United States Patent Application Publication US 2011/0214205 A1 - sequence listing, part 21

SEQ ID NO: 91088 - protein, 181 aa, Setaria italica
  Transcript Sequence Number=SeqID_25114
  Gene Ontology: Mol. function=zinc ion binding; Cellular component =intracellular; Biological process=regulation of transcription, DNA -dependent
  Homolog annotation: Hit_ID=B6U599; Match level="QueryCoverage=100%, HitCoverage=100%, E-value=2e-74, Identity=75%"; Hit description=Zinc finger protein 7
MERVPGVEEQKSAEQVDEAGQADDNTSVPWLKLGLDAPKSEEAQPPAKPPEAKSVATQHRTFSCNYCMRKFFSSQALGGHQNAHKRERCAARKSCTARMMMGLPPAASFLQPLRVNSHSTVLKEHGERAAVVVARFDGGQMSAWMPFAIEEAGLVWPGSFTTGSQESKKQTEKNLDLTLRL

SEQ ID NO: 91089 - protein, 112 aa, Setaria italica
  Transcript Sequence Number=SeqID_25115
  Gene Ontology: Mol. function=electron carrier activity; Cellular component=nucleus; Biological process=oxidation reduction
  Homolog annotation: Hit_ID=Q8L520; Match level="QueryCoverage=100%, HitCoverage=53%, E-value=3e-44, Identity=79%"; Hit description =Putative cytochrome P450
GGQPHRSLARLAKIHGPIMSLRLGSVTTVVVSSPDAAREFLQKHDAVFANRSVPDAVGDHARNSVPWLPHSARWRALRKIMATELFAPHRLDALQGLRCEKVQELVDHVGRL

SEQ ID NO: 91090 - protein, 101 aa, Setaria italica
  Transcript Sequence Number=SeqID_25116
MGACATKPGDLKVKGEAPLVVEDAAAVPVVVAGEEKAKADGVVPAAAEADPADASRRRSLSDLLKQDAATSDGEADQEAGKVVAVEPEGDDAGATTVAQAT

SEQ ID NO: 91091 - protein, 86 aa, Setaria italica
  Transcript Sequence Number=SeqID_25117
HSNQSLHLLNQDAATSDGEADQEAGKVVAVEPEGDDAGATTVAQAPVQASAATEQQDDAAGELKDDPHGDVQAEDEEEKRVDPDSV

SEQ ID NO: 91092 - protein, 92 aa, Setaria italica
  misc_feature (79)..(79): Xaa can be any naturally occurring amino acid
  Transcript Sequence Number=SeqID_25118
  Gene Ontology: Mol. function=RNA polymerase II transcription factor activity; Cellular component=nucleus; Biological process =transcription initiation from RNA polymerase II promoter
  Homolog annotation: Hit_ID=B6U2E9; Match level="QueryCoverage=94%, HitCoverage=44%, E-value=4e-26, Identity=64%"; Hit description =Transcription initiation factor TFIID subunit 11
  Pfam annotation: Domain name=TAFII28; Domain location=2-84; Score =55.5; E_value=2e-13; Accession=PF04719.6; Description=hTAFII28-like protein conserved region
MCLLSSYSNQSVAMFAELINCVYLQLLTSITGSQKISIPTSIVVSGIAKMFVGELIETGKFVMTERKDSGPIRPCHIRXAYRRLKLEGDTTK

SEQ ID NO: 91093 - protein, 146 aa, Setaria italica
  Transcript Sequence Number=SeqID_25119
  Gene Ontology: Mol. function=RNA polymerase II transcription factor activity; Cellular component=nucleus; Biological process =transcription initiation from RNA polymerase II promoter
  Homolog annotation: Hit_ID=B6U2E9; Match level="QueryCoverage=82%, HitCoverage=58%, E-value=1e-61, Identity=95%"; Hit description =Transcription initiation factor TFIID subunit 11
  Pfam annotation: Domain name=TAFII28; Domain location=41-130; Score =179.7; E_value=8.3e-51; Accession=PF04719.6; Description=hTAFII28 -like protein conserved region
KAKGRVQREQQEDEDDEEDQMEVDLEKLPTSTGDPDKLAKMNAILSQFTEQQMNRYESFRRSGFQKSNMKRLLTSITGSQKISIPTSIVVSGIAKMFVGELIETARIVMTERKDSGPIRPCHIREAYRRLKLEGKIPRRSVPRLFR

SEQ ID NO: 91094 - protein, 321 aa, Setaria italica
  Transcript Sequence Number=SeqID_25120
  Gene Ontology: Mol. function=glutamate N-acetyltransferase activity; Biological process=arginine biosynthetic process
  Homolog annotation: Hit_ID=Q7XKW2; Match level="QueryCoverage=80%, HitCoverage=67%, E-value=1e-145, Identity=96%"; Hit description =OSJNBa0073E02.7 protein
  Pfam annotation: Domain name=DUF647; Domain location=51-321; Score =282.1; E_value=1.3e-81; Accession=PF04884.6; Description=Protein of unknown function, DUF647
MNILERMRGGGDGAAAPERPPRPEFWVEISESVSRLCSFDAAGSGGGGISVKVIQDSRPIHDKVVDSFLNKFFPSGYPYSVNEGYLTYTKFRALQHFSSAMLHVLSTQSLLFAAGLRPTPAQATAVSWILKDGMQHAGKLICSSMGARMDSEPKSWRILADVLYDLGTALEFVSPLCPQLFLEVAGLGNFAKGMAVVAARATRLPIYSSFAKEGNLSDLFAKGEAISTLFNVMGIGAGIGLASTVCSTTQGKLIAGPLLSAVHIYGVVQEMRATPVNTLNPQRTAMIVADFVKSGKVSSPAELRYKEDLLFPNRLIEEAGS

SEQ ID NO: 91095 - protein, 131 aa, Setaria italica
  Transcript Sequence Number=SeqID_25121
  Gene Ontology: Mol. function=solute:hydrogen antiporter activity; Cellular component=integral to membrane; Biological process =regulation of pH
  Homolog annotation: Hit_ID=B9RCL1; Match level="QueryCoverage=79%, HitCoverage=13%, E-value=4e-37, Identity=70%"; Hit description =Na(+)/H(+) antiporter, putative
DLGRMAMSAAAVNDVAAWILLALAIALSGSGSPIVSLWVLLTATGFVIAICLFLRPVLAWMARRSPEGEPVKEVYICATLAIVLAAGFVTDIIGIHALFGAFMVGIVVPKDGPFAGVLIEKVEDLISGLFL

SEQ ID NO: 91096 - protein, 281 aa, Setaria italica
  Transcript Sequence Number=SeqID_25122
RFFIAVSNFLPAGPFGNGNIINQSNLAQCIPFQKNTTVVLTNDQISPGVWYIGYFHGLGPARTQSKMISRGKARLVSTRITVRGCPTSAFWGPYCNQTVEMIGCSQPSINNNSRNLLDLNIERRNSRYTREHHRRINILSQQNHLVEKEVGSNVTALVRMENSITCSISNDSLCVRQGDMKFYFLDVVNLALQFQITAANFGVLGPSLICYLRYNAFPQRDLHDYSGDISHDPLVVKSPNIGRWYIAIETVNKTQTNNTASNPVLDTMCFSLKWQLTGCLN

SEQ ID NO: 91097 - protein, 55 aa, Setaria italica
  Transcript Sequence Number=SeqID_25123
MAVGGGLALYHVLGVATCVALLYFTFGEVDLRHISLSSLPASGFGFGSGAGPSSS

SEQ ID NO: 91098 - protein, 54 aa, Setaria italica
  Transcript Sequence Number=SeqID_25124
  Subcellular localization annotation: CTP_CleavageSite=44; ConfidenceScore=5.28e-01
DTNAMTTFISISNYSQTSLRRTVHMSSSFTGNVYLLMTFFGYSVSEEINNVHMT

SEQ ID NO: 91099 - protein, 91 aa, Setaria italica
  Transcript Sequence Number=SeqID_25125
  Subcellular localization annotation: CTP_CleavageSite=78; ConfidenceScore=5.88e-01
GHPAAAPARSLGGIASACVASRKRNFRTSSVLRSFHPSASHPYPPRFPRRPPMERTPGATARRPLRLLRSRASRSALRSSARSPTPPRSLA

SEQ ID NO: 91100 - protein, 107 aa, Setaria italica
  Transcript Sequence Number=SeqID_25126
  Gene Ontology: Mol. function=acyltransferase activity; Biological process=metabolic process
  Homolog annotation: Hit_ID=Q69R60; Match level="QueryCoverage=100%, HitCoverage=18%, E-value=5e-32, Identity=64%"; Hit description =Phospholipid/glycerol acyltransferase-like protein
VVGGRFSGTMASPGVAAGGDRSLGALLAVLGRDRPIVDVGLCTGAAGDRRQPAFLQVCQERRAVSAPEKSQATPLPRSEYPRPLVFHDGRLVRRPEPLAFLAILLWV

SEQ ID NO: 91101 - protein, 166 aa, Setaria italica
  Transcript Sequence Number=SeqID_25127
  Homolog annotation: Hit_ID=B6U2N6; Match level="QueryCoverage=83%, HitCoverage=31%, E-value=1e-35, Identity=53%"; Hit description=Amino acid/polyamine transporter II
EKRRFPKMLAICFVLCTLNYGSMAVLGYLMYGDGVQSQVTLNLPAARLSSKVAIFTTIVNPLSKYALVVTPIAMAVEERIGSGSSAAASMAVRTLLVLSTVAVALAVPFFGYLMALVGSLLSVGACVLLPCVCYVRVFGLPARAAEAAAIAAILALGSLLLITGTY

SEQ ID NO: 91102 - protein, 95 aa, Setaria italica
  Transcript Sequence Number=SeqID_25128
  Gene Ontology: Mol. function=transferase activity, transferring groups other than amino-acyl groups
  Homolog annotation: Hit_ID=B6TZX2; Match level="QueryCoverage=98%, HitCoverage=22%, E-value=2e-22, Identity=62%"; Hit description =Taxadien-5-alpha-ol O-acetyltransferase
MVNITVTRKSQSFVVLSEPASAAETLELSAIDRVPGLRHAVRSLHVFRNRDSTTRHDDAAARPAEVIRKALSRALVDYRAFAGRFIGSVVAGEAC

SEQ ID NO: 91103 - protein, 93 aa, Setaria italica
  Transcript Sequence Number=SeqID_25129
FFFTAEKNKLLSVMLIQANKVYAISYTESESANVLTDISVQPHSKVLLCTSICHFSTRTDTIEKINHHGGYLYKGLTYRSNKMLANNIFCIRI

SEQ ID NO: 91104 - protein, 57 aa, Setaria italica
  Transcript Sequence Number=SeqID_25130
  Gene Ontology: Mol. function=peptidase activity
  Homolog annotation: Hit_ID=Q84P70; Match level="QueryCoverage=96%, HitCoverage=18%, E-value=1e-22, Identity=87%"; Hit description =Putative serine protease-like protein (Fragment)
LWRSKREVAGFHNWIQFYLEEAKGNVDYQGYIFPRRRGESPDSETQLLTVQFEWHGV

SEQ ID NO: 91105 - protein, 78 aa, Setaria italica
  misc_feature (71)..(71): Xaa can be any naturally occurring amino acid
  Transcript Sequence Number=SeqID_25131
  Homolog annotation: Hit_ID=B6TNC1; Match level="QueryCoverage=56%, HitCoverage=9%, E-value=4e-13, Identity=86%"; Hit description =Placental protein 11
NSSFLGCIREHCPYHFHAEIAFFKPFRLKRPLEMEGEGTNDGGWQTVGEKKHHGRPQQSEAWNGYRRPPSXEQKYSED

SEQ ID NO: 91106 - protein, 442 aa, Setaria italica
  Transcript Sequence Number=SeqID_25132
  Gene Ontology: Mol. function=peptidase activity; Cellular component =nucleus; Biological process=female pregnancy
  Homolog annotation: Hit_ID=B6TNC1; Match level="QueryCoverage=100%, HitCoverage=93%, E-value=0.0, Identity=80%"; Hit description =Placental protein 11
  Pfam annotation: Domain name=XendoU; Domain location=168-326; Score =308.8; E_value=1.2e-89; Accession=PF09412.2; Description =Endoribonuclease XendoU
EAPRRGAPQRADPDADGEEGRDERSRSTWAEVVSEQKDGGPDDGRRDHRNSGRDQRHHERRDEEGWERVGGRNQQHPAGRQNQYDGDDRRDGGCQRPQKQQQAPGYRRQEQEGEGTNDGGWQTVGEKKHHGRPQQSEAWNGYRRPPSEQKYSEDVGQVHQGLNVEPTREELNSLSKACSRLWELDMNRLVPGKDYRIDCGEGKKVYQKGDMASESLFSWLGDDVLRKPTYSRFCALLDNYNPHQGYKEVVTQQDKHEEVAFIEEIARTAPIKYLHRYLVQKGAVSQDYEDFKRMLASLWFDLYGRGGTSCCSSAFEHVFVGEIKGRGQGESEVAGFHNWIQFYLEEAKGNVDYQGYIFPRRRGESPDSETQLLTVQFEWHGVLKSVSSTLIGVSPEFEVALYTLCFFAGGEDNRVDIGPYTVNIKCYRLGNKIGSAFPIAEN

SEQ ID NO: 91107 - protein, 84 aa, Setaria italica
  Transcript Sequence Number=SeqID_25133
  Gene Ontology: Mol. function=hydrolase activity; Biological process =lipid catabolic process
  Homolog annotation: Hit_ID=Q9XE77; Match level="QueryCoverage=89%, HitCoverage=17%, E-value=1e-28, Identity=82%"; Hit description =Patatin-like protein
  Pfam annotation: Domain name=Patatin; Domain location=20-84; Score= -24.5; E_value=0.014; Accession=PF01734.14; Description=Patatin-like phospholipase
SSAESARWMPPDNLKLVTILSIDGGGIRGIIPATILAFLEAKLQELDGPDARIADYFDVVAGTSTGGLLTAMLTAPDTNGRPLF

SEQ ID NO: 91108 - protein, 100 aa, Setaria italica
  Transcript Sequence Number=SeqID_25134
  Gene Ontology: Mol. function=hydrolase activity; Biological process =lipid catabolic process
  Homolog annotation: Hit_ID=B6TD55; Match level="QueryCoverage=100%, HitCoverage=23%, E-value=2e-44, Identity=87%"; Hit description =Patatin class 1
  Pfam annotation: Domain name=Patatin; Domain location=1-100; Score= -15.4; E_value=0.0034; Accession=PF01734.14; Description=Patatin-like phospholipase
ELDGPDARIADYFDVVAGTSTGGLLTAMLTAPDTNGRPLFAAKDLARFYIKHSPKIFRQKNHIRSKIASKLRMLSGPKYDGKYLHALLRRYLGDMRLDRT

SEQ ID NO: 91109 - protein, 315 aa, Setaria italica
  Transcript Sequence Number=SeqID_25135
  Gene Ontology: Mol. function=hydrolase activity; Biological process =lipid catabolic process
  Homolog annotation: Hit_ID=B6TD55; Match level="QueryCoverage=96%, HitCoverage=73%, E-value=1e-142, Identity=78%"; Hit description =Patatin class 1
  Pfam annotation: Domain name=Patatin; Domain location=1-133; Score =53.1; E_value=1.1e-12; Accession=PF01734.14; Description=Patatin -like phospholipase
GCVGDHLAFCRNHIRSKIASKLRMLSGPKYDGKYLHALLRRYLGDMRLDRTLTNIVIPTFDIAYMQPTIFSTFELKQEPTKNALLSDISMSTSAAPTFFPPHYFETKDKNGRRKAFNLVDGGLAANNPTLCAMNQVSQDIILGNEHFFPMKPADYGKFMVISLGCGSNRNRRYCAKVAAKWGIFSWLIKNGTAPIVDMLNSASADMVDINLCVLFRALRSSENYLRIQYDQLTGSAGSIDDCSKENMDKLVRIGKRLLNMNVSRVDLETGRIVEVPGLGSNAEQLTRFAKQLSDERRRRQDELIYSEVGFQNLAW

SEQ ID NO: 91110 - protein, 342 aa, Setaria italica
  misc_feature (102)..(102): Xaa can be any naturally occurring amino acid
  Transcript Sequence Number=SeqID_25136
  Gene Ontology: Mol. function=phosphatidylcholine-sterol O -acyltransferase activity; Cellular component=integral to membrane; Biological process=lipid metabolic process
  Homolog annotation: Hit_ID=B9R6Y0; Match level="QueryCoverage=90%, HitCoverage=72%, E-value=3e-55, Identity=41%"; Hit description=1-O -acylceramide synthase, putative
  Pfam annotation: Domain name=LACT; Domain location=73-342; Score= -129.8; E_value=0.0005; Accession=PF02450.7; Description =Lecithin:cholesterol acyltransferase
MGGAHAQLLLLVLFAWAWLFFAGALARGASGLHPVVLLPGFGCSQLDARLTDEFEPATAAPSCGGVPKGKKGWFRLWNNHTALQEDPTLVPCYAELLRLVYXDPVAGDYRNVPGVETRVVAFGTTRGFGYGDPAMKNFCMEKLVRALEGVGYREGENLFGASYDFRYAAAAPGKESRVFSCFLSSLRVLVEQASERNGDAPVILVTHSFGGINANVFLRRSPLAWRRRYVKHFVMVSAGAGGGVSRLQFCGPSSSSPPTDPLSFADTGRSFAGVFSTLPSPKVFGDAPLVITRAKNYSAYDIPEYLKANGFSDGEVARYVTRVLPVTLDFSAPAVPMTCING

SEQ ID NO: 91111 - protein, 92 aa, Setaria italica
  Transcript Sequence Number=SeqID_25137
VLKSFQTFLKILLLKCRACSSRHALRLQRPREVMPVEVRLADWATARVPVPAFSFTTCYLDGRYVLPLRLVSYYWQPALLQCQVQVKRRNGC

SEQ ID NO: 91112 - protein, 97 aa, Setaria italica
  Transcript Sequence Number=SeqID_25138
CPSRSGLQTGRRREYPFRLSASRHATLMVAMYCEFLLFLSVHSSPTQRAHTPAFAIQLGLVIRFYLSPNLPYPLTCTDHFDWYPIIGNLRCCSARSR

SEQ ID NO: 91113 - protein, 59 aa, Setaria italica
  Transcript Sequence Number=SeqID_25139
  Gene Ontology: Mol. function=oxidoreductase activity, acting on paired donors, with incorporation or reduction of molecular oxygen, 2-oxoglutarate as one donor, and incorporation of one atom each of oxygen into both ...
  Gene Ontology: Mol. function=donors; Cellular component=plasma membrane; Biological process=protein metabolic process
  Homolog annotation: Hit_ID=B6TED5; Match level="QueryCoverage=100%, HitCoverage=19%, E-value=9e-23, Identity=86%"; Hit description =Prolyl 4-hydroxylase
  Pfam annotation: Domain name=ShK; Domain location=17-57; Score=26.5; E_value=0.00011; Accession=PF01549.16; Description=ShK domain-like
VRLYLPLFKQSGSSDGCEDDNVLCPQWAAVGECAKNPNYMVGTKEAPGFCRKSCKVCAE

SEQ ID NO: 91114 - protein, 302 aa, Setaria italica
  Transcript Sequence Number=SeqID_25140
  Gene Ontology: Mol. function=oxidoreductase activity, acting on paired donors, with incorporation or reduction of molecular oxygen, 2-oxoglutarate as one donor, and incorporation of one atom each of oxygen into both ...
  Gene Ontology: Mol. function=donors; Cellular component=plasma membrane; Biological process=protein metabolic process
  Homolog annotation: Hit_ID=B6TED5; Match level="QueryCoverage=92%, HitCoverage=93%, E-value=1e-157, Identity=94%"; Hit description =Prolyl 4-hydroxylase
  Pfam annotation: Domain name=2OG-FeII_Oxy; Domain location=122-244; Score=53.2; E_value=9.9e-13; Accession=PF03171.12; Description=2OG -Fe(II) oxygenase superfamily
  Pfam annotation: Domain name=ShK; Domain location=260-300; Score =26.5; E_value=0.00011; Accession=PF01549.16; Description=ShK domain -like
  Pfam module annotation: Pfam domain module=2OG-FeII_Oxy::ShK; Domain location=122-244::260-300
MAFHRHLFLAATVALLLADGFVPATAASLGAGGFDPSRVVQLSWRPRAFLHKGFLTDAECDHLIALAKDKLEKSMVADNESGKSVQSEVRTSSGMFLEKKQDEVVKRIEERISAWTFLPPENGESIQILHYQNGEKYEPHYDYFHDRNNQALGGHRIATVLMYLSNIEKGGETIFPNAEGKLLQPKDDTWSECARNGYAVKPVKGDALLFFSLHPDATTDSDSLHGSCPVIEGEKWSATKWIHVRSFDLPVKQSGSSDGCEDDNVLCPQWAAVGECAKNPNYMVGTKEAPGFCRKSCKVCAE

SEQ ID NO: 91115 - protein, 77 aa, Setaria italica
  Transcript Sequence Number=SeqID_25141
YVNKCPALSYMLNDTFFFTSNIDERKGQACNWWHLHSCISSNNNRHWMTPFPSESYQFLSFFCFMLFVLHTNRFEPT

SEQ ID NO: 91116 - protein, 137 aa, Setaria italica
  Transcript Sequence Number=SeqID_25142
  Gene Ontology: Mol. function=electron carrier activity; Cellular component=peroxisome; Biological process=metabolic process
  Homolog annotation: Hit_ID=O49506; Match level="QueryCoverage=97%, HitCoverage=36%, E-value=1e-61, Identity=83%"; Hit description =Glycolate oxidase - like protein
  Pfam annotation: Domain name=FMN_dh; Domain location=14-137; Score= -54.3; E_value=4.1e-11; Accession=PF01070.10; Description=FMN -dependent dehydrogenase
MELITNVTEYEKLAKEKLPKMVYDYYASGAEDQWTLKENREAFSRILFRPRILIDVSHIDMTTNVLGFNISMPIMIAPTAMQKMAHPEGELATARAAASAGTIMTLSSWSTSSVEEVNSVGPGIRFFQLYVYKDRNY

SEQ ID NO: 91117 - protein, 49 aa, Setaria italica
  Transcript Sequence Number=SeqID_25143
RPKRLRHIISVRITYAPPRSMMDFGCKPDDVHFVSKKLIKRSDDLNHKS

SEQ ID NO: 91118 - protein, 55 aa, Setaria italica
  Transcript Sequence Number=SeqID_25144
SLRWKRLPGLSSLSLRSGSASAVVDAVAFRVMYVVEAVVLGLALSCFFLCCGCHL

SEQ ID NO: 91119 - protein, 95 aa, Setaria italica
  misc_feature (13)..(13): Xaa can be any naturally occurring amino acid
  Transcript Sequence Number=SeqID_25145
  Gene Ontology: Mol. function=DNA binding; Cellular component =chromatin; Biological process=regulation of transcription, DNA -dependent
  Homolog annotation: Hit_ID=P40621; Match level="QueryCoverage=63%, HitCoverage=37%, E-value=4e-21, Identity=83%"; Hit description =HMG1/2-like protein
  Pfam annotation: Domain name=HMG_box; Domain location=1-58; Score =65.6; E_value=1.8e-16; Accession=PF00505.11; Description=HMG (high mobility group) box
EEFRKEFKEKNPXNKSVAEVGKAAGNRWKSLTDADKAPYVAKANKLKSEYNKAIAAYNKGEVHSIASLSFLLLLTAHCYSIVLNNHSCVGLFRAL

SEQ ID NO: 91120 - protein, 113 aa, Setaria italica
  Transcript Sequence Number=SeqID_25146
  Gene Ontology: Mol. function=binding; Cellular component =mitochondrial inner membrane; Biological process=transport
  Homolog annotation: Hit_ID=B6TAM1; Match level="QueryCoverage=52%, HitCoverage=17%, E-value=1e-24, Identity=94%"; Hit description =Peroxisomal carrier protein
  Pfam annotation: Domain name=Mito_carr; Domain location=15-90; Score=- 0.3; E_value=0.0034; Accession=PF00153.19; Description=Mitochondrial carrier protein
SSIFTSLPLNYPLLELIKYSILNRRIASQYNGNSSRAPKTMLGALHAIWSKEGIPGFFKGLHAQILKTVLSSALLLMIKEKISKFTWVSLLALMIKERSQSSLGSHYRRRASS

SEQ ID NO: 91121 - protein, 78 aa, Setaria italica
  Transcript Sequence Number=SeqID_25147
  Gene Ontology: Mol. function=binding; Cellular component =mitochondrial inner membrane; Biological process=transport
  Homolog annotation: Hit_ID=B6TAM1; Match level="QueryCoverage=53%, HitCoverage=12%, E-value=1e-16, Identity=95%"; Hit description =Peroxisomal carrier protein
RMQTSTFGKSKGLRETLTEGTWMEAFDGLGISIILTCNPSIQVLNLTRFLYNEHCRTSYCPFALWCPTISFFIYKVQT

SEQ ID NO: 91122 - protein, 127 aa, Setaria italica
  Transcript Sequence Number=SeqID_25148
MIVGICILQYTVFDQLKQRIIQRQRRKNGGSTEDNSRVALSAFSAFLLGAVSKSIATVLTYPLIRSEVFTLAIEVYLGLTTCFCLLMLSDDLLSYYKSSSNRCKVMIQAADPDEDDEDESERPSKSR

SEQ ID NO: 91123 - protein, 432 aa, Setaria italica
  Transcript Sequence Number=SeqID_25149
  Gene Ontology: Mol. function=aspartic-type endopeptidase activity; Biological process=proteolysis
  Homolog annotation: Hit_ID=Q2QWY6; Match level="QueryCoverage=98%, HitCoverage=93%, E-value=0.0, Identity=80%"; Hit description =Eukaryotic aspartyl protease family protein, expressed
  Pfam annotation: Domain name=Asp; Domain location=38-389; Score= -96.9; E_value=8e-08; Accession=PF00026.15; Description=Eukaryotic aspartyl protease
SAVSGDKPLRGGPSGAGKEPESSSAIFPLYGDVYPHGLYYVSMNIGNPSRPYFLDVDTGSDLTWLQCDAPCVSCNKVPHPLYRPIKNKLVPCVDQLCASLHGGLSGRHKCDSPHQQCDYEIRYADQGSSIGVLVNDSFALRLANSSVVRPSLAFGCGYDQQVGSSSEVSPTDGVLGLGSGSISLLSQLKKHGISKNVVGHCLSLRGGGFLFFGDDLVPYSRATWAPMARSAFRNYYSPGSASLYFGGRSLGVRPMEVVFDSGSSFTYFAAQPYQALVSALKGGLSRTLKEVSDPSLPLCWKGKKPFKSVLDVKKEFKSLVLSFANGKKALMEIPPENYLIVTKYGNACLGILNGSEVGLKDLNILGDITMQDQMVIYDNERGQIGWIRAPCDRIPNDNTIHGFEEGYCWPQFPGIIGLPNEDCPAYYRSNIV

SEQ ID NO: 91124 - protein, 169 aa, Setaria italica
  misc_feature (10)..(10): Xaa can be any naturally occurring amino acid
  misc_feature (21)..(21): Xaa can be any naturally occurring amino acid
  misc_feature (28)..(28): Xaa can be any naturally occurring amino acid
  misc_feature (133)..(133): Xaa can be any naturally occurring amino acid
  Transcript Sequence Number=SeqID_25150
  Gene Ontology: Mol. function=oligopeptide transporter activity; Cellular component=integral to membrane; Biological process =oligopeptide transport
  Homolog annotation: Hit_ID=B6SVF4; Match level="QueryCoverage=97%, HitCoverage=18%, E-value=9e-58, Identity=68%"; Hit description =Oligopeptide transporter 9
QHFFAVTYGXGFASLTATIVXVFLFHGXEQVLLQFSSLKLMRRYKQVPEWWFICILVANIAVTIFACEYYIEQLQLPWWGVLLACAIAFFFTLPVGIITATTNQVLILRPYAYHMPCNSRALAQHFSFFGCMXTPGLNIITEYIMGYLYPGRPVANMCFKVYGYYSSLL

SEQ ID NO: 91125 - protein, 596 aa, Setaria italica
  misc_feature (24)..(24): Xaa can be any naturally occurring amino acid
  Transcript Sequence Number=SeqID_25151
  Gene Ontology: Mol. function=oligopeptide transporter activity; Cellular component=integral to membrane; Biological process =oligopeptide transport
  Homolog annotation: Hit_ID=B6SVF4; Match level="QueryCoverage=100%, HitCoverage=78%, E-value=0.0, Identity=85%"; Hit description =Oligopeptide transporter 9
  Pfam annotation: Domain name=OPT; Domain location=1-559; Score=611.1; E_value=1.1e-180; Accession=PF03169.7; Description=OPT oligopeptide transporter protein
FANSGAGTVYAIHVITAVRVFYGXGFGWAGIFRRYLVEPAAMWWPSNLVQVSLFRALHEKEQRVKGGLTRNQFFLVAFICSFAYYIFPGYLFQMLTSLSWVCWVFPHSVFAQQLGSGLRGLGIGAIGLDWSTVSSYLGSPLASPWFATANVAAGFVFVMYIVTPIAYWFNFYKAQNFPIFSDGLFTTTGQKYNISSIVDSHFHFDTKAYEKNGPLYLSTFFAVTYGVGFASLTATIVHVFLFHGSEIWQLSKSAFQEKKMDVHTKLMRRYKQVPEWWFICILVANIAVTIFACEYYIEQLQLPWWGVLLACAIAFFFTLPVGIITATTNQTPGLNIITEYIMGYLYPGRPVANMCFKVYGYISMSQALTFLQDFKLGHYMKIPPRTMFMAQVVGTLIAAFVYIGTAWWLMETVPNICNTELLPRDSPWTCPGDHVFYDASVIWGLISPRRIFGDLGTYSAVNWFFLGGAIAPLLVWLAHKAFPGQSWILLINMPVLIGATGNMPPATAVNYTTWILVGFLSGYVVYRYRRDWWERHNYLLSGALDAGLAFMAVLIYLCLGLENISLNWWGNDLDGCPLASCPTAKGIVVEGCPVYT

SEQ ID NO: 91126 - protein, 78 aa, Setaria italica
  Transcript Sequence Number=SeqID_25152
IRKHTRYIHFSVSVKQGDCGGEKTLGYSLGRQEIALLVQFSEASAQHYIIDIMKMVCCSLSLQLSDHVRALSMAFISA

SEQ ID NO: 91127 - protein, 88 aa, Setaria italica
  misc_feature (79)..(79): Xaa can be any naturally occurring amino acid
  Transcript Sequence Number=SeqID_25153
RSVYRVTVTEPAGVKVTVVPGELEFFGTGEEKEFTVTLDVVDAAAASDYVFGSIVWSDANGFDAYSSPDANRGHRVRSXPIVVKTKCG

SEQ ID NO: 91128 - protein, 86 aa, Setaria italica
  Transcript Sequence Number=SeqID_25154
  Subcellular localization annotation: CTP_CleavageSite=60; ConfidenceScore=5.57e-01
QRLFPNNQAVPSFFSNPGLLYFPLIPCLVIPPPSRRRRRRCPRPDLLRPTLAPRPPGIPRSATGAVRGGGPPRDPPGAVREGDNPS

SEQ ID NO: 91129 - protein, 82 aa, Setaria italica
  Transcript Sequence Number=SeqID_25155
  Gene Ontology: Mol. function=transferase activity, transferring glycosyl groups
  Homolog annotation: Hit_ID=Q9SSF7; Match level="QueryCoverage=96%, HitCoverage=6%, E-value=5e-15, Identity=54%"; Hit description =F25A4.30 protein
VQLGFQSARTRRSVASSTGSAFAWSEDLMFVASEPLDDTLVVLVEDRSMIKEPALLGHATIPVASIEQRLDERQIVASRWFN

SEQ ID NO: 91130 - protein, 208 aa, Setaria italica
  misc_feature (75)..(75): Xaa can be any naturally occurring amino acid
  Transcript Sequence Number=SeqID_25156
  Gene Ontology: Mol. function=UDP-glucose:glycoprotein glucosyltransfer ase activity; Cellular component=ER-Golgi intermediate compartment; Biological process=protein amino acid glycosylation
  Homolog annotation: Hit_ID=Q6ESI8; Match level="QueryCoverage=98%, HitCoverage=12%, E-value=1e-103, Identity=90%"; Hit description =Putative UDP-glucose:glycoprotein glucosyltransferase
VVTEDLSQEVRGFIFSKILERKPELNAEIMAFRDYLLSSTVSDTLEVWELKDLGHQTAQRIVQASDPLQSMQEIXNQNFPSIVSSLSRMKLDNSIKDEIIANQRMVPPGKSLMALNGALINIEDLDLYLLMDMVHGELSLADQFARLKLPQSAAHKILSAPPPAESNSFRVDFRSSHVHYLNNLEEDTMYRRWRSNLQELLMPVFPWF

SEQ ID NO: 91131 - protein, 151 aa, Setaria italica
  Transcript Sequence Number=SeqID_25157
  Gene Ontology: Mol. function=structural constituent of cell wall
  Homolog annotation: Hit_ID=B9S9J6; Match level="QueryCoverage=96%, HitCoverage=27%, E-value=2e-42, Identity=55%"; Hit description =Structural constituent of cell wall, putative
  Pfam annotation: Domain name=Root_cap; Domain location=82-138; Score =126.9; E_value=6.6e-35; Accession=PF06830.3; Description=Root cap
TDRLAIVYDGAPVEVQGVANVRWEAPSSPLSVTRTKAANGVLVELAGVFKITVIAVPITEEDSRVHSYGLRDGDCLAHLDLAFRFYSLTDDVHGVLGQTYRSSYVNRLDVAARMPVMGGERDFAASGLFATDCPVARFAHGRRADALAVAS

SEQ ID NO: 91132 - protein, 175 aa, Setaria italica
  Transcript Sequence Number=SeqID_25158
  Gene Ontology: Mol. function=sugar binding
  Homolog annotation: Hit_ID=B6U4E5; Match level="QueryCoverage=51%, HitCoverage=18%, E-value=4e-11, Identity=47%"; Hit description =Collagen, type IV, alpha 5
VLDTTAPGAEGRSVWESECLAVSTVNTCALVFSWKGLEVFDGSTSVWHTHDTKSDDQNFLETLQLVDQGDMRILDKGGELAWKASDEPRAAQHCGMPGSPGLASALPPFAEPIGHGSSDLPFGFGQGAGGVGVGGVAQPEAPLAAPLPQPELPLAPLPQEADEFGGAAAAAAAQG

SEQ ID NO: 91133 - protein, 173 aa, Setaria italica
  Transcript Sequence Number=SeqID_25159
  Gene Ontology: Mol. function=sugar binding
  Homolog annotation: Hit_ID=B6U4E5; Match level="QueryCoverage=59%, HitCoverage=22%, E-value=3e-10, Identity=45%"; Hit description =Collagen, type IV, alpha 5
MQLSFLPHVAICLALAFLLPSHAAVTAAPAGTIQRVTKQQILASIPPHWDENPVLFLTSPSGKYAAYFMRSQTTPGAGGLGADFCYVEVLDTTAPGAEGRSVWESECLAVSTVNTCALVFSWKGLEVFDGSTSVWHTHDTKSDDQNFLETLLPCPIGSANGGSAEARAGGAGH

SEQ ID NO: 91134 - protein, 202 aa, Setaria italica
  Transcript Sequence Number=SeqID_25160
KPLLKKMERNGIGLKRASFYMAYALYYEKHKRFNDAEKMYRLGIQNLAEPIGELHKAHEQFILRMESYKRRKDKLQERMPRKAGPSEIMPTKAGPSITPMNQVEGESRNSKELKSNTIQKSGSSSNTSLGRHPPLGPAKVGMLSRGNSGANKNLSRCNSDDTVVVRFVGSALVGKSETEDACHHGLVEPTINTKEAMDAINS

SEQ ID NO: 91135 - protein, 85 aa, Setaria italica
  Transcript Sequence Number=SeqID_25161
KVVVGYDPLVVCNEAEAPEIMKFYEPFQRIFAKYEVDAYISTGGFCGYFHRDNSMLHIGHPRPGGDHTTVDGFFLHRVTPLEMES

SEQ ID NO: 91136 - protein, 111 aa, Setaria italica
  Transcript Sequence Number=SeqID_25162
ITGITFQCPLLETVIVQCSKDDGEIQKTVDALVATGISLEKIHVTFYEDIRKNLAERKRGRQEGKTGRSILEKKLKRRQDWVDDSHAISDNDNNGDEMEEACGYEYDPDDF

SEQ ID NO: 91137 - protein, 124 aa, Setaria italica
  misc_feature (119)..(119): Xaa can be any naturally occurring amino acid
  Transcript Sequence Number=SeqID_25163
NADLAGARRALDDENDGLRRALERAAEDASTATEALELVSGENAGLREAADEKERDLEDLRRENGTLRAGEAAARERAKELEAQLLAAATATDGSAAIGKAAVEIPLVEKWRREAAQGXLGAAA

SEQ ID NO: 91138 - protein, 48 aa, Setaria italica
  Transcript Sequence Number=SeqID_25164
MVVPEAVALEIPAAAEEGSPPPAARVPPRIRRRLLRAREGGGTAPTAE

SEQ ID NO: 91139 - protein, 104 aa, Setaria italica
  Transcript Sequence Number=SeqID_25165
  Homolog annotation: Hit_ID=B4FXN3; Match level="QueryCoverage=81%, HitCoverage=20%, E-value=1e-23, Identity=64%"; Hit description =Carboxyl-terminal proteinase
VLLVALFLATVVALASAANETRSFRPGDELRRYRRVQALLRRLNKPALRTIQSPDGDIIDCVAAHLQPAFDHPRLRGQKPLDPPVRPKGHHLRPIPNDTADAGV

SEQ ID NO: 91140 - protein, 30 aa, Setaria italica
  Transcript Sequence Number=SeqID_25166
GLLCFIYVYEWIYDFIEVTEDFIFGSIMKY

SEQ ID NO: 91141 - protein, 56 aa, Setaria italica
  Transcript Sequence Number=SeqID_25167
RYFLMNQLKGGKPGSLEIDTKSAYRITLKRFILKIDAEKVVSSYPHWHIYVHCQNN

SEQ ID NO: 91142 - protein, 253 aa, Setaria italica
  Transcript Sequence Number=SeqID_25168
  Gene Ontology: Mol. function=protein serine/threonine kinase activity; Cellular component=integral to membrane; Biological process=protein amino acid phosphorylation
  Homolog annotation: Hit_ID=B9RY42; Match level="QueryCoverage=100%, HitCoverage=46%, E-value=2e-69, Identity=40%"; Hit description =Phytosulfokine receptor, putative
  Pfam annotation: Domain name=LRR_1; Domain location=109-131; Score =16.9; E_value=0.084; Accession=PF00560.25; Description=Leucine Rich Repeat
  Pfam annotation: Domain name=LRR_1; Domain location=133-155; Score =16.0; E_value=0.16; Accession=PF00560.25; Description=Leucine Rich Repeat
  Pfam annotation: Domain name=LRR_1; Domain location=218-240; Score =16.8; E_value=0.09; Accession=PF00560.25; Description=Leucine Rich Repeat
  Pfam annotation: Domain name=LRR_1; Domain location=33-54; Score =10.5; E_value=3; Accession=PF00560.25; Description=Leucine Rich Repeat
  Pfam annotation: Domain name=LRR_1; Domain location=59-83; Score=3.7; E_value=59; Accession=PF00560.25; Description=Leucine Rich Repeat
  Pfam annotation: Domain name=LRR_1; Domain location=85-107; Score =13.6; E_value=0.74; Accession=PF00560.25; Description=Leucine Rich Repeat
  Pfam annotation: Domain name=LRR_1; Domain location=9-31; Score=14.4; E_value=0.47; Accession=PF00560.25; Description=Leucine Rich Repeat
  Pfam module annotation: Pfam domain module=LRR_1::LRR_1::LRR_1::LRR _1::LRR_1::LRR_1::LRR_1; Domain location=109-131::133-155::218 -240::33-54::59-83::85-107::9-31
PSGISSCPELRTLNLARNKLVGEIPETFKDLRSVSYLSLTGNGFTNLSSALQVLQHLPNLTSLVLTRNFRGGETMPVDGINGFKSMEVLVLANCLLTGTIPPWLQTLESLNVLDISWNKLNGNIPPWLGKLNNLFYIDLSNNSFSGELPVSFTQMRSLISSNGSSEQSPTEDLPLFIKKNSTGKGLQYNQVSSFPPSLILSNNLLIGPIWSSFGHLVKLQHMDLSWNKFSGPIPDELSNMSSLEVLNLAHNNL

SEQ ID NO: 91143 - protein, 58 aa, Setaria italica
  Transcript Sequence Number=SeqID_25169
ELREVGGKRCEARGSERNPVAFAALFLILRLVCDCFVSFRFGVGGSALSAMAYWPCLV

SEQ ID NO: 91144 - protein, 132 aa, Setaria italica
  Transcript Sequence Number=SeqID_25170
DNNKMKPGGHNSQEEGMSHSAQEPQMKNKNYQLQNKMEMSGHGPESVTPMQCHDNMGISSNHTLEKSVATNSRTKQQPEVPITRSNTSKEGHPSKVSSNSEETIFSSPFTSSDKTTELKQHTLVRASSERQQ

SEQ ID NO: 91145 - protein, 234 aa, Setaria italica
  Transcript Sequence Number=SeqID_25171
  Gene Ontology: Mol. function=glutathione transferase activity
  Homolog annotation: Hit_ID=Q9FQA2; Match level="QueryCoverage=100%, HitCoverage=100%, E-value=9e-86, Identity=74%"; Hit description =Glutathione S-transferase GST 37
  Pfam annotation: Domain name=GST_C; Domain location=105-208; Score =42.7; E_value=1.4e-09; Accession=PF00043.17; Description=Glutathione S-transferase, C-terminal domain
  Pfam annotation: Domain name=GST_N; Domain location=10-83; Score =67.8; E_value=4.1e-17; Accession=PF02798.12; Description=Glutathione S-transferase, N-terminal domain
  Pfam module annotation: Pfam domain module=GST_C::GST_N; Domain location=105-208::10-83
MAGREATGVEELTLLGVWASPFVIRARAALNLKGLAYRYVEDDLNSKSELLLASNPVHKKVPVLLHDGRAVCESLVILEYLDEAFPSRGPHLLPDDPYDRAVARFWASYVDDKLFSTWIPVYNGRTREDRVEAARQVVAVLEKFEQALEECSGGKAFFGGDGVGLVDVVLGGFLGWLRASEAMCGVRVLDPAKTPLLVAWADRFGALDGVEEVIPGVQRLLEYNKMRRALRGLP

SEQ ID NO: 91146 - protein, 343 aa, Setaria italica
  Transcript Sequence Number=SeqID_25172
  Gene Ontology: Mol. function=zinc ion binding
PEIQSVAAPSLVDQNSIKKHDNNQSMCNVNHLHSNVEKPRPPPVSAELQPENLTNVVKENEIGNFQQSPIEPTVAVDEPCASESRFYNQPQEDAINTASGGARSPEKNLSNVDSDTSSAAVPASASWNVTLQGNIVEPISKKDMIDKTTMVQPQPCKGKSPNPNDDGTCDQSLKDPRHESQTVQATMAPAFVRSNDVLPANASEASHLVNQDLDGNASIPPVEKDPVHEGLTLRGSSGIPSVTCNGAIQEDESGTNHPSTECTIMFEEQIGDKCQLEKNHSLYDDGTMLEKNKVCGGLNVQTAPESRSCNVTFHDRISEGNPLSEQNIETNTTDIQKRSCSTP

SEQ ID NO: 91147 - protein, 92 aa, Setaria italica
  Transcript Sequence Number=SeqID_25173
  Gene Ontology: Mol. function=protein dimerization activity
  Homolog annotation: Hit_ID=Q3LAG0; Match level="QueryCoverage=98%, HitCoverage=11%, E-value=4e-17, Identity=48%"; Hit description =Transposase-related protein w-gary2
  Pfam annotation: Domain name=zf-BED; Domain location=1-37; Score=8.0; E_value=0.028; Accession=PF02892.7; Description=BED zinc finger
AIQSAECLYCHIHMSCRGADGQSNGTSHLWRHQKICRAKDGFGPSPLQQDADLPYVVSEVDPVDQILPDSLDGINLVTRSENSKFRSKVWKD

SEQ ID NO: 91148 - protein, 84 aa, Setaria italica
  Transcript Sequence Number=SeqID_25174
PALDAKLLIRWLLYYGADSKTYDCPLFGRRLNHFTAFLTLQCGGSQTLLTLQGKRSSKWYGLLSLKSTEFDSTMSRSSALAIKF

SEQ ID NO: 91149 - protein, 249 aa, Setaria italica
  Transcript Sequence Number=SeqID_25175
  Gene Ontology: Cellular component=plasma membrane
MASPNGPATPPMVMYPFYPAGAFPQQAGDDQAQGPGIYAIQQNQLAAAMGMGRYAPTTLVPLTYKIPAESIGAPAGEGNVQDAMQQNGPQRQVVVRRFHFAFQLDLALIIKLAAVVFLFSQEGSKQRLFLLILFASLIYLYQTGAITPFVRWLQRAGGAAARPPQAPARVENRALLPAQNDGNDQPNDPANPDQAAENQEPGAGAGNENPQVAEGEGNRRNWLGGILKEVQLVVVGFVASLLPGFQHND

SEQ ID NO: 91150 - protein, 45 aa, Setaria italica
  misc_feature (12)..(12): Xaa can be any naturally occurring amino acid
  Transcript Sequence Number=SeqID_25176
  Homolog annotation: Hit_ID=B6SWR5; Match level="QueryCoverage=100%, HitCoverage=10%, E-value=2e-17, Identity=91%"; Hit description =Cyclin-like F-box
RALECGDFWFPXQVYNREDGHVGFVLSCYDAHLRYDRRTDTFTAR

SEQ ID NO: 91151 - protein, 139 aa, Setaria italica
  misc_feature (13)..(13): Xaa can be any naturally occurring amino acid
  misc_feature (126)..(126): Xaa can be any naturally occurring amino acid
  misc_feature (130)..(130): Xaa can be any naturally occurring amino acid
  Transcript Sequence Number=SeqID_25177
  Homolog annotation: Hit_ID=B6SWR5; Match level="QueryCoverage=99%, HitCoverage=32%, E-value=1e-47, Identity=68%"; Hit description =Cyclin-like F-box
PSSWIAGRWLKGXATPAPAAVAAEPAPATAAPPTDTVAAWYRALECGDFWFPAQVYNREDGHVGFVLSCYDAHLRYDRRTDTFTARYPPHGRKPAKEEDGVQWSRIRAPPVSTPAHDLHGSGCLGXLRPXDHFEIQWRK

SEQ ID NO: 91152 - protein, 165 aa, Setaria italica
  Transcript Sequence Number=SeqID_25178
  Homolog annotation: Hit_ID=B6SWR5; Match level="QueryCoverage=100%, HitCoverage=38%, E-value=7e-78, Identity=83%"; Hit description =Cyclin-like F-box
CYDAHLRYDRGRSVSFDRYPPHGRKPAKEEDGVQWSRIRAPPVSTPAHDLHGSGCLGALRPGDHFEIQWRKNKDFPYGWWYGVVGHQASCNANEHLWCRCHEDDMIVLEFQHYAPGSRWRQTTVSRKDHRETGDETDGFYGGIRKLQTKDEIATWRRFWPVDVLN

SEQ ID NO: 91153 - protein, 183 aa, Setaria italica
  Transcript Sequence Number=SeqID_25179
LPILILVSLPIPIPMLAIILLLPPIILLLLPLPLPSATAMVILLLPPCALSLLCLSRCRSPPSTSISSNAASLVSSAAPMTKTQNQHRISAHFSPEKRSRRRRERASVRALDVEGAGTAKERSDGDDGAGGQSRRCGPSGWRRRVDRDGWREAEAKQGAGLPAGLRRRRRMIGGRRRMMASIG

SEQ ID NO: 91154 - protein, 143 aa, Setaria italica
  Transcript Sequence Number=SeqID_25180
  Gene Ontology: Mol. function=alpha-1,6-mannosylglycoprotein 2-beta-N -acetylglucosaminyltransferase activity; Cellular component=integral to membrane; Biological process=oligosaccharide biosynthetic process
  Homolog annotation: Hit_ID=Q1EP08; Match level="QueryCoverage=99%, HitCoverage=29%, E-value=2e-63, Identity=73%"; Hit description=N -acetylglucosaminyltransferase, putative
  Pfam annotation: Domain name=MGAT2; Domain location=1-143; Score= -8.7; E_value=3.9e-15; Accession=PF05060.6; Description=N -acetylglucosaminyltransferase II (MGAT2)
NAYRNRTAACGFEPKKCPGCYAVNLAPSDVKAKGEGWESLVAEKMGNIGYAFNRTVWRKIHAKAKQFCTFDEYNWDITMWATVYPSFGAPVYSLRGPRRSAAHFGKCGLHQGQGSSNVCVDNGSGAVELEEIDKVPNIKADWP

SEQ ID NO: 91155 - protein, 63 aa, Setaria italica
  Transcript Sequence Number=SeqID_25181
MEHEVWLLWATLAGVVSLLYYLAILSRRRGSGRLPPGPRPLPIIGNALDLRGNLHHALARLAR

SEQ ID NO: 91156 - protein, 434 aa, Setaria italica
  Transcript Sequence Number=SeqID_25182
  Homolog annotation: Hit_ID=Q656E2; Match level="QueryCoverage=80%, HitCoverage=78%, E-value=0.0, Identity=86%"; Hit description =Endoribonuclease E-like protein
CDLRLRRLVCSDAAGPAAALATCGGGCSCGCPRPADPRLLLLVAAEIVTGETCRLQRRQHLRRAVAGAAEEKEGCVATPAIAKAEDKNEAEVAMGHTMTEICDKFIEFFMHKKPETKDWKKVLVFREEWQRYRKQFYKRCQVRIDMETDSSLKQKLAVLARKVKKIDDEIEKHMELFTELRDNPADINAIVARRRKDFTGDFFRHLNFLVNAYNGLDERDGVVRLGAKCLSAIHAYDCTLEQLDIESAQSKFDDILNSSSLEDACDKIKSLAKAKQLDSSLILLINRAWAAAKDSTTMKDKVKDIMYHIYTSTKESLKSISPPEMKLLKYLLNIEDPEERFGALATAFSPGDEREAKDEDALYTTPNELHKWIKMMLDSYHLNKEETDFMDARKMSDPVIIQRLTLLKETIEEEYMKQYIHPDEPESMDDEELE

SEQ ID NO: 91157 - protein, 77 aa, Setaria italica
  Transcript Sequence Number=SeqID_25183
  Gene Ontology: Mol. function=catalytic activity; Biological process =metabolic process
  Homolog annotation: Hit_ID=A4ZYX4; Match level="QueryCoverage=100%, HitCoverage=10%, E-value=8e-36, Identity=96%"; Hit description=1 -deoxy-D-xylulose 5-phosphate synthase
TAEEGSIGGFGSHVAHYLSLAGLLDGNLKLRSMFLPDRYIDHGAPQDQMEEAGLTPRHIAATVLSLLGRPLEAMQLK

SEQ ID NO: 91158 - protein, 694 aa, Setaria italica
  Transcript Sequence Number=SeqID_25184
  Gene Ontology: Mol. function=protein tyrosine kinase activity; Cellular component=integral to plasma membrane; Biological process =protein amino acid phosphorylation
  Homolog annotation: Hit_ID=B6SSJ5; Match level="QueryCoverage=100%, HitCoverage=87%, E-value=0.0, Identity=73%"; Hit description=Wound and phytochrome signaling involved receptor like kinase
  Pfam annotation: Domain name=DUF1191; Domain location=79-295; Score= -147.6; E_value=0.084; Accession=PF06697.4; Description=Protein of unknown function (DUF1191)
  Pfam annotation: Domain name=LRR_1; Domain location=44-66; Score=0.4; E_value=2.5e+02; Accession=PF00560.25; Description=Leucine Rich Repeat
  Pfam annotation: Domain name=LRR_1; Domain location=68-90; Score =14.5; E_value=0.45; Accession=PF00560.25; Description=Leucine Rich Repeat
  Pfam annotation: Domain name=LRR_1; Domain location=92-115; Score =17.5; E_value=0.054; Accession=PF00560.25; Description=Leucine Rich Repeat
  Pfam annotation: Domain name=Pkinase; Domain location=323-599; Score=- 21.5; E_value=3.3e-07; Accession=PF00069.17; Description=Protein kinase domain
  Pfam annotation: Domain name=Pkinase_Tyr; Domain location=326-599; Score=-57.9; E_value=7.1e-10; Accession=PF07714.9; Description =Protein tyrosine kinase
  Pfam module annotation: Pfam domain module=DUF1191::LRR_1::LRR_1::LRR_ 1::Pkinase::Pkinase_Tyr; Domain location=79-295::44-66::68-90::92 -115::323-599::326-599
AGARSAAFAVDPLRGLTALEALNASGFPLPGRIPAWFGRGLPPSLGVVDLRSARVNGELPTDLGASGNLMTLVLSGNNLTGPIPASLFSIPGLRVLDLSSNNLTGPLPSVSFSGSYGAGVSFNVSGNSLYGAIGDAIRKRFWVVDVSSNYFDQAVGIGIENGTDGTVFFRMNCFSGAANQRTPGDCEAFYTRNGMRLADVPELSSPLLEPQPPPVLPMPSTGKRGDKWKHILAGVLGGAAIVVTLGLGALVFCLLRRRGRRRPRTRGVEQTEEGIRSGRRSSSVNPVTMSPMASPGASGSPKSVPIVIDDFTYEQLHHATGGFGDDNLINHGHSGDMYHGVLESGFEVVVKKIDLKSSKKCQGELNFLTKHSHRRIVSLLGHLAKDEEQLLVYKYMAKGDLTTALHKKSVEVEEGLRSLDWITRLKIAIGVSEALCFLHDECSPPLVHRNIQASSVLLDDKFEVCLGSLSEICTQQSQGSQSFFSRILRSSKSLDKNTSGPPASCTYDVYCFGKVLIELITGNLGVSGSNDSDSDEWLARTLGYIDANDKEGVSGIVDPSLVVDEDHLEEVWAVAIIAKTCLNPKPTRRPLARYVLKALENPLTVVREREELRSNSSQLKSTSSRSSWRFAFHGNKYQSWDVMPTSGKALAPNNKAKSQGTEGSDEDEENSFSFKRASRENFPDPIELEDSVVV

SEQ ID NO: 91159 - protein, 69 aa, Setaria italica
  Transcript Sequence Number=SeqID_25185
ILFSNVLDRVLLVMDRHFALVLVSMLNLHLELLSYLCFFIFVLKLELLIPFWERVNCWLYSISPSGRFV

SEQ ID NO: 91160 - protein, 358 aa, Setaria italica
  Transcript Sequence Number=SeqID_25186
MDSFQRALNEPTCLEETVQQGIERCPFLRNINEPTSFSFSSVNFPILARGAKGPIFEDGPNFDTAFRVFHGRDGVVPLSEGSFPQIEKPLPKPNPEFNPLAAKAATISLSAFGGFFSFGDFSNKRNKKNFNKKNPNNLPQNKGQSNNHEAVSNEWLENGQCPLAKSYRALSGIVPLVAKMMTPPAGMKLKCPPAVVAARAAISRTAFAKGLRPQPLPTKVLVIALLGMAANVPLGIWREHTQKFSVQWFAAVHAAVPFIGMLRKSVLMPKSAMALTIAASILGQTIGSRAERIRLKRVAAAKSAGEGDDTADCIKAPMSLKTGNRSVVQFWDPLALRVESTVSAGSPSVLVPAVAAFN

SEQ ID NO: 91161 - protein, 79 aa, Setaria italica
  Transcript Sequence Number=SeqID_25187
  Subcellular localization annotation: CTP_CleavageSite=8; ConfidenceScore=5.10e-01
MGSPKAARSMVKQRICRRRFGALFAAALVAAVLAVFVFSDLFAQDPNASSQFNALRPVRDASEPAETGKSPNKEDLATA

SEQ ID NO: 91162 - protein, 152 aa, Setaria italica
  misc_feature (144)..(144): Xaa can be any naturally occurring amino acid
  Transcript Sequence Number=SeqID_25188
  Gene Ontology: Mol. function=oxidoreductase activity; Cellular component=cell wall
  Homolog annotation: Hit_ID=Q7XJZ1; Match level="QueryCoverage=100%, HitCoverage=25%, E-value=8e-67, Identity=81%"; Hit description =OSJNBa0034E24.20 protein
AGLALPHSPYWYGLTVGGMLATGAHGSSLWGKGSAVHEYVVGLRIVTPAPASQGFAVVRELAAGDPDLDAAKVSLGVLGVISQVTLELQPQFKRSVTFVTRDDKDMAAKLAAWGGLHEFGDVSWLPRQGKAIYREDNRVDVSTXPGNGLNNY

SEQ ID NO: 91163 - protein, 385 aa, Setaria italica
  Transcript Sequence Number=SeqID_25189
  Gene Ontology: Mol. function=nucleic acid binding
SFVRSEDYLGHIGTDVEIALDESRVVYDMDSDDEEWISSWRKFLVGDDITAHELAEDLFERVMDKLEKFAYSHNCNELSTDQMKEMDIDNVPLDIIEVIHAYWQDKRQKKGMPLIRHFQSAMWKIYEQQLHEWESTVYRMQGSSNGYQEKKLPPKPALFAFCLKPRGLHVPYKGPKQRSHKKLMSTGCHSFSREHEGFYRQVSGRKYNEYIGDGRICEPYDSGSLYSPTGYSPRFSTRTDSPRAFDASERSSTPRFFRTNSVKRSASFAFSDDHQPSPSFRHQKVKRGVADHWNTVIHEWQNSKHLFPGSSRVDIEELKLRDAAGAAQHAAAMAKLKREKAHCLMRKADLALHKATVALMIADAIKSSSRDTFRDGRRDLRDEER

SEQ ID NO: 91164 - protein, 162 aa, Setaria italica
  Transcript Sequence Number=SeqID_25190
  Gene Ontology: Mol. function=protein serine/threonine kinase activity; Biological process=protein amino acid phosphorylation
  Homolog annotation: Hit_ID=B9A1H1; Match level="QueryCoverage=87%, HitCoverage=13%, E-value=4e-41, Identity=55%"; Hit description =Putative LRR-kinase protein
SKTMLNSVSFTGLRGSIGYVAPEYGEGRAVSTLGDVYSLGILLLEMFTGMSPTDDMFKGSLDLHKFAEAALPDRALKVADPAIWLHEEAKGEDPATVRSRSERCLASVVGLGVSCSKQLPRERTAMRDAAAEMRAIRDAFLVQCATETWPAVGTTGLGSADS

SEQ ID NO: 91165 - protein, 146 aa, Setaria italica
  Transcript Sequence Number=SeqID_25191
  Gene Ontology: Mol. function=phosphogluconate dehydrogenase (decarboxylating) activity; Biological process=pentose-phosphate shunt
  Homolog annotation: Hit_ID=B9RKH5; Match level="QueryCoverage=71%, HitCoverage=35%, E-value=2e-21, Identity=51%"; Hit description=3 -hydroxyisobutyrate dehydrogenase, putative
  Pfam annotation: Domain name=NAD_binding_2; Domain location=47-146; Score=36.0; E_value=2e-11; Accession=PF03446.7; Description=NAD binding domain of 6-phosphogluconate dehydrogenase
  Pfam annotation: Domain name=Shikimate_DH; Domain location=43-143; Score=-23.4; E_value=0.027; Accession=PF01488.12; Description =Shikimate  quinate 5-dehydrogenase
  Pfam module annotation: Pfam domain module=NAD_binding_2::Shikimate _DH; Domain location=47-146::43-143
  Subcellular localization annotation: CTP_CleavageSite=18; ConfidenceScore=5.28e-01
MLAGISRSLTHRRPPFPLAATAAAAAAAMSSSATGANVSDCPISPDTTRVAWVGTGVMGQSMAGHLLSAGYALTVFNRTASKAQGLVSHGASLADSPRAAAAAADVIFLMVGFPSDVRSTALDPSAGALAGLAPGGVLVDMTTSDP

SEQ ID NO: 91166 - protein, 100 aa, Setaria italica
  Transcript Sequence Number=SeqID_25192
  Gene Ontology: Mol. function=unfolded protein binding; Cellular component=chloroplast; Biological process=cellular protein metabolic process
  Homolog annotation: Hit_ID=B9SQA2; Match level="QueryCoverage=99%, HitCoverage=17%, E-value=5e-17, Identity=46%"; Hit description =Rubisco subunit binding-protein alpha subunit, ruba, putative
GKEICTCHNSNIFASDLGWGLHGITSDQLGMAQKITITSESTTIIAHPSMRPEIEARIMQLKKDVEETTSSYLRERFSARIAKLSRGVGVIKVGAATEAE

SEQ ID NO: 91167 - protein, 126 aa, Setaria italica
  Transcript Sequence Number=SeqID_25193
  Subcellular localization annotation: CTP_CleavageSite=52; ConfidenceScore=5.12e-01
PLLVVVVHVDPRDGGLLLPAAAGRRPSSSAAGVIRTAAAARRLFPFLLGTAVGAYVAQNYKVPNLRGLAERGVHDARRYEEAYRKKTPGCGGGSDDAGGAAAGSSTGGGRKKKAAVARVDMDDDDE

SEQ ID NO: 91168 - protein, 48 aa, Setaria italica
  Transcript Sequence Number=SeqID_25194
CIFLTDADYPYGKNVQLYLWEGGIQQLVLLNSVEQKKLTMVLLLTLHA

SEQ ID NO: 91169 - protein, 67 aa, Setaria italica
  Transcript Sequence Number=SeqID_25195
  Subcellular localization annotation: CTP_CleavageSite=20; ConfidenceScore=5.06e-01
SIILHTTHRHQLRPPLRHKRLVTVKTYLCWRTCRELPRPRTPAQPPRLRSPAPPPTTTTTSLSYCTP

SEQ ID NO: 91170 - protein, 355 aa, Setaria italica
  misc_feature (58)..(58): Xaa can be any naturally occurring amino acid
  Transcript Sequence Number=SeqID_25196
  Gene Ontology: Mol. function=nucleic acid binding; Cellular component= nucleus; Biological process=DNA replication
  Homolog annotation: Hit_ID=B3VTC8; Match level="QueryCoverage=100%, HitCoverage=38%, E-value=1e-160, Identity=73%"; Hit description =Replication protein A1-like protein
  Pfam annotation: Domain name=Rep_fac-A_C; Domain location=75-224; Score=280.6; E_value=3.4e-81; Accession=PF08646.2; Description =Replication factor-A C terminal domai
  Pfam annotation: Domain name=zf-CCHC; Domain location=305-322; Score =14.3; E_value=0.0027; Accession=PF00098.15; Description=Zinc knuckle
  Pfam module annotation: Pfam domain module=Rep_fac-A_C::zf-CCHC; Domain location=75-224::305-322
LTEFSGRSVSSISSTQLKINPDFPEAEKLQRWYVTEGKTATCVSLSVASMGKTDVRKXVVQIKGGNLGRSEKPDWITVKGTVSHLNTDNFCYPACTMEVNGRQCNKKVINNGDGTWHCDRCDQSLPNCEYRYLLMCQIQDHTGLTYANAFQEAGVEIMGCSAEELYNMKEEDTERFADIIQGVRWQQFLFKLKVYEETFNDEQRVKCSIVKAEKLDLSRECSYLLKGIGALLQDDTGSPSEVQGAMAYSAGLNTSGAGQGMPASNSAYATSMGTPRYGETGNQLGQQANTYGGVSTPLSATRNVETCMGCGSSGHNAQSCPASMYRQQQPAANTASSYVSSPGDAGSGRCFRCNQ

SEQ ID NO: 91171 - protein, 92 aa, Setaria italica
  Transcript Sequence Number=SeqID_25197
MSWCSDSEIPICSADKLPFSIYMVLADYDSTTVKLLALQPAATNEGWTKLHIGPNTRKKDLEERLMPELKSLVLGTTKERAAILRACWAMSS

SEQ ID NO: 91172 - protein, 111 aa, Setaria italica
  Transcript Sequence Number=SeqID_25198
  Gene Ontology: Mol. function=receptor activity; Cellular component =plasma membrane
  Homolog annotation: Hit_ID=Q9XID5; Match level="QueryCoverage=95%, HitCoverage=17%, E-value=5e-28, Identity=60%"; Hit description =F23M19.3
  Pfam annotation: Domain name=DUF668; Domain location=72-110; Score= -31.1; E_value=0.054; Accession=PF05003.4; Description=Protein of unknown function (DUF668)
FAGDNLHILKQEVKSQRKHVKSLRKKSLWSKNLEEVMGKLVDIVHFLHLEIHNAFGRSDNEESQEPTKRRNRLGPAGLALHYANIISQIDTLVSSYTPFVLLFFLWLGETI

SEQ ID NO: 91173 - protein, 598 aa, Setaria italica
  Transcript Sequence Number=SeqID_25199
  Gene Ontology: Mol. function=receptor activity; Cellular component =plasma membrane
  Homolog annotation: Hit_ID=Q9XID5; Match level="QueryCoverage=93%, HitCoverage=86%, E-value=0.0, Identity=60%"; Hit description=F23M19.3
  Pfam annotation: Domain name=DUF668; Domain location=328-413; Score =191.9; E_value=1.7e-54; Accession=PF05003.4; Description=Protein of unknown function (DUF668)
AAAKRMQEEQHQQQQLPVSVSQTAVPGGSADASLPPWDGVPQLARLPSQRSGIGVTAKVSEVSSILGRASTAGLGKAVDVLDTLGSSMTNLNISGFGSSTTTKGNKISILAFEVANTIVKGCNLMRALSKDSIKHLKETVLHSEGVQNLISKDMDELLKIAAADKREELKVFSTEVVRFGNRCKDPQWHNLDRYFDKLASERTPQHHLKEEAESVMQQLVICVQFTAELYHEMHALDRFEQDYQRKHQEEDGSSVVQRGDNLHILKQEVKSQRKHVKSLRKKSLWSKNLEEVMGKLVDIVHFLHLEIHNAFGRSDNEESQEPTKRRNRLGPAGLALHYANIISQIDTLVSRSSSIPPNTRDALYQSLPPTIKSSLRSKLHSFGVKEELTVSQIKAEMEKTLRWLVPIATNTTKAHHGFGWVGEWANAGSDVNCKPTGQMDLTRIETLYHADKDKTEAYILELVLWLHHLISQSKTANGERSPIKSPVRSPTQRGASITLSPNKTSSNSSPLLTQEDQDMLRDVKYRKFIPGISKSQEFDTKARLNKQSRLSKSNSHSPSSGNMKELLSIRRLLPVIDFEIDRTKALDVIDRVDNLRVQ

SEQ ID NO: 91174 - protein, 89 aa, Setaria italica
  Transcript Sequence Number=SeqID_25200
  Subcellular localization annotation: CTP_CleavageSite=83; ConfidenceScore=5.49e-01
SIRRQREACSYKGHNLFASPAGFSLPQPQESSTRSLEFFDSFSRGSSFLSPVRSAGSGAMQRSNSFGTSWADQWDYGGDPSPRARRAAG

SEQ ID NO: 91175 - protein, 64 aa, Setaria italica
  Transcript Sequence Number=SeqID_25201
  Gene Ontology: Mol. function=RNA-directed DNA polymerase activity; Biological process=RNA-dependent DNA replication
  Homolog annotation: Hit_ID=Q2R299; Match level="QueryCoverage=93%, HitCoverage=6%, E-value=1e-10, Identity=53%"; Hit description =Retrotransposon protein, putative, unclassified
IFLVSASGLHTNLHKSSIVLIACSQDQIARISHIIPAQMTEFPIQYLGLPLSVRHLRKAHYQPL

SEQ ID NO: 91176 - protein, 68 aa, Setaria italica
  Transcript Sequence Number=SeqID_25202
  Gene Ontology: Mol. function=kinase activity
  Subcellular localization annotation: CTP_CleavageSite=25; ConfidenceScore=5.17e-01
MDGHGGGAGPGGAGKLTRTPSSLLRSPTVRNCSSFQAVVVEDPEPDDKKAQAHPKASPHQFHPGAGPA

SEQ ID NO: 91177 - protein, 81 aa, Setaria italica
  Transcript Sequence Number=SeqID_25203
  Subcellular localization annotation: CTP_CleavageSite=62; ConfidenceScore=5.36e-01
TWCFASGVASNFTGLIVLLSSMGSQVWLSLQWRLSVSCCVLCPGLLLVQVLCRPVVFAKQIQGSLISSQFNQDAAQQQMFT

SEQ ID NO: 91178 - protein, 53 aa, Setaria italica
  Transcript Sequence Number=SeqID_25204
  Subcellular localization annotation: CTP_CleavageSite=37; ConfidenceScore=5.03e-01
PPPGASPPGWPVTSQGSLCCCRPWVHKFGCLSNGDCLCRAVFTNTTGRHRTCT

SEQ ID NO: 91179 - protein, 93 aa, Setaria italica
  Transcript Sequence Number=SeqID_25205
  Gene Ontology: Mol. function=serine-type endopeptidase activity; Cellular component=plasma membrane; Biological process=protein modification process
  Homolog annotation: Hit_ID=O64955; Match level="QueryCoverage=96%, HitCoverage=89%, E-value=9e-43, Identity=93%"; Hit description =Polyubiquitin (Fragment)
  Pfam annotation: Domain name=ubiquitin; Domain location=22-90; Score =138.0; E_value=2.9e-38; Accession=PF00240.15; Description=Ubiquitin family
EGRSTTPHLVLRLRGGMQIFVKTLTGKTITLEVESSDTIDNVKAKIQDKEGIPPDQQRLIFAGKQLEDGRTLADYNIQKESTLHLVLRLRGGQ

SEQ ID NO: 91180 - protein, 78 aa, Setaria italica
  Transcript Sequence Number=SeqID_25206
  Gene Ontology: Cellular component=membrane
  Homolog annotation: Hit_ID=B6U3D7; Match level="QueryCoverage=89%, HitCoverage=20%, E-value=8e-31, Identity=94%"; Hit description =Nodulin protein
MWGMAHLDEWRPVMAMLVFNLISAVMTALVKEALQQGLNSLVLITLRQLVATVFLAPIAYFKERNTRPKLTAEIFVYL

SEQ ID NO: 91181 - protein, 209 aa, Setaria italica
  misc_feature (176)..(176): Xaa can be any naturally occurring amino acid
  Transcript Sequence Number=SeqID_25207
  Gene Ontology: Mol. function=transferase activity, transferring groups other than amino-acyl groups
  Homolog annotation: Hit_ID=B6TCS3; Match level="QueryCoverage=97%, HitCoverage=44%, E-value=6e-74, Identity=67%"; Hit description =Anthranilate N-benzoyltransferase protein 1
  Pfam annotation: Domain name=Transferase; Domain location=2-208; Score=-171.5; E_value=0.014; Accession=PF02458.7; Description =Transferase family
LTTRSKNVKPSPELRRQLVPRIEPSSVVSAVQVTFFKCGWVALGTALHHAAIDAMSAIHFFQTWSAFSRDGERGAVEPPCHDRTLLRARSPPTVHPDALSTFYPKLAFSDPSGPLATKVFTISKDRIASLKRLCGGASTFRAVSALVWRCACIARRLPPDSETRFTSAVNIRRRVXPPLPERYFGNALVEVVVAAAARDITSEALASVA

SEQ ID NO: 91182 - protein, 111 aa, Setaria italica
  Transcript Sequence Number=SeqID_25208
  Gene Ontology: Mol. function=actin binding; Cellular component =integral to membrane; Biological process=actin cytoskeleton organization and biogenesis
  Homolog annotation: Hit_ID=Q6H7U3; Match level="QueryCoverage=97%, HitCoverage=12%, E-value=3e-38, Identity=70%"; Hit description =Formin-like protein 10
PNLLTETPSTPSNSLNIEPPNQPHHHKPAHKGVTPPFSPLEKHKDYVKLVLIAVLPTAAVSFVAAFLIFYCCGCNKSKVSVSEQRDDHPLLHMQLANVPGSSPDAHCPASP

SEQ ID NO: 91183 - protein, 79 aa, Setaria italica
  Transcript Sequence Number=SeqID_25209
MAVSVRRRAPWLGLLFLAAGALLLRLALAEEPEGASAAASGHGVGEGHAAVALRNDSVVNGVDVVGKDVGVVKRQQTVW

SEQ ID NO: 91184 - protein, 43 aa, Setaria italica
  Transcript Sequence Number=SeqID_25210
LKIWHDDKCFHPSSKHRYKMSVSTTSFTVFKFKWYLVCSSGQT

SEQ ID NO: 91185 - protein, 238 aa, Setaria italica
  Transcript Sequence Number=SeqID_25211
  Gene Ontology: Cellular component=cell wall
  Homolog annotation: Hit_ID=Q43557; Match level="QueryCoverage=80%, HitCoverage=49%, E-value=2e-59, Identity=56%"; Hit description =Unidentified
  Pfam annotation: Domain name=DUF642; Domain location=63-238; Score =154.3; E_value=3.7e-43; Accession=PF04862.4; Description=Protein of unknown function, DUF642
MYVPVTASEIDTMRRDSEMTKGARRLALFFLLVSVAARAVSAVVSDGLLPNGNFEQGPNKSEMNGTRVKDRDAILHWEIYGFVEYIESGHTQDDMILPVPEGEQAVRLGNDATIRQQLDVTRHTYYSITFTAARTCAQAETLNVSVTPESGVLPIQTVYTSSGWDSYSWAFKAKHSSVWLSTHNPGHEDNPACGPLIDFIAIKNLHPPHHTPVQLDRAVNMLRNGDFEEGPYIFPDVP

SEQ ID NO: 91186 - protein, 199 aa, Setaria italica
  Transcript Sequence Number=SeqID_25212
  Gene Ontology: Mol. function=protein kinase activity; Cellular component=integral to membrane; Biological process=protein amino acid phosphorylation
  Homolog annotation: Hit_ID=B9T5A8; Match level="QueryCoverage=79%, HitCoverage=23%, E-value=5e-57, Identity=63%"; Hit description=ATP binding protein, putative
  Pfam annotation: Domain name=Pkinase_Tyr; Domain location=61-199; Score=-133.3; E_value=7.3e-05; Accession=PF07714.9; Description =Protein tyrosine kinase
VAAELALHSKEAMSPNGYTPRVSDARPPPSVPPAVAAASVGKKKLFFFGRIPRPYDLEDLLRASAEVLGKGTYGTTYKAAIESGPVMAVKRLKETSLPEREFRDKVAAIGGIDHPNVVPLQAYYFSKDEKLMVYEFVAMGSLSSMLHGNRGSGRSPLSWESRRRIALASARGLEYIHATGSMVTHGNIRSSNILLSRSV

SEQ ID NO: 91187 - protein, 112 aa, Setaria italica
  Transcript Sequence Number=SeqID_25213
  Gene Ontology: Mol. function=nucleotide binding; Cellular component =membrane; Biological process=defense response
  Homolog annotation: Hit_ID=Q9XEQ9; Match level="QueryCoverage=75%, HitCoverage=6%, E-value=6e-33, Identity=78%"; Hit description =Disease resistance protein RPM1 homolog
QLYWFLTDLATYSYSVGCQIIDSSEAKEADMDGIMVSAATGVISSLLAKLADLLREDYQMQKGMRREIAFLQDELSSMNVLLERLADMEVLDPQTREWRNQVREMSYDIEDC

SEQ ID NO: 91188 - protein, 59 aa, Setaria italica
  Transcript Sequence Number=SeqID_25214
  Gene Ontology: Mol. function=calcium ion binding; Cellular component =flagellin-based flagellum; Biological process=ciliary or flagellar motility
  Homolog annotation: Hit_ID=B6SJJ2; Match level="QueryCoverage=55%, HitCoverage=19%, E-value=2e-09, Identity=93%"; Hit description =Calmodulin
  Pfam annotation: Domain name=efhand; Domain location=35-59; Score =17.0; E_value=0.078; Accession=PF00036.24; Description=EF hand
  Subcellular localization annotation: CTP_CleavageSite=29; ConfidenceScore=5.08e-01
MTRSAPAAAAASVPATKQQQQPPHHAVLRGSQLKQLREIFRRFDMDGDGSLTQLELAAL

SEQ ID NO: 91189 - protein, 101 aa, Setaria italica
  misc_feature (2)..(2): Xaa can be any naturally occurring amino acid
  Transcript Sequence Number=SeqID_25215
  Gene Ontology: Mol. function=ATPase activity, coupled to transmembrane movement of substances; Cellular component=integral to membrane; Biological process=transport
  Homolog annotation: Hit_ID=Q5SMN1; Match level="QueryCoverage=100%, HitCoverage=7%, E-value=6e-36, Identity=76%"; Hit description =Putative multidrug resistance-associated protein 7
  Subcellular localization annotation: CTP_CleavageSite=18; ConfidenceScore=5.11e-01
LXSLFTFSIFAIMGHTLDAATVFTCVALFNTLISPLNSFPWVINGLIDAVISSRRLSNYLSTPEHHSSELTASADLLKHQFKRYTEVTHNPMAFVLQNVCC

SEQ ID NO: 91190 - protein, 256 aa, Setaria italica
  Transcript Sequence Number=SeqID_25216
  Gene Ontology: Mol. function=nucleotide binding; Cellular component =cytoskeleton; Biological process=cell division
  Homolog annotation: Hit_ID=B6SKP8; Match level="QueryCoverage=97%, HitCoverage=39%, E-value=5e-98, Identity=68%"; Hit description =Dynamin-related protein 1C
  Pfam annotation: Domain name=Dynamin_M; Domain location=2-184; Score=- 63.2; E_value=3.7e-07; Accession=PF01031.12; Description=Dynamin central region
  Pfam annotation: Domain name=GED; Domain location=199-255; Score= -12.2; E_value=0.035; Accession=PF02212.10; Description=Dynamin GTPase effector domain
  Pfam module annotation: Pfam domain module=Dynamin_M::GED; Domain location=2-184::199-255
FLYPGAQLYTILDLCRAFDRVFKEHLDGGRSGGDRIYRVFDHKLPAAFKKLPFDRYLSVENVKKVVSEADGYQPHLIAPEQGYRRLIGTGLTYFRGPAEATVDAVHVVLKDLVRKSIGETEQLRRFPTLQASIATAANEALEGFREDGRSTALRLVEMEATYPTVDFFRNRPQDPAADASTKGGAKNHSADSSVPLDRYGDGHYRNIASNVSQYIRMVGDELLKTIPKAAVHCQVREAKRSLLNHFYVQIGKKEAG

SEQ ID NO: 91191 - protein, 43 aa, Setaria italica
  Transcript Sequence Number=SeqID_25217
  Subcellular localization annotation: CTP_CleavageSite=14; ConfidenceScore=5.03e-01
SPSPLSDPESVKARSTAVAAASPATPPPPPAQPSPPPPRPRRI

SEQ ID NO: 91192 - protein, 128 aa, Setaria italica
  misc_feature (102)..(102): Xaa can be any naturally occurring amino acid
  Transcript Sequence Number=SeqID_25218
  Homolog annotation: Hit_ID=Q7XLZ2; Match level="QueryCoverage=69%, HitCoverage=16%, E-value=6e-24, Identity=56%"; Hit description =OSJNBa0086O06.17 protein
VDSRLKVLKRKYYSIKDMLASPGFSWDDARKMIQCEKQRYDEYCRDHPRAKGMYGIPFVYFDTFDAIYGKDRYIGEGLEGSEEAIANMENGENANEVGDERXEEDAMSTGVSGRSLAATLSSKSQKKY

SEQ ID NO: 91193 - protein, 269 aa, Setaria italica
  misc_feature (30)..(30): Xaa can be any naturally occurring amino acid
  misc_feature (45)..(45): Xaa can be any naturally occurring amino acid
  Transcript Sequence Number=SeqID_25219
  Homolog annotation: Hit_ID=Q7XLZ2; Match level="QueryCoverage=84%, HitCoverage=47%, E-value=3e-45, Identity=39%"; Hit description =OSJNBa0086O06.17 protein
NKRKWTAEEDEELVKALCEVSADPRYKVEXGFKNCYSQGIQSILXQKLPGRGIKASPHVDSRLKVLKRKYYSIKDMLASPGFSWDDARKMIQCEKQRYDEYCRDHPRAKGMYGIPFVYFDTFDAIYGKDRYIGEGLEGSEEAIANMENGENANEVGDDEVEEDAMSTGVSGRSLAATLSSKSQKKYKHDGKGNRTESNCPSLDKFKDLHGQFQTAIQHVSTMAAAMELFKDVHDHFQSVVQHAGAMATGMEQFKDAHDRFQSVVQHVST

SEQ ID NO: 91194 - protein, 198 aa, Setaria italica
  Transcript Sequence Number=SeqID_25220
  Gene Ontology: Mol. function=protein kinase activity; Cellular component=integral to membrane; Biological process=protein amino acid phosphorylation
  Homolog annotation: Hit_ID=C0LGK9; Match level="QueryCoverage=99%, HitCoverage=25%, E-value=2e-43, Identity=43%"; Hit description =Leucine-rich repeat receptor-like protein kinase (Fragment)
  Pfam annotation: Domain name=LRR_1; Domain location=124-145; Score =8.4; E_value=7.6; Accession=PF00560.25; Description=Leucine Rich Repeat
  Pfam annotation: Domain name=LRR_1; Domain location=147-166; Score =5.3; E_value=30; Accession=PF00560.25; Description=Leucine Rich Repeat
  Pfam annotation: Domain name=LRR_1; Domain location=169-197; Score =5.6; E_value=26; Accession=PF00560.25; Description=Leucine Rich Repeat
  Pfam annotation: Domain name=LRR_1; Domain location=27-48; Score =17.8; E_value=0.047; Accession=PF00560.25; Description=Leucine Rich Repeat
  Pfam annotation: Domain name=LRR_1; Domain location=51-73; Score =11.4; E_value=2; Accession=PF00560.25; Description=Leucine Rich Repeat
  Pfam annotation: Domain name=LRR_1; Domain location=75-97; Score=9.0; E_value=5.7; Accession=PF00560.25; Description=Leucine Rich Repeat
  Pfam annotation: Domain name=LRR_1; Domain location=99-122; Score =10.0; E_value=3.7; Accession=PF00560.25; Description=Leucine Rich Repeat
  Pfam module annotation: Pfam domain module=LRR_1::LRR_1::LRR_1::LRR _1::LRR_1::LRR_1::LRR_1; Domain location=124-145::147-166::169 -197::27-48::51-73::75-97::99-122
GRVVAFSAAGMGLAGAIPEDTVGKLARLQALDLSGNRLTALPNDLWELGASLRALNLSGNAIRGALPNNVGNFALLQVLDVSHNAFTGALPQALGSIAGLQVLNASHNQFQGQVPSAVVFGCGNLVAMDLSGNALDGDLPDLSPLRSLAYLNLSGNRLGGSVVGAFQEQLRVIDLCNNRFSGLNFSSGYAGSALVYLD

SEQ ID NO: 91195 - protein, 158 aa, Setaria italica
  Transcript Sequence Number=SeqID_25221
  Gene Ontology: Mol. function=geranylgeranyl reductase activity; Biological process=chlorophyll biosynthetic process
  Homolog annotation: Hit_ID=B9S6M0; Match level="QueryCoverage=91%, HitCoverage=32%, E-value=1e-49, Identity=64%"; Hit description =Geranylgeranyl hydrogenase, putative
IPEHPRPRRVVGRVALVGDAAGYVTRCSGEGIYFAAKSGRLCGRAMAEEWARTGAVTEAGLKRGYLRPWDDEYLLMFRFLDLLQQVFYGGNAGREALVEMCADEYVQRRTFESYLYKRMVPGEPWGDLRLLWRTVASMVRCGVIGREVERLRRLELQA

SEQ ID NO: 91196 - protein, 123 aa, Setaria italica
  Transcript Sequence Number=SeqID_25222
  Gene Ontology: Mol. function=manganese ion binding; Cellular component=nucleus; Biological process=DNA repair
  Homolog annotation: Hit_ID=Q75LI2; Match level="QueryCoverage=99%, HitCoverage=29%, E-value=3e-57, Identity=86%"; Hit description=Flap endonuclease 1b
  Pfam annotation: Domain name=XPG_N; Domain location=1-108; Score =146.5; E_value=8.1e-41; Accession=PF00752.9; Description=XPG N -terminal domain
MGIKGLTKLLAEHAPRAAVQRRVEDYRGRVISVDASLSIYQFLIVVGRKGSELLTNEAGEVTSHLQGMLNRTVRMLEAGIKPVFVFDGEPPEMKKKELAKRSLKRNDATKDLNRAMEIGDEDS

SEQ ID NO: 91197 - protein, 138 aa, Setaria italica
  Transcript Sequence Number=SeqID_25223
  Gene Ontology: Mol. function=protein serine/threonine kinase activity; Cellular component=integral to membrane; Biological process=protein amino acid phosphorylation
  Homolog annotation: Hit_ID=B9RAX9; Match level="QueryCoverage=98%, HitCoverage=12%, E-value=1e-48, Identity=64%"; Hit description =Receptor protein kinase, putative
DFGLARFADEGANSSPPPFAGSYGYIACLSGCMTKITTKSDVYSFGVVLLEMITGRRPLDPSFGEGQSVVQWVRDHLCRKREPMEVIDARLQGRPDAQVQEMLQALGIALLCASPRPEDRPMMKDVAALLRGIQHDDG

SEQ ID NO: 91198 - protein, 58 aa, Setaria italica
  Transcript Sequence Number=SeqID_25224
  Gene Ontology: Mol. function=RNA binding
MEAYQSAPMELRSHCNLRYGWHATPISPTASFERVRSLISVYGQQAHPRRQTYQSAEM

SEQ ID NO: 91199 - protein, 45 aa, Setaria italica
  Transcript Sequence Number=SeqID_25225
  Homolog annotation: Hit_ID=B6U6J6; Match level="QueryCoverage=97%, HitCoverage=8%, E-value=2e-11, Identity=75%"; Hit description=ABI3 -interacting protein 2
HKKGKQLEAVKFIQALNVVHKYPLLPVLRSYISAAALAGKMIQIR

SEQ ID NO: 91200 - protein, 227 aa, Setaria italica
  Transcript Sequence Number=SeqID_25226
  Gene Ontology: Mol. function=oxidoreductase activity; Cellular component=chloroplast; Biological process=cell redox homeostasis
  Homolog annotation: Hit_ID=Q7F8S5; Match level="QueryCoverage=70%, HitCoverage=71%, E-value=7e-77, Identity=87%"; Hit description =Peroxiredoxin-2E-2, chloroplastic
  Pfam annotation: Domain name=AhpC-TSA; Domain location=67-206; Score =78.6; E_value=2.2e-20; Accession=PF00578.13; Description=AhpCTSA family
  Pfam annotation: Domain name=Redoxin; Domain location=66-226; Score =193.1; E_value=7.7e-55; Accession=PF08534.2; Description=Redoxin
  Pfam module annotation: Pfam domain module=AhpC-TSA::Redoxin; Domain location=67-206::66-226
  Subcellular localization annotation: CTP_CleavageSite=44; ConfidenceScore=5.94e-01
MAATTTASLSTLSPAAGRRFALSSTSLSFSSHRLTTTPAVLRLRAAAASRTPTRRRASSRIAATIAVGDKLPDATLSYFDPADGELKTVTVSDLTAGKKAILFAVPGAFTPTCSQKHLPGFAEKAGELRAKGVETLACVSVNDAFVMKAWKEALGVGDDVMMLSDGNLELTRALGVEMDLSDKPVGLGVRSRRYALLAEDGVVKVLNLEEGGAFTSSSAEDMLQALG

SEQ ID NO: 91201 - protein, 104 aa, Setaria italica
  Transcript Sequence Number=SeqID_25227
WGRGPFYNPCLPLRVQDGTRGKEAGCGTLSCGVGWVFFAGTSTYALGLFMWTRTMPGDSAPYYPWKGKVLRLIHDCTHFIRTDIIVKPTKLVSCLQIAVSLYRM

SEQ ID NO: 91202 - protein, 85 aa, Setaria italica
  Transcript Sequence Number=SeqID_25228
KTIPLDPEFRHYIRGAMERYILLLRFPEHLSSAGVRVSSSTEVADECFSMDVRTFQLERVCQLKHHIPRAYIYTNFPPLLSPQSI

SEQ ID NO: 91203 - protein, 73 aa, Setaria italica
  Transcript Sequence Number=SeqID_25229
ARCQVLQLVYNHNGAACGINISLLSSITSSTLAQPLLASPPTILAPTMMIHGLQHSFFFTKSQQGDKESPCER

SEQ ID NO: 91204 - protein, 391 aa, Setaria italica
  misc_feature (143)..(143): Xaa can be any naturally occurring amino acid
  Transcript Sequence Number=SeqID_25230
DQVKMRDAAPADRKRSPLRGRTTPEQSENPHAKVIDHHRWPAMMGGRVSASAMSKSMDLTDKISRSALPSVPSRGVSPKRTTMSSAANALSRSIDLADVVDRLVSSSVSSRGGSPRRSPASSGANDVPKSIGVGKDLKPASLXISLRRASAITKAASDGTRNLSESMDLTENDNSTLSSSVSSPSISPSASVSSVSNAASQTTAKSSERLNGPVSNLSSSRGLSPRRTTSGGIGTLSKSVDFPEKDRRPASSRGVSPRRRLASDGVNDIARNMDFAEKDNRVVSSSIPSRGVSPRRRLASDGVDTISRSIDFSGKDIRPSTSSSASRGISPRRRLASDGISAVTKGMDFSDNANRPSTSSAASRGISPRPQLASDGIATVYQKPQILLIDM

SEQ ID NO: 91205 - protein, 105 aa, Setaria italica
  Transcript Sequence Number=SeqID_25231
  Homolog annotation: Hit_ID=B6T9X1; Match level="QueryCoverage=100%, HitCoverage=24%, E-value=5e-36, Identity=75%"; Hit description =Cyclin B2
MAGRMADENRRPAAGKPVPGVAREMGNRRALTDIKNLVGAAPYPCAVAKKPMLQKNGRDQKKPALAASRPMTRKFAASLASKGQPERQATTIDPGFGADHNKEPV

SEQ ID NO: 91206 - protein, 101 aa, Setaria italica
  Transcript Sequence Number=SeqID_25232
  Gene Ontology: Mol. function=metal ion transmembrane transporter activity; Cellular component=integral to membrane; Biological process=metal ion transport
  Homolog annotation: Hit_ID=C1J0N2; Match level="QueryCoverage=100%, HitCoverage=28%, E-value=1e-44, Identity=87%"; Hit description=Metal ion transporter ZIP8
LKIIAIFSILVSSAVGCAIPSLGRKIPALRPDTDLFFAVKAFAAGVILATAFVHILPDAFEKLGSPCLVDGPWQKFPFAGFVAMLAAIATLVVDTIATGYF

SEQ ID NO: 91207 - protein, 79 aa, Setaria italica
  misc_feature (72)..(72): Xaa can be any naturally occurring amino acid
  Transcript Sequence Number=SeqID_25233
  Gene Ontology: Mol. function=protein serine/threonine kinase activity; Biological process=protein amino acid phosphorylation
  Homolog annotation: Hit_ID=B9A1H1; Match level="QueryCoverage=89%, HitCoverage=6%, E-value=2e-09, Identity=55%"; Hit description =Putative LRR-kinase protein
  Pfam annotation: Domain name=LRRNT_2; Domain location=12-52; Score =57.5; E_value=5.1e-14; Accession=PF08263.4; Description=Leucine rich repeat N-terminal domain
SQRPPGERTAVASDEASALLAFKAELAGSGSGMLASWNGTAGVCSWEGVACTSGQVVALSLPSYGFAGALSXPAIGNLT

SEQ ID NO: 91208 - protein, 131 aa, Setaria italica
  Transcript Sequence Number=SeqID_25234
  Gene Ontology: Mol. function=metal ion binding
  Homolog annotation: Hit_ID=Q53PH4; Match level="QueryCoverage=100%, HitCoverage=32%, E-value=6e-50, Identity=65%"; Hit description=Zinc finger, C3HC4 type family protein, expressed
RSSSKSRDKSQCAACPQCRTAVQSVGRNHFLHNIEEAILQTFSSLQRSDEEIALLESYASVKSNIVLGKQKNQSRKRPFPRSTDNIDNADLPCPQCRGEFGGFRCSPGAAHLQCDGCGGMMPARSNVNIPQ

SEQ ID NO: 91209 - protein, 69 aa, Setaria italica
  Transcript Sequence Number=SeqID_25235
MAGLQRSSETFRRSGSSGLVWDDKNFSGEIKPAGDDAEPRAAVERSRSAGHAHGHGGYRTTGRVPPALD

SEQ ID NO: 91210 - protein, 180 aa, Setaria italica
  Transcript Sequence Number=SeqID_25236
  Gene Ontology: Mol. function=triacylglycerol lipase activity; Biological process=lipid metabolic process
  Homolog annotation: Hit_ID=Q2R051; Match level="QueryCoverage=92%, HitCoverage=24%, E-value=2e-36, Identity=54%"; Hit description =Lipase family protein
QKHSALSCWSSVAANRQTLESLMNPTQAMSIPALMSIYAGTDQNTRESASCSLEELSHPRSDAEQTNQKEKAAGQEHMKQILKSPRSWPVPSPCHQLYPPGRIMHMVVLPCPEEQEGTGKQHDQDEVVAIYQTPRSMYGKIRLARSMIRDHYMPRYIETMEMLIDKLAEDDDDDTDDQLG

SEQ ID NO: 91211 - protein, 112 aa, Setaria italica
  Transcript Sequence Number=SeqID_25237
  Gene Ontology: Mol. function=exonuclease activity; Cellular component= intracellular; Biological process=DNA replication
  Homolog annotation: Hit_ID=B6TZF8; Match level="QueryCoverage=100%, HitCoverage=35%, E-value=4e-53, Identity=91%"; Hit description=DNA polymerase III subunit epsilon
AHNGRSFDVPFLFFEFRRCKVEMPGDWLFVDTLPIARQLVDSEGSKLSSVSLEKLRERYKIPLTGSAHRAMQDVTTLCYVLQKLTFELKLTVPQLLEKSFRATDLPATRSDK

SEQ ID NO: 91212 - protein, 130 aa, Setaria italica
  Transcript Sequence Number=SeqID_25238
  Gene Ontology: Mol. function=structural constituent of ribosome; Cellular component=ribonucleoprotein complex; Biological process =translation
  Homolog annotation: Hit_ID=Q9LX88; Match level="QueryCoverage=100%, HitCoverage=100%, E-value=2e-68, Identity=96%"; Hit description=40S ribosomal protein S15a-4
  Pfam annotation: Domain name=Ribosomal_S8; Domain location=5-130; Score=218.0; E_value=2.4e-62; Accession=PF00410.11; Description =Ribosomal protein S8
MVRVSVLNDALKSMYNAEKRGKRQVMIRPSSKVIIKFLMVMQKHGYIGEFEYVDDHRAGKIVVELNGRLNKCGVISPRFDVGVKEIEGWTARLLPSRQFGYIVLTTSAGIMDHEEARRKNVGGKVLGFFY

SEQ ID NO: 91213 - protein, 323 aa, Setaria italica
  misc_feature (59)..(59): Xaa can be any naturally occurring amino acid
  misc_feature (233)..(233): Xaa can be any naturally occurring amino acid
  Transcript Sequence Number=SeqID_25239
  Gene Ontology: Mol. function=hydrolase activity; Cellular component =intracellular
  Homolog annotation: Hit_ID=Q7F447; Match level="QueryCoverage=99%, HitCoverage=43%, E-value=1e-162, Identity=84%"; Hit description =P0696G06.7 protein
DLRGNHDSFGVPAPGDNYDFYQKYSINAKLRRQGRVQSITLENNGRKHLFVGFDSTMEXGLRGPTNLFGHPTDKQLIELDQALSQWDTDFDKAPVTKIAFGHFPLSFSALTESGKSIKDVFLKQSLAAYLCGHLHTRFGKNLKRYYHRAVQESSFSEHYYQFNMHQGYAIQSNKENCSEEAAHIEEFWEWEMGDWRKSRSMRILAIDDGYVSYTDIDFRLGSKSIIILPTFPXFDSRFMQRASASRDFKCHIRGPSTFDTARALVFSKHEIVSVSVKIYDSRPGTLEVVFDSEMKRVDSNETRGHMYIVPWNWRAFEDPSFRV

SEQ ID NO: 91214 - protein, 107 aa, Setaria italica
  Transcript Sequence Number=SeqID_25240
  Gene Ontology: Mol. function=DNA binding; Cellular component =mitochondrion
  Homolog annotation: Hit_ID=B9SPI6; Match level="QueryCoverage=89%, HitCoverage=19%, E-value=4e-14, Identity=37%"; Hit description =Pentatricopeptide repeat-containing protein, putative
  Pfam annotation: Domain name=PPR; Domain location=39-73; Score=27.5; E_value=5.4e-05; Accession=PF01535.12; Description=PPR repeat
  Pfam annotation: Domain name=PPR; Domain location=4-38; Score=2.7; E _value=4.3; Accession=PF01535.12; Description=PPR repeat
  Pfam module annotation: Pfam domain module=PPR::PPR; Domain location =39-73::4-38
NQTTSYLGMLQALYKLNDIDRMKQIYVDWESNYENYDVRLTNMMIRGHLKLGMTDEAESLWEKAKEKGAEFDSKTCELFLDHYMGKGDMNLALNWVENMVKLPKKAG

SEQ ID NO: 91215 - protein, 80 aa, Setaria italica
  Transcript Sequence Number=SeqID_25241
  Gene Ontology: Mol. function=binding; Cellular component=integral to membrane; Biological process=transport
  Homolog annotation: Hit_ID=Q2R5V9; Match level="QueryCoverage=68%, HitCoverage=17%, E-value=3e-23, Identity=90%"; Hit description =Mitochondrial carrier protein, expressed
  Pfam annotation: Domain name=Mito_carr; Domain location=6-80; Score =60.1; E_value=8.2e-15; Accession=PF00153.19; Description =Mitochondrial carrier protein
MAAAGDAAKEYVAGAAAGVAQVVVGHPFDTVKVKLQAHNTTAHGKVYKNAFHCTSRILLEEGIRGLYKGASSSFIGIAVE

SEQ ID NO: 91216 - protein, 87 aa, Setaria italica
  Transcript Sequence Number=SeqID_25242
RWDPAIILTAEHRATLLLLEFGPTPESQISLCWGFCLPLYVSVACQIPRSCQIVWLEHILVVVYWTRNTLNKMLYTQESSQICTTEV

SEQ ID NO: 91217 - protein, 124 aa, Setaria italica
  Transcript Sequence Number=SeqID_25243
  Gene Ontology: Biological process=pollen maturation
  Homolog annotation: Hit_ID=Q9ZVT9; Match level="QueryCoverage=91%, HitCoverage=11%, E-value=7e-34, Identity=56%"; Hit description =F15K9.2 protein
GTEILFRIMPGPELDSQQQTSHLVISWRMNFLQSTMIKSMIENGARQGLEQNYSQFSDLLSQKIKPIDVEGSGSDKEQVLASLQGGQESDWKIAFLYFCNFGVLSSLFVSIYIVLHCFASEFKF

SEQ ID NO: 91218 - protein, 136 aa, Setaria italica
  Transcript Sequence Number=SeqID_25244
  Homolog annotation: Hit_ID=B9R9B2; Match level="QueryCoverage=99%, HitCoverage=26%, E-value=5e-55, Identity=70%"; Hit description=KDEL motif-containing protein 1, putative
  Pfam annotation: Domain name=DUF821; Domain location=1-136; Score= -24.6; E_value=3.5e-20; Accession=PF05686.4; Description=Arabidopsis thaliana protein of unknown function (DUF821)
RKELNSGNRRVKWMDREPYAYWKGNPDVAAIRQELVKCNVSSEHEWNARIYKQDWLKEIKAGYKQSDLASQCTHRYKIYIEGSAWSVSEKYILACDSMTLVVTPKYYDFLFKVLMPMQHYWPVQDDNKCNSIKYAV

SEQ ID NO: 91219 - protein, 89 aa, Setaria italica
  Transcript Sequence Number=SeqID_25245
  Gene Ontology: Mol. function=electron carrier activity; Biological process=response to oxidative stress
  Homolog annotation: Hit_ID=B6SMR2; Match level="QueryCoverage=96%, HitCoverage=25%, E-value=1e-18, Identity=52%"; Hit description =Peroxidase 52
SGAHSVGTARCLHYRERVYGYDGQGGADDIDPSFAEIRRQTCQAGGDDAMAPFDEQTPMRFDNAYYKDLIARRGLLTSDQELYGCGRPR

SEQ ID NO: 91220 - protein, 53 aa, Setaria italica
  Transcript Sequence Number=SeqID_25246
DHSERPTKTWEKNLMLKQQQEHIIYQLVIDDDDDDDRSNQTTSANGFFFSLEI

SEQ ID NO: 91221 - protein, 35 aa, Setaria italica
  Transcript Sequence Number=SeqID_25247
DTFHGYVDDLISIAEVNGKDFTGLHSSSLNRHLIM

SEQ ID NO: 91222 - protein, 98 aa, Setaria italica
  Transcript Sequence Number=SeqID_25248
LDLIGSVELSAPFCDSCPLPDRPGHRIEPKPEPPGQLQFQSRFLLKNAQKNASLAPPTSNAELSVRSPTCLTAMDSIRSIGVSSPSSLSPPRGAGPSH

SEQ ID NO: 91223 - protein, 381 aa, Setaria italica
  Transcript Sequence Number=SeqID_25249
  Gene Ontology: Cellular component=anchored to membrane
  Homolog annotation: Hit_ID=Q5YLM2; Match level="QueryCoverage=99%, HitCoverage=56%, E-value=0.0, Identity=90%"; Hit description =Roothairless 3
  Pfam annotation: Domain name=COBRA; Domain location=1-138; Score =200.9; E_value=3.5e-57; Accession=PF04833.7; Description=COBRA-like protein
GCIYGAAAQYYQSLDFSQVLNCDRKPVILDLPLSRYNDTQIGKIDNCCRNGTILPKSMDEKQSKSAFQMQVFKMPPDLNRTKLFPPANFKIAGASSLNPDYTCGQPVPVSPTAFPDPSGLDSTTLAVATWQVVCNITRTKGAKPKCCVTFSAYYNDSVIPCNTCACGCPANRRGQTCSTTAQSMLLPPEALLVPFDNRTQKAMAWAELKHYIVPRPMPCGDFCGVSINWHVSTDYNKGWSARVTLFNWEDVDMANWFAAIVMDKAYDGFEKAYSFNGTAVGKNTIFMQGLEGLNYLVKQTNMSGSDYLVPGKQQSVLSFTKKLTPGINIVSGDGFPTKVFFNGDECAMPQRIPKSSSGFRTRLSSALALVLVLAASAFLIA

SEQ ID NO: 91224 - protein, 72 aa, Setaria italica
  Transcript Sequence Number=SeqID_25250
  Subcellular localization annotation: CTP_CleavageSite=39; ConfidenceScore=5.25e-01
PCMIFPSLIAPTGTDLSSAGASVCTSTSDTIALSSLQLTASRVSKSDHREASDGTYRHGTPPRHRPAALRRR

SEQ ID NO: 91225 - protein, 349 aa, Setaria italica
  misc_feature (348)..(348): Xaa can be any naturally occurring amino acid
  Transcript Sequence Number=SeqID_25251
  Gene Ontology: Mol. function=ATP-dependent helicase activity
  Homolog annotation: Hit_ID=B6SRZ5; Match level="QueryCoverage=100%, HitCoverage=59%, E-value=1e-178, Identity=90%"; Hit description =EMB1586
  Pfam annotation: Domain name=DEAD; Domain location=165-335; Score =145.9; E_value=1.2e-40; Accession=PF00270.21; Description=DEADDEAH box helicase
  Pfam annotation: Domain name=ResIII; Domain location=161-282; Score= -27.7; E_value=0.011; Accession=PF04851.7; Description=Type III restriction enzyme, res subunit
  Pfam module annotation: Pfam domain module=DEAD::ResIII; Domain location=165-335::161-282
MRLSIGQVHRNVLALASSRSCFVLGDRLSFRMLSQQRAAGFHQTAWRGSQIVEDRGGPLTLASLEVQNRVEYGKKEKMARTGGPKPSSRGSSLNVKPRVSSSLNMKPRVSSLNVKPAKSALPKSTGIKKTLKVDEALFSAKSFEELGLPPLLVDRLNKEGLTAPTEVQSAAIPIIAQKHDVVIQSYTGSGKTLAYLLPILSEIGPLKRPMEQDNSEKRSGIEAVIVAPSRELGMQIVREVEKILGPNDKRLVQQLVGGANRSRQEEALKKNKPIIVVGTPGRISEISAAGKLHTHGCRFLVLDEVDQLLSFNYREDMHRILEHVGKKPGTTSRDILGPLARRSERQTXL

SEQ ID NO: 91226 - protein, 241 aa, Setaria italica
  Transcript Sequence Number=SeqID_25252
  Gene Ontology: Mol. function=electron carrier activity; Cellular component=extracellular region; Biological process=response to oxidative stress
  Homolog annotation: Hit_ID=B4FG25; Match level="QueryCoverage=100%, HitCoverage=62%, E-value=3e-65, Identity=55%"; Hit description =Peroxidase 12
  Pfam annotation: Domain name=peroxidase; Domain location=1-208; Score= 184.8; E_value=2.5e-52; Accession=PF00141.15; Description=Peroxidase
SILLDGWNSEKHKIQNQGLQQQALDLIERIRGTVHDKCGATVSCADILALATTHAVSQSGGPWISMPMGRRDSLEPAPGWAVETLPRPDADVNTLITSFRNKGLGGDDKGNPTDLVALSGAHTVGKARCGSFRDRIDRRSPNDQFANRLAGFCGNDDNRQQNLDVRTPDTFDNMYFEDLMKREGVLTTDQGLLFDGRTRWLVDGFAKNKGWFFGQFAKSMEKMSKLGMGQGGEIRSNCFRR

SEQ ID NO: 91227 - protein, 406 aa, Setaria italica
  Transcript Sequence Number=SeqID_25253
GRTGCDSAAVSRRHEQRSIDNANADISTSTVVLPRMDFADGNISSSFALDAKHKESSRVRNEVMRTCARVRSSGAAVQTGAERLRKRATPTRPDISGSVSSGSLADSMRPVGCSRESASAGRRVAQSGSGPRRESVGRSIAGQGRTTGRDVINRSDLASTSRISSTGSGPKGGSRKVGRDAVANNRDDRNAVAFTSRSAPKPVARASSPSKVLKSGCPSRLAHDTTHARMPAPDIKYMGASHSVMATSEKNDFNRLLKVKMNELGLFDRIEFTSSDEPSGKLTAPVLQELISALTNDMSTSISQSSNYSDASVPSSCNRNIDCIDPSCYVFSNDQSPDFQKRYQSEQDVDSSATSLNNEPNQPSPTSVLEASFSNDASSLGSPVEKNEGKDLFVSTENKMEDLVLI

SEQ ID NO: 91228 - protein, 55 aa, Setaria italica
  misc_feature (33)..(33): Xaa can be any naturally occurring amino acid
  Transcript Sequence Number=SeqID_25254
  Gene Ontology: Mol. function=DNA-directed RNA polymerase activity; Cellular component=RNA polymerase complex; Biological process =transcription, DNA-dependent
  Homolog annotation: Hit_ID=A2Q3E0; Match level="QueryCoverage=89%, HitCoverage=33%, E-value=1e-18, Identity=95%"; Hit description=DNA -directed RNA polymerase, 14 to 18 kDa subunit
AHQLPSPLEIAMKELRARKIPFTIRRYLPDGSXYEDWGVDELIVEDSWKRQVGGD

SEQ ID NO: 91229 - protein, 143 aa, Setaria italica
  Transcript Sequence Number=SeqID_25255
  Gene Ontology: Mol. function=DNA-directed RNA polymerase activity; Cellular component=RNA polymerase complex; Biological process =transcription, DNA-dependent
  Homolog annotation: Hit_ID=B9R9F9; Match level="QueryCoverage=58%, HitCoverage=67%, E-value=1e-41, Identity=98%"; Hit description=DNA -directed RNA polymerase subunit rpb6, putative
  Pfam annotation: Domain name=RNA_pol_Rpb6; Domain location=62-115; Score=87.0; E_value=6.6e-23; Accession=PF01192.14; Description=RNA polymerase Rpb6
MADDDYNEMDMGYEDEPPEPEIEEGAEEELENNNEDTPDDVVGAEGEEKEQEKAKSERKTSKYMTKYERARILGTRALQISMNAPVMVELEGETDPLEIAMKELRARKIPFTIRRYLPDGSYEDWGVDELIVEDSWKRQVGGD

SEQ ID NO: 91230 - protein, 79 aa, Setaria italica
  Transcript Sequence Number=SeqID_25256
  Gene Ontology: Mol. function=DNA-3-methyladenine glycosylase I activity; Biological process=base-excision repair
  Homolog annotation: Hit_ID=Q01I90; Match level="QueryCoverage=100%, HitCoverage=20%, E-value=6e-24, Identity=63%"; Hit description =H0311C03.4 protein
  Pfam annotation: Domain name=Adenine_glyco; Domain location=1-78; Score=-16.1; E_value=7.2e-11; Accession=PF03352.5; Description =Methyladenine glycosylase
AFHDQEWGVPVHDDKKLFEMLTLSGALAEMAWPAILSKRDTFREVFMDFNPVLVAKLNEKKFLAPGSPASSLLSEHRLR

SEQ ID NO: 91231 - protein, 82 aa, Setaria italica
  Transcript Sequence Number=SeqID_25257
LGIVVALIVTTHVAINSTVLGYVIGSILFALGAASFGYHARRLIIKRGMNLPDTKIALIITCGAPKVTFTRDLIVWHTDGVN

SEQ ID NO: 91232 - protein, 107 aa, Setaria italica
  misc_feature (12)..(12): Xaa can be any naturally occurring amino acid
  Transcript Sequence Number=SeqID_25258
  Pfam annotation: Domain name=WD40; Domain location=13-52; Score=14.0; E_value=0.61; Accession=PF00400.24; Description=WD domain, G-beta repeat
  Pfam annotation: Domain name=WD40; Domain location=58-96; Score=11.4; E_value=1.8; Accession=PF00400.24; Description=WD domain, G-beta repeat
  Pfam module annotation: Pfam domain module=WD40::WD40; Domain location=13-52::58-96
SAPTEILQKGKXSKFPTLYSESRKSLTDIAFTSDDKSWIFASGLDGAVYMWDRRSSKTHCLELVAPPESQFNTVKLSVDNRTVFGATKNGTIHVWDIRGGRASAAFQ

SEQ ID NO: 91233 - protein, 50 aa, Setaria italica
  Transcript Sequence Number=SeqID_25259
SEALNMIEHLFLRAQRPLKNKAQHERSASASSPPFRHYPCGRGRTTVAAP

SEQ ID NO: 91234 - protein, 74 aa, Setaria italica
  Transcript Sequence Number=SeqID_25260
  Gene Ontology: Mol. function=iron ion binding; Cellular component =mitochondrion; Biological process=cellular iron ion homeostasis
  Homolog annotation: Hit_ID=B6TSR5; Match level="QueryCoverage=100%, HitCoverage=36%, E-value=4e-35, Identity=93%"; Hit description =Frataxin
  Pfam annotation: Domain name=Frataxin_Cyay; Domain location=1-74; Score=75.7; E_value=1.7e-19; Accession=PF01491.8; Description =Frataxin-like domain
NQVLTLRLGDLGTYVVNKQAPNRQIWLSSPVSGPSRFDWDASTDGWIYKRTGANLVQLLEKEIGELCGTPVELS

SEQ ID NO: 91235 - protein, 104 aa, Setaria italica
  Transcript Sequence Number=SeqID_25261
  Homolog annotation: Hit_ID=Q7XUK8; Match level="QueryCoverage=95%, HitCoverage=24%, E-value=1e-36, Identity=75%"; Hit description =OSJNBa0067K08.21 protein
  Pfam annotation: Domain name=PH_2; Domain location=1-94; Score=-3.7; E_value=0.0027; Accession=PF08458.2; Description=Plant pleckstrin homology-like region
KLHTVSAAPNKRGEIVLRIKKTNLVMAFSHAKESVIRDVRPCAPEKPSPDEGATYPVEVSTSKGKVELRADDYGVYKRWVATLSHMLVMSTAVVSARHEPPRRD

SEQ ID NO: 91236 - protein, 245 aa, Setaria italica
  Transcript Sequence Number=SeqID_25262
  Gene Ontology: Mol. function=tRNA dihydrouridine synthase activity; Biological process=metabolic process
  Homolog annotation: Hit_ID=B6SQP1; Match level="QueryCoverage=96%, HitCoverage=97%, E-value=2e-90, Identity=69%"; Hit description=FAD binding protein
GIDLSYYRPPPPDAAGEDESTCRGIFVEFMTKVARFEELAESGNRLLVRFHQELEYFRRPQIPTESDVMKQILKSNCTHRMKSYLEAGCRLHSQNISNINQLRSCEDGLKDHINKVKALLEELECLVEDVYGITLTASLSALEVSDCHSIDNKLTTESCIIEMEGVSTPQEEDKNTDQLDSDVSFVTVMVIVRNMLKLDYTMQEKIVNALSLKTPSSELQGYRLMWDLRPFIEDNVMHLAWKMCP

SEQ ID NO: 91237 - protein, 84 aa, Setaria italica
  Transcript Sequence Number=SeqID_25263
FMKSYTINTLYILQFCDFGPLKLTQLPAERKKNHLHRLQFRLIATTEITQPSYTKFVTEPQKQIITLLITSQLLCVCSADGFSG

SEQ ID NO: 91238 - protein, 52 aa, Setaria italica
  Transcript Sequence Number=SeqID_25264
MVQRTYYQTRHIPLGKLVPSSPVSDVSTKKLISKRFDEQYVTQFSLSIYGHK

SEQ ID NO: 91239 - protein, 38 aa, Setaria italica
  Transcript Sequence Number=SeqID_25265
MGGSEDGGSCNLLQVLFEGAAAGGAAGVVVETALYPIE

SEQ ID NO: 91240 - protein, 86 aa, Setaria italica
  Transcript Sequence Number=SeqID_25266
WDQEEFDIISRQTRISLHFQAGKKQMLRHAFTYHWRLWSIPEIKDCLEEAGFKSIHVWIREMPNTQSNGNAKEYNANRDVKYEESQ

SEQ ID NO: 91241 - protein, 71 aa, Setaria italica
  Transcript Sequence Number=SeqID_25267
TDSEPSSLRIRRHRPRPLSADQRKGATAAAPWTAKTARAPLPARIDPRWLQKLSRLSSLLGSSLRKNRYMT

SEQ ID NO: 91242 - protein, 64 aa, Setaria italica
  Transcript Sequence Number=SeqID_25268
PSSCSTTVLEVAGQLRPWRERPDGVPSTLCFTQATTFGRRYPALLVYIMHMEFGQLTIISNKIQ

SEQ ID NO: 91243 - protein, 120 aa, Setaria italica
  misc_feature (70)..(70): Xaa can be any naturally occurring amino acid
  Transcript Sequence Number=SeqID_25269
  Gene Ontology: Mol. function=nucleotide binding; Biological process =defense response
  Homolog annotation: Hit_ID=Q84KC6; Match level="QueryCoverage=75%, HitCoverage=7%, E-value=8e-15, Identity=46%"; Hit description=NBS -LRR disease resistance protein homologue
MSGGAEMIAGAVVQRVAGMLGQSAWERVELLQRFSDDFEEMKGTLITVQAVMADAENRSQVSESVRLWLXKLKSAAYNIKDMIDELEANTKIWRSSTCPTEHHRVALSSVLADRPLQEPL

SEQ ID NO: 91244 - protein, 104 aa, Setaria italica
  Transcript Sequence Number=SeqID_25270
MFDVIRHYRLLEMVAGRGVEFHSNALNLRRTYSEFRPVRGDGECFYRSFIFSYLEQVLDRQDTHEEHRLLVAVKEVARQHERLGWASEFSRSHKDVHHCFTVVA

SEQ ID NO: 91245 - protein, 103 aa, Setaria italica
  misc_feature (52)..(52): Xaa can be any naturally occurring amino acid
  misc_feature (76)..(76): Xaa can be any naturally occurring amino acid
  Transcript Sequence Number=SeqID_25271
  Gene Ontology: Mol. function=ARF GTPase activator activity; Biological process=regulation of ARF GTPase activity
ITSYLQEGASTEQMPLNPFELPFDTHSGTPDLFMDVSSLQEALPNPESTSFXDGLPETWFSSSSCAFVPSASHGGXPCLVEQAPNSPLRNIPVGTVSTGNPFA

SEQ ID NO: 91246 - protein, 164 aa, Setaria italica
  Transcript Sequence Number=SeqID_25272
  Gene Ontology: Mol. function=ARF GTPase activator activity; Biological process=regulation of ARF GTPase activity
GAVSHDQLCAQRRIDEHSNVVSISLSTSNPFMCSVASKGSQDDDPAQVFMDGLSPNTLLSASAEPSLEGASTEQMPLNPFELPFDTHSGTPDLFMDVSSLQEALPNPDLPAFLDGLPETWFSSSSCAFVPSASHGGLPCLVEQAPNSPLRNIPVGTVSTGNPFA

SEQ ID NO: 91247 - protein, 59 aa, Setaria italica
  misc_feature (13)..(13): Xaa can be any naturally occurring amino acid
  Transcript Sequence Number=SeqID_25273
  Gene Ontology: Mol. function=protein binding
  Homolog annotation: Hit_ID=B6TKJ6; Match level="QueryCoverage=100%, HitCoverage=12%, E-value=1e-20, Identity=83%"; Hit description =Receptor-like protein kinase
QLRQLKEGGAVVXSLADNCLPRCPHKFFFCQGAPQKDHATCPPKCEASVHRQDTLLRMP

SEQ ID NO: 91248 - protein, 82 aa, Setaria italica
  Transcript Sequence Number=SeqID_25274
VGPYRSSGRPGDAWPTPCALRQQYGGTTDAALFLRLQLGNPLAHQARCESHPILRSNPLARRTRRDSPISTRVSLPPSLRCL

SEQ ID NO: 91249 - protein, 138 aa, Setaria italica
  Transcript Sequence Number=SeqID_25275
  Gene Ontology: Mol. function=electron carrier activity; Biological process=oxidation reduction
  Homolog annotation: Hit_ID=Q6Z6D6; Match level="QueryCoverage=86%, HitCoverage=21%, E-value=1e-58, Identity=85%"; Hit description =Cytochrome P450 monooxygenase
SDGCMIPRDMELLIPIMAIHHDTRFWGQDAAQFNPMRFAEGTARAGKHPLAFIPFGLGSRMCIGQNLARLEAKLTMAILLQRFEMRTSPNYIHAPTVLMLLYPQYGAPVIFRPRSAHPSDPAAQTASPAPSLTFKRFP

SEQ ID NO: 91250 - protein, 81 aa, Setaria italica
  Transcript Sequence Number=SeqID_25276
LIGRQPVVPRMKRKTPSELRGEQLKRRTSEKPANDQLPSSAAFDRSSNGLRNTEQQKISKYISTRVTEVFPVRKARNHGKE

SEQ ID NO: 91251 - protein, 198 aa, Setaria italica
  misc_feature (136)..(136): Xaa can be any naturally occurring amino acid
  Transcript Sequence Number=SeqID_25277
MAADADKRPAVDEILSYANDLAGVLRASNDNDANAQTGAAAGMLLSACRSDSDDLDLQIRECQEKIRSCKEKIDKAKAETITDDELNALQNKMEEKLQEEKQLRQELRVLHDELDNLDRQRASIEERKDAVRKESXEMQEAERMLSMCVSVTNIMPNFEDQDKISGYIVDRSGKKLEKFEFEKTTPPVEICDKLWKKI

SEQ ID NO: 91252 - protein, 59 aa, Setaria italica
  Transcript Sequence Number=SeqID_25278
  Pfam annotation: Domain name=DUF538; Domain location=1-58; Score= -14.8; E_value=0.00022; Accession=PF04398.4; Description=Protein of unknown function, DUF538
AFAEKGKLRKITGVKTKELMLWLSVVEVYVPEASPEKVTFKTGTGLSDSFDATAFALGE

SEQ ID NO: 91253 - protein, 117 aa, Setaria italica
  Transcript Sequence Number=SeqID_25279
  Subcellular localization annotation: CTP_CleavageSite=44; ConfidenceScore=5.23e-01
MASNYVDTTGEEGRFHGPHHHSASTTPTGAAASSPRTMRRSFSSASSGGHSHGGGKCVCAPPTHAGSFKCRLHRTNSQGHGHPHPSPPTSPAGGASSGAAPAQGVPPSASSRTVEAQ

SEQ ID NO: 91254 - protein, 124 aa, Setaria italica
  Transcript Sequence Number=SeqID_25280
  Subcellular localization annotation: CTP_CleavageSite=45; ConfidenceScore=5.31e-01
PCWMPSPARFATPSATPRHVVVTTRPASPMPRIWWVADLMRWMSRAKRRSAKRQHADVHGAESAAAVSQLDAAVDPDELERKAAFERLDNLGRCIADVESSGEKVFRALVNTRVSLLNILSPAF

SEQ ID NO: 91255 - protein, 180 aa, Setaria italica
  Transcript Sequence Number=SeqID_25281
GLTGVDIVHDYLKHRISPLRRRAHLSCNYTGPTDPTRDSDKDISEEDIESRLSYLLDLKKTGQKEPPKRPNVPTSLIRASVDRANQPIGLLNVLPTLRAKKKAVDELTAPRTAPRSIRKSSDNDLAPASPRRCTRQSAITRKVPPAPEIDSSEDEEIPEPEARTTINNWTSPASVPGAEI

SEQ ID NO: 91256 - protein, 95 aa, Setaria italica
  Transcript Sequence Number=SeqID_25282
AAPAPRRKAGFGFAAPELPDSSDARRHRRPHKHAPGDDEAAPPGSLTTPGGDVSPPPLGGAAPPRRKRIGILAPAWASALTGPSDARRPRPRQHP

SEQ ID NO: 91257 - protein, 234 aa, Setaria italica
  Transcript Sequence Number=SeqID_25283
  Gene Ontology: Mol. function=sequence-specific DNA binding; Cellular component=nucleus; Biological process=regulation of transcription, DNA-dependent
  Homolog annotation: Hit_ID=Q6IEQ1; Match level="QueryCoverage=100%, HitCoverage=98%, E-value=2e-75, Identity=67%"; Hit description=WRKY transcription factor 30
  Pfam annotation: Domain name=WRKY; Domain location=36-95; Score =151.8; E_value=2.1e-42; Accession=PF03106.7; Description=WRKY DNA -binding domain
AAANTTTNAIDMAAMASRAVREPRIVVQTTSEVDILDDGYRWRKYGQKVVKGNPNPRSYYKCTYAGCTVRKHVERASNDLKSVITTYEGKHNHEVPAARNSSGHPNSGSNAAPQGSNLHRRPEPAQPSIPQLNAAAAYGSLGLPPQLSAASGGFSFGLLPPGMAVPVPSLGTFMPAPIPGHPPTMQGCTGLVVPRGEVKVKVNLEEQSRLQVANGNAMAAYQQFMGRLPQGPQM

SEQ ID NO: 91258 - protein, 121 aa, Setaria italica
  Transcript Sequence Number=SeqID_25284
  Gene Ontology: Mol. function=transporter activity; Cellular component= integral to membrane; Biological process=transport
  Homolog annotation: Hit_ID=B6U4R9; Match level="QueryCoverage=97%, HitCoverage=24%, E-value=3e-27, Identity=50%"; Hit description =Synaptic vesicle 2-related protein
SKTSGIVAFQALWSYDLLQSTFLLWFLYLANYFAYYGVILLTSELSNGKRRCTSARTHLMQPNSINLYRDVLLTSLAEFPGLLLAALLVDRIGRKTSMGGMLFMCGAFLAPLSVQLGEGLV

SEQ ID NO: 91259 - protein, 212 aa, Setaria italica
  Transcript Sequence Number=SeqID_25285
  Gene Ontology: Mol. function=enzyme activator activity; Cellular component=anaphase-promoting complex; Biological process=positive regulation of ubiquitin-protein ligase activity during mitotic cell cycle
  Homolog annotation: Hit_ID=B6T9C7; Match level="QueryCoverage=100%, HitCoverage=55%, E-value=1e-119, Identity=67%"; Hit description =Fizzy-related protein
  Pfam annotation: Domain name=WD40; Domain location=149-187; Score =34.9; E_value=3.3e-07; Accession=PF00400.24; Description=WD domain, G-beta repeat
  Pfam annotation: Domain name=WD40; Domain location=19-57; Score=37.7; E_value=4.7e-08; Accession=PF00400.24; Description=WD domain, G-beta repeat
  Pfam annotation: Domain name=WD40; Domain location=61-102; Score =27.7; E_value=4.8e-05; Accession=PF00400.24; Description=WD domain, G-beta repeat
  Pfam annotation: Domain name=eIF2A; Domain location=29-188; Score= -103.0; E_value=0.0096; Accession=PF08662.3; Description=Eukaryotic translation initiation factor eIF
  Pfam module annotation: Pfam domain module=WD40::WD40::WD40::eIF2A; Domain location=149-187::19-57::61-102::29-188
LVSGSRDKNILQHDIRVPSDYISSFSGHRSEVCGLKWSHDDRELASGGNDNQLLVWNQRSQQPVLRLTEHTAAVKAIAWSPHQQGLLASGGGTADRCIRFWNTANGNLLNSIDTGSQVCNLAWCKNVNELVSTHGYSQNQIMVWKYPSMSKVATLTGHTMRVLYLASSPDGQTIVTGAGDETLRFWNIFPSVKTQTPVRDIGLWSFSRSHIR

SEQ ID NO: 91260 - protein, 94 aa, Setaria italica
  misc_feature (21)..(21): Xaa can be any naturally occurring amino acid
  misc_feature (56)..(56): Xaa can be any naturally occurring amino acid
  Transcript Sequence Number=SeqID_25286
  Subcellular localization annotation: CTP_CleavageSite=55; ConfidenceScore=5.89e-01
SGPAPHPPSPTPPDASSAPPXRPAPSSASSSAASHPRAAPMPPPPHLSGISSNASXAAARPRPPAPHPPSPTPPPAGVGTGGGDPASLTVHFLR

SEQ ID NO: 91261 - protein, 148 aa, Setaria italica
  misc_feature (112)..(112): Xaa can be any naturally occurring amino acid
  Transcript Sequence Number=SeqID_25287
  Gene Ontology: Mol. function=nucleoside-triphosphatase activity; Cellular component=cytoplasm; Biological process=protein metabolic process
  Homolog annotation: Hit_ID=Q9SYS9; Match level="QueryCoverage=99%, HitCoverage=25%, E-value=7e-77, Identity=96%"; Hit description=101 kDa heat shock protein (Fragment)
  Pfam annotation: Domain name=AAA_2; Domain location=1-134; Score =262.9; E_value=7.3e-76; Accession=PF07724.6; Description=ATPase family associated with various
  Pfam annotation: Domain name=AAA_5; Domain location=3-148; Score=9.4; E_value=0.00016; Accession=PF07728.6; Description=ATPase family associated with various
  Pfam annotation: Domain name=CobU; Domain location=4-141; Score= -80.0; E_value=0.035; Accession=PF02283.8; Description=Cobinamide kinase  cobinamide phosphate guanyltransferase
  Pfam module annotation: Pfam domain module=AAA_2::AAA_5::CobU; Domain location=1-134::3-148::4-141
TGSFLFLGPTGVGKTELAKALAEQLFDDENLLVRIDMSEYMEQHSVARLIGAPPGYVGHEEGGQLTEQVRRRPYSVILFDEVEKAHVAVFNTLLQVLDDGRLTDGQGRTGRXFRNTVIIMTSNLGAEHLLAGMVGNNSMKAARDLVML

SEQ ID NO: 91262 - protein, 165 aa, Setaria italica
  Transcript Sequence Number=SeqID_25288
  Gene Ontology: Mol. function=transporter activity; Cellular component= integral to membrane; Biological process=transport
  Homolog annotation: Hit_ID=Q6H4E9; Match level="QueryCoverage=100%, HitCoverage=28%, E-value=2e-80, Identity=84%"; Hit description =Transporter-like protein
  Subcellular localization annotation: CTP_CleavageSite=53; ConfidenceScore=5.12e-01
LSQISPLSAVPMGAVLLLGLPDDPSKGVSYAVVLFVMGLLMSWNGPATNFPIFAEIVPEKSRTSIYALDRSFESVLSSFAPPIVGLLAQRVYGYKPNDKGESVQQDRENAASLAKALYTSIAIPFILCTAIYSFLYCSYPRDRERARMQSLIESELQQMEHESTC

SEQ ID NO: 91263 - protein, 112 aa, Setaria italica
  misc_feature (9)..(9): Xaa can be any naturally occurring amino acid
  Transcript Sequence Number=SeqID_25289
  Gene Ontology: Mol. function=carbohydrate binding; Biological process= carbohydrate metabolic process
  Homolog annotation: Hit_ID=Q7XV01; Match level="QueryCoverage=77%, HitCoverage=21%, E-value=2e-32, Identity=78%"; Hit description =OSJNBa0036B21.18 protein
MARAALLLXLLCCFALACGAGAARKTVGVYELKNKKGDFSIKVTNWGATLMSVIAPDSKGNLADVVLGYDTVAGFVNGSSYFGALVGRVANRVAKGRFVLDGKAYHLYINDG

SEQ ID NO: 91264 - protein, 84 aa, Setaria italica
  Transcript Sequence Number=SeqID_25290
  Gene Ontology: Mol. function=RNA-directed DNA polymerase activity; Biological process=RNA-dependent DNA replication
  Homolog annotation: Hit_ID=Q7XU53; Match level="QueryCoverage=100%, HitCoverage=7%, E-value=2e-22, Identity=57%"; Hit description =OSJNBa0006A01.18 protein
WEEAFSSHALQALSTSLSDHCPLLLSNHGGPRRPKSFRFENYWPKLPGFTDTVKRAWTAPTAHVEPFHRLYYKLHHTAVALREW

SEQ ID NO: 91265 - protein, 84 aa, Setaria italica
  Transcript Sequence Number=SeqID_25291
  Gene Ontology: Mol. function=substrate-specific transmembrane transporter activity; Cellular component=integral to membrane; Biological process=transmembrane transport
  Homolog annotation: Hit_ID=Q7XMZ1; Match level="QueryCoverage=100%, HitCoverage=23%, E-value=1e-17, Identity=51%"; Hit description =OSJNBa0027G07.4 protein
AVEQDRRHESGAFRRLFCRREYRPHLAIAVATPVFFDLTGMIVVSIFTPLLFYTVGFTNQKAILGSIITDVVSLASIAVAGLAV

SEQ ID NO: 91266 - protein, 83 aa, Setaria italica
  Transcript Sequence Number=SeqID_25292
VDITVGQLAYHWFDLVAPLTVIAGNPLGTPFQLRADQRAINGLIGAFALNDLVSVPDGIAFATGTYVSSQSYIWVDRSLRPQS

SEQ ID NO: 91267 - protein, 76 aa, Setaria italica
  Transcript Sequence Number=SeqID_25293
  Subcellular localization annotation: CTP_CleavageSite=49; ConfidenceScore=5.38e-01
SCMRSSTHAPSSMPVATTPTGSTNSPVWKCAEYPAPTAKKPGGLAMKCSCGEKRSSWCSMSMVAGCDCDCDASDPS

SEQ ID NO: 91268 - protein, 136 aa, Setaria italica
  Transcript Sequence Number=SeqID_25294
  Gene Ontology: Mol. function=phosphopantetheine binding
AKTASSQRETERSKLKEQLEDKLQRAKQQRVEYLKQRGSPYGSIRSSSVKSGEFLSRKLARCWRRFITSRKTTVVLARAFDSLGINQQSVVSMPFEELAICIESPTVLQTTKALLDRLESRFVLSQSFSSSKPENI

SEQ ID NO: 91269 - protein, 89 aa, Setaria italica
  misc_feature (50)..(50): Xaa can be any naturally occurring amino acid
  Transcript Sequence Number=SeqID_25295
RQSQVGVVELERMLLHRMEMDSDEDDESSDASSDLFELENFAAVAPAAGXAGAYRDELPVYETTRVVLNRAIGHGHGHGYAHGRSTRVV

SEQ ID NO: 91270 - protein, 129 aa, Setaria italica
  Transcript Sequence Number=SeqID_25296
  Gene Ontology: Mol. function=unfolded protein binding; Cellular component=prefoldin complex; Biological process=protein folding
  Homolog annotation: Hit_ID=B6SIP7; Match level="QueryCoverage=100%, HitCoverage=100%, E-value=3e-64, Identity=93%"; Hit description =Prefoldin subunit 1
  Pfam annotation: Domain name=Prefoldin_2; Domain location=11-116; Score=81.9; E_value=2.3e-21; Accession=PF01920.12; Description =Prefoldin subunit
MADEANRAAFMELQARMIDTTGKIKQLQTQMRSKEGEKKRAYLTLEELRQLPEDTNTYKTVGKVFILEPKSVLLNEQEQKFNDSESAIASMQTSKEYLEKQLGEVENNIRELLQQDPGLARQILSMTVQ

SEQ ID NO: 91271 - protein, 448 aa, Setaria italica
  Transcript Sequence Number=SeqID_25297
  Gene Ontology: Mol. function=sucrose transmembrane transporter activity; Cellular component=integral to plasma membrane; Biological process=carbohydrate transport
  Homolog annotation: Hit_ID=Q0ILJ3; Match level="QueryCoverage=96%, HitCoverage=86%, E-value=0.0, Identity=84%"; Hit description=Sucrose transport protein 2
  Pfam annotation: Domain name=Sugar_tr; Domain location=4-408; Score= -184.8; E_value=0.1; Accession=PF00083.16; Description=Sugar (and other) transporter
PHAFASLVWLCGPLSGLLVQPLVGHLSDRIAPAASPLGRRRPFIAAGAASIAAAVLTVGFSADLGRLFGDDITPGTTRLGAICVYLLGFWLLDVGNNATQGPCRAFLADLTENDPRRTRIANAYFSLFMALGNILGYATGAYSGWYRIFPFTVTPSCSISCANLKSAFLLDIIILVITTYITVSSAQEPQTFGGDEAEHPGTEQEAFLWELFGSFRYFTLPVWMVLIVTALTWIGWFPFILFDTDWMGREIYRGSPDNPEQSQSYHDGVRMGSFGLMMNSVLLGFTSVVLEKLCRKWGAGLVWGVSNIIMALCFVAMLVITYVAKNMDYPPSGVPPTGIVIASLVVFTILGAPLAITYSIPYAMAASRVENLGLGQGLAMGILNLAIVIPQIIVSLGSGPWDELFGGGNAPAFAVAAGASFIGGLVAILGLPRARIASSRRRGGGTHR

SEQ ID NO: 91272 - protein, 170 aa, Setaria italica
  Transcript Sequence Number=SeqID_25298
  Gene Ontology: Mol. function=catalytic activity; Biological process =spermidine biosynthetic process
  Homolog annotation: Hit_ID=Q8VWK6; Match level="QueryCoverage=72%, HitCoverage=36%, E-value=1e-50, Identity=75%"; Hit description =Spermine synthase
  Pfam annotation: Domain name=Spermine_synth; Domain location=41-169; Score=15.2; E_value=1.8e-09; Accession=PF01564.9; Description =Sperminespermidine synthase
MVGAVQDYGRVGELNGGLETNGYESRVAMAKQQPRREEESQWFEEEIDDDLKLCYALNSVLHRGASKYQEIALIDTKHFGKALIIDGKMQSAEVDEFIYHESLIHPPLLFHPNPKTVFIMGGGEGSAAREVLRHNTVHRVVMCDIDQEVVDFCRTHLSAANRAAFASDKL

SEQ ID NO: 91273 - protein, 904 aa, Setaria italica
  Transcript Sequence Number=SeqID_25299
  Homolog annotation: Hit_ID=Q9S823; Match level="QueryCoverage=89%, HitCoverage=76%, E-value=3e-55, Identity=29%"; Hit description =F1C9.4 protein
KDSIYKDSRDLSVRVCNGEEVKDHPFNFGDPSRQLDGPPRDSTQGKSKGLMDINESLRVLAKLREATWTPSESGHHARLSYDAPRFSYDGKEPASKLREVPRLSLDIKEGHHWNREMNSRSKPSLSSSDRSSSNATGSNAALETQQEQPACKRLPSVVAKLMGLEELPERSESTASLQACKAVKESKEATLNPLSISSHNEPAPRQQRNQDSTVRNLPNSKFPVETAPWKQQERIVLPRKPPRGSKGAHGREPVASVFSDIEKRLKDLDFQQSNKDLRALKQILDSMQAKGLLENKKREEASMSKLYDGSHDDQETTNLNTRLNSNTNSMWVPEESNAESSFKSPIVIMKPSKSANLYSEVDSSVIPLGGSSDLPQLQTGNSTDKRKASTVNRTAKEQHAKWSPRVPTSQPLVSYDRKSNGRNDDSSNKQKSSSLLVTESSSRRQQLPRDSSISLQKNKNSTSPRLLQRKLDSERRARPPVPSAESNKSQRQSGDRNNLDTVSPRSKFRRKPVRAQEGDDGMPNGLNNRTRSLNQQGNDMSTRSDGSMCVASEVDIEVISNDRSTEVNVSNFEQGNGTPSGRNTQKVKTSYDASKDVSSVDPSAAISERPSPVSVLDPLFDQEDLFPSSRTSDSLAADDEHHTSEEPWKPSDTKLREVAMQSKNNKLANVASLLEKLQQLSVNKDEDAPPVDHIAFLCETESPDHRYVSEILLASGLLMKDLGSGHAGLQLHPSGYPINPDLFHVLEQRKAGWVSKPDGIHQSRVKCDPKRAHRKLMFDSVNEILLQKFEKETAVYSASSFTRAKDLPAKTLSGQQLVKFVSSGIEDLEMEQSRICQKEGSVIPDAEILERLQGWTSFCRELPGLVLEIERSVFKELVDEVVHGESADGPLMKAAIRRRRRLFA

SEQ ID NO: 91274 - protein, 101 aa, Setaria italica
  misc_feature (12)..(12): Xaa can be any naturally occurring amino acid
  Transcript Sequence Number=SeqID_25300
  Gene Ontology: Mol. function=ATPase activity, coupled to transmembrane movement of substances; Cellular component=integral to membrane; Biological process=transport
  Homolog annotation: Hit_ID=Q8GU65; Match level="QueryCoverage=100%, HitCoverage=6%, E-value=8e-45, Identity=87%"; Hit description=MRP -like ABC transporter
RLTLVLGRVILXRTKILFMDEATASVDSQTDATIQKITRREFSTCTIISIAHRIPTVMDCDRVLVLDEGLVKEFDAPSRLIEQPSLFAAMVQEYGNRSLNL

SEQ ID NO: 91275 - protein, 96 aa, Setaria italica
  Transcript Sequence Number=SeqID_25301
RCVIGYMDEVKLNMVPPFYFIGIRKASGPLPNGTKTLEVEINHEQLFEAREQLRKTEWSKKTRIAVAHQDQLIRDLTWLRSRSGYLPPGSEFLQPV

SEQ ID NO: 91276 - protein, 540 aa, Setaria italica
  Transcript Sequence Number=SeqID_25302
  Gene Ontology: Mol. function=protein tyrosine kinase activity; Cellular component=integral to membrane; Biological process=protein amino acid phosphorylation
  Homolog annotation: Hit_ID=B6SS74; Match level="QueryCoverage=95%, HitCoverage=95%, E-value=0.0, Identity=67%"; Hit description=ATP binding protein
  Pfam annotation: Domain name=Pkinase; Domain location=267-509; Score=- 52.3; E_value=2.2e-05; Accession=PF00069.17; Description=Protein kinase domain
  Pfam annotation: Domain name=Pkinase_Tyr; Domain location=266-509; Score=-82.4; E_value=3e-08; Accession=PF07714.9; Description=Protein tyrosine kinase
  Pfam module annotation: Pfam domain module=Pkinase::Pkinase_Tyr; Domain location=267-509::266-509
MEKMRRRRWMVGVLLLVALVSVLPHLGSSNDAGQGTLNPEEDIRSDSEARITHGDRTRKILQEQQNKYWSGRFDSNKAAWPDFTNNNPSAGGGGFQGPPSTFTPNRQPQYPQWPPWPWTPKATPPISFPPSPAPAPSPAVFAKPLPLPAHDSNPSQSIALPPQPADNGSRPVIAGVATGGRHSNHVGRPVYVIAAAGASLLAAVSVAVFLLCYRSSKVVTVRPWATGLSGQLQKAFVTGVPSLKRSELELACEDFSNVIGSLPDYMVYKGTLSSGVEIAVVSTTKSSAKEWSKHCETQFRKKITSLSRVNHKNFVNLLGYCQEEQPFTRMMVFEYAPNGTLFEHLHVREDGHLDWPTRLRVAVGVAYCLEHMHQLSPPEILRTLDTSTICLTDDFAAKISDVFFCDEPREEESLPPSPALADREGVVYSYGMVLLETMAGRFTASAGGLLEGWAAGYLRGERRLRDVVDPALRRSFNAATVDRLDGVIRGCTDREPRRRLTMPEVARRLREITAMPPDAATPKVSPLWWAELEIISTEVN

SEQ ID NO: 91277 - protein, 132 aa, Setaria italica
  Transcript Sequence Number=SeqID_25303
  Gene Ontology: Mol. function=zinc ion binding
  Homolog annotation: Hit_ID=A5C6C9; Match level="QueryCoverage=82%, HitCoverage=8%, E-value=7e-14, Identity=39%"; Hit description =Serine/threonine protein phosphatase
MDPASEGLLAQQQKANSRRPVGSSQIWTRYGVLLPSQQTRKLKEWVLTDQQQQLVNASGLGHLALTTGFTIDRSLLTSFCERWNNETNTAHFMGFEMAPSLRDVSYILGIPVTGHVVTAEPVGDEAVKRMCL

SEQ ID NO: 91278 - protein, 226 aa, Setaria italica
  misc_feature (141)..(141): Xaa can be any naturally occurring amino acid
  Transcript Sequence Number=SeqID_25304
  Gene Ontology: Mol. function=protein serine/threonine kinase activity; Biological process=protein amino acid phosphorylation
  Homolog annotation: Hit_ID=Q5W239; Match level="QueryCoverage=93%, HitCoverage=34%, E-value=1e-85, Identity=74%"; Hit description =Ser/Thr receptor-like kinase
PFRLPTHPPPCGAPGMQLSCLGHDTILDHPVLGPLTRKIIYNRHRVMNVIPLEDSSLQCPLQKLVSRNQSTHVYTPVSHSYPDSVLVGCSRVATDQDRIVGPSSCLSLGSNASQFWYLVDPQTDMSTLPMDCVVIAKGIPXPYTYDKNGPNSWAYLTGSLFNEKANRAIKFGETALNWHLNNITSACQRCEQEGQHCGFNSIRGQAFCQHRGIVFLAQIPNCLVSH

SEQ ID NO: 91279 - protein, 85 aa, Setaria italica
  Transcript Sequence Number=SeqID_25305
  Subcellular localization annotation: CTP_CleavageSite=75; ConfidenceScore=5.81e-01
MSCTVAIPSSPVFSPSRRQLSCKAASASPEPAVAVSTSSPAPAPAAAAGSPLRPFALRALLREEISPSSSPQPASAASVASALAG

SEQ ID NO: 91280 - protein, 144 aa, Setaria italica
  Transcript Sequence Number=SeqID_25306
  Gene Ontology: Mol. function=RNA-directed RNA polymerase activity
  Homolog annotation: Hit_ID=Q5QMN5; Match level="QueryCoverage=53%, HitCoverage=6%, E-value=6e-15, Identity=55%"; Hit description =Probable RNA-dependent RNA polymerase 3
LRCLQGVGPYGFHLGPECAIMLQKPVPNLDAENAFRKAASPHITNELRKTASPQMWALEDLEFCRRFLILWYLCQNNMEDEAVLTVDYIKSLKFLSIAHFESEIWSKFGRKNFQASNRTASDRPKVVLWLLLFYNGSPMIPRFQ

SEQ ID NO: 91281 - protein, 190 aa, Setaria italica
  Transcript Sequence Number=SeqID_25307
  Gene Ontology: Mol. function=nucleic acid binding; Cellular component= intracellular
  Homolog annotation: Hit_ID=B9RAX5; Match level="QueryCoverage=99%, HitCoverage=45%, E-value=1e-39, Identity=46%"; Hit description =Nucleic acid binding protein, putative
  Pfam annotation: Domain name=G-patch; Domain location=143-187; Score =49.5; E_value=1.3e-11; Accession=PF01585.15; Description=G-patch domain
SEVHLDLVRVSTGKLYRLRNPSRKYLASLSAYDSSNPTKDWGFPDIYANPDINLNKQSTAQCESEVADESSVREGVSADNDKEQKTNTYRDRAAERRNLHRGLGIGPGQKQCNIISFDEYEESIDDINSMGTASVDMNFRSSGLQSAKRIMENMGWKEGEALGKSRKGIVEPIQPIINKHGAGLGWNQTR

SEQ ID NO: 91282 - protein, 272 aa, Setaria italica
  Transcript Sequence Number=SeqID_25308
  Homolog annotation: Hit_ID=B9R923; Match level="QueryCoverage=58%, HitCoverage=28%, E-value=8e-54, Identity=66%"; Hit description =Epstein-Barr nuclear antigen, putative
  Pfam annotation: Domain name=Wbp11; Domain location=7-92; Score =142.0; E_value=1.9e-39; Accession=PF09429.2; Description=WW domain binding protein 11
MKTTKGGKVMNPTDAFRKEQRKKELKRNKKERKKVRDVGILKKDPEAIREQIEKLEKMKADGALDKARKHKKRQLEDTYNLIVKKRKEYEQKMKEKGEQPVMFGHLGPPKRRPAAEEEDRANPKPEDSVYYHPTLNPSGAPPPGKPPMYKSSIGPRIPLPSSSNAGASSSMSESEAGPSTLPPPPPPPPLPATSESIDPSAPPFPLPPLPPPPPPPPKPVSDSALPSLPPPPPPPPGPPPRELVSGHTVLPPPPPPPQRPSGANESITDSAQ

SEQ ID NO: 91283 - protein, 93 aa, Setaria italica
  Transcript Sequence Number=SeqID_25309
  Gene Ontology: Mol. function=hydrolase activity, hydrolyzing O -glycosyl compounds; Cellular component=extracellular region; Biological process=carbohydrate metabolic process
  Homolog annotation: Hit_ID=Q8RVZ1; Match level="QueryCoverage=98%, HitCoverage=30%, E-value=2e-14, Identity=47%"; Hit description =Putative xylanase inhibitor protein
PVILSFLRVAGHGKYLTDLSGHDVSTVGADVKHCQSAKNVTVLLSVAGSYNSPATARDVADHLWNAFLGGGSRRGGVRRPFGDAVLDGVNFYL

SEQ ID NO: 91284 - protein, 121 aa, Setaria italica
  Transcript Sequence Number=SeqID_25310
  Subcellular localization annotation: CTP_CleavageSite=42; ConfidenceScore=5.03e-01
LQSSSSSSAVTTAETTGQSFAGPSIHHHHHHQAGQPARHPIRVASAAACASLLCSGRRRASDSDGAPPIPVRAAVGCHILSSGEQEHGGLPPPPPLPRRRHAYATLPLFGPPTKLLAASTS

SEQ ID NO: 91285 - protein, 93 aa, Setaria italica
  Transcript Sequence Number=SeqID_25311
PPPPRASADGAFTSGPAVAVPEAGDATEQVAAAAQPAALPDMHDKAGGADVDDGAGGNGEFPPGGGGGDGDNGGGGGGGGGGGDGEEGEDEFR

SEQ ID NO: 91286 - protein, 184 aa, Setaria italica
  Transcript Sequence Number=SeqID_25312
  Homolog annotation: Hit_ID=Q9AS82; Match level="QueryCoverage=98%, HitCoverage=19%, E-value=9e-51, Identity=57%"; Hit description =P0028E10.10 protein
PRITRLLTETHRLSADHKSEMNGTETCSNGSEVSNCSDAHKETSAAATQIPANLSCLQETSAELFQVQTHVRPITREKLDNPNVDFKAPVHLRSKIDDVGDRSKLNAMFQSPFIGEEMGIEKKIIASVSPDNSDVQYQFMLEQRVLRRLCVQKIVVPTPMKDKLDKDTRFRIVEDGSHALPKSV

SEQ ID NO: 91287 - protein, 96 aa, Setaria italica
  Transcript Sequence Number=SeqID_25313
APKSKATGSSQKTATSLLVLALFIELSAELYRAGVPSNVEAYVLFAGAEFVWLFLDGSWLGFALACLVGTVCPLAEIPLIKLLRCWSYPNADVHLL

SEQ ID NO: 91288 - protein, 106 aa, Setaria italica
  Transcript Sequence Number=SeqID_25314
  Gene Ontology: Mol. function=nucleic acid binding
  Homolog annotation: Hit_ID=B6U752; Match level="QueryCoverage=64%, HitCoverage=14%, E-value=4e-25, Identity=79%"; Hit description =Heterogeneous nuclear ribonucleoprotein R
  Pfam annotation: Domain name=RRM_1; Domain location=30-96; Score =50.4; E_value=6.8e-12; Accession=PF00076.14; Description=RNA recognition motif. (a.k.a. RRM, RBD, o
ALKDAKEYRNEEEKEKHAELLALPPHGSEVYVGGIFYVSSEDLKRLFESVGEVVEVRIRGKGDNKLYAFVNFRTKELALKAIQKLNNKDLRVCHLNSGSIFMLVHQ

SEQ ID NO: 91289 - protein, 187 aa, Setaria italica
  Transcript Sequence Number=SeqID_25315
  Gene Ontology: Mol. function=nucleic acid binding
  Homolog annotation: Hit_ID=B6U752; Match level="QueryCoverage=73%, HitCoverage=25%, E-value=2e-44, Identity=72%"; Hit description =Heterogeneous nuclear ribonucleoprotein R
RYELDGQLLDCSLAKADKKDDTISVPTAKGGPLLPSYTPLGYGLSGAYNPLGNGLAGAYNPLGNGLAGAYNRLGNGLAGAYNRLGNGLAGAYGVLPAPAAQPILYAPGAPSGSTMIPMVLPDGRLVYVPQAAGQQTVHVASPPSQQGGHRYGGSGGGGSGSGGRRQRGDDRGSTSSNNSRRGRHRPY

SEQ ID NO: 91290 - protein, 465 aa, Setaria italica
  Transcript Sequence Number=SeqID_25316
  Gene Ontology: Mol. function=nucleic acid binding; Cellular component= ribonucleoprotein complex
  Homolog annotation: Hit_ID=B6U752; Match level="QueryCoverage=85%, HitCoverage=81%, E-value=1e-168, Identity=75%"; Hit description =Heterogeneous nuclear ribonucleoprotein R
  Pfam annotation: Domain name=RRM_1; Domain location=168-241; Score =23.5; E_value=0.00084; Accession=PF00076.14; Description=RNA recognition motif. (a.k.a. RRM, RBD, o
  Pfam annotation: Domain name=RRM_1; Domain location=263-332; Score =64.6; E_value=3.8e-16; Accession=PF00076.14; Description=RNA recognition motif. (a.k.a. RRM, RBD, o
  Pfam annotation: Domain name=RRM_1; Domain location=92-158; Score =67.4; E_value=5.5e-17; Accession=PF00076.14; Description=RNA recognition motif. (a.k.a. RRM, RBD, o
  Pfam module annotation: Pfam domain module=RRM_1::RRM_1::RRM_1; Domain location=168-241::263-332::92-158
MPRSTENALRQEDHLEFDDPDEVDEEEVEYEEIEEEVEYEEVEEDEEEEEEKSEVACEVDAKHDSKMVDQKDEEEKEKHAELLALPPHGSEVYVGGISDVSSEDLKKLFESVGEVVEVRIRGKGDNKLYAFVNFRTKELALKAIQKLNNKDLKGKKIKVSSSQAKNRLFIGNIPKDWTQDDFKNAVEEVGPGVLKVNLPKAPHSDCHKGYGFIEYYNQACAEYARQKMSTPEFKLDTNAPTVNWADTKNSGESASTAKQVKSLYVKNLPKTVTEEQLRTLFEHLGEITKVVLPPAKAGHENRYGFVHFKERYMAIKALKNTERYELDGQLLDCSLAKADKKDDTISVPNTKAGPLLPSYTPLGYGLSGAYNPLGNGLAGAYNPLGNGLAGAYNPLGNGLAGAYNRLGNGLAGAYGVLPAPAAQPILYAPGAPSGSTMIPMVLPDGRLVYVPQAAGQQTVHVASPP

SEQ ID NO: 91291 - protein, 50 aa, Setaria italica
  Transcript Sequence Number=SeqID_25317
AGSPRNPFLSHEIGEDGAGDSDLGFSKWAEKLRGGASGLVHLSNLFIARS

SEQ ID NO: 91292 - protein, 89 aa, Setaria italica
  Transcript Sequence Number=SeqID_25318
  Gene Ontology: Mol. function=hydrolase activity, hydrolyzing O -glycosyl compounds; Biological process=carbohydrate metabolic process
  Homolog annotation: Hit_ID=Q9LLB8; Match level="QueryCoverage=98%, HitCoverage=14%, E-value=4e-35, Identity=80%"; Hit description =Exoglucanase
LGILAGIDMVMIPYTYTEFIDDLTALVRNGTIPMSRIDDAVRRILRVKFTMGLFEDPYGDPSLAGELGKPEHRELAREAVRRSLVLLKN

SEQ ID NO: 91293 - protein, 61 aa, Setaria italica
  misc_feature (48)..(48): Xaa can be any naturally occurring amino acid
  Transcript Sequence Number=SeqID_25319
  Gene Ontology: Mol. function=structural constituent of ribosome; Cellular component=ribonucleoprotein complex; Biological process =translation
  Homolog annotation: Hit_ID=B6U773; Match level="QueryCoverage=98%, HitCoverage=46%, E-value=4e-22, Identity=88%"; Hit description=40S ribosomal protein S15a
MGRRILNDALRTMVNADRRGKATALLQPISGVMVSFLNIMKHRGYIKXFEVIDPHRVGKIN

SEQ ID NO: 91294 - protein, 66 aa, Setaria italica
  Transcript Sequence Number=SeqID_25320
  Gene Ontology: Mol. function=structural constituent of ribosome; Cellular component=ribonucleoprotein complex; Biological process =translation
  Homolog annotation: Hit_ID=B6U773; Match level="QueryCoverage=100%, HitCoverage=51%, E-value=1e-30, Identity=93%"; Hit description=40S ribosomal protein S15a
  Pfam annotation: Domain name=Ribosomal_S8; Domain location=1-66; Score=-50.9; E_value=0.032; Accession=PF00410.11; Description =Ribosomal protein S8
LHGRIKDCKALTYRQDLRAKEIEQYRVRMLPTRQWGYVVITTPNGVLDHEEAIRQNVGGQVLGYFH

SEQ ID NO: 91295 - protein, 129 aa, Setaria italica
  Transcript Sequence Number=SeqID_25321
  Gene Ontology: Mol. function=structural constituent of ribosome; Cellular component=ribonucleoprotein complex; Biological process =translation
  Homolog annotation: Hit_ID=B6U773; Match level="QueryCoverage=100%, HitCoverage=100%, E-value=1e-62, Identity=89%"; Hit description=40S ribosomal protein S15a
  Pfam annotation: Domain name=Ribosomal_S8; Domain location=6-129; Score=87.2; E_value=5.8e-23; Accession=PF00410.11; Description =Ribosomal protein S8
MGRRILNDALRTMVNADRRGKATALLQPISGVMVSFLNIMKHRGYIKSFEVTDPHRVGKINVELHGRIKDCKALTYRQDLRAKEIEQYRVRMLPTRQWGYVVITTPNGVLDHEEAIRQNVGGQVLGYFH

SEQ ID NO: 91296 - protein, 141 aa, Setaria italica
  Transcript Sequence Number=SeqID_25322
  Homolog annotation: Hit_ID=Q656N0; Match level="QueryCoverage=99%, HitCoverage=4%, E-value=1e-39, Identity=58%"; Hit description =Putative STH1 protein
LGPTALGGNRQHLNQETKELPAPSKPQHMPVDGYNSNMPGIDQTTETVGAGNDVENCSHAADIVPEQAADEGDEDLSEHDDLPSSPPKHTMTEKWILEYQKRMYNEKQKRTLEQHKLHSRMSASYEKLKESVNSSEDLSAK

SEQ ID NO: 91297 - protein, 81 aa, Setaria italica
  Transcript Sequence Number=SeqID_25323
LGPTRLAILRLNQILPHTVTHHSSVNNACLDSLDRIRLRTREAYSVIPFASDRGGAAAPCCSAAQGRPPRVSAACRSSRQR

SEQ ID NO: 91298 - protein, 65 aa, Setaria italica
  misc_feature (1)..(3): Xaa can be any naturally occurring amino acid
  Transcript Sequence Number=SeqID_25324
XXXFFFLTQISHSRESLHIISRDSLFSRNSSLEKCSAELPTTAYKITMSHQSYAIFKLQVLSEEK

SEQ ID NO: 91299 - protein, 41 aa, Setaria italica
  Transcript Sequence Number=SeqID_25325
  Homolog annotation: Hit_ID=Q5QLI3; Match level="QueryCoverage=92%, HitCoverage=12%, E-value=4e-09, Identity=76%"; Hit description =Transcription factor-like protein
PVSDALGEGFSNGYLEEMLRSFPLQEDGQNKSGDAPNGADG

SEQ ID NO: 91300 - protein, 153 aa, Setaria italica
  misc_feature (125)..(125): Xaa can be any naturally occurring amino acid
  Transcript Sequence Number=SeqID_25326
  Homolog annotation: Hit_ID=Q5QLI3; Match level="QueryCoverage=71%, HitCoverage=50%, E-value=7e-21, Identity=43%"; Hit description =Transcription factor-like protein
RFLSYYLVKRQKLLRNAHELIERSKKQEALWRSERSKEEHVDEEAPATHTGTEDQVGLNNSDSEDMDDEEEEEESDGYDSPPMAEGFRDFTLDDSYALGEGFSNGYLEEMLRSFPLQEDGLNQIXDAPNGADGSDGEFEIFEQPSDNDESSDG

SEQ ID NO: 91301 - protein, 69 aa, Setaria italica
  Transcript Sequence Number=SeqID_25327
MFLHSILMQKMAKNTRQPRKDGGARSGGHKSPWYQRAVEVLLLIWKQPAAPTATTKAAAASGVTAASGR

SEQ ID NO: 91302 - protein, 103 aa, Setaria italica
  misc_feature (90)..(90): Xaa can be any naturally occurring amino acid
  Transcript Sequence Number=SeqID_25328
  Gene Ontology: Mol. function=nucleotide binding; Biological process =defense response
  Homolog annotation: Hit_ID=Q2QZQ9; Match level="QueryCoverage=95%, HitCoverage=15%, E-value=2e-32, Identity=70%"; Hit description=NB -ARC domain containing protein
IILLTSRLDTVAVEIGVDYTYRVDLMSVDVGCELLWKSMGINEVKVAENLRDLGIDIVRRCGCLPLGIKVIARVLASKDQTEIEWKKILXKNAWSMSKFHSQV

SEQ ID NO: 91303 - protein, 113 aa, Setaria italica
  misc_feature (7)..(7): Xaa can be any naturally occurring amino acid
  Transcript Sequence Number=SeqID_25329
  Gene Ontology: Mol. function=transferase activity, transferring glycosyl groups; Cellular component=membrane; Biological process =cell wall biogenesis
  Homolog annotation: Hit_ID=B6SRP0; Match level="QueryCoverage=99%, HitCoverage=19%, E-value=4e-50, Identity=82%"; Hit description =Fucosyltransferase 7
CEDMQAXLQRVPWLVFQSDNYFVPGLFLNPGHERELARMFPRRDAVFHHLGRYLFHPSNTVWGMVTRYHDEYFAKADERVGIQVRKFGWAPISTDELYGQILNCSQREGILPV

SEQ ID NO: 91304 - protein, 64 aa, Setaria italica
  Transcript Sequence Number=SeqID_25330
  Homolog annotation: Hit_ID=Q6A9R1; Match level="QueryCoverage=100%, HitCoverage=45%, E-value=6e-30, Identity=100%"; Hit description =Protein mraZ
  Pfam annotation: Domain name=MraZ; Domain location=1-61; Score=48.4; E_value=2.7e-11; Accession=PF02381.10; Description=MraZ protein
DTAPDKQGRVMIPPMLRRYAALNKEIVVVGAITRVEVWDATEWEKYSEAQEEAFADMNEEVFAE

SEQ ID NO: 91305 - protein, 277 aa, Setaria italica
  misc_feature (28)..(28): Xaa can be any naturally occurring amino acid
  misc_feature (64)..(64): Xaa can be any naturally occurring amino acid
  misc_feature (237)..(237): Xaa can be any naturally occurring amino acid
  Transcript Sequence Number=SeqID_25331
YEPTAHKDTSCSGRAWGRRAADTGPHHXATHFYFSPRHSTPLHSSQPRSSTRQLAHTAAAYYCXATTTPHTRAHTGKNRSVLNGEPVPCTRARGCRMPRRAVIHRGRRRARPHHSLSAAFASSSAAGSAAAGSASAGAASVAGASSAAGAAASGSGSVAGAASSFTSSAAAGSASLGASATGSGSAAAAGSASLGASASGSASLFSVSATAGAVSSAGAGVSSLGASSAAAAAAGGXVSTAGASSVTTAVGVWTSAVAIGDEQKVGDYKKSGGYLAS

SEQ ID NO: 91306 - protein, 67 aa, Setaria italica
  misc_feature (63)..(63): Xaa can be any naturally occurring amino acid
  Transcript Sequence Number=SeqID_25332
MDMELEHGGDEEETRSESSKRSLGASSDATVSSTASKLQALRFAEDLSLPSVQVVVMSANMGXSHCR

SEQ ID NO: 91307 - protein, 84 aa, Setaria italica
  misc_feature (72)..(72): Xaa can be any naturally occurring amino acid
  Transcript Sequence Number=SeqID_25333
  Gene Ontology: Mol. function=heat shock protein binding; Cellular component=nucleus; Biological process=protein folding
  Homolog annotation: Hit_ID=Q5GAN9; Match level="QueryCoverage=85%, HitCoverage=16%, E-value=1e-33, Identity=90%"; Hit description=AT hook-containing MAR binding 1-like protein
GASAAAAADADAFWTACPYCCHVYQYQRALVGRALRCQSAGCRRAFVAAEIPTVPPIVPGTDMYYCAWGFPXMGFPKAADLSTN

SEQ ID NO: 91308 - protein, 99 aa, Setaria italica
  misc_feature (86)..(86): Xaa can be any naturally occurring amino acid
  Transcript Sequence Number=SeqID_25334
HGESVKYLSARKLRSSPLKQELRVFLEEDQRNSDAYISLGEEEIGEGTSTRASAFSNARNEQSKVINFPRRSLSIEQNTVDSERGXRTLVREKLEELAI

SEQ ID NO: 91309 - protein, 103 aa, Setaria italica
  Transcript Sequence Number=SeqID_25335
MCGGAILTELIPSPRRAASKPVTAGHLWSAGSNSKKAGNGSDKGHHHADIDDFEAAFEDFDDEFDEEVEDHHFVFSAKSAFSPAHGGRAASQKKRGRRHFRGS

SEQ ID NO: 91310 - protein, 94 aa, Setaria italica
  Transcript Sequence Number=SeqID_25336
  Subcellular localization annotation: CTP_CleavageSite=43; ConfidenceScore=5.03e-01
KRKNTKERTSLKHGGLINGIKLPESSSSDKNVKSSLKARMSLKAMVENKCTRTPSPAVQDGKTSFSFQNKDGEDTQGSGNAVNQDCLHEIGNLR

SEQ ID NO: 91311 - protein, 77 aa, Setaria italica
  Transcript Sequence Number=SeqID_25337
GTKKASRERITQGFPFLAQKNRSLYLSLVASHTWNWISPLTNHNSLSLIARHPSYSWLLASLLLLVPSRLSLLTALP

SEQ ID NO: 91312 - protein, 325 aa, Setaria italica
  Transcript Sequence Number=SeqID_25338
  Gene Ontology: Mol. function=DNA binding; Cellular component=nucleus
  Homolog annotation: Hit_ID=Q5I204; Match level="QueryCoverage=100%, HitCoverage=100%, E-value=1e-67, Identity=47%"; Hit description =Brain acid soluble protein 1
  Pfam annotation: Domain name=MBD; Domain location=18-88; Score=50.2; E_value=8.1e-12; Accession=PF01429.11; Description=Methyl-CpG binding domain
MATGEEHVAAAVEQTPEKKEASVTELPAPSGWTKKLAPIRGGKFEVIFVSPTGEEIKSKRQLTQYLKAHPGGPASSEFDWGTSDTPRRSARLSEKFKATESPEGEKTPKRGRSSSKRGRKEKKEDADAVDANETVDRGTLEGTDVEMKDAEEEKKEDAPSADVAEKTEGGEEKKDEAPGADAAEKTEQGAEGQEQTNNVAAPESENKSDVKPAESEVAPLAPVVEEEKKEEKTENSLVAEPAVPPAAEPVVLLAASSEGEKKEDGGVTEPAALPVAETKADAPPAEAAKEAENLGQANAAPQEPSAANCDNKGQIQPGASAVRCT

SEQ ID NO: 91313 - protein, 73 aa, Setaria italica
  Transcript Sequence Number=SeqID_25339
  Gene Ontology: Mol. function=protein tyrosine kinase activity; Biological process=protein amino acid phosphorylation
  Homolog annotation: Hit_ID=B9RZY6; Match level="QueryCoverage=95%, HitCoverage=4%, E-value=2e-29, Identity=85%"; Hit description =Neurobeachin, putative
EQKSSDNGWRDLTKSKWRLAKGDEQLDFTYSSSEIPHHVSDECLSELAVCSYKARRLPKTILRSAVRSVYEPN

SEQ ID NO: 91314 - protein, 98 aa, Setaria italica
  Transcript Sequence Number=SeqID_25340
  Subcellular localization annotation: CTP_CleavageSite=50; ConfidenceScore=5.84e-01
QLPARAPWQEPSTQRPRRRPPCRRRRSRPPRTPPPASPTCSGCSGSAPTRCSTAGPSRIIKRPTTMTSAPPCSPAPRPTSRPARARTTRRRRARRRGA

SEQ ID NO: 91315 - protein, 173 aa, Setaria italica
  Transcript Sequence Number=SeqID_25341
  Gene Ontology: Mol. function=protein serine/threonine kinase activity; Cellular component=integral to membrane; Biological process=protein amino acid phosphorylation
  Homolog annotation: Hit_ID=B9RAX9; Match level="QueryCoverage=99%, HitCoverage=49%, E-value=2e-43, Identity=33%"; Hit description =Receptor protein kinase, putative
  Pfam annotation: Domain name=LRR_1; Domain location=114-136; Score =12.7; E_value=1.1; Accession=PF00560.25; Description=Leucine Rich Repeat
  Pfam annotation: Domain name=LRR_1; Domain location=138-161; Score =1.2; E_value=1.8e+02; Accession=PF00560.25; Description=Leucine Rich Repeat
  Pfam annotation: Domain name=LRR_1; Domain location=17-39; Score =13.2; E_value=0.89; Accession=PF00560.25; Description=Leucine Rich Repeat
  Pfam annotation: Domain name=LRR_1; Domain location=41-64; Score =14.9; E_value=0.34; Accession=PF00560.25; Description=Leucine Rich Repeat
  Pfam annotation: Domain name=LRR_1; Domain location=66-88; Score =15.1; E_value=0.29; Accession=PF00560.25; Description=Leucine Rich Repeat
  Pfam annotation: Domain name=LRR_1; Domain location=90-112; Score =15.8; E_value=0.18; Accession=PF00560.25; Description=Leucine Rich Repeat
  Pfam module annotation: Pfam domain module=LRR_1::LRR_1::LRR_1::LRR _1::LRR_1::LRR_1; Domain location=114-136::138-161::17-39::41-64::66 -88::90-112
GNHIAGAIPAEIGKLGNLSFLDLGSNRLSSALPAEISGCRNLTFVDLHDNAIAGELPPGLFQDLLSLQYLDLSYNVIGGTLPSDIGMLTSLTKLILSGNRLSGPVPPEIGSCTRLQLLDVGGNSLSGKIPGSIGKIPGLEIALNLSCNSFTGTIPSEFAGLVRLGVLDVSHNQ

SEQ ID NO: 91316 - protein, 195 aa, Setaria italica
  Transcript Sequence Number=SeqID_25342
  Homolog annotation: Hit_ID=Q108Z7; Match level="QueryCoverage=99%, HitCoverage=8%, E-value=4e-92, Identity=81%"; Hit description =Transcriptional regulator, putative, expressed
SAFGNSQTIDSSQLTAWNIDVLVDSINEIAPGTNWAHVMENLDHEGFNIPDEASFRLLMSIYSRACKDPFPLHAICGTLWKNTEGQLSFLKHAVALPNDTFTFAHCTRKMAFPDLGNLNQGNQAWYCLDLLEVLCQLAELGYAKPVRTMLDYPLIHCPEVLLLGVSHINTTYNLIQHEVLSHVFPSMLKNTMHSR

SEQ ID NO: 91317 - protein, 262 aa, Setaria italica
  Transcript Sequence Number=SeqID_25343
  Gene Ontology: Mol. function=transporter activity; Cellular component= membrane; Biological process=oligopeptide transport
  Homolog annotation: Hit_ID=B6SXM6; Match level="QueryCoverage=100%, HitCoverage=48%, E-value=1e-135, Identity=90%"; Hit description =Peptide transporter PTR2
  Pfam annotation: Domain name=PTR2; Domain location=1-194; Score= -66.8; E_value=0.0007; Accession=PF00854.13; Description=POT family
RPSPWRLCTVTQVEELKCVLRLLPVWASGIIFAAAYTQMTTTFILQGDTLDPYVGGFRVPAAVLSVFDTLSVMLWVPLYDRVVVPLARRATGHDRGFTQLARMGVGLVVLTAAMLAAGTLEVERRRVIARHGMYDTNTGADGAYLPMSIFWQVPQYVVVGASEVFTFIGQMEFFYDQAPDAMRSLCSGLSMTSFALGNYVSSALVTVVARATARGGRDGWIPDDINRAHLDNFFWLLAMLCIGNFGVYLLIARWYTYKKTVD

SEQ ID NO: 91318 - protein, 58 aa, Setaria italica
  misc_feature (35)..(35): Xaa can be any naturally occurring amino acid
  Transcript Sequence Number=SeqID_25344
  Gene Ontology: Mol. function=nucleic acid binding; Cellular component= chromatin; Biological process=chromatin assembly or disassembly
  Homolog annotation: Hit_ID=Q01MI5; Match level="QueryCoverage=98%, HitCoverage=16%, E-value=2e-14, Identity=66%"; Hit description =H0515C11.6 protein
GPFQILECIGEVAYRLHLPAGAQIHDVFHVGPPQXFHGDPPVQTPPLPALENGRFLPP

SEQ ID NO: 91319 - protein, 89 aa, Setaria italica
  Transcript Sequence Number=SeqID_25345
  Gene Ontology: Mol. function=electron carrier activity; Biological process=oxidation reduction
  Homolog annotation: Hit_ID=B6SWV0; Match level="QueryCoverage=100%, HitCoverage=15%, E-value=9e-41, Identity=88%"; Hit description =Cytochrome P450 CYP734A7
PATSHNALPRVLAFYHYWRKIYGPTFLIWFGPTPRLTVADPELVREILLTNADAFDRYEAHPVVRQLEGDGLVSLHDGKWALHRRVLTP

SEQ ID NO: 91320 - protein, 279 aa, Setaria italica
  Transcript Sequence Number=SeqID_25346
  Homolog annotation: Hit_ID=B9S462; Match level="QueryCoverage=96%, HitCoverage=39%, E-value=5e-32, Identity=34%"; Hit description=Endo beta n-acetylglucosaminidase, putative
DSQGSLRQNIIFSEQLFNGGLGMEDGSIHLFYSVRADAGSALGLSLNLSSNKQSTSILVAEDIASFITKKQNHKYGSYVKADEVEPHAPDNQGWVLYEATLQSSSGYKLTGINVVCTLKIAGEMSPETEEDMISEANANGSSPYHVSLGHISIQKTDANTEFPPAGSWVTEGEHISWSNSSDTTKRVSLKLSWKLNTLDQPSFRQYNIYVEKSTADPNIKASRSYLGVASVDAFYVSGLEVPSEVTDLKFIIQACAHDGSWQELEKCPKFLLVPVHSEL

SEQ ID NO: 91321 - protein, 123 aa, Setaria italica
  Transcript Sequence Number=SeqID_25347
  Gene Ontology: Mol. function=protein serine/threonine kinase activity; Cellular component=chloroplast; Biological process=protein amino acid phosphorylation
  Homolog annotation: Hit_ID=Q9T020; Match level="QueryCoverage=97%, HitCoverage=13%, E-value=6e-47, Identity=72%"; Hit description =Putative receptor-like protein kinase
  Pfam annotation: Domain name=Pkinase_Tyr; Domain location=30-121; Score=-153.2; E_value=0.0015; Accession=PF07714.9; Description =Protein tyrosine kinase
VVFRSLFASSAYGLGRYFTFAEIQKATKNFEEKDVLGVGGFGKVYLGVLEDGTKLAIKRGNPSSDQGMNEFLTEIQMLSKLRHRHLVSLIGCCDENNEMILVYEFMSNGPLRDHLYGGTNLKP

SEQ ID NO: 91322 - protein, 84 aa, Setaria italica
  Transcript Sequence Number=SeqID_25348
  Subcellular localization annotation: CTP_CleavageSite=21; ConfidenceScore=5.09e-01
RLPPTSLPSPPLHCCCFGCKRAGLRRGQLYAPYGLGGVVKVLKTPSKKPSSLPSVIVACTASLLPFPWSISRCNVLPHGHVASS

SEQ ID NO: 91323 - protein, 214 aa, Setaria italica
  misc_feature (24)..(24): Xaa can be any naturally occurring amino acid
  Transcript Sequence Number=SeqID_25349
  Gene Ontology: Mol. function=transferase activity, transferring glycosyl groups; Biological process=metabolic process
  Homolog annotation: Hit_ID=B6SSB3; Match level="QueryCoverage=100%, HitCoverage=44%, E-value=2e-64, Identity=60%"; Hit description =Anthocyanidin 5,3-O-glucosyltransferase
HCEMVSGGGIDFHHLPAVEHRADXPRHPSEYIQLYAPHVKAAIAGLAAPVAAVVVDFFGTPLLDVAHDLAVPAYVYFPSNGAALALMLRLPAIHEKVVATFRDEKQGVIDVPGMPPVPVASMPSPELNDYAWFVYYGRRFMEARGIVVNTAAELEPGVLAAIAAGRCTPGDRAPPVYPIGPVLSLNKPRADGDQSPHECVRWLDAQAPASIVFL

SEQ ID NO: 91324 - protein, 96 aa, Setaria italica
  Transcript Sequence Number=SeqID_25350
  Pfam annotation: Domain name=DUF617; Domain location=1-96; Score =146.7; E_value=7e-41; Accession=PF04759.5; Description=Protein of unknown function, DUF617
PTWRAYCNGRKCGFAVRRECGADEWRVLGAVEPVSVGAGVLPDDVSGAAAGAAEGDLMYMRARFERVVGSRDSEAFYMMNPDGSGGPELSIYLLRV

SEQ ID NO: 91325 - protein, 138 aa, Setaria italica
  Transcript Sequence Number=SeqID_25351
  Homolog annotation: Hit_ID=Q8SAW5; Match level="QueryCoverage=92%, HitCoverage=8%, E-value=2e-24, Identity=51%"; Hit description =Putative myosin-like protein
NLTENSNQMGLMDDFLEMERLACLSSEAQECEGIVKEKVGKIGATLSPCQLKKESEKNSSPALQLPGSPFSSDHLIASPSLSKLQLRISALLSSQSPQNNVVKVLDGIRNILRDIEHEVESVNVTKLQQEDTFEVTGN

SEQ ID NO: 91326 - protein, 75 aa, Setaria italica
  misc_feature (67)..(67): Xaa can be any naturally occurring amino acid
  Transcript Sequence Number=SeqID_25352
  Gene Ontology: Mol. function=microtubule motor activity; Cellular component=microtubule associated complex; Biological process =microtubule-based process
  Homolog annotation: Hit_ID=B9SIE5; Match level="QueryCoverage=100%, HitCoverage=66%, E-value=1e-24, Identity=72%"; Hit description =Cytoplasmic dynein light chain, putative
  Pfam annotation: Domain name=Dynein_light; Domain location=1-75; Score=45.9; E_value=1.5e-10; Accession=PF01221.10; Description =Dynein light chain type 1
MLESQAVIGDTDMLQAMQQDALRLAGKALDDFEAVDSTEIARFIKKEFDRSYGPGWQCIVGTDFGSXVTHHSGCF

SEQ ID NO: 91327 - protein, 88 aa, Setaria italica
  misc_feature (10)..(10): Xaa can be any naturally occurring amino acid
  misc_feature (20)..(20): Xaa can be any naturally occurring amino acid
  Transcript Sequence Number=SeqID_25353
  Homolog annotation: Hit_ID=B9RCQ1; Match level="QueryCoverage=94%, HitCoverage=18%, E-value=8e-23, Identity=59%"; Hit description=Amino acid transporter, putative
LAFVAAMLPXFGEIQGVVGXVGYIPLDVVIPVVMYNMALAPRRRSPAYVANVAIMVAFVGLGVIGAVASVRKLVLNADKFKLFSNGRS

SEQ ID NO: 91328 - protein, 73 aa, Setaria italica
  Transcript Sequence Number=SeqID_25354
  Gene Ontology: Mol. function=inositol or phosphatidylinositol phosphatase activity
MLENQKQAEVLWPRLVANKLFRKPSGSHAFVADFPAADFPVADDDGAEFSDGGCSPDADASRCVKRPRPQERS

SEQ ID NO: 91329 - protein, 81 aa, Setaria italica
  Transcript Sequence Number=SeqID_25355
  Subcellular localization annotation: CTP_CleavageSite=51; ConfidenceScore=5.58e-01
TAGPCCPPLLAGSHPVGMRLRAPFSLMTRCGATQAFRRLSFSAIRFGCWISQSVVRTNQPCKSLCQVPTTLQRLLDYGTGL

SEQ ID NO: 91330 - protein, 125 aa, Setaria italica
  misc_feature (8)..(8): Xaa can be any naturally occurring amino acid
  Transcript Sequence Number=SeqID_25356
  Gene Ontology: Mol. function=aspartic-type endopeptidase activity; Cellular component=intracellular; Biological process=DNA integration
  Homolog annotation: Hit_ID=Q53QA4; Match level="QueryCoverage=100%, HitCoverage=9%, E-value=4e-65, Identity=91%"; Hit description =Retrotransposon protein, putative, Ty1-copia subclass
NRSIISKXRCMLSNARMSKRFWAEAANTACYLINRSPSIPLNKRTPIEVWSGTPADYSQLKVFGCTAYAHVDNGKLEPRAVKCLFLGYGSGVKGYKLWNPETGKTFLSRSVIFNESVMFTDSLSS

SEQ ID NO: 91331 - protein, 357 aa, Setaria italica
  misc_feature (125)..(125): Xaa can be any naturally occurring amino acid
  Transcript Sequence Number=SeqID_25357
  Gene Ontology: Mol. function=zinc ion binding
  Homolog annotation: Hit_ID=B9SWC9; Match level="QueryCoverage=96%, HitCoverage=36%, E-value=1e-100, Identity=53%"; Hit description =Transcription factor, putative
RMDHALRHEIRGSLAMPIYDPSKGSCCAVLELVTNKEKPDFDAEMDSVCNALQAVNLQTATDRSSQKVYSENQKSAFIEILDVLRAICHAHMLPLALTWVPTSNGIDNGYCVRNNIGVDSQSGKXVLRIHESACYINDAKMQGFLHACAERHLEKGQGIAGRALKSNLPFFSPDVREYNIEDYPLAHHARKFGLHAAVAIRLRSTYTGNDDYILEFFLPVNCKGCGEQQMLLNNLSSTMQRICKSLRTVSEAEADSVSASAASMNKKSNGSLPTGNSESSSHDDQPITESAFQDLSLADKQEQDIESDQAQASSMRVAEKKRSTSEKNFSLDVLRKYFSGSLREASMKTYGSFSTLT

SEQ ID NO: 91332 - protein, 113 aa, Setaria italica
  Transcript Sequence Number=SeqID_25358
  Gene Ontology: Cellular component=extracellular region; Biological process=plant-type cell wall organization and biogenesis
  Homolog annotation: Hit_ID=Q4PR41; Match level="QueryCoverage=100%, HitCoverage=44%, E-value=5e-41, Identity=69%"; Hit description =Expansin-A25
  Pfam annotation: Domain name=DPBB_1; Domain location=1-54; Score =58.2; E_value=3.2e-14; Accession=PF03330.10; Description=Rare lipoprotein A (RlpA)-like double
  Pfam annotation: Domain name=Pollen_allerg_1; Domain location=65-113; Score=4.3; E_value=0.0011; Accession=PF01357.13; Description=Pollen allergen
  Pfam module annotation: Pfam domain module=DPBB_1::Pollen_allerg_1; Domain location=1-54::65-113
AAVTVTATNFCPPNWAQPSNRGGWCNPPRPHFDMAQPAWERIGVYKAGIIPVLYQQVTCWRQGGIRITIGGSTFFQLMNFANVGGSGSIRSVSVKGTKTGWIALNRNWGANWQ

SEQ ID NO: 91333 - protein, 93 aa, Setaria italica
  Transcript Sequence Number=SeqID_25359
  Subcellular localization annotation: CTP_CleavageSite=62; ConfidenceScore=5.39e-01
MAAWCSGESTKPVFVGIYGAVLGGFAVSALFFLLSSFSSLSAPPLPLPTGATTPAAAGNLSRSAPAQPETMYNRPIWKPPPRGSRMPSPRAFR

SEQ ID NO: 91334 - protein, 56 aa, Setaria italica
  Transcript Sequence Number=SeqID_25360
MEYGYPCNGCGGNKEKRPPLKRGQLKLQIAKTLLGGLAAPAGAGAAAANRERSFGR

SEQ ID NO: 91335 - protein, 109 aa, Setaria italica
  Transcript Sequence Number=SeqID_25361
  Homolog annotation: Hit_ID=Q01L33; Match level="QueryCoverage=98%, HitCoverage=9%, E-value=2e-32, Identity=60%"; Hit description =H0209H04.5 protein
MEEPGPSRPATSTAVGGDFPELLGFCARAEALIAELLLLADRAPPQFADRRFDSVLFDFRYLDSPGDFESRVEGIIELEALEDQLRESCAPYMQRFFSLLDGAVTYHVR

SEQ ID NO: 91336 - protein, 80 aa, Setaria italica
  Transcript Sequence Number=SeqID_25362
  Gene Ontology: Cellular component=integral to membrane; Biological process=vesicle-mediated transport
  Homolog annotation: Hit_ID=Q9LFP1; Match level="QueryCoverage=71%, HitCoverage=25%, E-value=3e-19, Identity=77%"; Hit description =Vesicle-associated membrane protein 713
  Pfam annotation: Domain name=Synaptobrevin; Domain location=3-80; Score=90.8; E_value=4.7e-24; Accession=PF00957.13; Description =Synaptobrevin
TAIVELLVRSVMIDNIDKVLERGDRLELLVDKTANMQGNTVRFKRQARRFRNTVWWRNVKLTAALILLLLVIIYVVLVFV

SEQ ID NO: 91337 - protein, 221 aa, Setaria italica
  Transcript Sequence Number=SeqID_25363
  Gene Ontology: Mol. function=protein binding; Cellular component =integral to membrane; Biological process=vesicle-mediated transport
  Homolog annotation: Hit_ID=O49377; Match level="QueryCoverage=99%, HitCoverage=100%, E-value=4e-89, Identity=71%"; Hit description =Vesicle-associated membrane protein 711
  Pfam annotation: Domain name=Synaptobrevin; Domain location=124-212; Score=142.4; E_value=1.4e-39; Accession=PF00957.13; Description =Synaptobrevin
MAILYALVARGTVVLAEHSAAATNAGAVARQVLERLPDGGADSHVSYTQDRYVFHAKRTDGITALCMADDAAGRRIPFAFLEDIHGRFVKAYGRAALTALAYAMNDEFSRVLSQQMDYYSNDPNADRINRMRGEINQVRSVMIDNIDKVLERGDRLELLVDKTANMQGNTVRFKRQARRFRNTVWWRNVKLTAALILLLLVIIYVVLVFVCHGFTLPTCIR

SEQ ID NO: 91338 - protein, 86 aa, Setaria italica
  Transcript Sequence Number=SeqID_25364
AATSSWPWSPPELYWRSWRRRMRAASDALRPRLTNAAEAEARRCGAMRRKRRRSGRVLGGGVIAARASAAVAREIVGRGVALGAEA

SEQ ID NO: 91339 - protein, 92 aa, Setaria italica
  misc_feature (81)..(81): Xaa can be any naturally occurring amino acid
  Transcript Sequence Number=SeqID_25365
  Gene Ontology: Mol. function=transferase activity, transferring groups other than amino-acyl groups; Biological process=biosynthetic process
  Homolog annotation: Hit_ID=Q5ZBB6; Match level="QueryCoverage=100%, HitCoverage=28%, E-value=2e-19, Identity=53%"; Hit description =Chalcone synthase-like
  Pfam annotation: Domain name=Chal_sti_synt_C; Domain location=1-92; Score=3.6; E_value=0.001; Accession=PF02797.7; Description=Chalcone and stilbene synthases, C-te
KLREEGILYNLHRDIPLHVSSSMERLVKLMLQETMVPTLDLNDEVFWVVHPGGRGILDRIASKLGLREEKLAASRAVMRQXGNTRCSSVILV

SEQ ID NO: 91340 - protein, 86 aa, Setaria italica
  Transcript Sequence Number=SeqID_25366
  Subcellular localization annotation: CTP_CleavageSite=75; ConfidenceScore=5.06e-01
MATLYGFLMQSDPTYSNPKVLPQSISEDQVSKKAQVAVCLQGRQPAESSHISTQPAARRFLFGDKTLGRLAYSCVFSSVMDFSLAL

SEQ ID NO: 91341 - protein, 122 aa, Setaria italica
  Transcript Sequence Number=SeqID_25367
  Gene Ontology: Mol. function=inositol trisphosphate 3-kinase activity; Cellular component=nucleus
  Homolog annotation: Hit_ID=B6SIS9; Match level="QueryCoverage=100%, HitCoverage=42%, E-value=3e-47, Identity=86%"; Hit description =Inositol hexaphosphate kinase
  Pfam annotation: Domain name=IPK; Domain location=1-108; Score=-67.1; E_value=8.8e-05; Accession=PF03770.8; Description=Inositol polyphosphate kinase
GVRRMLRRYVSSDSGEVVDCALAAAVYGGEGGVLSQLRELKAWFEEQTLFHFYSASILLGYDANAVSATGVGGGVRVKLVDFAHVAEGDGVIDHNFLGGLCSLIKFISEIVSETPDTPPLGP

SEQ ID NO: 91342 - protein, 120 aa, Setaria italica
  Transcript Sequence Number=SeqID_25368
  Gene Ontology: Mol. function=inositol trisphosphate 3-kinase activity; Cellular component=nucleus
  Homolog annotation: Hit_ID=B6SIS9; Match level="QueryCoverage=86%, HitCoverage=35%, E-value=4e-40, Identity=88%"; Hit description =Inositol hexaphosphate kinase
  Pfam annotation: Domain name=IPK; Domain location=1-106; Score=-68.9; E_value=0.00012; Accession=PF03770.8; Description=Inositol polyphosphate kinase
TDVNVVRTELPEEGRWNCALAAAVYGGEGGVLSQLRELKAWFEEQTLFHFYSASILLGYDANAVSATGVGGGVRVKLVDFAHVAEGDGVIDHNFLGGLCSLIKFISEIVSETPDTPPLGP

SEQ ID NO: 91343 - protein, 67 aa, Setaria italica
  Transcript Sequence Number=SeqID_25369
  Subcellular localization annotation: CTP_CleavageSite=39; ConfidenceScore=5.39e-01
TILRGGSASRRAHSPPPLLISDHQSARRTFGFFCAPWLNKSTRRCRACITSFTLLHFHCCLKKHILC

SEQ ID NO: 91344 - protein, 57 aa, Setaria italica
  Transcript Sequence Number=SeqID_25370
  Gene Ontology: Mol. function=protein dimerization activity; Cellular component=nucleus; Biological process=regulation of transcription, DNA-dependent
QNRWYLTFYALEAALQFNNELPNPQQIDYKSYPSKPSYAQLQAAENFCDLGRSIYHA

SEQ ID NO: 91345 - protein, 80 aa, Setaria italica
  Transcript Sequence Number=SeqID_25371
  Gene Ontology: Mol. function=protein serine/threonine kinase activity; Cellular component=integral to membrane; Biological process=protein amino acid phosphorylation
  Homolog annotation: Hit_ID=B9ST85; Match level="QueryCoverage=100%, HitCoverage=7%, E-value=7e-15, Identity=56%"; Hit description =Serine/threonine-protein kinase bri1, putative
  Pfam annotation: Domain name=LRR_1; Domain location=21-44; Score =10.2; E_value=3.4; Accession=PF00560.25; Description=Leucine Rich Repeat
  Pfam annotation: Domain name=LRR_1; Domain location=46-66; Score =12.1; E_value=1.5; Accession=PF00560.25; Description=Leucine Rich Repeat
  Pfam module annotation: Pfam domain module=LRR_1::LRR_1; Domain location=21-44::46-66
LDLSNNRLVGGLPASFAKCRSLEVLDLGGNQLSGDFVDTVVSTISSLRVLRLSFNNITGPNPLPVLAAGCPLLEVIDLGS

SEQ ID NO: 91346 - protein, 95 aa, Setaria italica
  Transcript Sequence Number=SeqID_25372
  Gene Ontology: Mol. function=transporter activity; Cellular component= integral to membrane; Biological process=auxin mediated signaling pathway
  Homolog annotation: Hit_ID=Q651V6; Match level="QueryCoverage=100%, HitCoverage=15%, E-value=3e-48, Identity=95%"; Hit description =Probable auxin efflux carrier component 2
MITGRDIYDVLAAIVPLYVAMFLAYGSVRWWGIFTPDQCSGINRFVAVFAVPLLSFHFISSNDPYAMQYRFLAADSLQKLVILAALAVWHNVLSR

SEQ ID NO: 91347 - protein, 424 aa, Setaria italica
  Transcript Sequence Number=SeqID_25373
  Gene Ontology: Mol. function=transferase activity, transferring groups other than amino-acyl groups; Biological process=paclitaxel biosynthetic process
  Homolog annotation: Hit_ID=B4G1P9; Match level="QueryCoverage=100%, HitCoverage=100%, E-value=0.0, Identity=90%"; Hit description=3-N -debenzoyl-2-deoxytaxol N-benzoyltransferase
  Pfam annotation: Domain name=Transferase; Domain location=6-423; Score=229.8; E_value=7e-66; Accession=PF02458.7; Description =Transferase family
  Subcellular localization annotation: CTP_CleavageSite=60; ConfidenceScore=5.69e-01
MAGAAPTVTKSPPSLVPPAGPTPGGSLPLSSIDKTAAVRVSVDFIQVFPSSGAADQAASVATMREGFARALVPYYPVAGRIAEPVQGEPEIECTGEGVWFVEAEASCSLEEARNLERPLCIPKEELLPRPPAGVRVEDTVLLAQVTKFTCGGFSVGICFSHLVFDGQGAAQFLKAVGEMARGIPEPSIKPIWARDAIPNPPKPPLGPPPSFTAFNFEKSVVEISLDSIKRVKDQVASETSQKCSTFDVVTAIIFKCRALAVDFAPDAEVRLGFAASTRHLLSNVLPSVEGYYGNCVYPGGLTKTSQEVKEASLVEIVTAIREAKEALSSRFLDWLSGGAKENHYNVSLDYGTLVVTDWSHVGFNEVDYGFGEPSYVFTLNDDVNIVPSVVYLKPPKPTQGIRLVLQCVEGQHSAVFKKELQKHA

SEQ ID NO: 91348 - protein, 51 aa, Setaria italica
  Transcript Sequence Number=SeqID_25374
MGEEQVSPRPEAAAAAVELTGFVMSAEEAKRAAAAAGVATVQDLLPLLVPS

SEQ ID NO: 91349 - protein, 84 aa, Setaria italica
  misc_feature (18)..(18): Xaa can be any naturally occurring amino acid
  misc_feature (37)..(37): Xaa can be any naturally occurring amino acid
  Transcript Sequence Number=SeqID_25375
  Gene Ontology: Mol. function=metal ion binding
AHFVTMPKADTRTPPAFXSDPLKRLSSSGDRESNGAXSGAPIHVEPEIVEIEGPSPVITQFPEQESNFIRSPSPHGPGAMTRKG

SEQ ID NO: 91350 - protein, 362 aa, Setaria italica
  Transcript Sequence Number=SeqID_25376
  Gene Ontology: Mol. function=metal ion binding; Cellular component =integral to membrane; Biological process=regulation of transcription
  Homolog annotation: Hit_ID=B6TBU8; Match level="QueryCoverage=99%, HitCoverage=99%, E-value=1e-157, Identity=77%"; Hit description=Zinc finger protein-like 1
  Pfam annotation: Domain name=zf-C3HC4; Domain location=54-103; Score =23.9; E_value=0.00019; Accession=PF00097.17; Description=Zinc finger, C3HC4 type (RING finger)
MVVCKCRKATRLYCFVHQVPVCGECICFQEHELCVVKNYAEWVVNSDYDWPQHCSSCNSVLEAGSEETTRLGCLHVMHTKCLISHIQNFPTQTAPAGYVCPSCSEPIWPPSSIKDTGSRLHAKLKEAIVQTGLEKNVFGNHFVTMPKADTRTPPAFASDPLKRLSSSGDRESNGANIISSAKDASLPSTLHSGMYSSASVGSGAPIHVEPEIVEIEGPSPVITQFPEQESNFIRSPSPHGPGAMTRKGATSVDRQNSEISYYADDEDGNRKKYTKRGTFRHRFLRMLLPFWSSALPTLPVTAPSKKESDAPEGRIRQRSSRMDPTKILLAMAIMACIATMGILYYRLSQRSLSENFVEDEIQ

SEQ ID NO: 91351 - protein, 64 aa, Setaria italica
  Transcript Sequence Number=SeqID_25377
  Gene Ontology: Mol. function=bile acid:sodium symporter activity; Cellular component=membrane; Biological process=sodium ion transport
  Homolog annotation: Hit_ID=B6TKE8; Match level="QueryCoverage=90%, HitCoverage=14%, E-value=3e-21, Identity=89%"; Hit description=Bile acid sodium symporter
  Subcellular localization annotation: CTP_CleavageSite=45; ConfidenceScore=5.02e-01
MFFLIPLQGTTVFETGMQSSLLALALANKFFPDPLVGVPPAISVVLMSLMGFSLVMVWSKKTET

SEQ ID NO: 91352 - protein, 143 aa, Setaria italica
  Transcript Sequence Number=SeqID_25378
  Gene Ontology: Mol. function=metal ion binding; Cellular component =intracellular
  Homolog annotation: Hit_ID=UPI00005DC2DD; Match level="QueryCoverage =69%, HitCoverage=13%, E-value=2e-19, Identity=43%"; Hit description =nucleic acid binding / protein binding / zinc ion binding
  Pfam annotation: Domain name=zf-C3HC4; Domain location=43-83; Score =9.4; E_value=0.0085; Accession=PF00097.17; Description=Zinc finger, C3HC4 type (RING finger)
MTRESTACHNSGDDGVNTNGDTGCQDHVIDIAPQDDADPKNYCVVCTHPSEWVAIGRCGHRVVCRKCMVRIRFFHRNKRCCICRTRCPKVIVAKRDASTDILSTLPLFALREGRVGKLWYHRLTAAYYEDEKEYNAARVACDG

SEQ ID NO: 91353 - protein, 141 aa, Setaria italica
  Transcript Sequence Number=SeqID_25379
MDAGGGVQAQGVNPDCPNAANPFHRCAEYCPVPAPRAAPKPSPPRPRPAQNGTRNGDGGKRVVPAAAADGSEEERAVNPDCPNASNRFHTCSEYCPVPPPRAAAKSPPPPGPRHAVHNGTAHRDEEECEITTADDSDEAGK

SEQ ID NO: 91354 - protein, 79 aa, Setaria italica
  Transcript Sequence Number=SeqID_25380
SFPFHHSNIYYDATASASTHLEPGLATTAALEELPNKRGWIGSGSWCITWIREGEEPAKTRSAVQARRRRSAQRSLGFL

SEQ ID NO: 91355 - protein, 37 aa, Setaria italica
  Transcript Sequence Number=SeqID_25381
NEEDLPTVGYPNVGKSSLINRLLKRRMCPAAPRPALL

SEQ ID NO: 91356 - protein, 363 aa, Setaria italica
  misc_feature (21)..(21): Xaa can be any naturally occurring amino acid
  Transcript Sequence Number=SeqID_25382
  Gene Ontology: Mol. function=GTP binding; Cellular component =intracellular
  Homolog annotation: Hit_ID=B9S422; Match level="QueryCoverage=79%, HitCoverage=79%, E-value=1e-133, Identity=77%"; Hit description =Nucleolar GTP-binding protein, putative
  Pfam annotation: Domain name=MMR_HSR1; Domain location=213-323; Score= 61.0; E_value=4.6e-15; Accession=PF01926.15; Description=GTPase of unknown function
  Subcellular localization annotation: CTP_CleavageSite=40; ConfidenceScore=5.49e-01
AASAAPTTSFPPAPAPARGRXRIKTAPLPFGTFPRRVLLRAAGESAMVAGDTLLGLYEKERLGLSHYADEEFEEERYWETLDADLRYWTRSLRPVQWYPGHIAKTEKELKEQLRLMDVVIEIRDARIPLSTSHPKMDSWLGNRRRIIVLNREDMISTEDRNAWATYFANHGNKVVFANGQLGMGTMKLGRMAKSVASGVNTKRKEKGLLPRPVRAGIVGYPNVGKSSLINRLLKRRMCPAAPRPGVTRELKWVRFGTDLELLDSPGILPMRISDQTAAIKLAICDDIGERSYDFPDVAAILVQMLIRHPAVGSEAFRRRYRIDVDDDCGKTFVTKLSVHLFNGDANQAAFRILSDYRKGKFGW

SEQ ID NO: 91357 - protein, 101 aa, Setaria italica
  Transcript Sequence Number=SeqID_25383
TQTRQYEKTQKNNEYRPVGLGHQSALYHANVLLKTQHRPVGLGHQPDLSQLCLVELGYRHEPQQKTLLDRIGTSIRASTQTHAQTTWLVKRGQRHHHDTTN

SEQ ID NO: 91358 - protein, 98 aa, Setaria italica
  Transcript Sequence Number=SeqID_25384
VNHGACHRLRILAVDRGAGIPVNPAAARGQRWQTRAGQVGSFVWCLLLALLVANLTYPSTFLFFCPPEYIKNRLLFNGEIPEIDFFFPSLSPGGRGRT

SEQ ID NO: 91359 - protein, 241 aa, Setaria italica
  misc_feature (66)..(66): Xaa can be any naturally occurring amino acid
  Transcript Sequence Number=SeqID_25385
  Gene Ontology: Mol. function=nucleotide binding; Biological process =defense response
  Homolog annotation: Hit_ID=Q9XEQ9; Match level="QueryCoverage=99%, HitCoverage=17%, E-value=4e-94, Identity=72%"; Hit description =Disease resistance protein RPM1 homolog
LDLDGNENFDSSYLEDVGKLFQLRYLRIKASNIITLPEQIGALQFMVVLDLLNCPNISELPASIVXLRCLKWLIAHRVRLPEEIGNLQALEFLSLIVVDYTTSITMLQELGSLTKLRTLGLDWRIGTQHRDKNIYIDNFVLLLGKLGRSNLQYLKLISPWSLDFLLDSWSPVPHLLQELDIIGWYLSKIPAWMASLTNLTYLDIEVKATQEALQILGDFPSLLFLKLHSNVGGPWESCLVS

SEQ ID NO: 91360 - protein, 115 aa, Setaria italica
  misc_feature (45)..(45): Xaa can be any naturally occurring amino acid
  misc_feature (73)..(73): Xaa can be any naturally occurring amino acid
  Transcript Sequence Number=SeqID_25386
  Homolog annotation: Hit_ID=Q5W7C9; Match level="QueryCoverage=45%, HitCoverage=16%, E-value=3e-11, Identity=69%"; Hit description =Unknow protein
CPHCPKFPTAASRRSLGRVSVPVWLVVLSDQLLIVALVGPYPTNXLIRYRPLQEHEVLRSPTFIRRSYAVLAXLSLRYPPLLGTFRYITHPFATRRQVAPRCRSTCMCKACRQRS

SEQ ID NO: 91361 - protein, 320 aa, Setaria italica
  misc_feature (5)..(5): Xaa can be any naturally occurring amino acid
  misc_feature (23)..(23): Xaa can be any naturally occurring amino acid
  Transcript Sequence Number=SeqID_25387
  Gene Ontology: Mol. function=ATPase activity, coupled to transmembrane movement of substances; Cellular component=integral to membrane; Biological process=transport
  Homolog annotation: Hit_ID=Q8GU65; Match level="QueryCoverage=99%, HitCoverage=53%, E-value=1e-156, Identity=60%"; Hit description=MRP -like ABC transporter
  Pfam annotation: Domain name=ABC_tran; Domain location=116-299; Score= 177.9; E_value=2.8e-50; Accession=PF00005.19; Description=ABC transporter
  Pfam annotation: Domain name=MMR_HSR1; Domain location=117-221; Score= -19.2; E_value=0.06; Accession=PF01926.15; Description=GTPase of unknown function
  Pfam module annotation: Pfam domain module=ABC_tran::MMR_HSR1; Domain location=116-299::117-221
IGTLXLSITAFLMISLPSNFIKXEFVGMSLSYGLSLNSLVYYTISISCMIENDMVAVERVHQYSTLPSEAAWEVADCLPSSNWPSRGDIDVKDLKVRYRQNTPLILKGITVSIKNGEKIGVVGRTGSGKSTLVQALFRIVEPAEGRIIIDGVDICTLGLHDLRSRFGVIPQEPVLFEGTVRSNIDPTGQYSEAEIWQALERCQLKDIVASKPEKLDALVADMGENWSVGQKQLLCFGRVILKRSRILFMDEATASVDSQTDAAIQRIIREEFAECTVISIAHRIPTVMDSDRVLVLDAGLVAEFDAPSKLSGEPSLLWSP

SEQ ID NO: 91362 - protein, 194 aa, Setaria italica
  misc_feature (101)..(101): Xaa can be any naturally occurring amino acid
  misc_feature (161)..(161): Xaa can be any naturally occurring amino acid
  Transcript Sequence Number=SeqID_25388
  Gene Ontology: Mol. function=zinc ion binding
  Homolog annotation: Hit_ID=Q2QVL7; Match level="QueryCoverage=100%, HitCoverage=27%, E-value=4e-53, Identity=48%"; Hit description =Transposon protein, putative, unclassified, expressed
  Pfam annotation: Domain name=MULE; Domain location=54-150; Score =111.1; E_value=3.8e-30; Accession=PF10551.1; Description=MULE transposase domain
GDTDAQGLFDYFKRMQSENSGFFCSIQVDSKNCVSNAVWVDARARMAYTYFGDAVYFDTTYSQNENMLPFAAFTGLNHHGDTVVFGCALILDRTESSYAWXFETWLTAMDKRLPFSFTTDEGKGMAAAVAKVFPQCFHRLCRWRILSRCKKKLTDVYTRFXGFHDELKRCINECDTVPVFDMFWGSILDKYGLR

SEQ ID NO: 91363 - protein, 35 aa, Setaria italica
  Transcript Sequence Number=SeqID_25389
LVALIRLQSNGKKVKLKSVINFFLKYVDLCFVFFF

SEQ ID NO: 91364 - protein, 81 aa, Setaria italica
  misc_feature (68)..(68): Xaa can be any naturally occurring amino acid
  Transcript Sequence Number=SeqID_25390
MVWKLEWTNICQYLRSPSFLSDLASDSSPAYSDFFQNQLGSDVGKTAVLEKEARLLEWMSLECYNHGXVTNAMKYGQRRCS

SEQ ID NO: 91365 - protein, 88 aa, Setaria italica
  misc_feature (8)..(8): Xaa can be any naturally occurring amino acid
  Transcript Sequence Number=SeqID_25391
MADADANXPPPDAAASPIASISPSTVGAGDATDADADSIVKQLAGLGIAAAGGEVFPEPSGWDDVPVPVPVAVADGDEVAGEKVRGPP

SEQ ID NO: 91366 - protein, 172 aa, Setaria italica
  Transcript Sequence Number=SeqID_25392
  Gene Ontology: Mol. function=protein serine/threonine kinase activity; Biological process=protein amino acid phosphorylation
  Homolog annotation: Hit_ID=Q69MP3; Match level="QueryCoverage=93%, HitCoverage=19%, E-value=2e-72, Identity=79%"; Hit description =Putative receptor kinase 5
  Pfam annotation: Domain name=Pkinase_Tyr; Domain location=1-139; Score=-171.9; E_value=0.027; Accession=PF07714.9; Description =Protein tyrosine kinase
LDANMRPKIADFGMARIFNDNQKDANTHRVVGTYGYMAPEYAMEGVFSIKSDVYSFGVLLLEIVTGIKRSSVSSIIGSPNLIVYAWNMWKEGKTRDLADQSITDACLLDEVSLCSHVALLCVQENPDDRPLMSSVVFTLENGSTTLPAPNNPGHYGQRSSDRGDKLGTELEN

SEQ ID NO: 91367 - protein, 34 aa, Setaria italica
  Transcript Sequence Number=SeqID_25393
KYFASLRMKSPSDQHGVEASMIGGGHTSGTVCQP

SEQ ID NO: 91368 - protein, 102 aa, Setaria italica
  Transcript Sequence Number=SeqID_25394
LNFLLEREDAKKAPMVAPTQEFLELLAGGSGTKGRIAVSAAGDVEEGVDHEPASPAAGALLKGVTPDGDTALHAVASNGDNGDDFLKCAGIICDRDRDLLFA

SEQ ID NO: 91369 - protein, 159 aa, Setaria italica
  Transcript Sequence Number=SeqID_25395
KKNLISISPPGRAVVAVLILLFGDGVDRVDDPREVAEEGEQEADPELELAAELEEDAEWGKDDGDEDVDAVRRALRHGAPIRTAASRCLWLRRRSSFFPKRILFFLPYAGWFMYSDCVCFVKSSSETVINRCTLSDPSCCSVERASSGLDTMYFLRFKL

SEQ ID NO: 91370 - protein, 118 aa, Setaria italica
  Transcript Sequence Number=SeqID_25396
AHSCLLWTHQTDSCKRKRSNLYGSEQDEGGHGELRRHPHRHHPAPSRRLPQVRLQGRVLALPLAHLPRLSSGDHLRDLRHHQGIAWKQSNHSGEGTAQDVKFLITGSLLIWRLIVSCQ

SEQ ID NO: 91371 - protein, 98 aa, Setaria italica
  misc_feature (5)..(5): Xaa can be any naturally occurring amino acid
  misc_feature (8)..(8): Xaa can be any naturally occurring amino acid
  Transcript Sequence Number=SeqID_25397
VFFFXFFXFFFFLIFCKRRKYIVSSPELARSTEQQDGSESVHRFITVSDDDLTKHTQSEYINTSKKSSIGLYVVRQMTNLQTTQHTHHPAQVPASRYC

SEQ ID NO: 91372 - protein, 128 aa, Setaria italica
  Transcript Sequence Number=SeqID_25398
MHTNIYKFRETKTTYNLKRRKYIVSSPELARSTEQQDGSESVHRFITVSDDDLTKHTQSEYINTSKKSSIGLYVVRQMTNLQTTQHTHHPAQVPPGRAVVAVLILLFGDGVDRVDDPREVAEEGEQEA

SEQ ID NO: 91373 - protein, 191 aa, Setaria italica
  Transcript Sequence Number=SeqID_25399
LKRRKYIVSSPELARSTEQQDGSESVHRFITVSDDDLTKHTQSEYINTSKKSSIGLYVVRQMTNLQTTQHTHHPAQVPPGRAVVAVLILLFGDGVDRVDDPREVAEEGEQEADPELELAAELEEDAEWGKDDGDEDVDAVRRALRHGAPIRTAASRCLWLRRRSSFFPKRILFFLPYAGWFMCKQSTETAI

SEQ ID NO: 91374 - protein, 107 aa, Setaria italica
  Transcript Sequence Number=SeqID_25400
MSAPRRRLATTTPSLRFLGLLKQPDDACVDVQELELDERDVVWSSSATSSSSTSAASSPSPTTSPSASLRRPISASSRYFPSGSVGLSALLAEDHRHAPTAPRRRRR

SEQ ID NO: 91375 - protein, 108 aa, Setaria italica
  misc_feature (23)..(23): Xaa can be any naturally occurring amino acid
  Transcript Sequence Number=SeqID_25401
  Gene Ontology: Mol. function=protein kinase activity; Biological process=protein amino acid phosphorylation
  Homolog annotation: Hit_ID=Q7F0A0; Match level="QueryCoverage=91%, HitCoverage=20%, E-value=5e-12, Identity=43%"; Hit description =Serine/threonine protein-like protein
  Subcellular localization annotation: CTP_CleavageSite=81; ConfidenceScore=5.50e-01
PTNQKLPKLIDTKPNTGSISSRXDEKSSNVDTTTSNVVNRDVRRSIRSVVNSYIKNFDAKFNTGSTANSDARNSDTKPSTRSVANADDAKCMDVKPISGSVKSNDAIK

SEQ ID NO: 91376 - protein, 174 aa, Setaria italica
  Transcript Sequence Number=SeqID_25402
  Gene Ontology: Mol. function=nucleic acid binding
  Homolog annotation: Hit_ID=Q7XWS4; Match level="QueryCoverage=99%, HitCoverage=26%, E-value=7e-22, Identity=36%"; Hit description =OSJNBa0091C12.8 protein
  Pfam annotation: Domain name=zf-CCHC; Domain location=52-69; Score =13.6; E_value=0.0036; Accession=PF00098.15; Description=Zinc knuckle
LPTMSMTNWPVSDRVKLKAPDYVWMPGRPKTERRDPTEAPKGTKLSRVGTVIRCTKCKQTGHNRSTCEKRNAAASSGTVGVQSAASPNAMAVVSNTQQSCTSSRKRKAPAGSSHGAPVKNVTKTSANARVSTIQGGSATGKAGAHVSASATKITRPDPKQGPMLLLPPWESAKL

SEQ ID NO: 91377 - protein, 71 aa, Setaria italica
  Transcript Sequence Number=SeqID_25403
  Gene Ontology: Mol. function=glycerophosphodiester phosphodiesterase activity; Cellular component=anchored to membrane; Biological process=lipid metabolic process
  Homolog annotation: Hit_ID=Q9FZI0; Match level="QueryCoverage=97%, HitCoverage=6%, E-value=3e-19, Identity=59%"; Hit description =F1O19.6 protein
SAYKTLRGDAPRVVAKGGFSGVFPDSSSDAYSFALIASAPGTTLWCDVQLTKDGVGVCLRDINMNNCTNVA

SEQ ID NO: 91378 - protein, 65 aa, Setaria italica
  Transcript Sequence Number=SeqID_25404
  Homolog annotation: Hit_ID=B6SYB6; Match level="QueryCoverage=100%, HitCoverage=11%, E-value=3e-22, Identity=81%"; Hit description =Glycosyltransferase
KVRPYTRKFEDSIMSTIDEVTILPVAGAYNASASAGDGGTLRRRCDVRHPRGVPAVVFSTGGYTG

SEQ ID NO: 91379 - protein, 40 aa, Setaria italica
  Transcript Sequence Number=SeqID_25405
FSNISCICLIVSFLVHQYYCYYHIPTRRNRSCHLKIPIKP

SEQ ID NO: 91380 - protein, 111 aa, Setaria italica
  Transcript Sequence Number=SeqID_25406
  Gene Ontology: Mol. function=catalytic activity; Biological process =metabolic process
  Homolog annotation: Hit_ID=B9RMA4; Match level="QueryCoverage=96%, HitCoverage=31%, E-value=3e-38, Identity=65%"; Hit description =Aminocarboxymuconate-semialdehyde decarboxylase, putative
LSPVCLANPADDGSGIKQLEHLIVQEKYRAVRFNPNLWPSGQKMTNEVGRSLFAKAGELGAPVGILVMKGIGLYIQEIEELCRDYPETTVILDHMAFCKPPTNDEEEKAFS

SEQ ID NO: 91381 - protein, 133 aa, Setaria italica
  Transcript Sequence Number=SeqID_25407
  Gene Ontology: Mol. function=catalytic activity; Biological process =metabolic process
  Homolog annotation: Hit_ID=B9RMA4; Match level="QueryCoverage=96%, HitCoverage=37%, E-value=2e-53, Identity=72%"; Hit description =Aminocarboxymuconate-semialdehyde decarboxylase, putative
THVWASPQQANEGYSYFPGQEPTLRGDADFLLECMDEAGVDGALIVQPVNHMFDHSLVTSVLKKYPSKFIGCCLANPADDGSGIKQLEHLIVQEKYRAVRFNPNLWPSGQKMTNEVGRSLFAKAGELGAPSRE

SEQ ID NO: 91382 - protein, 34 aa, Setaria italica
  Transcript Sequence Number=SeqID_25408
SIPVSSRKFRISCYFISSSRVILKQYSFYRVLSW

SEQ ID NO: 91383 - protein, 208 aa, Setaria italica
  Transcript Sequence Number=SeqID_25409
  Gene Ontology: Mol. function=sequence-specific DNA binding; Cellular component=nucleus
  Homolog annotation: Hit_ID=B6SWM4; Match level="QueryCoverage=100%, HitCoverage=31%, E-value=1e-106, Identity=88%"; Hit description=BEL1- related homeotic protein 30
MATYYPSPGSERDSQTLYSTESGNASYPMPPTLGNLLYPNNASSGPYTEFSGIIQPQQNFMDLPGHPSAMSHDSSSNEATNMGTSLTEQRSFGPLKDMRNEMLMHLMDGAHSSGSDLIHNDAHNTAQVEFGMLNNHNSTSVPSAPGQGLSLSLNTHILAPSYPYWSAKPDLLSPNSYQGDDNRMKNMQSEASRAIRNSKYLKAAQDCL

SEQ ID NO: 91384 - protein, 88 aa, Setaria italica
  Transcript Sequence Number=SeqID_25410
MAMRLRRRSAFHGSGQPQPNMDDHDTHSERVTKVAGNPCHAGGGGGAAAAVQQHTAVHTESFKEVDGDGYDPRRGHNNHALQQQAHLQ

SEQ ID NO: 91385 - protein, 106 aa, Setaria italica
  Transcript Sequence Number=SeqID_25411
  Subcellular localization annotation: CTP_CleavageSite=91; ConfidenceScore=5.37e-01
VSRPPQLPTRLAPAAAAARAQCPPTRPASLWGRIWWLPRQARVGWPSSTFVSSEQAPGARHRPSLSPVATACRPRELSRATGGPPPPLRPPANYLENNYLGSILGV

SEQ ID NO: 91386 - protein, 134 aa, Setaria italica
  misc_feature (106)..(106): Xaa can be any naturally occurring amino acid
  Transcript Sequence Number=SeqID_25412
  Gene Ontology: Mol. function=metal ion binding; Cellular component =integral to membrane
  Homolog annotation: Hit_ID=B9RS95; Match level="QueryCoverage=95%, HitCoverage=29%, E-value=3e-46, Identity=68%"; Hit description=Ring finger protein, putative
  Pfam annotation: Domain name=zf-C3HC4; Domain location=84-124; Score =23.8; E_value=0.0002; Accession=PF00097.17; Description=Zinc finger, C3HC4 type (RING finger)
GTQYITCTMICCCLPCIISVMGFREDTNNTRGATSESINALPTYKFKTKKRRHGSGSEAEGQEGGIVAAGTEKERSLSAEDAVCCICLAKYAHNDELRELPCSHCXHKDCVDKWLKINALCPLCKSEIASSSST

SEQ ID NO: 91387 - protein, 105 aa, Setaria italica
  Transcript Sequence Number=SeqID_25413
  Gene Ontology: Mol. function=metal ion binding; Cellular component =integral to membrane
  Homolog annotation: Hit_ID=B9RS95; Match level="QueryCoverage=40%, HitCoverage=9%, E-value=1e-19, Identity=93%"; Hit description=Ring finger protein, putative
  Pfam annotation: Domain name=PHD; Domain location=35-79; Score=-3.6; E_value=0.065; Accession=PF00628.21; Description=PHD-finger
  Pfam annotation: Domain name=zf-C3HC4; Domain location=36-76; Score =29.2; E_value=1.7e-05; Accession=PF00097.17; Description=Zinc finger, C3HC4 type (RING finger)
  Pfam module annotation: Pfam domain module=PHD::zf-C3HC4; Domain location=35-79::36-76
MLIHLFLTGLIFFQRIKFFYHHHLCLFLYPLVLQVCCICLAKYAHNDELRELPCSHCFHKDCVDKWLKINALCPLCKSEIASSSSTSDTRQSEQNAIPVQEIEMH

SEQ ID NO: 91388 - protein, 406 aa, Setaria italica
  Transcript Sequence Number=SeqID_25414
  Gene Ontology: Mol. function=metal ion binding; Cellular component =plasma membrane
  Homolog annotation: Hit_ID=B9RS95; Match level="QueryCoverage=91%, HitCoverage=87%, E-value=1e-114, Identity=57%"; Hit description=Ring finger protein, putative
  Pfam annotation: Domain name=PHD; Domain location=336-380; Score= -3.6; E_value=0.065; Accession=PF00628.21; Description=PHD-finger
  Pfam annotation: Domain name=zf-C3HC4; Domain location=337-377; Score= 29.2; E_value=1.7e-05; Accession=PF00097.17; Description=Zinc finger, C3HC4 type (RING finger)
  Pfam module annotation: Pfam domain module=PHD::zf-C3HC4; Domain location=336-380::337-377
MNTSRMEQATGVSGPEHIIDIPRDTGSSASVSRSADRENHEELNPVDRPSTRALVPALQAPSAIGAVPSAGQTSGTRRSDNYVRRHRSPLNSGLWISIEVIVNVSQIVAAIVVLCLSRKEHPQAPLLEWVIGYTVGCFATLPHLYWRYIHRNIVNGEHEPAHAPQGSSHNNSTEATHAASASERRRNAARNAVLANPRINALFDHFKMALDCFFAVWFVVGNVWIFGGRSSAADAPNLYRLCIVFLTFSCIGYAMPFILCAMICCCLPCIISVMGFREDTNNTRGATSESINALPTYKFKTKKRRHGSGSEAEGQEGGIVAAGTEKERSLSAEDAVCCICLAKYAHNDELRELPCSHCFHKDCVDKWLKINALCPLCKSEIASSSSTSDTRQSEQNAIPVQEIEMH

SEQ ID NO: 91389 - protein, 97 aa, Setaria italica
  Transcript Sequence Number=SeqID_25415
  Gene Ontology: Mol. function=small conjugating protein ligase activity; Biological process=ubiquitin-dependent protein catabolic process
  Homolog annotation: Hit_ID=A0BUC8; Match level="QueryCoverage=77%, HitCoverage=50%, E-value=6e-18, Identity=51%"; Hit description =Ubiquitin carrier protein
  Pfam annotation: Domain name=UQ_con; Domain location=12-97; Score =31.7; E_value=1.9e-07; Accession=PF00179.18; Description=Ubiquitin -conjugating enzyme
RPADKSRRWETRLERELEGLWADPPEWCLPGADATDRLRWQVVVVGPEGSPYDGGVFAVRLEFPRDYPFKAPKVFFATKVYHPNVDPRTGLVCLDFL

SEQ ID NO: 91390 - protein, 89 aa, Setaria italica
  misc_feature (1)..(16): Xaa can be any naturally occurring amino acid
  Transcript Sequence Number=SeqID_25416
XXXXXXXXXXXXXXXXFLTTKGQVSDAIFTRNSLDDQAIQKFLPNIYQYTHCTVLYFNQIRNQFQLGKELSHHKICQSSRDSSSGPSRN

SEQ ID NO: 91391 - protein, 227 aa, Setaria italica
  Transcript Sequence Number=SeqID_25417
  Gene Ontology: Mol. function=N-acetyltransferase activity; Biological process=metabolic process
  Homolog annotation: Hit_ID=B6T916; Match level="QueryCoverage=100%, HitCoverage=100%, E-value=1e-92, Identity=75%"; Hit description=N -acetyltransferase
  Pfam annotation: Domain name=Acetyltransf_1; Domain location=113-195; Score=55.0; E_value=2.9e-13; Accession=PF00583.16; Description =Acetyltransferase (GNAT) family
MAPPANSTTFSGDVWAELRLADARDVPHIYSLIHQMAEFELLTDLFAATEELLTSTLFPSPAPPPFTSFTALVLDLSPSPVVPDSSSTIGSLRLDLSASPLADPEAAAFASPRGGGRVTAGFVICFPNYSSFLSKPGLYVEDIFVRAPWRRRGLGRMMLSSVAGRAAELGMGRVEWCVLDWNKNAIDFYEGMGADVLPQWRICRLTGAALDKYKGNQEAAADGKAVE

SEQ ID NO: 91392 - protein, 266 aa, Setaria italica
  misc_feature (232)..(232): Xaa can be any naturally occurring amino acid
  misc_feature (256)..(256): Xaa can be any naturally occurring amino acid
  Transcript Sequence Number=SeqID_25418
  Gene Ontology: Mol. function=binding; Cellular component=centrosome; Biological process=cell division
  Homolog annotation: Hit_ID=Q6K6B1; Match level="QueryCoverage=83%, HitCoverage=18%, E-value=3e-87, Identity=67%"; Hit description=CLIP -associating protein-like
PLNPEKDWSIRIAAMQRIEALVYGGAMDYPSFLMLLKQLVPPLSSQLSDRRSSIVKQACHLLNVLSKELLGDFEPCAEIFIPVLFKLVVITVLVIAESADNCIKSILRNCKVSRVLPLIADTAKNDHSAILRARCCEYALLILEYWADTPEIRRSADLYEDLIKSCVADAMSEVRAMARTCYMMFTKTWPERSRRLFMSFDPAIQRIINDEDGGKHKRHPSPSLHERGVQLXRASSHAGGNHFGYGTSAIVAMDKXAAISSESSLS

SEQ ID NO: 91393 - protein, 154 aa, Setaria italica
  Transcript Sequence Number=SeqID_25419
  Gene Ontology: Mol. function=RNA binding; Cellular component =chloroplast
  Homolog annotation: Hit_ID=B6TZ31; Match level="QueryCoverage=57%, HitCoverage=24%, E-value=1e-38, Identity=85%"; Hit description=RNA binding S1
  Subcellular localization annotation: CTP_CleavageSite=42; ConfidenceScore=5.79e-01
MLAASLKPAPSLAAFSPSARRSPAASASFPFPARLNQRPLLSAAATAEGTGTPASQGDAFSYSYTAAAAPPIDEARLAQFAADWEAARADKEQGNILTLPVLRSNSGGLIVKYNSLQGFVPNPLLSPAHWCKDPKRPIQDVTKDLVGTSISVKV

SEQ ID NO: 91394 - protein, 116 aa, Setaria italica
  misc_feature (8)..(8): Xaa can be any naturally occurring amino acid
  Transcript Sequence Number=SeqID_25420
  Gene Ontology: Mol. function=ATPase activity, coupled to transmembrane movement of ions, phosphorylative mechanism; Cellular component=membrane; Biological process=calcium ion transport
  Homolog annotation: Hit_ID=Q94IM7; Match level="QueryCoverage=100%, HitCoverage=17%, E-value=3e-49, Identity=83%"; Hit description=P -type ATPase (Fragment)
QDPPREEXVHKAIEDCRAAGIRVMVITGDNKETAEAICREIGVFGPDEDISSTSFTGKEFMALSDKKKLLRQQGGLLFSRAEPKHKQEIVRLLKEDGEVVAMTGDGVNDAPALKLA

SEQ ID NO: 91395 - protein, 373 aa, Setaria italica
  Transcript Sequence Number=SeqID_25421
  Gene Ontology: Mol. function=hydrolase activity, acting on acid anhydrides, catalyzing transmembrane movement of substances; Cellular component=integral to membrane; Biological process=calcium ion transport
  Homolog annotation: Hit_ID=O04938; Match level="QueryCoverage=97%, HitCoverage=34%, E-value=1e-163, Identity=83%"; Hit description=Ca2+- ATPase
  Pfam annotation: Domain name=Cation_ATPase_N; Domain location=4-77; Score=92.9; E_value=1.1e-24; Accession=PF00690.18; Description =Cation transporterATPase, N-terminus
  Pfam annotation: Domain name=E1-E2_ATPase; Domain location=96-352; Score=279.3; E_value=8.7e-81; Accession=PF00122.12; Description=E1 -E2 ATPase
  Pfam module annotation: Pfam domain module=Cation_ATPase_N::E1-E2 _ATPase; Domain location=4-77::96-352
AFPAWARTPSECLAELGVLVDRGLSSDEAAARLQRYGPNELERHAPPSVWKLVLEQFEDTLVRILLLAAVVSFVLALYDGAEGGEVGVTAFVEPLVIFLILIVNAVVGVWQESNAEKALEALKEIQSEHATVKRDGRWSHGLPARDLVPGDIVELRVGDKVPADMRVLQLISSTLRIEQGSLTGETASVNKTSHKIEMEDTDIQGKECMVFAGTTVVNGSAVCVVTGTGMATEIGKIHAQIQEASQEEDDTPLKKKLNEFGEALTAIIGVICALVWLINVKYFLSWDYVDGWPRNFKFSFEKCTYYFEIAVALAVAAIPEGLPAVITTCLALGTRKMAQKNALVRKLPSVETLGCTTVICSDKTGTLTTNQMS

SEQ ID NO: 91396 - protein, 394 aa, Setaria italica
  misc_feature (7)..(7): Xaa can be any naturally occurring amino acid
  Transcript Sequence Number=SeqID_25422
  Gene Ontology: Mol. function=hydrolase activity; Biological process =lipid catabolic process
  Homolog annotation: Hit_ID=Q69VY8; Match level="QueryCoverage=100%, HitCoverage=28%, E-value=0.0, Identity=85%"; Hit description =Putative calcium-independent phospholipase A2
GWRRVVXLLVEASFSPDFGKKINHARSLESFCSHNGIRLALMNSASGFGKPATALPTPITSPLFTGSFPSSPLLYSPEGTQRIGRIDLVPPLSLDGHPTSKSSPPTSPLKSRQPSAHVRSLYDKLQNMPQVGVIHLALQNDSTGSVLSWQNDVFVVAEPGELADRFLQSVKTSLSNLLRGRNRKGAYSLSKISCLSELVAEWPSFEIGGIHHRYIGRQTQVMEDNQEIGAYMFRRTVPAVHMAPEDVRWMVGAWRERIIVCSGKYGLTHGLVKAFMDSGAKAVISSSIEPPDSQTIAYYGMDVNGSLENGKFVIGDEEADESEPEPVSPISDWEDSDAEKSGNHDMDDEEYLAQFMCLLYDKLFREGVTVDTALQQALRSHPKLKYSCHLPNVL

SEQ ID NO: 91397 - protein, 322 aa, Setaria italica
  Transcript Sequence Number=SeqID_25423
  Gene Ontology: Mol. function=hydrolase activity; Cellular component =integral to membrane; Biological process=lipid catabolic process
  Homolog annotation: Hit_ID=Q69VY8; Match level="QueryCoverage=83%, HitCoverage=20%, E-value=1e-140, Identity=82%"; Hit description =Putative calcium-independent phospholipase A2
IPKVFAVSTLVSVMPAQPYIFRNYQYPPGTLEVSPGMAESPSIGAIGTAVSGAPVGIKRGAFMGSCKHRVWEAIRASSAAPYYLDDFAVDANRWQDGAIVANNPTIFAIREAQLLWPDTRIDCLVSIGCGSVPTKSRRGGWRYLDTGQVLIESACSVERVEETLDTLIPMLPEMQYFRFNPVDERCGMELDETDPAIWLKLEAATEEYIQKNFLAFKNLCELLVPRYPEEEKSSDIYKSLSFSRLTSLNQGFSESNPTLGWRRVVLLVEASFSPDFGKKINHARSLESFCSHNTDIQGKECMVFAGTTVVNGSAVCVVTGTG

SEQ ID NO: 91398 - protein, 736 aa, Setaria italica
  Transcript Sequence Number=SeqID_25424
  Gene Ontology: Mol. function=ATPase activity, coupled to transmembrane movement of ions, phosphorylative mechanism; Cellular component=membrane; Biological process=calcium ion transport
  Homolog annotation: Hit_ID=Q4PKC7; Match level="QueryCoverage=97%, HitCoverage=81%, E-value=0.0, Identity=91%"; Hit description=Ca2+ -ATPase (Fragment)
  Pfam annotation: Domain name=Cation_ATPase_C; Domain location=491 -718; Score=231.7; E_value=1.8e-66; Accession=PF00689.13; Description= Cation transporting ATPase, C-terminus
  Pfam annotation: Domain name=Hydrolase; Domain location=56-430; Score= 74.6; E_value=3.6e-19; Accession=PF00702.18; Description=haloacid dehalogenase-like hydrolase
  Pfam module annotation: Pfam domain module=Cation_ATPase _C::Hydrolase; Domain location=491-718::56-430
TLEELDKWQLGLVRQDKFQDLSPAVITTCLALGTRKMAQKNALVRKLPSVETLGCTTVICSDKTGTLTTNQMSAVKLVAIGRWPDTLRTFKVDGTTYDPTDGQIHDWPSLSMDENLKMIAKIAAVCNDASIAHSEHQYVATGMPTEAALKVLVEKMGLPGGYTPSMDSSDLLRCCQWWNNAAKRVATLEFDRTRKSMGVIVKADSGKNLLLVKGAVENLLERCSFIQLLDGSVVLLDDGAKAIILSTLRDMSASALRCLGFAYKEDLDAFATYDGEEHAAHKYLLDPSCYSNIESKMIFCGFVGLRDPPREEVHKAIEDCRAAGIRVMVITGDNKETAEAICREIGVFGPDEDISSTSFTGKEFMALSDKKKLLRQQGGLLFSRAEPKHKQEIVRLLKEDGEVVAMTGDGVNDAPALKLADIGIAMGITGTEVAKEASDMVLADDNFSTIVAAVGEGRSIYNNMKAFIRYMISSNIGEVASIFLTSALGIPEGLIPVQLLWVNLVTDGPPATALGFNPPDKDIMKKPPRRSDDSLITPWILFRYMVIGLYVGVATVGIFIIWYTHGSFLGIDLASDGHTLVSYSQLSNWGQCSSWEGFKVSPFTAGTQTFNFDANPCDYFQGGKIKATTLSLSVLVAIEMFNSLNALSEDGSLLSMPPWVNPWLLLAMSVSFGLHFLILYVPFLAQVFGIVPLSFNEWLLVIAVAFPVVLIDEVLKFVGRCLTARARKQSGKRKAE

SEQ ID NO: 91399 - protein, 67 aa, Setaria italica
  Transcript Sequence Number=SeqID_25425
  Gene Ontology: Mol. function=pseudouridine synthase activity
  Homolog annotation: Hit_ID=Q2QNM3; Match level="QueryCoverage=100%, HitCoverage=19%, E-value=2e-30, Identity=91%"; Hit description=RNA pseudourine synthase 1
TKCNKVAGKLVKAFTDHKVKKAYLALCIGFPPTWEKIKICSGHGRSKHGAWRVYAMPDIGRSLPGGS

SEQ ID NO: 91400 - protein, 191 aa, Setaria italica
  Transcript Sequence Number=SeqID_25426
  Gene Ontology: Mol. function=protein binding; Cellular component =nucleus; Biological process=DNA integration
  Homolog annotation: Hit_ID=Q6K7D3; Match level="QueryCoverage=89%, HitCoverage=13%, E-value=2e-63, Identity=74%"; Hit description =Putative BRUSHY1
  Subcellular localization annotation: CTP_CleavageSite=13; ConfidenceScore=5.12e-01
SVGKGSASKSAASGSKFSAPVSNSRHESQNVVGFQSTDADHQHFWAFRIGEHLVYLDGRAYVHEGAFSIESLKVEVACVYYLQISDEKRVKGLLPVIGELKYCGKVLDDAAPIYYDGQLTSEQKCVDVVIDDWVPKRLMKLYVDCCTKLSEAPNKKLLTKLYNLEVSEDEVIVSDCGLQDLSITPFLDALR

SEQ ID NO: 91401 - protein, 158 aa, Setaria italica
  misc_feature (29)..(29): Xaa can be any naturally occurring amino acid
  Transcript Sequence Number=SeqID_25427
  Gene Ontology: Cellular component=plasma membrane
  Homolog annotation: Hit_ID=B4G172; Match level="QueryCoverage=100%, HitCoverage=34%, E-value=1e-63, Identity=73%"; Hit description=Amino acid permease 1
MRQASILGVATTTAFYMMCGCLGYSAFGXGAPGNILSGFYEPYWLVDFANVCIVLHLVGGFQVFLQPLFAAVEAAVADRWPCSRREHGGRSNVFRLVWRTLFVALITLGAVLLPFFNSILGILGSVAFWPLTVFFPVEMYIRQREIPRFSGVWLALET

SEQ ID NO: 91402 - protein, 53 aa, Setaria italica
  Transcript Sequence Number=SeqID_25428
  Subcellular localization annotation: CTP_CleavageSite=27; ConfidenceScore=5.09e-01
RQRRAAAGQPPRPVGSRRRRRPPRLLRCSCFWRWRRVSWRSYDRSRGVNIVSC

SEQ ID NO: 91403 - protein, 127 aa, Setaria italica
  misc_feature (115)..(115): Xaa can be any naturally occurring amino acid
  Transcript Sequence Number=SeqID_25429
  Gene Ontology: Mol. function=nucleotide binding; Biological process =defense response
EELQDSRAHPFPHLKKVQIKNCKVLSHMPSCCLQASLEELDLSECNEIFKCNPSCFGGLKSLLRLRIHNCLGRIHLPCNLLASLEVLNLQKCEVYFQGGIEQIIKLKGILTSDFXELNLDELKEIRK

SEQ ID NO: 91404 - protein, 74 aa, Setaria italica
  Transcript Sequence Number=SeqID_25430
FPYPFFVFYYCVFNVSAASLPHPTEGAKDLTLVALGSHRPPHGPLTTASTAQSDQTRDQRHPGRRKINRGRKEK

SEQ ID NO: 91405 - protein, 208 aa, Setaria italica
  misc_feature (25)..(25): Xaa can be any naturally occurring amino acid
  misc_feature (76)..(76): Xaa can be any naturally occurring amino acid
  misc_feature (109)..(109): Xaa can be any naturally occurring amino acid
  Transcript Sequence Number=SeqID_25431
  Gene Ontology: Mol. function=serine-type peptidase activity; Cellular component=membrane; Biological process=proteolysis
  Homolog annotation: Hit_ID=B9RSG5; Match level="QueryCoverage=100%, HitCoverage=27%, E-value=7e-83, Identity=70%"; Hit description =Dipeptidyl peptidase IV, putative
  Pfam annotation: Domain name=Peptidase_S15; Domain location=5-207; Score=-107.5; E_value=0.032; Accession=PF02129.10; Description=X-Pro dipeptidyl-peptidase (S15 family)
  Pfam annotation: Domain name=Peptidase_S9; Domain location=47-207; Score=66.7; E_value=8.6e-17; Accession=PF00326.13; Description =Prolyl oligopeptidase family
  Pfam module annotation: Pfam domain module=Peptidase_S15::Peptidase _S9; Domain location=5-207::47-207
IGTKDGTTLYANMYLPDEKQFGPPXYRTLISVYGGPSVQLVYDSWSNTVDMRAQYLRNKGILVWKLDNRGTARRGXGKFEGQLKYNIGRVDAEDQRTGAEWLIKQGLSXKGTIGLYGWSYGGYLSAMCLARFPDIFCCAVAGAPVTAWDGYDTFYTEKYMGLPSENKDVYEFASIMHHVNNLKGKLLLVHGMVDENVHFRHTARLINS

SEQ ID NO: 91406 - protein, 68 aa, Setaria italica
  Transcript Sequence Number=SeqID_25432
  Gene Ontology: Mol. function=amino acid binding; Biological process =metabolic process
  Homolog annotation: Hit_ID=B6U9J2; Match level="QueryCoverage=83%, HitCoverage=12%, E-value=1e-22, Identity=94%"; Hit description=ACR4
MALMAAAAARMDDHDEYAKLVRGMNPPRVVIDNDASDDATVIRVDSVNSHGTLLAVVQVIADLNLVIR

SEQ ID NO: 91407 - protein, 112 aa, Setaria italica
  Transcript Sequence Number=SeqID_25433
  Subcellular localization annotation: CTP_CleavageSite=43; ConfidenceScore=5.76e-01
PAAPLPCPPCVQAPPVRIGAPAWLPSSLSPAVRRPRLTQLAPRAALARNRPKSEMQCSQRRMNLPCGWSFSFFSSVMLQLVHAKRNSKALEMVELPTSASTFVLRGCLDTPC

SEQ ID NO: 91408 - protein, 103 aa, Setaria italica
  Transcript Sequence Number=SeqID_25434
DSTSAGARGGQCGFLRRYVLGRRPRQEQEEEEKGAAHRRAHRCARPASALLPPVDCSCCRRRPPLSCWIPLGGLRCFSMDLRSSAKLARFVGWGRGREEREVS

SEQ ID NO: 91409 - protein, 505 aa, Setaria italica
  misc_feature (497)..(497): Xaa can be any naturally occurring amino acid
  Transcript Sequence Number=SeqID_25435
  Gene Ontology: Cellular component=integral to membrane
  Homolog annotation: Hit_ID=B6U077; Match level="QueryCoverage=32%, HitCoverage=41%, E-value=5e-84, Identity=92%"; Hit description=LMBR1- like conserved region family protein
DIIDNMVAQLLREDPSFKPSGGRLGENDMDYDTDDKSMATLRRQLRRAHEEYYRCKSEYMTCVMEALKLEDTIKNYERRDANGWKYVSSFRESRSGTLGSLLDTIEFIWRCILRKQLQKAFAVILGCMSAAILLAEATLLPSGVDLSLFSILIKAVGKQEVLVQVAAFVPLMYMCICTYYSLFKIGMLMFYSLTPRQTSSVSLLMICSMVARYAPPISYNFLNLIRLGGNAKTTFEKRMGNIDDAVPFFGRGFNRIYPLIMVVYTLLVASNFFGRVIDFFGSWKRFKFQREEENIDGLDPSGMIILQKERSWIEQGCKVGDQVIPLARNFNGVSTDIESQNVPLVENTVEMKAGATSSSGRAGHSKYANNRENIASKYTAVREQNRQVGKSVKKEISSNSVSLLEERNSEQGSNTGVPPTGVSATWASMKIGFQNFKANMGSKKFIPLRQDPGFVPNSNVSSPESLDDIFQRLKRRPANMPVDYLDDDDDDNTGDMXSAFPGSLR

SEQ ID NO: 91410 - protein, 81 aa, Setaria italica
  Transcript Sequence Number=SeqID_25436
  Gene Ontology: Mol. function=transferase activity, transferring glycosyl groups; Cellular component=integral to membrane
  Homolog annotation: Hit_ID=B6SWB6; Match level="QueryCoverage=76%, HitCoverage=7%, E-value=2e-26, Identity=95%"; Hit description=CSLF3 -cellulose synthase-like family F; beta1,3;1,4 glucan synthase
MLVLFCNVSAIGVALGKTVVYIGTWTAAKKMHAALGLLFNIWIMFLLYPFALAIMGRWAKRPIILVVLLPVIFVLVALLYV

SEQ ID NO: 91411 - protein, 66 aa, Setaria italica
  Transcript Sequence Number=SeqID_25437
MGGSRRKLKRSRAKVQVGLPRKKPREFKPAFELPEALAAAAAAEGSAGWDAEGSVVKNYAAFGVVA

SEQ ID NO: 91412 - protein, 83 aa, Setaria italica
  Transcript Sequence Number=SeqID_25438
  Gene Ontology: Mol. function=ATP-dependent helicase activity; Cellular component=intracellular; Biological process=RNA processing
  Homolog annotation: Hit_ID=Q10HL3; Match level="QueryCoverage=65%, HitCoverage=3%, E-value=5e-17, Identity=70%"; Hit description =Endoribonuclease Dicer homolog 2a
MAGTRGGEGPSGSEEGCGNAEDTYQHGQPVYFPEELVDNWVSFSRRGLYYCYNISMRGCLNTDAAPTDIILAVKCDLGPEFLR

SEQ ID NO: 91413 - protein, 108 aa, Setaria italica
  Transcript Sequence Number=SeqID_25439
NYLLFRIYFFREYAGELRIFRIYFVHGSAPISWGKKKRIRYFTLMVTLMIYGEARNPQQGRTWCVANCFLMISLKPRCSAGLIHDAFLYRSAMQMLRGTMDSLTRKTR

SEQ ID NO: 91414 - protein, 105 aa, Setaria italica
  Transcript Sequence Number=SeqID_25440
NNNLTNQSGAAPNHSPTILITPPYSLAPRTGRWAPTGNRHLQLVAPRHIHIGLSHPPVPPRDPVPSCFSWRGRGGAAGHAAGAGTRRRRAATRRRTNLGTERTTG

SEQ ID NO: 91415 - protein, 125 aa, Setaria italica
  Transcript Sequence Number=SeqID_25441
  Gene Ontology: Mol. function=adenylate cyclase activity; Biological process=cAMP biosynthetic process
  Homolog annotation: Hit_ID=B6TQK5; Match level="QueryCoverage=100%, HitCoverage=63%, E-value=2e-29, Identity=54%"; Hit description =Adenylate cyclase
GVSRVEEVEEPLDPAIALACAADPARLGGVDSPIVRLVAADYGVGGDAAPFVCLGGFRNTRAVYELEDEGLVLELDETSYELECETAEPDQVKEVLERLLTVSGVPYEYSRSNKFACFMAGKLLP

SEQ ID NO: 91416 - protein, 376 aa, Setaria italica
  Transcript Sequence Number=SeqID_25442
  Gene Ontology: Mol. function=receptor activity; Cellular component =integral to membrane
  Homolog annotation: Hit_ID=B9T3A9; Match level="QueryCoverage=99%, HitCoverage=72%, E-value=1e-148, Identity=67%"; Hit description=Ptm1, putative
  Pfam annotation: Domain name=Lung_7-TM_R; Domain location=29-316; Score=513.1; E_value=3.5e-151; Accession=PF06814.5; Description=Lung seven transmembrane receptor
LNPGWPKLFVASFDGSDLIATLPSRTIPITKTGMYNMYFIHCDPSLADLEIEGKTIWKNPTGYLPGRMAPLKNFFGLMSFAFVVLGIYWFYQYMKSWREVLPLQNCITLVITLGMLEMALWYFEYAEFNETGVRPKGITFWAVTFGTVKRTAAEIIVLIVSMGYGVVTPTLGGLTSKVVMLGGTFFLATETLELVENLGAVNDLSGKARLFLVYPVAILDAAFVIWIFISLAKTIGKLQARRLMAKLEIYRKFAIALIVSVLVSVGWIGYEIYFKSTDVFNERWQYAWIIPAFWHVLSFSLLCVICYLWAPSQNSMRFAYDGSEFFDRKDNLSLIRPAPSASKNGWSLSSTPEDKATKNVNSVASFDEDDEENKRE

SEQ ID NO: 91417 - protein, 333 aa, Setaria italica
  misc_feature (32)..(32): Xaa can be any naturally occurring amino acid
  misc_feature (48)..(48): Xaa can be any naturally occurring amino acid
  misc_feature (67)..(67): Xaa can be any naturally occurring amino acid
  Transcript Sequence Number=SeqID_25443
  Gene Ontology: Mol. function=oxidoreductase activity; Cellular component=cytoplasm; Biological process=metabolic process
  Homolog annotation: Hit_ID=Q8S530; Match level="QueryCoverage=100%, HitCoverage=71%, E-value=1e-175, Identity=90%"; Hit description =Cytosolic aldehyde dehydrogenase RF2D (Fragment)
  Pfam annotation: Domain name=Aldedh; Domain location=1-323; Score =414.3; E_value=2e-121; Accession=PF00171.14; Description=Aldehyde dehydrogenase family
PTMMFFLKVSPALAAGCTVVVKPAEQTPLSAXLYYAHLAKLAGVPDGXVINVVPGFGHTAGAAITSXMDVDSVAFTGSTEIGRLIMESAARSNLKTVSLELGGKSPLIVFDDADVDMAVNLSRLAIFFNKGEVCVAGSRVYVQEGIYDEFVKKAVEAAQSWKVGDPFDVTTNMGPQVDKEQFEKVLKYIEHGKSEGATLLTGGKPAAEKGYYIEPTIFVDVTDDMKIAQEEIFGPVMSLMKFKTVDEVIEKANCTKYGLAAGIVTKSLDIANRVSRSVRAGTVWVNCYFAFDPDAPFGGYKMSGFGRDQGLAAMDKYLQVKSVITALPDSPWY

SEQ ID NO: 91418 - protein, 213 aa, Setaria italica
  misc_feature (34)..(34): Xaa can be any naturally occurring amino acid
  Transcript Sequence Number=SeqID_25444
  Gene Ontology: Mol. function=hydrolase activity
  Homolog annotation: Hit_ID=B6TAG5; Match level="QueryCoverage=100%, HitCoverage=57%, E-value=1e-114, Identity=92%"; Hit description =Phosphatase DCR2
VPWAAILGNHDQESTMTREELMMFMSLMDYSVSXQVNPPGFLVHGFGNYHIGIHGPFGSELVNTSLLNLYFLDSGDREVVNGVKTYGWIKESQLVWLRATSLELQKTVLAPALAFFHIPIPEVRGLWHSGFKGQYQEGVACSSVNSGVLNTLVSMGDVKAVLLGHDHLNDFCGNLDGIWFCYGGGFGYHAYGRPHWPRRARVIYSELKKGQRS

SEQ ID NO: 91419 - protein, 371 aa, Setaria italica
  Transcript Sequence Number=SeqID_25445
  Gene Ontology: Mol. function=protein transporter activity; Cellular component=integral to membrane; Biological process=protein transport
  Homolog annotation: Hit_ID=B4FPJ1; Match level="QueryCoverage=92%, HitCoverage=93%, E-value=1e-180, Identity=87%"; Hit description =Protein transporter
  Pfam annotation: Domain name=Sec62; Domain location=67-258; Score= -49.1; E_value=6.4e-06; Accession=PF03839.8; Description =Translocation protein Sec62
  Subcellular localization annotation: CTP_CleavageSite=27; ConfidenceScore=5.09e-01
MAGKGAKATAAKSADKDKGKKAGGPVSRSSRAAPQEKSAPKKDVYQLFAEKVRDNKQLESRWAIMQETRVEYFRGKDFTTFIKNHPEVREILGPDKDLEVEDIVNTLLTKDLVIRCDRVMKTVRPGKKKLSSWPAHLEIHNEQVFTENDGFFAWMFLKRRTLWQTILSFVWPLFALAVCLFPVYPYQCKIVVLYSCAGALLFIVSILLLRAAIFGILWVLLGKRVWFFPNINAEETTFRELVRFWPEKDEGERPKWTSRLFYALVAVLVILLLRHHAPDEAARARYQKKVSNIIDDVLEWSPKLAISGMIEKHTGANMTEASNYTSTAGTSHAPSSAEGKATEANPDTQADSDEIQDSEYADDTRTRSSKA

SEQ ID NO: 91420 - protein, 150 aa, Setaria italica
  Transcript Sequence Number=SeqID_25446
  Gene Ontology: Cellular component=anchored to membrane
  Homolog annotation: Hit_ID=Q6Z4G8; Match level="QueryCoverage=82%, HitCoverage=27%, E-value=6e-66, Identity=92%"; Hit description=COBRA- like protein 1
  Pfam annotation: Domain name=COBRA; Domain location=55-150; Score =88.4; E_value=2.6e-23; Accession=PF04833.7; Description=COBRA-like protein
MATRRPASLHLCASAALLVVAFSFLTHSADAYDPLDPNGNITIKWDVMQWTPDGYVAVVSLYNYQQYRHIQAPGWKLGWVWAKKEIIWAMTGGQATEQGDCSKFKSNIPHCCRKDPEIVDLLPGTPYNMQIANCCKGGVLTAWAQDPENA

SEQ ID NO: 91421 - protein, 74 aa, Setaria italica
  Transcript Sequence Number=SeqID_25447
  Homolog annotation: Hit_ID=A2Q224; Match level="QueryCoverage=100%, HitCoverage=23%, E-value=1e-13, Identity=47%"; Hit description =Proteinase inhibitor I4, serpin
MGTLVGHVAPGAGFLLIGLWQLFSHTRLFLLRPSSYSAPVWFPVRGVRHLELILIIIGTVISILMELVIGPAKH

SEQ ID NO: 91422 - protein, 45 aa, Setaria italica
  Transcript Sequence Number=SeqID_25448
MEFGADGTRWSQPRGEAAEALPPPPPGDRGEVASPRFDSSRAFRL

SEQ ID NO: 91423 - protein, 115 aa, Setaria italica
  Transcript Sequence Number=SeqID_25449
TNVGEVAYGSEVPSNPAGDFCWPVVATNDDEENIGKVAYNSILNLESPDPTTLLRIMMGNKYSTNKVSEQFQNVARLQAPDFATLLTVMNNAGYGETADDGHYDVDKVMTNLEGW

SEQ ID NO: 91424 - protein, 253 aa, Setaria italica
  misc_feature (151)..(151): Xaa can be any naturally occurring amino acid
  Transcript Sequence Number=SeqID_25450
  Gene Ontology: Mol. function=metal ion binding; Cellular component =integral to membrane; Biological process=ubiquitin-dependent protein catabolic process
  Homolog annotation: Hit_ID=Q5GAS1; Match level="QueryCoverage=93%, HitCoverage=66%, E-value=8e-63, Identity=59%"; Hit description=Znf
  Pfam annotation: Domain name=C1_4; Domain location=52-96; Score=-9.8; E_value=0.044; Accession=PF07975.4; Description=TFIIH C1-like domain
  Pfam annotation: Domain name=zf-C3HC4; Domain location=53-94; Score =24.2; E_value=0.00018; Accession=PF00097.17; Description=Zinc finger, C3HC4 type (RING finger)
  Pfam module annotation: Pfam domain module=C1_4::zf-C3HC4; Domain location=52-96::53-94
  Subcellular localization annotation: CTP_CleavageSite=56; ConfidenceScore=5.46e-01
PGTPSSRFVFVAASPLPQRGLPAAALRSLPVTVYGSATAAAASPGKERERLECAVCLSEVADGEKVRTLPKCAHGFHVECIDMWFHSHDTCPLCRAPVAADLGALPREEPVEFPVFPTNVLFWGTHDDVTNAGLAAPPPPTLPPPSPAPPXTSSSASGRRKENLVIDIPTRGVAINTPPMNSPLPASRMPGTADDMRSPVSARLRSIRRLLSLGKQAVVGTSYSPRAAAAAGDIEQGVAGAEAARPPKTPKTS

SEQ ID NO: 91425 - protein, 65 aa, Setaria italica
  Transcript Sequence Number=SeqID_25451
PLLSTIQTRMTKRSTHTSLPLPKALTKQMRKPPPKQAKGWLPQPAISHIYIGIRKISRMPLHEAH

SEQ ID NO: 91426 - protein, 69 aa, Setaria italica
  Transcript Sequence Number=SeqID_25452
DLLGYLVHVVYRIRIWFYQIVNGFIELHKIFFSIPCGKILAPPLHTAAVYVQSLHKCVGGVSGSTLYSL

SEQ ID NO: 91427 - protein, 89 aa, Setaria italica
  Transcript Sequence Number=SeqID_25453
  Pfam annotation: Domain name=Complex1_LYR; Domain location=11-77; Score=24.0; E_value=0.00031; Accession=PF05347.7; Description =Complex 1 protein (LYR family)
MPSLQKALPPELADNVLRLYRECLRRAKFIGHQKHNTELLVTMVREQFKKNMHETDPEKIQKMKDDAARGLINHILYESEKITGRKFSG

SEQ ID NO: 91428 - protein, 204 aa, Setaria italica
  Transcript Sequence Number=SeqID_25454
  Gene Ontology: Cellular component=integral to membrane; Biological process=vesicle-mediated transport
  Homolog annotation: Hit_ID=B6TMV3; Match level="QueryCoverage=100%, HitCoverage=81%, E-value=4e-81, Identity=73%"; Hit description =Vesicle-associated membrane protein 724
  Pfam annotation: Domain name=Synaptobrevin; Domain location=107-195; Score=119.4; E_value=1.2e-32; Accession=PF00957.13; Description =Synaptobrevin
  Subcellular localization annotation: CTP_CleavageSite=48; ConfidenceScore=5.28e-01
AAQCLQRLPAGSSSASPGGSGAPARFSYSCDRHTYSFLLHRGYAYCVVAKESVPKNVSVAFLERLKDDFMKRYGGGKADTALAKSLNKEYGPVIKQHIQYVLEHSEELDKTLKVQAQVSEVKNIMLDNIEKTLGRGETLSELQDKTSDLRSQAQEFKKQGVKIRRKTWLQNMKIKLVILGILLLLVVIVWVSVCQGFDCTKHET

SEQ ID NO: 91429 - protein, 77 aa, Setaria italica
  Transcript Sequence Number=SeqID_25455
  Subcellular localization annotation: CTP_CleavageSite=65; ConfidenceScore=5.16e-01
MPSRFASLMMHSMIFRLLFGLVLALFLQSLSVLANPLELGLQSSSSGLPNPSGLRVGFYQYTCPNAEAIVRDEMTKI

SEQ ID NO: 91430 - protein, 275 aa, Setaria italica
  Transcript Sequence Number=SeqID_25456
  Gene Ontology: Mol. function=nuclease activity; Cellular component =Mre11 complex; Biological process=response to DNA damage stimulus
  Homolog annotation: Hit_ID=A8IE00; Match level="QueryCoverage=100%, HitCoverage=20%, E-value=1e-144, Identity=89%"; Hit description=DNA repair protein Rad50
KGIRSFDPDNKNVITFFKPLTLIVGPNGAGKTTIIECLKLSCTGELPPNSRSGHTFVHDPKVAGETETKGQIKLRFKTAAGKDVVCIRSFQLTQKASKMEFKAIESVLQTINPHTGEKVCLSYRCADMDREIPALMGVSKAVLENVIFVHQDESNWPLQDPSTLKKKFDDIFSATRYTKALEVIKKLHKDQAQEIKTFRLKLENLQTVKDQAFKLRENIAQDLEKSDASKSQMEQLKEKIQGIENEMKHMKTSLDELRRLQGQISTKAAERSTLF

SEQ ID NO: 91431 - protein, 75 aa, Setaria italica
  Transcript Sequence Number=SeqID_25457
  Subcellular localization annotation: CTP_CleavageSite=48; ConfidenceScore=5.22e-01
PARSWFVEGAGSVLYAPVIRRFIALFRQGVARLRNSFAFLVGFLSLFVAVVNREKVLWGVSLTLVRLSYHVVMIR

SEQ ID NO: 91432 - protein, 125 aa, Setaria italica
  misc_feature (17)..(17): Xaa can be any naturally occurring amino acid
  Transcript Sequence Number=SeqID_25458
  Gene Ontology: Mol. function=protein tyrosine kinase activity; Cellular component=plasma membrane; Biological process=protein amino acid phosphorylation
  Homolog annotation: Hit_ID=Q8LRD7; Match level="QueryCoverage=98%, HitCoverage=17%, E-value=8e-22, Identity=48%"; Hit description=CLV1 receptor kinase-like protein
  Pfam annotation: Domain name=LRR_1; Domain location=44-67; Score =12.0; E_value=1.6; Accession=PF00560.25; Description=Leucine Rich Repeat
  Pfam annotation: Domain name=LRR_1; Domain location=69-91; Score =11.1; E_value=2.2; Accession=PF00560.25; Description=Leucine Rich Repeat
  Pfam annotation: Domain name=LRR_1; Domain location=93-115; Score =12.6; E_value=1.2; Accession=PF00560.25; Description=Leucine Rich Repeat
  Pfam module annotation: Pfam domain module=LRR_1::LRR_1::LRR_1; Domain location=44-67::69-91::93-115
  Subcellular localization annotation: CTP_CleavageSite=37; ConfidenceScore=5.64e-01
PCAWNGVACSSSSTDAXQPRRVVALSLPKKRLVAALPAAPLPSSLRHLNLRSNRLFGPVPPELVSGAPALQSLVLYGNALNGPLPEELGRLAFLQILDLSSNALNGSLPASILKCRRLRALGVFV

SEQ ID NO: 91433 - protein, 158 aa, Setaria italica
  misc_feature (50)..(50): Xaa can be any naturally occurring amino acid
  Transcript Sequence Number=SeqID_25459
  Gene Ontology: Mol. function=electron carrier activity; Biological process=metabolic process
  Homolog annotation: Hit_ID=B6THA4; Match level="QueryCoverage=97%, HitCoverage=41%, E-value=4e-60, Identity=76%"; Hit description =Oxidoreductase
YQRRPWATAAAARGKHLLLEKPTALCAADLDAILDACDASGVQFMDTTNXWNPTNPRTAKMREIVADKDAFGDVRVIHSMRGFRASEYFLQNDIRVKPDLDALGVLGDVGWYCIRSILWAVDYELPETVIAQGHPVKNQAGVILACGATLYWADGKTA

SEQ ID NO: 91434 - protein, 83 aa, Setaria italica
  Transcript Sequence Number=SeqID_25460
MAVRGGAVAVLLVVALALSCDAASAQFLKKKPKQQPQTSKPGNPKQLPPKGKYTTVKANKYHKRDYEITCTTDFGAACYVKCP

SEQ ID NO: 91435 - protein, 57 aa, Setaria italica
  Transcript Sequence Number=SeqID_25461
MAYMRVTHRDEEGKKVTEKMPIPETRRPDTAKHFERKLEEQGFHRLERHPANAPRGV

SEQ ID NO: 91436 - protein, 159 aa, Setaria italica
  Transcript Sequence Number=SeqID_25462
IPENCQDILKNTLKNCSSSFVIWITILKKNARLVKLAILPREGQLLRFCSESSTLAARALSASRRRYHGRRWTPARSPSARRLALCRPCLTRRSSACSRRDPGAARRRRFNPRRTCELYPHPALLVAMEEANKRIRGRSNGGFWPRRRSSIWYSYFRSL

SEQ ID NO: 91437 - protein, 167 aa, Setaria italica
  misc_feature (22)..(22): Xaa can be any naturally occurring amino acid
  Transcript Sequence Number=SeqID_25463
  Gene Ontology: Mol. function=carbon-nitrogen ligase activity, with glutamine as amido-N-donor
  Homolog annotation: Hit_ID=Q5VQ48; Match level="QueryCoverage=99%, HitCoverage=32%, E-value=2e-36, Identity=46%"; Hit description =Putative amidase
PEGGYRQFLNIDGLRARRLGIXLRKDFFRFPSGSVQQKVFSEHFNIMSKIGAVLVDNLEIPSMDVINDAVQSGERALMLAEFKLSLNYYLSELATSPVRSLSDIIDFNNKHRIEERMAEFGQDYLIQSEATNGIGPTEKHAIARLNKLCKRGIEKVMQDNKLDAIVA

SEQ ID NO: 91438 - protein, 163 aa, Setaria italica
  Transcript Sequence Number=SeqID_25464
  Gene Ontology: Mol. function=RNA-directed DNA polymerase activity; Cellular component=mitochondrion
  Homolog annotation: Hit_ID=B9R8Z2; Match level="QueryCoverage=100%, HitCoverage=62%, E-value=1e-44, Identity=38%"; Hit description =Pentatricopeptide repeat-containing protein, putative
  Pfam annotation: Domain name=PPR; Domain location=112-146; Score =46.2; E_value=1.3e-10; Accession=PF01535.12; Description=PPR repeat
  Pfam annotation: Domain name=PPR; Domain location=3-36; Score=8.7; E _value=0.84; Accession=PF01535.12; Description=PPR repeat
  Pfam annotation: Domain name=PPR; Domain location=37-71; Score=32.5; E_value=1.7e-06; Accession=PF01535.12; Description=PPR repeat
  Pfam annotation: Domain name=PPR; Domain location=72-106; Score=25.4; E_value=0.00023; Accession=PF01535.12; Description=PPR repeat
  Pfam module annotation: Pfam domain module=PPR::PPR::PPR::PPR; Domain location=112-146::3-36::37-71::72-106
DLPLFNSLLDALVKSRHVGKAASLVRALERRFPPDAVTFNILADGWCSVKDTSRALDILLQMVESGIAPTKATYNIILKGFFRSGQLRHAWDFFLQMKKRGINDENGKPDVVSYTTVLHGLGVAGQLEKARKVFDEMSKEGCPPSTATYNALIQAICKKGNVE

SEQ ID NO: 91439 - protein, 96 aa, Setaria italica
  Transcript Sequence Number=SeqID_25465
  Homolog annotation: Hit_ID=B9SVM2; Match level="QueryCoverage=93%, HitCoverage=12%, E-value=4e-19, Identity=46%"; Hit description =Protein phosphatase 2c, putative
  Pfam annotation: Domain name=DUF868; Domain location=1-96; Score= -67.4; E_value=5.9e-08; Accession=PF05910.4; Description=Plant protein of unknown function (DUF868)
KARFHDQGDVHDIAIECGGGGGGEGGDAADMEMSIAIDGEEAVQVKHLQWKFRGNQSVTFSRAKVEVYWDVHDWLFSAGTRPALFIFRPIVLSSAS

SEQ ID NO: 91440 - protein, 52 aa, Setaria italica
  Transcript Sequence Number=SeqID_25466
FFLKVHGKIDFASIACHASCLRCRHDIQPLYQVANRHQGKHVIHIRSKTRTR

SEQ ID NO: 91441 - protein, 73 aa, Setaria italica
  misc_feature (17)..(17): Xaa can be any naturally occurring amino acid
  Transcript Sequence Number=SeqID_25467
AESGGGGPSFVLDTSNXPDDPSSNIPYGLTLRNGATEAAAVKEPEKALPPPPPPAPPAAADAAPAGDLMLRRY

SEQ ID NO: 91442 - protein, 96 aa, Setaria italica
  Transcript Sequence Number=SeqID_25468
  Gene Ontology: Mol. function=flavin-containing monooxygenase activity; Biological process=cellular aromatic compound metabolic process
  Homolog annotation: Hit_ID=B6SVK7; Match level="QueryCoverage=98%, HitCoverage=23%, E-value=4e-47, Identity=95%"; Hit description =Disulfide oxidoreductase/ monooxygenase/ oxidoreductase
KRFFRGGAELVDGRRVAADAVILATGYHSNVPQWLKGSDFFTQEGYPRVPFPDGWKGESGLYSVGFTRRGLSGVSSDAVKVAQDIAMEWDQQTSTL

SEQ ID NO: 91443 - protein, 101 aa, Setaria italica
  misc_feature (9)..(9): Xaa can be any naturally occurring amino acid
  Transcript Sequence Number=SeqID_25469
  Gene Ontology: Mol. function=heat shock protein binding; Biological process=response to stress
  Homolog annotation: Hit_ID=B6TDF0; Match level="QueryCoverage=93%, HitCoverage=51%, E-value=1e-23, Identity=57%"; Hit description=DnaJ -like protein
STNDQEDVXGFHDFLQEMISLMATVGREEPVYSLGELQSMLDGMIQDFAAPHQPEPTAFFTGGASQLFAEPSGAEQSSPSARMHPQGIGDSACFSRTAFSR

SEQ ID NO: 91444 - protein, 162 aa, Setaria italica
  Transcript Sequence Number=SeqID_25470
  Gene Ontology: Mol. function=helicase activity
  Homolog annotation: Hit_ID=B9RM74; Match level="QueryCoverage=95%, HitCoverage=71%, E-value=1e-23, Identity=29%"; Hit description =Pentatricopeptide repeat-containing protein, putative
  Pfam annotation: Domain name=PPR; Domain location=126-160; Score=7.3; E_value=1.2; Accession=PF01535.12; Description=PPR repeat
  Pfam annotation: Domain name=PPR; Domain location=21-55; Score=43.6; E_value=7.7e-10; Accession=PF01535.12; Description=PPR repeat
  Pfam annotation: Domain name=PPR; Domain location=56-90; Score=34.1; E_value=5.5e-07; Accession=PF01535.12; Description=PPR repeat
  Pfam annotation: Domain name=PPR; Domain location=91-125; Score=36.0; E_value=1.5e-07; Accession=PF01535.12; Description=PPR repeat
  Pfam module annotation: Pfam domain module=PPR::PPR::PPR::PPR; Domain location=126-160::21-55::56-90::91-125
LDEAWGVLDWMLQEGCCPMVHTYTPIVQGYCREGRIEEARKLIDFMEDSGCPPNAVTYNVLIRALCDDARFDEVKQVLAEIKMKGQKPNTVTYNIYMDALSKKGMAKEALQQFEDMQGEGLYPTAFTLSIILNCLCCNSRFSQAISLLERSTELNWCAAVAA

SEQ ID NO: 91445 - protein, 90 aa, Setaria italica
  Transcript Sequence Number=SeqID_25471
  Homolog annotation: Hit_ID=B6U6A3; Match level="QueryCoverage=47%, HitCoverage=10%, E-value=2e-16, Identity=83%"; Hit description=F-box domain containing protein
  Pfam annotation: Domain name=F-box; Domain location=25-72; Score =32.1; E_value=2.3e-06; Accession=PF00646.25; Description=F-box domain
MELEEAATERALASSGGGSSGGEPDRLSSLPDSLLHAIMSFLKARQAVQTCVLSTRWRHLWRSVPCLDVDHDEFRTAAGSAPNNHPAPVP

SEQ ID NO: 91446 - protein, 82 aa, Setaria italica
  Transcript Sequence Number=SeqID_25472
  Gene Ontology: Mol. function=symporter activity; Cellular component =integral to membrane; Biological process=auxin mediated signaling pathway
  Homolog annotation: Hit_ID=B6TPT6; Match level="QueryCoverage=100%, HitCoverage=16%, E-value=9e-31, Identity=79%"; Hit description=Auxin transporter-like protein 3
MDSEANGSLANEKAPETVGVGRYVEMEQDGDSNTVKSRLSGLLWHGGSAYDAWFSCASNQVAQVLLTLPYSFSQLGMLSGIL

SEQ ID NO: 91447 - protein, 92 aa, Setaria italica
  Transcript Sequence Number=SeqID_25473
SGGGVEKATRQRRLEDILLRQGRNLGRRFVILCGVLGKERRGGLYITRRPKPKQLTRAAKRRAGRERGGGAAPCDASGRRCRHVRTRRTGAL

SEQ ID NO: 91448 - protein, 122 aa, Setaria italica
  misc_feature (63)..(63): Xaa can be any naturally occurring amino acid
  misc_feature (72)..(72): Xaa can be any naturally occurring amino acid
  misc_feature (91)..(91): Xaa can be any naturally occurring amino acid
  misc_feature (95)..(95): Xaa can be any naturally occurring amino acid
  Transcript Sequence Number=SeqID_25474
  Subcellular localization annotation: CTP_CleavageSite=37; ConfidenceScore=5.85e-01
ARGSASCLNPPPPWCSSPSPAVPMPMTPTSSSLPLPSATMDSSSCSRAILKRPAFPSPAAAFXGKDFEDRGXPAEGEWCAVNAGWLSEGKXNGMXRNLLCYRRGGSVRLQGGRASVVAAPRG

SEQ ID NO: 91449 - protein, 200 aa, Setaria italica
  Transcript Sequence Number=SeqID_25475
  Gene Ontology: Mol. function=symporter activity; Cellular component =integral to membrane; Biological process=auxin mediated signaling pathway
  Homolog annotation: Hit_ID=Q7XGU4; Match level="QueryCoverage=74%, HitCoverage=27%, E-value=2e-78, Identity=92%"; Hit description=Auxin transporter-like protein 3
CGGGGSREDGAGRAGGGRHRGGRREQQGREVRAMGIGDDAEQQQQRDGGFGLKSLLWHGGSVYDAWFSCASNQVAQVLLTLPYSFAQLGMVSGVLLQVFYGLLGSWTAYLISILYLEYRTRRERDKVDFRNHVIQWFEVLDGLLGRHWRNAGLAFNCTFLLFGSVIQLIGCASNIYYVNDRLDKRTWTYIFGACCATTVF

SEQ ID NO: 91450 - protein, 189 aa, Setaria italica
  Transcript Sequence Number=SeqID_25476
  Gene Ontology: Mol. function=symporter activity; Cellular component =integral to membrane; Biological process=auxin mediated signaling pathway
  Homolog annotation: Hit_ID=Q5N892; Match level="QueryCoverage=100%, HitCoverage=38%, E-value=1e-91, Identity=86%"; Hit description=Auxin transporter-like protein 1
  Pfam annotation: Domain name=Aa_trans; Domain location=1-189; Score= -113.0; E_value=0.037; Accession=PF01490.10; Description =Transmembrane amino acid transporter protein
YRYLTVLSNSYGRSTTTSGPNKLVLYFTGATNILYTFGGHAVTVEIMHAMWKPRKFKYIYLLATLYVFTLTLPSAAAMYWAFGDQLLTHSNAFSLLPRTGWRDAAVILMLIHQFITFGFACTPLYFVWEKVVGMHETRSVCLRALVRLPIVVPIWFLAIIFPFFGPINSAVGALLVSFTVYVIPALAHM

SEQ ID NO: 91451 - protein, 184 aa, Setaria italica
  Transcript Sequence Number=SeqID_25477
  Gene Ontology: Mol. function=symporter activity; Cellular component =integral to membrane; Biological process=auxin mediated signaling pathway
  Homolog annotation: Hit_ID=Q9CA25; Match level="QueryCoverage=88%, HitCoverage=34%, E-value=3e-56, Identity=66%"; Hit description=Auxin transporter-like protein 3
TYLPDDYRTYRRTAAVVLMLVHQFITFGFACTPLYFVWEKLVGVHESRSLALRAAARLPIVLPIWFLAIIFPFFGPINSTVGSLLVSFTVYIIPALAHMAVFAPAASRENAVERPPRWVGGWAGMYVVNCFVVAWVLVVGFGLGGWASVTNFVKQIDTFGLFARCYQCPPKPHAGSPLPAPPHH

SEQ ID NO: 91452 - protein, 195 aa, Setaria italica
  Transcript Sequence Number=SeqID_25478
  Gene Ontology: Mol. function=symporter activity; Cellular component =integral to membrane; Biological process=auxin mediated signaling pathway
  Homolog annotation: Hit_ID=Q9FEL6; Match level="QueryCoverage=87%, HitCoverage=36%, E-value=4e-93, Identity=94%"; Hit description=Auxin transporter-like protein 3
RRRRRRRRREAASAATSRRGGNKALSSLFWHGGSVYDAWFSCASNQVAQVLLTLPYSFSQLGMASGIVFQLFYGLMGSWTAYLISVLYVEYRTRKEREKVDFRNHVIQWFEVLDGLLGKHWRNMGLFFNCTFLLFGSVIQLIACASNIYYINDKYDKRTWTYIFGACCATTVFIPSFHNYRIWSFLGLLMTTYTA

SEQ ID NO: 91453 - protein, 490 aa, Setaria italica
  Transcript Sequence Number=SeqID_25479
  Gene Ontology: Mol. function=symporter activity; Cellular component =integral to membrane; Biological process=auxin mediated signaling pathway
  Homolog annotation: Hit_ID=Q5N892; Match level="QueryCoverage=95%, HitCoverage=95%, E-value=0.0, Identity=89%"; Hit description=Auxin transporter-like protein 1
  Pfam annotation: Domain name=Aa_trans; Domain location=49-443; Score =386.9; E_value=3.4e-113; Accession=PF01490.10; Description =Transmembrane amino acid transporter protein
MAREQLEESIVADGNGKEEEVGVMGIGTAGDGDEHHGGGGFNMKRFLWHGGSVWDAWFSCASNQVAQVLLTLPYSFSQLGMLSGVLLQIFYGFLGSWTAYLISVLYVEYRSRKEKEGVSFKNHVIQWFEVLDGLLGPYWKAAGLAFNCTFLLFGSVIQLIACASNIYYINDRLDKRTWTYIFGACCATTVFIPSFHNYRIWSFLGLGMTTYTAWYLAIAALLNGQVEGVAHTGPTKLVLYFTGATNILYTFGGHAVTVEIMHAMWKPPKFKYIYLLATLYVFTLTLPSAAAMYWAFGDELLNHSNAFSLLPKTAWRDAAVILMLIHQFITFGFACTPLYFVWEKVIGMHDTKSIFKRALARLPIVVPIWFLAIIFPFFGPINSAVGALLVSFTVYIIPSLAHILTYRTASARMNAAEKPPFFLPSWTGMFVLNMFIVVWVLVVGFGLGGWASMVNFIRQIDTFGLFAKCYQCPKPPVPAAAQSPAPLPHH

SEQ ID NO: 91454 - protein, 66 aa, Setaria italica
  Transcript Sequence Number=SeqID_25480
GPKVPQLANLKGPPTYRTTSYVVGLVHGLAIVYLVALTFLLFQVYLHMRFSWITILLASFLIVQMN

SEQ ID NO: 91455 - protein, 86 aa, Setaria italica
  Transcript Sequence Number=SeqID_25481
NSRANLAYVELPHEEVKSSTDQHSWRKKRCLADWHMLGNTLDIPLPGNFTKEKGCTIALNTIPSCPPSVKFVQPSYSKRTKQNYRN

SEQ ID NO: 91456 - protein, 73 aa, Setaria italica
  Transcript Sequence Number=SeqID_25482
  Gene Ontology: Mol. function=nucleic acid binding
  Homolog annotation: Hit_ID=Q6E0J0; Match level="QueryCoverage=86%, HitCoverage=12%, E-value=1e-11, Identity=57%"; Hit description=U1 snRNP
MRIGKEAARRRGHETEHSKRHDQEYYRVDSYSKMETNYQVQPNNAEPEGPEEGEAYEEGDYQYHRAGEHMNDA

SEQ ID NO: 91457 - protein, 129 aa, Setaria italica
  misc_feature (119)..(119): Xaa can be any naturally occurring amino acid
  Transcript Sequence Number=SeqID_25483
  Gene Ontology: Mol. function=nucleic acid binding
  Homolog annotation: Hit_ID=Q6E0J0; Match level="QueryCoverage=55%, HitCoverage=14%, E-value=5e-18, Identity=67%"; Hit description=U1 snRNP
NERIQRIQRTNRTNERETDRARSHDRHRERGRDRGERDYERTSHERDRGHRHERDADYGNGGPKHDKNLSIYGQDYGYGQYEQHKGHEAYGYGQDGRGHETEHSKRHDQEYYRVDSYSXMETNYQVQHC

SEQ ID NO: 91458 - protein, 118 aa, Setaria italica
  Transcript Sequence Number=SeqID_25484
KNKGKVRTVRFRCGEGLCRQTAKQQGGRPRSEEPRRDDRRADRDREKSRERVRERDRDERARERSHDRTRDRDSREEKHHHRDRERTRDRERGKDREREHGRDRDRRDRDRDRDRGRD

SEQ ID NO: 91459 - protein, 119 aa, Setaria italica
  misc_feature (82)..(82): Xaa can be any naturally occurring amino acid
  misc_feature (92)..(92): Xaa can be any naturally occurring amino acid
  misc_feature (102)..(102): Xaa can be any naturally occurring amino acid
  misc_feature (112)..(112): Xaa can be any naturally occurring amino acid
  Transcript Sequence Number=SeqID_25485
  Gene Ontology: Mol. function=nucleic acid binding; Cellular component= ribonucleoprotein complex; Biological process=nuclear mRNA splicing, via spliceosome
  Homolog annotation: Hit_ID=Q6E0J0; Match level="QueryCoverage=73%, HitCoverage=17%, E-value=2e-30, Identity=75%"; Hit description=U1 snRNP
SLQVRLVTEKDTSKPRGYAFIEYMHTRDMKNAYKQADGRKVDNKRVLVDVERGRTVPNWRPRRLGGGLGSSRMGGAETDKKXSAREQQQGGXPRSEEPRRDXDRRADRDREXSVERVRE

SEQ ID NO: 91460 - protein, 193 aa, Setaria italica
  misc_feature (172)..(172): Xaa can be any naturally occurring amino acid
  Transcript Sequence Number=SeqID_25486
  Gene Ontology: Mol. function=nucleic acid binding; Cellular component= ribonucleoprotein complex; Biological process=embryonic development ending in birth or egg hatching
  Homolog annotation: Hit_ID=Q6E0I8; Match level="QueryCoverage=96%, HitCoverage=95%, E-value=5e-95, Identity=93%"; Hit description=U1 snRNP
MGDYGHGGGQVRGNPDSRPRGQGQRPNVQQLKLMGQIHPTGLTPNLLKLFEPRPPLEYKPPLEKRKLPAYTGMAHFVSHFAEPGDPEYAPPVPKCETRAEKKARIRDNKLEQGAAKVAEELQKYDPQSDPNATGDPYKTLFVARLNYETSENKIKREFEAYGPIKRVSTYGXIPVQEKLLHFGKVFQLLKCKP

SEQ ID NO: 91461 - protein, 450 aa, Setaria italica
  Transcript Sequence Number=SeqID_25487
  Gene Ontology: Mol. function=nucleic acid binding; Cellular component= ribonucleoprotein complex; Biological process=nuclear mRNA splicing, via spliceosome
  Homolog annotation: Hit_ID=Q6E0J0; Match level="QueryCoverage=96%, HitCoverage=88%, E-value=2e-95, Identity=76%"; Hit description=U1 snRNP
  Pfam annotation: Domain name=RRM_1; Domain location=99-169; Score =79.3; E_value=1.4e-20; Accession=PF00076.14; Description=RNA recognition motif. (a.k.a. RRM, RBD, o
QIRIRPIRRRPRPPLEYKPPLEKRKLPAYTGMAHFVSHFAEPGDPEYAPPVPKCETRAEKKARIRDNKLEQGAAKVAEELQKYDPQSDPNATGDPYKTLFVARLNYETSENKIKREFEAYGPIKRVRLVTEKDTSKPRGYAFIEYMHTRDMKNAYKQADGRKVDNKRVLVDVERGRTVPNWRPRRLGGGLGSSRMGGAETDKKDSAREQQQGGRPRSEEPRRDDRRADRDREKSRERVRERDRDERARERSHDRTRDRDSREEKHHHRDRERTRDRERGKDREREHGRDRDRRDRDRDRDRGRDYERETDRARSHDRHRERGRDRGERDYERTSHERDRGHRHERDADYGNGGPKHDKNLSSYGQDYGYGQYEQHKGHEAYGYGQDGRGHETEHSKRHDQEYYRVDSYSKMETNYQVQPNNAEPEGPEEGEAYEEGDYQYHRAGEHMNDA

SEQ ID NO: 91462 - protein, 75 aa, Setaria italica
  Transcript Sequence Number=SeqID_25488
  Gene Ontology: Mol. function=transferase activity, transferring glycosyl groups; Biological process=metabolic process
  Homolog annotation: Hit_ID=Q5ZAG6; Match level="QueryCoverage=98%, HitCoverage=15%, E-value=4e-23, Identity=74%"; Hit description =Betanidin-5-O-glucosyltransferase-like
VATRGAAANELSPDADGCLRWLEGKPSGSVVYVSFGTLSHFSPPELRELARGLNLSGKNFVWVIGGTDTEEQEWL

SEQ ID NO: 91463 - protein, 79 aa, Setaria italica
  Transcript Sequence Number=SeqID_25489
YPLCALVACLREVAAPWHGGSWQAGSHASTDQAGPAQGRSRSPPPLPPRRLLAMNGGIPGFHNAPASRAVVVAAALFSV

SEQ ID NO: 91464 - protein, 34 aa, Setaria italica
  Transcript Sequence Number=SeqID_25490
RVCSLLLAESQWAIDGPCRVCRYHHLTYLLSNLK

SEQ ID NO: 91465 - protein, 83 aa, Setaria italica
  Transcript Sequence Number=SeqID_25491
MDGGKKGRNAHKASADHRSDRKSATGMSGDPKKGGRGGKFTWEGADGYADEDLDLISNKNNGGRAGKGGATANAAKKDDGDDE

SEQ ID NO: 91466 - protein, 83 aa, Setaria italica; identical to SEQ ID NO: 91465
  Transcript Sequence Number=SeqID_25492

SEQ ID NO: 91467 - protein, 193 aa, Setaria italica
  Transcript Sequence Number=SeqID_25493
ILFPRRCHRRLGIGGFLGFLNIDLILSGDIGGSKKLRIVFPGGVRLVEVAPLLWNKFLWPDFHLVGASSGTVDGRGRKEPDGFWIGAFYSALQPALIWVSVALYRETAGRLVLVRWVDLCSVLAACRRSVQVHGRRSMGCVPGRYSSSVWFFWAQFKAFVRWYFVWPRCSCRSSSAPAVASATTAVDDERSVW

SEQ ID NO: 91468 - protein, 48 aa, Setaria italica
  Transcript Sequence Number=SeqID_25494
  Gene Ontology: Mol. function=NAD+ ADP-ribosyltransferase activity; Cellular component=nucleus
HNFPEQIMKFLIEEFSGNKSSVVSVLDDEPILIDFLSMTMVNLKSRKQ

SEQ ID NO: 91469 - protein, 105 aa, Setaria italica
  Transcript Sequence Number=SeqID_25495
  Subcellular localization annotation: CTP_CleavageSite=21; ConfidenceScore=5.45e-01
MAPRAPALLLAVAVAAAACVAASAQSRLGRIVVSGVVPCNTGTLIDVASSPAFPDAKVELRCGGGAVARATTGRDGSFQMEADAVAGALGALVGACQLVVDTPLA

SEQ ID NO: 91470 - protein, 92 aa, Setaria italica
  Transcript Sequence Number=SeqID_25496
  Subcellular localization annotation: CTP_CleavageSite=67; ConfidenceScore=5.39e-01
ENGKKPIRKGQTTACFPGRLSLFPQKSLRNQTAVSRTHRETGGRSANALSAAAGEIHPTLVSPSFCRAQDRRRCLTPRPIKFRALRRIKVQA

SEQ ID NO: 91471 - protein, 73 aa, Setaria italica
  Transcript Sequence Number=SeqID_25497
  Gene Ontology: Mol. function=4-coumarate-CoA ligase activity; Biological process=phenylpropanoid metabolic process
  Homolog annotation: Hit_ID=P17814; Match level="QueryCoverage=72%, HitCoverage=9%, E-value=8e-21, Identity=90%"; Hit description =Probable 4-coumarate--CoA ligase 1
MGSTEQQPEPVAAAAAVEEASPEIIFRSKLPDIAITNTLPLHRYCFERLPEVADRPCLIDGATGTVRTYAEVD

SEQ ID NO: 91472 - protein, 251 aa, Setaria italica
  Transcript Sequence Number=SeqID_25498
  Gene Ontology: Mol. function=DNA binding; Cellular component=nucleus; Biological process=regulation of transcription
  Homolog annotation: Hit_ID=Q6URR9; Match level="QueryCoverage=58%, HitCoverage=94%, E-value=3e-67, Identity=85%"; Hit description=P -type R2R3 Myb protein (Fragment)
  Pfam annotation: Domain name=Myb_DNA-binding; Domain location=14-62; Score=47.7; E_value=4.6e-11; Accession=PF00249.23; Description=Myb -like DNA-binding domain
  Pfam annotation: Domain name=Myb_DNA-binding; Domain location=68-113; Score=40.9; E_value=5.2e-09; Accession=PF00249.23; Description=Myb -like DNA-binding domain
  Pfam module annotation: Pfam domain module=Myb_DNA-binding::Myb_DNA -binding; Domain location=14-62::68-113
MGRAPCCDKASVKKGPWSPEEDAKLKSYIEQNGTGGNWIALPQKIGLKRCGKSCRLRWLNYLRPNIKHGGFSEEEDKIILSLYISIGSRWSIIAAQLPGRTDNDIKNYWNTRLKKKLFGKQSRKDQRQQQQFMRQATASDGMKQEAATGDANGSSGVPAVAYNWHQQAITGAVPPVPGIMMEGHRIGDEVDESIRKLLYKLGGAGPFATLPVPQCVPPMYEGSPSLMPPSCTVDTTSLSEGGVQGSSTLPA

SEQ ID NO: 91473 - protein, 117 aa, Setaria italica
  Transcript Sequence Number=SeqID_25499
  Homolog annotation: Hit_ID=Q94CX3; Match level="QueryCoverage=50%, HitCoverage=18%, E-value=7e-22, Identity=79%"; Hit description =P0402A09.3 protein
  Pfam annotation: Domain name=DUF1664; Domain location=1-66; Score= -5.0; E_value=0.00014; Accession=PF07889.4; Description=Protein of unknown function (DUF1664)
SSTILCLGRIDRVDCTLDECQEITEATRNDVTIIHGDLSAFQKDMESVHLVVRNLETKLGRLAYTQDRTTRGIYDLCEFTKKLEQSPKADTRQVTSSTPRPAIESSERAARAASLPP

SEQ ID NO: 91474 - protein, 358 aa, Setaria italica
  misc_feature (79)..(79): Xaa can be any naturally occurring amino acid
  Transcript Sequence Number=SeqID_25500
  Homolog annotation: Hit_ID=Q94CX3; Match level="QueryCoverage=100%, HitCoverage=100%, E-value=3e-94, Identity=54%"; Hit description =P0402A09.3 protein
  Pfam annotation: Domain name=DUF1664; Domain location=90-214; Score =200.6; E_value=4.4e-57; Accession=PF07889.4; Description=Protein of unknown function (DUF1664)
MVFGKVAIVIGSGIVGTVLTGGESSLPDFKDVISGAFKFMTKGAKQSKDGPSTSSPHTAQLLTQVNYLREELNMLSKSXNHVAIVTVDGRPGPGAYGITAVVIGAIGYLFIRWKGWKLSDMMFVTKRGFTDACNAVGKQVDQVSESVHAAKRHLAGRIDRVDCTLDECQEITEATRNEVTIIHGDLSAFQKDMESVHLVVRNLETKLGRLAYTQDRTTRGIYDLCEFTKKLEQSPKADTRQVTSSTPRPAIESSERAARAASLPPALEPESPSAQSPRAEAPKVVRSTTMSASGLSMLVGTTMPPKRDHQGAFSRASSMKEGSSELPSGAPSSAEPSPRRSTSSTLFGGFGFLRSYAS

SEQ ID NO: 91475 - protein, 136 aa, Setaria italica
  misc_feature (33)..(33): Xaa can be any naturally occurring amino acid
  misc_feature (45)..(45): Xaa can be any naturally occurring amino acid
  Transcript Sequence Number=SeqID_25501
  Gene Ontology: Mol. function=protein methyltransferase activity; Cellular component=cytoplasm; Biological process=protein amino acid methylation
  Homolog annotation: Hit_ID=Q9FN34; Match level="QueryCoverage=88%, HitCoverage=33%, E-value=5e-20, Identity=40%"; Hit description =Ribosomal protein L11 methyltransferase-like protein
IANQEVLSEALLCFGASSVTVDDIEDAGNLDEXISITSMYADGEXVDSSVSSAASSAGLNYSPGYETTVGKQCDWVATVQEAYESTEVADGLWVVPKWRTPHDPQATNIIINPGLVVLGAGEHPTTKLCLLLLREV

SEQ ID NO: 91476 - protein, 83 aa, Setaria italica
  Transcript Sequence Number=SeqID_25502
TMMEVKEENKPSGLLKQQMSSMFISADDILILDVLQSLVDEPDKMSKLKINITSSYLPLQLLLLRFVFHNTYYLIHLLIAYNS

SEQ ID NO: 91477 - protein, 175 aa, Setaria italica
  Transcript Sequence Number=SeqID_25503
  Gene Ontology: Cellular component=cell wall
  Homolog annotation: Hit_ID=O80537; Match level="QueryCoverage=99%, HitCoverage=47%, E-value=5e-54, Identity=55%"; Hit description =F14J9.21 protein
  Pfam annotation: Domain name=PAE; Domain location=1-174; Score=153.6; E_value=6.1e-43; Accession=PF03283.5; Description=Pectinacetylesterase
GIMSSSRAVNPDFYNWNRVKIRYCDGGSFAGDAYNKESGIYFRGQRIWNAVIRHLLSMGMSSADQVLLTGCSSGGLAVVLHCDQLRAFFPPGTTTTVKCLSDGGLYLDAVDISGGRSLRSYFGEIVAMQGIAQSLPPACTARLDATSCFFPQNIIDSVKTPMFILNAAYDVIQIS

SEQ ID NO: 91478 - protein, 164 aa, Setaria italica
  Transcript Sequence Number=SeqID_25504
  Gene Ontology: Mol. function=nucleic acid binding; Cellular component= nucleus; Biological process=response to DNA damage stimulus
  Homolog annotation: Hit_ID=B4FG21; Match level="QueryCoverage=99%, HitCoverage=52%, E-value=1e-57, Identity=70%"; Hit description =Nucleic acid binding protein
  Pfam annotation: Domain name=Swi3; Domain location=2-81; Score=126.7; E_value=7.3e-35; Accession=PF07962.4; Description=Replication Fork Protection Component Swi3
SLLSDDGIGFVLRYFPKAFKPRARPGHEVEDLGNLIKLYTDWHSRLIPYYSFEQFVRKVEKVGAGNRVRKCISELRDRVARGGDPTVLHEAPIEEVTPAGEPDGTAAEDAFLGTEDNHAIDPAHGDLMDPPMERNDVDLMQEDLLNETYGKAADEPRIPGGEGS

SEQ ID NO: 91479 - protein, 283 aa, Setaria italica
  Transcript Sequence Number=SeqID_25505
  Gene Ontology: Mol. function=DNA binding
  Subcellular localization annotation: CTP_CleavageSite=30; ConfidenceScore=5.16e-01
IDLTGIYGIKSKPEKRKYLSPVSKRRRLSTCSNEQSSRRSFSFSKGGGLEKEKSKPLSTSKPAAVDAGDAFQTKTIARCSTKEKPSKQKTDVSNSVTSDGQNERMVTENLIEDRSFEHKADPVAEIHSKITADETKYAKERAHVSGPINLNKLETPHVDKESVSIGTTSSEDQSGMKADEAPSISNSNMTRDLSEATGGPVAQQPEPALEANPRRHGTRNRPPTARALEAVAFGLLGSGKRKGDPKNMARSRPSQRARKATKDPVPTASGGDTESSVDAEAHP

SEQ ID NO: 91480 - protein, 130 aa, Setaria italica
  Transcript Sequence Number=SeqID_25506
ARASTATCTSCGGCSAAAAAARAPEVGEEPWTAPPPPPGRARGGQGSGGRPPSLGGASPPTAARSDHPSCSSDSEFQTEKGSSSSSSSSAAAAAAAAALLIRRTVDESIERRHWRQPHNFGDAGISFQMR

SEQ ID NO: 91481 - protein, 109 aa, Setaria italica
  Transcript Sequence Number=SeqID_25507
PYEESGGRPESNPFAARAVRIYLREVREAQAKARGIPYEKKKRKRGSAAAAPPVAPPPVVTAEGAGTSGGAAEEEDDEPSPSGEPQQATPASSAPPPPPPPTRCPYTPV

SEQ ID NO: 91482 - protein, 98 aa, Setaria italica
  misc_feature (71)..(71): Xaa can be any naturally occurring amino acid
  misc_feature (75)..(75): Xaa can be any naturally occurring amino acid
  Transcript Sequence Number=SeqID_25508
  Gene Ontology: Mol. function=nucleic acid binding
  Homolog annotation: Hit_ID=B9S7K8; Match level="QueryCoverage=91%, HitCoverage=37%, E-value=9e-40, Identity=82%"; Hit description=Rrm -containing protein, putative
  Pfam annotation: Domain name=RRM_1; Domain location=13-83; Score =77.5; E_value=4.7e-20; Accession=PF00076.14; Description=RNA recognition motif. (a.k.a. RRM, RBD, o
QLLDLSSTDDFRLFCGDLGNEVNDDILTKAFSKYPSFNMARVIRDKWTGKTKGYGFVSFANASDLAAALKXMNGXYVGNRPIKLRKSTWKSRIDFEAL

SEQ ID NO: 91483 - protein, 126 aa, Setaria italica
  Transcript Sequence Number=SeqID_25509
  Gene Ontology: Mol. function=nucleic acid binding
  Homolog annotation: Hit_ID=B9S7K8; Match level="QueryCoverage=88%, HitCoverage=46%, E-value=9e-45, Identity=80%"; Hit description=Rrm -containing protein, putative
  Pfam annotation: Domain name=RRM_1; Domain location=20-90; Score =81.8; E_value=2.4e-21; Accession=PF00076.14; Description=RNA recognition motif. (a.k.a. RRM, RBD, o
TPKLIVTQHVATRDLDDFRLFCGDLGNEVNDDILTKAFSKYPSFNMARVIRDKWTGKTKGYGFVSFANASDLAAALKEMNGKYVGNRPIKLRKSTWKSRIDFEALEKGKTRPQKKIKLQKRSVLHK

SEQ ID NO: 91484 - protein, 121 aa, Setaria italica
  Transcript Sequence Number=SeqID_25510
  Gene Ontology: Mol. function=nucleic acid binding
  Homolog annotation: Hit_ID=Q9M837; Match level="QueryCoverage=57%, HitCoverage=28%, E-value=6e-12, Identity=48%"; Hit description =Putative RRM-containing protein
PTTPSYFPVPFHLQNPQYAAWHAATAAAPAYNAVYSMPQVQQAQHLFQKDSKIISPEALATVKAAIANSEKDKKVEAAKKAVPRKAAGQSWEDPTLADWPESNKPWDNCHSHRQDLMLYLS

SEQ ID NO: 91485 - protein, 196 aa, Setaria italica
  Transcript Sequence Number=SeqID_25511
  Gene Ontology: Mol. function=hydrolase activity, acting on acid anhydrides, in phosphorus-containing anhydrides; Cellular component =spliceosome; Biological process=mRNA processing
  Homolog annotation: Hit_ID=B9SPB9; Match level="QueryCoverage=100%, HitCoverage=19%, E-value=1e-104, Identity=91%"; Hit description =Helicase, putative
  Pfam annotation: Domain name=Helicase_C; Domain location=121-196; Score=-4.1; E_value=0.1; Accession=PF00271.23; Description=Helicase conserved C-terminal domain
LVVDEKGKFREDSFQKALNALVPASDSDKKKENGKWQKAIIAGKSSEESDIFKMVKMIIQRQYDPVILFSFSKRECEFLAMQMAKMDLNEDDEKANIETIFWSAMDLLSDDDKKLPQVSNMLPLLKRGIGVHHSGLLPILKEVIEILFQEGLIKCLFATETFSIGLNMPAKTVVFTNVRKFDGDRFRWLSSGEYIQ

SEQ ID NO: 91486 - protein, 221 aa, Setaria italica
  Transcript Sequence Number=SeqID_25512
  Homolog annotation: Hit_ID=B6TIG9; Match level="QueryCoverage=100%, HitCoverage=66%, E-value=1e-69, Identity=61%"; Hit description =Transmembrane protein 115
  Pfam annotation: Domain name=DUF1751; Domain location=1-49; Score= -10.0; E_value=0.003; Accession=PF08551.2; Description=Eukaryotic integral membrane protein (
IFIVNLSTSACVFATTIVLYYITQEESYLYTPLSGFYGVLSGLLVGIKQILPDQELNLFVLKISAKWIPSIVAFISVVVSFFLKESMAYVPIILFGIYVSWIYLRYFQKRLEVGLKGDPSDEFSFSSFFPGFLRPILDPIASIFHKIFCGRSARYESTGQALDGSQFPGSGSIEANRRRERGQRALEQRLAEKLAAVRSAEGTDPPPPPQQQPEEDASDKV

SEQ ID NO: 91487 - protein, 88 aa, Setaria italica
  Transcript Sequence Number=SeqID_25513
  Gene Ontology: Mol. function=binding
NATDAEVAAATELNERASVEDILHALVSSLIQLCPSSCYSLKKLGIYGIESIEGMEENNDSFNDDPWAIAGLVLGLGNSVVALYRLGA

SEQ ID NO: 91488 - protein, 201 aa, Setaria italica
  Transcript Sequence Number=SeqID_25514
  Gene Ontology: Mol. function=hydrolase activity, acting on ester bonds
  Homolog annotation: Hit_ID=B2ZGS3; Match level="QueryCoverage=96%, HitCoverage=59%, E-value=5e-59, Identity=51%"; Hit description=DNase 2
  Pfam annotation: Domain name=SNase; Domain location=62-180; Score =96.1; E_value=1.2e-25; Accession=PF00565.9; Description =Staphylococcal nuclease homologue
FVLNTLPIHNKCIGDGDGFSAYVDTADPRESANVPLEVHEMVIARTEARTHRDYQKADALQRSLHEAGFRVITISGEEILAKKYRIRMRGVDAPELKMANGKESKNALVKLIGGKRVTIYVYGQDQFGRYVGDIYCDDVFIQEQMLKSGHVWHFKIYDKRPEFAQWEREARAARRGLWASENPEKPWDWRREQRSANVQVY

SEQ ID NO: 91489 - protein, 102 aa, Setaria italica
  misc_feature (72)..(72): Xaa can be any naturally occurring amino acid
  misc_feature (84)..(84): Xaa can be any naturally occurring amino acid
  Transcript Sequence Number=SeqID_25515
  Gene Ontology: Mol. function=metal ion binding
SNSEEFGMRELLCAIAAAYDKINVVHDYSSDLCSYLKYCNDVIFTGITCSTEEEHLVEIFWDMYKAGEDDNXKRACKIPVSRYXRKGIYKWSEQALPGWNIY

SEQ ID NO: 91490 - protein, 165 aa, Setaria italica
  misc_feature (143)..(143): Xaa can be any naturally occurring amino acid
  Transcript Sequence Number=SeqID_25516
  Gene Ontology: Mol. function=zinc ion binding; Biological process =regulation of transcription
MKYCNIYDVALQDDNPKEHVKSQSQGIEERAFTNGVNKRSRDGTFIEASCISLSSGHDAVQMLKSEMQDHGFHYMPPRKPRKSDGYLRYRRRRLSGGFVYVAHADYYMLLRAFSKLAEVNVRIMHISVLKLESRLACIEDRIXKSLNTLQNLSVRAKDELRPVSD

SEQ ID NO: 91491 - protein, 74 aa, Setaria italica
  Transcript Sequence Number=SeqID_25517
YRLLQQQRPQSDMFLACSACLPKPTGHNNKLCLLRCAANHPFKPHLNNVTTCFARKRNGGFLHLYAISTQNTFR

SEQ ID NO: 91492 - protein, 68 aa, Setaria italica
  Transcript Sequence Number=SeqID_25518
ANVAGYDPKQAVGLEFELSQQQRSLFLYTENALVRESTQLHSSFVKLKELRENYKTDLGTISNSSLGK

SEQ ID NO: 91493 - protein, 82 aa, Setaria italica
  Transcript Sequence Number=SeqID_25519
  Homolog annotation: Hit_ID=B9SMX6; Match level="QueryCoverage=98%, HitCoverage=57%, E-value=4e-28, Identity=54%"; Hit description =Pentatricopeptide repeat-containing protein, putative
  Pfam annotation: Domain name=PPR; Domain location=30-64; Score=57.5; E_value=5.1e-14; Accession=PF01535.12; Description=PPR repeat
NSALVNMYNKCGCIEDATKAFVEMSIRTLVTWTSMISGYSQHGRPQEAIQLFEDMRLAGVKPNEITFVSVLSACSYAGLVEE

SEQ ID NO: 91494 - protein, 79 aa, Setaria italica
  Transcript Sequence Number=SeqID_25520
  Subcellular localization annotation: CTP_CleavageSite=63; ConfidenceScore=5.37e-01
LLPPSPLRQVHHPGSRPPLGSRRAQPLIPHPPPLTHLHPTPRGSPQIHARPFSASIPRPSSLRVSAARNRPARPLFHFR

SEQ ID NO: 91495 - protein, 125 aa, Setaria italica
  misc_feature (103)..(103): Xaa can be any naturally occurring amino acid
  Transcript Sequence Number=SeqID_25521
  Gene Ontology: Mol. function=nucleotide binding; Cellular component =intrinsic to membrane; Biological process=defense response
  Homolog annotation: Hit_ID=B7T053; Match level="QueryCoverage=95%, HitCoverage=67%, E-value=4e-19, Identity=40%"; Hit description=NBS resistance protein (Fragment)
HHTRNAFSIVVWVSVFKGFDDTGLLSAIVRAAGGNPKAQENRVQLEAMLAAILKGKRFLLVLDDVHSHQINENSLEAHWHICGHGSRILITTRDESVVAKVKXAHIHWIKKLSFQDCWSLLCRNA

SEQ ID NO: 91496 - protein, 69 aa, Setaria italica
  Transcript Sequence Number=SeqID_25522
THSWQRIRDNGQTWRTPFAVCALLELIYSTKLLNSVWICDQFLNHKLHLVTGQPDQACDSGTDHISIQN

SEQ ID NO: 91497 - protein, 77 aa, Setaria italica
  Transcript Sequence Number=SeqID_25523
THSRQRIRDNGQTWRTPFAVCALLELIYSTKLLNSVWICDQFLNHKLHLVTGQPDQCCSMYITWQVHQGPNSIRVFS

SEQ ID NO: 91498 - protein, 236 aa, Setaria italica
  Transcript Sequence Number=SeqID_25524
  Gene Ontology: Mol. function=structural constituent of ribosome; Cellular component=ribonucleoprotein complex; Biological process =translation
  Homolog annotation: Hit_ID=B6TFD9; Match level="QueryCoverage=100%, HitCoverage=74%, E-value=1e-127, Identity=94%"; Hit description=50S ribosomal protein L3-2
  Pfam annotation: Domain name=Ribosomal_L3; Domain location=2-192; Score=236.7; E_value=5.7e-68; Accession=PF00297.14; Description =Ribosomal protein L3
AMWDKWGAKVPITVLWVDDNIVTQVKTTEKEGFFALQLGAGQKKEKHLTKPEVGHFRAQGVPLKRKLREFPVTEDALLPVGTTITVRHFVPGQFVDVTGITKGKGFAGGMKRHGFKGMPASHGASLSHRSIGSTGQRDAPGRVFKNRKMPGRMGGVQRTVKNVWVYQIDPARNLLYLKGQVPGPQGSFVFVKDSIFKKPDTALLPFPTYFTQEGEPEDLEPLIADLGEVDPFMAAD

SEQ ID NO: 91499 - protein, 48 aa, Setaria italica
  misc_feature (34)..(34): Xaa can be any naturally occurring amino acid
  Transcript Sequence Number=SeqID_25525
AKKGNYHLKLNYEPMSIHLCNSRHSIPHTASIIXRLLLNKQDLNGQKY

SEQ ID NO: 91500 - protein, 155 aa, Setaria italica
  Transcript Sequence Number=SeqID_25526
  Gene Ontology: Mol. function=sequence-specific DNA binding; Cellular component=nucleus; Biological process=regulation of transcription, DNA-dependent
  Homolog annotation: Hit_ID=Q6IEP4; Match level="QueryCoverage=73%, HitCoverage=23%, E-value=2e-55, Identity=90%"; Hit description=WRKY transcription factor 37
  Pfam annotation: Domain name=WRKY; Domain location=42-102; Score =138.0; E_value=3e-38; Accession=PF03106.7; Description=WRKY DNA -binding domain
GMQMPSPHGGGIKRRKNQARKVVCIPAPAASAGGRTTGEVVPSDLWAWRKYGQKPIKGSPYPRGYYRCSSSKGCPARKQVERSRTDPTLLVITYNSEHNHPWPTQRNALAGSTRSHHAKNSKSNSSHNLQKPIVKAEPDQTATAASATTATAATS

SEQ ID NO: 91501 - protein, 106 aa, Setaria italica
  Transcript Sequence Number=SeqID_25527
RIHPARLPRIHPARLHAHPEERALVENWALVPVGRVQISRKSIRDKPTGTKGGSFIPGHSTGTKDSLLSRLVIPIGIKRVTMASAAKKKSRAPRRPTHARRKSQVT

SEQ ID NO: 91502 - protein, 257 aa, Setaria italica
  misc_feature (190)..(190): Xaa can be any naturally occurring amino acid
  misc_feature (245)..(245): Xaa can be any naturally occurring amino acid
  Transcript Sequence Number=SeqID_25528
  Gene Ontology: Mol. function=binding; Cellular component=nucleus
  Homolog annotation: Hit_ID=B9IH01; Match level="QueryCoverage=95%, HitCoverage=41%, E-value=2e-62, Identity=50%"; Hit description =Tetratricopeptide repeat-containing protein
SCKSPSSTLFAEHRHECGGAHWAAVLPADKVLAGRIMARDIEKRMLYGKSAAISGPNLDLVHHYDRHSPVNKLESQIYAIVLLLCLQNHYRSDLLWTEESLSQLVLLIFQIKVNSIAIVRMKSMDGGLELTVNRGVSAAEGANMCSVEQVRVAQAIYVSGSMFNHSCRPNVHAYFLSRALILRSTEFIKXGSPVELSYGPQAGEMHLSDRQKSLQENYYFSCQCSSCSELNLSDLVMNSFCVHKXNCLGAISESTYY

SEQ ID NO: 91503 - protein, 64 aa, Setaria italica
  Transcript Sequence Number=SeqID_25529
HKLMTPGLMLRHNFIIVDMICSFHIKRCSESTVNLMFYVGTFELKSITRLSLYFLTIWNLTCIA

SEQ ID NO: 91504 - protein, 122 aa, Setaria italica
  Transcript Sequence Number=SeqID_25530
FLWTRVFLLHHFHVFVFNIGVIFLLTRIFHPILCLGISSSSLCFNHLHTLTFCCLIMLIIPILSFLILTRIFLSFNIGFMLCVNHFYILCAIHFHILSFNIGFMLCVNHFHILRFSIGFMLC

SEQ ID NO: 91505 - protein, 136 aa, Setaria italica
  Transcript Sequence Number=SeqID_25531
  Gene Ontology: Mol. function=voltage-gated potassium channel activity; Cellular component=integral to membrane; Biological process=potassium ion transport
  Homolog annotation: Hit_ID=Q7XUW4; Match level="QueryCoverage=100%, HitCoverage=18%, E-value=3e-62, Identity=82%"; Hit description =OSJNBa0027P08.8 protein
PEHLLDLECVQLVFLADVAVHFFLAYRDAHTYRMVYDRRKIALRYIKGSFALDILGCLPWDFIYKATGRTETVRCLLWLRLYRARKITAFFKKMEKDIRISYLFTRIVKLITVELYFTHTAACVFYYLATTLPPAR

SEQ ID NO: 91506 - protein, 87 aa, Setaria italica
  misc_feature (78)..(78): Xaa can be any naturally occurring amino acid
  misc_feature (82)..(82): Xaa can be any naturally occurring amino acid
  Transcript Sequence Number=SeqID_25532
  Gene Ontology: Mol. function=nucleoside-triphosphatase activity; Cellular component=DNA replication factor C complex; Biological process=DNA replication
  Homolog annotation: Hit_ID=Q9XI09; Match level="QueryCoverage=94%, HitCoverage=28%, E-value=3e-09, Identity=47%"; Hit description =F8K7.11 protein
  Pfam annotation: Domain name=Rep_fac_C; Domain location=10-74; Score =19.0; E_value=7.8e-05; Accession=PF08542.3; Description=Replication factor C
SLFATSNSPDLQAASSDFTTSSGITPETLIRSLEEIEDPDEQKARICKKLGETDKCLVDGADEYLQLLDVASETIRAXFDMXQTLVF

SEQ ID NO: 91507 - protein, 339 aa, Setaria italica
  Transcript Sequence Number=SeqID_25533
  Gene Ontology: Mol. function=nucleoside-triphosphatase activity; Cellular component=DNA replication factor C complex; Biological process=DNA replication
  Homolog annotation: Hit_ID=Q9XI09; Match level="QueryCoverage=98%, HitCoverage=99%, E-value=1e-147, Identity=76%"; Hit description =F8K7.11 protein
  Pfam annotation: Domain name=AAA; Domain location=44-226; Score=59.0; E_value=1.9e-14; Accession=PF00004.21; Description=ATPase family associated with various cellular activities (AAA)
  Pfam annotation: Domain name=AAA_5; Domain location=44-173; Score= -9.0; E_value=0.0053; Accession=PF07728.6; Description=ATPase family associated with various
  Pfam annotation: Domain name=Mg_chelatase; Domain location=21-178; Score=-136.4; E_value=0.0029; Accession=PF01078.13; Description =Magnesium chelatase, subunit ChlI
  Pfam annotation: Domain name=Rep_fac_C; Domain location=237-326; Score=115.9; E_value=1.4e-31; Accession=PF08542.3; Description =Replication factor C
  Pfam module annotation: Pfam domain module=AAA::AAA_5::Mg _chelatase::Rep_fac_C; Domain location=44-226::44-173::21-178::237-326
MAPLVPMSQPWVEKYRPRQVKDVAHQEEVVRVLTNTLQTADLPHMLFYGPPGTGKTTTALAIAYQLYGPELYKSRVLELNASDDRGINVVRTKIKDFAAVAVGTARKAGYPCPPYKMIILDEADSMTEDAQNALRRTMETYSKVTRFFFICNYISRIIEPLASRCAKFRFKPLSEEVMSSRIMHICNEESLNLDAQALSTLSAISQGDLRRAITYLQSAARLFGSSISSSDLISVSGVIPEDVVKSLLAACRSGEFDVANKEVSNIIADGYPVSQLMAQFLDVIVSADDIPDEQKARICKKLGETDKCLVDGADEYLQLLDVASETIRALFDMPQTLVF

SEQ ID NO: 91508 - protein, 97 aa, Setaria italica
  Transcript Sequence Number=SeqID_25534
  Gene Ontology: Mol. function=nucleoside-triphosphatase activity; Cellular component=DNA replication factor C complex; Biological process=DNA replication
  Homolog annotation: Hit_ID=Q9XI09; Match level="QueryCoverage=95%, HitCoverage=29%, E-value=5e-27, Identity=65%"; Hit description =F8K7.11 protein
  Pfam annotation: Domain name=Rep_fac_C; Domain location=1-84; Score =92.8; E_value=1.2e-24; Accession=PF08542.3; Description=Replication factor C
VVKSLLAACRSGEFDVANKEVSNIIADGYPVSQLMAQFLDVIVSADDIPDEQKARICKKLGETDKCLVDGADEYLQLLDVASETIRALFDMPQTLVF

SEQ ID NO: 91509 - protein, 105 aa, Setaria italica
  Transcript Sequence Number=SeqID_25535
  Gene Ontology: Mol. function=metal ion binding; Cellular component =integral to membrane; Biological process=ubiquitin-dependent protein catabolic process
  Homolog annotation: Hit_ID=B6TN00; Match level="QueryCoverage=60%, HitCoverage=22%, E-value=5e-15, Identity=63%"; Hit description=Zinc finger, C3HC4 type family protein
  Pfam annotation: Domain name=zf-C3HC4; Domain location=48-89; Score =34.2; E_value=5.3e-07; Accession=PF00097.17; Description=Zinc finger, C3HC4 type (RING finger)
SSAQQRRSTLGGGDAAGGRGGVDAAVLRALPVMVYRAKDRPPGEALECAVCLAELADGEAARFLPRCGHGFHAECVDLWLHGHSTCPLCRVDVDKAGSLPAPPPS

SEQ ID NO: 91510 - protein, 82 aa, Setaria italica
  Transcript Sequence Number=SeqID_25536
LRLFRTNRRRGTNRIAKYYIVAHKHNCIVAHMKLLPISYKILGMYTLNCLVNCLDSKLDHPICIPVMSKTKTTPCDSIVQII

SEQ ID NO: 91511 - protein, 44 aa, Setaria italica
  Transcript Sequence Number=SeqID_25537
HYFTQIPCSIYFIICLINQVDAGGICIFFINLVKTIKISFLGQD

SEQ ID NO: 91512 - protein, 102 aa, Setaria italica
  misc_feature (16)..(16): Xaa can be any naturally occurring amino acid
  Transcript Sequence Number=SeqID_25538
  Gene Ontology: Mol. function=RNA binding; Cellular component =mitochondrion
  Homolog annotation: Hit_ID=Q7XKS2; Match level="QueryCoverage=84%, HitCoverage=10%, E-value=3e-22, Identity=59%"; Hit description =OSJNBa0038P21.9 protein
  Pfam annotation: Domain name=PPR; Domain location=23-57; Score=47.8; E_value=4.1e-11; Accession=PF01535.12; Description=PPR repeat
  Pfam annotation: Domain name=PPR; Domain location=58-92; Score=42.7; E_value=1.5e-09; Accession=PF01535.12; Description=PPR repeat
  Pfam module annotation: Pfam domain module=PPR::PPR; Domain location =23-57::58-92
RRALELLRRMAEKGNXGCSPDVVSYNTVIDGFFKEGEVDKGCDLLNEMMQQGISPNLVTYNSSIDALCKARAMDKAEVVLRQMIRKGVHPDNWSYTNLMFAY

SEQ ID NO: 91513 - protein, 101 aa, Setaria italica
  Transcript Sequence Number=SeqID_25539
EKQSEVSKKKDIEESKAVLQKELEKILEEKQKLNDQSHSSSAVIIRLQDEIISMKNMQRRLEEEVCQHLEEKNKPQHCHPSTLVPMLVAILHSNSRIVFVH

SEQ ID NO: 91514 - protein, 321 aa, Setaria italica
  misc_feature (292)..(292): Xaa can be any naturally occurring amino acid
  Transcript Sequence Number=SeqID_25540
  Gene Ontology: Cellular component=plasma membrane
  Homolog annotation: Hit_ID=B9RTL8; Match level="QueryCoverage=99%, HitCoverage=17%, E-value=5e-24, Identity=31%"; Hit description =Protein binding protein, putative
  Pfam annotation: Domain name=DUF904; Domain location=163-241; Score= -11.9; E_value=0.07; Accession=PF06005.4; Description=Protein of unknown function (DUF904)
SPSRSPFAQQEEEKEAAVSLCQQSTARLQNLKSEIVHTQEKFNRLKEEMQTVPQLLGNGDEHFFLLERANQDLHLELDNLKLLLKQKHDELNDKQAEMEKLHISTEEEHLKRMQAEMAQLSLEKQLLLAQDKLRHLALEKQSEVSKKKDIEESKAVLQKELEKILEEKQKLNDQSHSSSAVIIRLQDEIISMKNMQRRLEEEVCQHLEEKNKLQHELSHLKEDRSDWERKHSSINEQIQSVNLNVESLQALAQELRDGNVELKEIVKNHESIELLHIDNLKQLERMSETNTXLEKSLSSAATELEGLREDIAIPQLLCQCL

SEQ ID NO: 91515 - protein, 64 aa, Setaria italica
  Transcript Sequence Number=SeqID_25541
TPARPTDHVDPSPLVSLPSVPKLLGTPHLVHTKCYSTHSFYPKIPPKFPKILDDPTSHLEQSKL

SEQ ID NO: 91516 - protein, 148 aa, Setaria italica
  Transcript Sequence Number=SeqID_25542
  Gene Ontology: Cellular component=mitochondrion
  Homolog annotation: Hit_ID=Q9SYL4; Match level="QueryCoverage=99%, HitCoverage=98%, E-value=2e-50, Identity=61%"; Hit description =F3F20.18 protein
  Pfam annotation: Domain name=DUF842; Domain location=17-145; Score =224.7; E_value=2.3e-64; Accession=PF05811.5; Description=Eukaryotic protein of unknown function (DUF842)
MDPSGAMEERVVTERIRRKLEEVNAAAQQHLAGVQDHVNFTMQQAYFKCAYECFDRQRNQEGINNCVENCSVPVLTANNLVENEMARFQERLNRSLMVCQDKFEAAKLQKMKTDATQELESCVNRSIDDSIRVLPHVVEQIKSSLKMN

SEQ ID NO: 91517 - protein, 145 aa, Setaria italica
  Transcript Sequence Number=SeqID_25543
  Subcellular localization annotation: CTP_CleavageSite=79; ConfidenceScore=5.24e-01
DRTYEPASRLDPASDSAAVREKTQAFLSSVRLALQTPLARRPTPQPVNAEPTHTPRRSTRLATQLLNTTVRPSKKGEILAMKKLGIIAREEEANRVTEADFDKFLKTTMQPRHFAALRDIFPAASVLSDAELLQINSQADGGAGA

SEQ ID NO: 91518 - protein, 48 aa, Setaria italica
  Transcript Sequence Number=SeqID_25544
SVTCYPFFCCMGNCFDFIMLWIRINLCIYHCGTSELIATYVLAVNIYT

SEQ ID NO: 91519 - protein, 149 aa, Setaria italica
  Transcript Sequence Number=SeqID_25545
  Gene Ontology: Mol. function=nucleotide binding; Biological process =defense response
  Homolog annotation: Hit_ID=Q2R1W1; Match level="QueryCoverage=100%, HitCoverage=15%, E-value=3e-28, Identity=45%"; Hit description=NB -ARC domain containing protein
  Pfam annotation: Domain name=NB-ARC; Domain location=6-149; Score= -122.3; E_value=0.083; Accession=PF00931.14; Description=NB-ARC domain
SKLIGIDESKEAVIKMLSHDDMKTRVVSVLGFGGLGKTTLAKATYDQLKQNYERGAFVSVGRNPDLVKVFKDILHKLDEDNFRKIHSTQKGAELLICDLLDFLRDKRYLIVIDDVWEAKSKKRIVDAILSTENNKGSRIIITTRKSEVA

SEQ ID NO: 91520 - protein, 120 aa, Setaria italica
  Transcript Sequence Number=SeqID_25546
  Gene Ontology: Mol. function=electron carrier activity; Cellular component=nucleus; Biological process=regulation of transcription, DNA-dependent
  Homolog annotation: Hit_ID=Q336Y0; Match level="QueryCoverage=96%, HitCoverage=6%, E-value=1e-54, Identity=92%"; Hit description=Amine oxidase, flavin-containing family protein, expressed
FYLFLEARDRIGGRVYTDRTSLSVPVDLGASIITGVEADIATERRADPSSLICSQLGLELTVLNSACPLYDVVTGNKVPDALDDDLEAEYNGLLDEMALLFAQNGDSAIGLSLEDGLEYA

SEQ ID NO: 91521 - protein, 49 aa, Setaria italica
  Transcript Sequence Number=SeqID_25547
PWRGFDPQPLVDNSPYDSGAWKEGRGAHIAAIGVAVCVSAVLGTMGVGL

SEQ ID NO: 91522 - protein, 123 aa, Setaria italica
  Transcript Sequence Number=SeqID_25548
  Homolog annotation: Hit_ID=B9SCN4; Match level="QueryCoverage=96%, HitCoverage=34%, E-value=2e-32, Identity=56%"; Hit description =Transferase, transferring glycosyl groups, putative
LAAARAVVDRERNCEDILMNFVAAEESSTGPVLVEAGSIRDWGDPRNDVNAGAGEDGGAMKDVGLSATGGLGHWEKRGECITEFHRLLGRMPLRYSYGKVMEATIGEQGLCSKGGRLVRCDQE

SEQ ID NO: 91523 - protein, 95 aa, Setaria italica
  Transcript Sequence Number=SeqID_25549
  Gene Ontology: Mol. function=transferase activity; Cellular component= chloroplast; Biological process=response to stress
  Homolog annotation: Hit_ID=B6T7H0; Match level="QueryCoverage=88%, HitCoverage=37%, E-value=2e-41, Identity=95%"; Hit description =Glutathione S-transferase 6
  Pfam annotation: Domain name=GST_C; Domain location=3-78; Score=17.2; E_value=0.0018; Accession=PF00043.17; Description=Glutathione S -transferase, C-terminal domain
SSGLCCYLLKIEDKLKQVLDVYDEILSKNEYLAGDEFTLADLSHLPNSHYIVNTERGRKLFTNKKNVAKWYEKISKREAWAQVAKMQKEHPGAFE

SEQ ID NO: 91524 - protein, 55 aa, Setaria italica
  Transcript Sequence Number=SeqID_25550
RNITHCQSKRESHMLALNIKSPRAVESKFLLRCLEVKKRITSSCTVLITNQFHQS

SEQ ID NO: 91525 - protein, 96 aa, Setaria italica
  Transcript Sequence Number=SeqID_25551
  Gene Ontology: Mol. function=voltage-gated potassium channel activity; Cellular component=voltage-gated potassium channel complex
  Homolog annotation: Hit_ID=Q7X607; Match level="QueryCoverage=87%, HitCoverage=13%, E-value=1e-30, Identity=78%"; Hit description =OSJNBa0014F04.24 protein
  Pfam annotation: Domain name=PUF; Domain location=7-41; Score=33.0; E_ value=1.2e-06; Accession=PF00806.11; Description=Pumilio-family RNA binding repeat
ISTDTARLASVLQELMKDQFGNYVVQRVLQTCDDKYLGMILSSIKLHLNELKNYTYGKHIVARVEKLIVTGEKRARMVSLSSQQQQSPICTAVDAR

SEQ ID NO: 91526 - protein, 309 aa, Setaria italica
  Transcript Sequence Number=SeqID_25552
  Gene Ontology: Mol. function=voltage-gated potassium channel activity; Cellular component=voltage-gated potassium channel complex
  Homolog annotation: Hit_ID=Q7X607; Match level="QueryCoverage=99%, HitCoverage=49%, E-value=1e-144, Identity=80%"; Hit description =OSJNBa0014F04.24 protein
  Pfam annotation: Domain name=PUF; Domain location=1-34; Score=19.8; E_ value=0.012; Accession=PF00806.11; Description=Pumilio-family RNA binding repeat
  Pfam annotation: Domain name=PUF; Domain location=108-143; Score =34.3; E_value=4.9e-07; Accession=PF00806.11; Description=Pumilio -family RNA binding repeat
  Pfam annotation: Domain name=PUF; Domain location=145-179; Score =34.9; E_value=3.2e-07; Accession=PF00806.11; Description=Pumilio -family RNA binding repeat
  Pfam annotation: Domain name=PUF; Domain location=181-215; Score =33.0; E_value=1.2e-06; Accession=PF00806.11; Description=Pumilio -family RNA binding repeat
  Pfam annotation: Domain name=PUF; Domain location=220-254; Score =33.1; E_value=1.1e-06; Accession=PF00806.11; Description=Pumilio -family RNA binding repeat
  Pfam annotation: Domain name=PUF; Domain location=36-70; Score=32.8; E_value=1.3e-06; Accession=PF00806.11; Description=Pumilio-family RNA binding repeat
  Pfam annotation: Domain name=PUF; Domain location=72-105; Score=36.0; E_value=1.5e-07; Accession=PF00806.11; Description=Pumilio-family RNA binding repeat
  Pfam module annotation: Pfam domain module=PUF::PUF::PUF::PUF::PUF::PU F::PUF; Domain location=1-34::108-143::145-179::181-215::220-254::36 -70::72-105
ISTDTARLTTDVFGNYVIQKFFEFATESQLIQLADQLKGHILQLSLQMYGCRVVQKVLEVVDMDRKINIVHELKNSVLKCIGDQNGNHVIQKCIECVPEDRIPFVIEPILSQILVLCTHQYGCRVIQRVLEHCHDPATQSAIMNEIVQQTFHLTDDKFGNYVVQHVLEHGKPEERSSIIQKLSGQVVILSKQKFASNVIEKCLAHGTPEERDSLIGEIISSGQTFQELMKDQFGNYVVQRVLQTCDDKYLGMILSSIKLHLNELKNYTYGKHIVARVEKLIVTGEKRARMVSLSSQQQQSPICTAVDAR

SEQ ID NO: 91527 - protein, 124 aa, Setaria italica
  Transcript Sequence Number=SeqID_25553
SDWTYSVFWTIRPRPRCRGGNGCKVGDDNGSLMLMWEDGFCRPRVAECLEDIDGEDPVRKAFIKMSIQLYNYGEGLMGKVASDKCHKWVFKEPSECEPNISNYWQSSFDALPPEWTDQFASGIQ

SEQ ID NO: 91528 - protein, 94 aa, Setaria italica
  Transcript Sequence Number=SeqID_25554
MYRAFGGMHACMIMSDVLRRWVLILLWTLTLSSPVLCRLMGKVASDKCHKWVFKEPSECEPNISNYWQSSFDALRTEITGAPASFLSLSAALPP

SEQ ID NO: 91529 - protein, 180 aa, Setaria italica
  Transcript Sequence Number=SeqID_25555
  Homolog annotation: Hit_ID=B9RN68; Match level="QueryCoverage=96%, HitCoverage=12%, E-value=2e-42, Identity=51%"; Hit description =Nucleotide binding protein, putative
EILIAGDKKGNITAFPFPKILVLYDSGVMQQKMPPCDRFKGAHGISSVTSVHIKDSSSDQIEIHTTGGDGCICFFKYGRNVCKIEFFGMRQVKELGTIQSIYTNLAPESQLSTYAIGFTSADFIIWDLENETKMAQVSCGGWRRPYSYYLGTVPEYQNCLAFVKDHDIHIHRHWAPTQDK

SEQ ID NO: 91530 - protein, 87 aa, Setaria italica
  Transcript Sequence Number=SeqID_25556
PGAAMSWLPGWFLLLSWAEEESGSASVGTGRPSLPSFHHWLASLRLLLLLASCFFVFLLPLTNSCSAQSGWPMKSSSLISCFLAYSL

SEQ ID NO: 91531 - protein, 252 aa, Setaria italica
  Transcript Sequence Number=SeqID_25557
  Subcellular localization annotation: CTP_CleavageSite=44; ConfidenceScore=5.02e-01
GSFTLMFPGKEATLELWKSSAEFCAMRSLSIVSLAQRMITLSRSCTNASSALAAFYTRHFAEKVPDIKPPSLQLLVSFWQHPSEHVRMAARSLFHCAAPRSIPQPLRIHKNKASDILLSSSDNMDDLISAVQSSSISSYGELKADSGNVDKDGSDAANMISWLESFENQEWLSWIGGTSQDAVASNIIVAAALVVWYPSIVKAKLASLVVSQLIKLVMSMNDRYSSTAAELLAEGMESTWKACLGAEITHFE

SEQ ID NO: 91532 - protein, 106 aa, Setaria italica
  misc_feature (37)..(37): Xaa can be any naturally occurring amino acid
  Transcript Sequence Number=SeqID_25558
EMQVCKPEGCHIATGVVGDRGSFTLMFPGKEATLELXWKSSAEFCAMRSLSIVSLAQRMITLSRSCTNASRYWVISFFFSSIKLMFPNSRLPYLLGVLEHCRKNLK

SEQ ID NO: 91533 - protein, 109 aa, Setaria italica
  Transcript Sequence Number=SeqID_25559
DYIETQQQAPAEVEGSGLRWRRRLWHAESIIFQSQCKLALWSDRLIQSSVKFSQGHLELLRVHLLLLLLLVVAGAIARPAVLIDVEERDPEIPDPPPPPPPLFLLLLVV

SEQ ID NO: 91534 - protein, 554 aa, Setaria italica
  Transcript Sequence Number=SeqID_25560
  Gene Ontology: Cellular component=integral to membrane; Biological process=phagocytosis, engulfment
  Homolog annotation: Hit_ID=B9STR3; Match level="QueryCoverage=90%, HitCoverage=78%, E-value=0.0, Identity=78%"; Hit description =Endosomal P24A protein, putative
  Pfam annotation: Domain name=EMP70; Domain location=55-553; Score =908.7; E_value=3e-270; Accession=PF02990.8; Description=Endomembrane protein 70
MAMPAWAVALAALCLVALAPPAAGFYLPGVAPNDFEKKDPLPVKVNKLTSIKTQLPYSYYSLPFCKPDTIVDSAENLGEVLRGDRIENSPYTFEMREPQMCQIVCKISVGEKEAKLLKEKIEDEYRVNMILDNLPLVVPIQRVDQEGAYFYQHGFHVGAKGKYSGSKDEKYFIHNHLSFTVKYHRDEQRDVSRIVAFEVKPYSVKHEYEGQWNDKKTRLTTCDPHAQRVITSSDSPQEVEVGKEIIFTYDVDFKESDIKWASRWDSYLLMTDDQIHWFSIVNSLMIVLFLSGMVAMIMLRTLYRDISKYNQLETQEEAQEETGWKLVHGDVFRPPSNSDWLCVYVGTGVQFFGMLLVTMVFAVLGFLSPSNRGGLMTAMLLLWVFMGLLAGYSSSRLYKLFKGSEWKNIALRTAFTFPGSVFAIFFFLNALIWGQKSSGAVPFTTMFALVLLWFGISVPLVFVGSFLGFKKPTIEDPVKTNKIPRQIPEQAWYMNPIFSILIGGILPFGAVFIELFFILTSIWLHQFYYIFGFLFLVFLILIVTCCLVVFFVFC

SEQ ID NO: 91535 - protein, 217 aa, Setaria italica
  Transcript Sequence Number=SeqID_25561
  Gene Ontology: Cellular component=integral to membrane
  Homolog annotation: Hit_ID=B9RNV4; Match level="QueryCoverage=100%, HitCoverage=33%, E-value=2e-90, Identity=78%"; Hit description =Endosomal P24A protein, putative
  Pfam annotation: Domain name=Cytochrom_B_C; Domain location=52-133; Score=-14.8; E_value=0.037; Accession=PF00032.9; Description =Cytochrome b(C-terminal)b6petD
  Pfam annotation: Domain name=EMP70; Domain location=1-175; Score= -74.7; E_value=1.6e-12; Accession=PF02990.8; Description=Endomembrane protein 70
  Pfam module annotation: Pfam domain module=Cytochrom_B_C::EMP70; Domain location=52-133::1-175
  Subcellular localization annotation: CTP_CleavageSite=35; ConfidenceScore=5.13e-01
AIFFFLNALIWGQKSSGAVPFTTMFALVLLWFGISVPLVFVGSFLGFKKPTIEDPVKTNKIPRQIPEQAWYMNPIFSILIGGILPFGAVFIELFFILTSIWLHQFYYIFGFLFLVFLILIVTCAEISIVLCYFQLCSEDYLWWWRSYLTSGSSALYLFLYATFYFFTKLEITKFVSAVLYFGYMLIASYAFFALTGTIGFYACFLFTRLIYSSVKIE

SEQ ID NO: 91536 - protein, 103 aa, Setaria italica
  Transcript Sequence Number=SeqID_25562
MDFHRHGLLTTLGFAALTGNSALAIYRSRDDPGSVAFVAGAYASIALLFHFLRRFERGEGDRGRTKAAVWLLTTLLTAMFASRVAPLMPPPVGSLVYLMAAGT

SEQ ID NO: 91537 - protein, 64 aa, Setaria italica
  Transcript Sequence Number=SeqID_25563
PSPTHPVSLLLVLSYTRLKSAFSKFHSKYFKKKFFIPTRVLLHVYHDYRNSNHGCIIAQPAGSC

SEQ ID NO: 91538 - protein, 332 aa, Setaria italica
  Transcript Sequence Number=SeqID_25564
  Gene Ontology: Mol. function=lipid binding; Cellular component =endoplasmic reticulum
  Homolog annotation: Hit_ID=B9RXF0; Match level="QueryCoverage=77%, HitCoverage=86%, E-value=4e-71, Identity=55%"; Hit description=NSFL1 cofactor p47, putative
  Pfam annotation: Domain name=SEP; Domain location=154-227; Score =134.7; E_value=2.9e-37; Accession=PF08059.5; Description=SEP domain
  Pfam annotation: Domain name=UBX; Domain location=255-332; Score =78.0; E_value=3.4e-20; Accession=PF00789.12; Description=UBX domain
  Pfam module annotation: Pfam domain module=SEP::UBX; Domain location =154-227::255-332
DAALASAAAAAEERRRPSKRLKRSHDARGASGSGSRAGGRANGAGNVRTLSDLGGGKRGAGSDEDSGEDDEWAPPPEYYTGGEKSGMVVRDRSKRKNNADEVFKQAKTKGAKQGPFESRRRSSSRNFTGTGRLLTGETVQRDAPQPPEEIVHNIYFWSNGFTVNDGPLRSFDDPANASFLESIKNSDCPTELEPADGKSKVNVNLIRKEEEFTEPVKPAAPFQGERRTLAAPSDNNTSSAAASSTTAAPRTITVDDSLPSTSLQIRFADGSRLVARFNTSHTISDVRAFIDATRPEASEYMLQAGFPPKPLEDVTKTIEEAGVANSVIIQSV

SEQ ID NO: 91539 - protein, 62 aa, Setaria italica
  Transcript Sequence Number=SeqID_25565
VFRNIKHCLLCLTYDMHSRDMHTSLDVSYYERCSLGKMLLTFCCLFASTKPLLNVMVCMKSL

SEQ ID NO: 91540 - protein, 45 aa, Setaria italica
  Transcript Sequence Number=SeqID_25566
PYCPCRFFVDKVPIRVYPNDASKPASNGFFPVSKPMYIFSSIWNA

SEQ ID NO: 91541 - protein, 201 aa, Setaria italica
  misc_feature (194)..(194): Xaa can be any naturally occurring amino acid
  Transcript Sequence Number=SeqID_25567
  Gene Ontology: Mol. function=hydrolase activity, hydrolyzing O -glycosyl compounds; Cellular component=cell wall; Biological process= carbohydrate metabolic process
  Homolog annotation: Hit_ID=C0IRG0; Match level="QueryCoverage=88%, HitCoverage=59%, E-value=2e-71, Identity=70%"; Hit description =Xyloglucan endotransglucosylase/hydrolase 1
  Pfam annotation: Domain name=Glyco_hydro_16; Domain location=28-201; Score=267.6; E_value=2.9e-77; Accession=PF00722.13; Description =Glycosyl hydrolases family 16
GGDLLAVAVLLLSCLSRGASAADPAASFGDNFEITGAEDHVKTSADGQTWYLYLDNKTGVGFQTKQRYLFGWFSMKLKLVGNDSAGVVTAYYMCSDVDAAPQRDELDFEFLGNRTGQPYIIQTNVYHNGVGGREMRHSLWFDPTADFHTYAILWNPKHIVFFVDKVPIRVYPNDASKPASNGFFPVSKPMYIFXSIWNRRR

SEQ ID NO: 91542 - protein, 126 aa, Setaria italica
  Transcript Sequence Number=SeqID_25568
  Gene Ontology: Mol. function=nucleic acid binding; Cellular component= intracellular; Biological process=RNA processing
  Homolog annotation: Hit_ID=B9RE60; Match level="QueryCoverage=97%, HitCoverage=12%, E-value=6e-46, Identity=70%"; Hit description=RNA binding protein, putative
  Pfam annotation: Domain name=DUF1604; Domain location=37-125; Score =188.3; E_value=2.1e-53; Accession=PF07713.5; Description=Protein of unknown function (DUF1604)
MGADSDDEDLVIYGTPIEREEDTSARKRRAVAEAGQLRALPAWKQEVRDEEGRRRFHGAFTGGFSAGFYNTVGSKEGWTPQTFTSSRKNRAEVKKQSIHSFLDEEDIKDMGGSALETSQQYDTFGF

SEQ ID NO: 91543 - protein, 112 aa, Setaria italica
  Transcript Sequence Number=SeqID_25569
  Gene Ontology: Mol. function=transcription factor activity; Cellular component=nucleus; Biological process=regulation of transcription, DNA-dependent
  Homolog annotation: Hit_ID=B5RHW0; Match level="QueryCoverage=61%, HitCoverage=45%, E-value=9e-16, Identity=63%"; Hit description =Putative AP2 domain-containing transcription factor (Fragment)
  Pfam annotation: Domain name=AP2; Domain location=34-85; Score=72.1; E_value=2e-18; Accession=PF00847.12; Description=AP2 domain
  Subcellular localization annotation: CTP_CleavageSite=52; ConfidenceScore=5.15e-01
MVKNTSNGVATATAFSDDKARPESGGVGGKSAARPYKGVRMRSWGSWVSEIRAPNQKRRIWLGSYATPEAAARAYDAALLCLKGSDAVLNFPASSSPTSSSSSPHHHVDTTR

SEQ ID NO: 91544 - protein, 84 aa, Setaria italica
  misc_feature (29)..(29): Xaa can be any naturally occurring amino acid
  misc_feature (55)..(55): Xaa can be any naturally occurring amino acid
  Transcript Sequence Number=SeqID_25570
  Subcellular localization annotation: CTP_CleavageSite=33; ConfidenceScore=5.55e-01
QYTSWANSSSRGGFRGHGNSSRGNGGHNXGRTSGGRGQNRGGQNNSNSSSQPKKXICQICKKVGHEAPRFWYRYDEDEQEKVAG

SEQ ID NO: 91545 - protein, 63 aa, Setaria italica
  Transcript Sequence Number=SeqID_25571
RTQISRGVAENWRAITSWLKPSSSLCHFSTGDLFTLQSSLKLKGYDAEIEEEDEKRTEQFLLK

SEQ ID NO: 91546 - protein, 94 aa, Setaria italica
  Transcript Sequence Number=SeqID_25572
  Gene Ontology: Mol. function=protein serine/threonine kinase activity; Biological process=protein amino acid phosphorylation
  Pfam annotation: Domain name=LRR_1; Domain location=25-47; Score =13.9; E_value=0.66; Accession=PF00560.25; Description=Leucine Rich Repeat
  Pfam annotation: Domain name=LRR_1; Domain location=49-71; Score=7.8; E_value=9.6; Accession=PF00560.25; Description=Leucine Rich Repeat
  Pfam annotation: Domain name=LRR_1; Domain location=75-94; Score =12.5; E_value=1.3; Accession=PF00560.25; Description=Leucine Rich Repeat
  Pfam module annotation: Pfam domain module=LRR_1::LRR_1::LRR_1; Domain location=25-47::49-71::75-94
  Subcellular localization annotation: CTP_CleavageSite=6; ConfidenceScore=5.08e-01
AASACSTSTAVAGKVGIPAALACVGLQTLDLAYNQLNGSVPAALGALPGLRRLSLASNRFGGAIPDELGGAGCRSLQFLDLSGNLLVGGIPRSL

SEQ ID NO: 91547 - protein, 92 aa, Setaria italica
  Transcript Sequence Number=SeqID_25573
  Gene Ontology: Mol. function=phosphoprotein phosphatase activity; Cellular component=cytoplasm; Biological process=carbohydrate metabolic process
  Homolog annotation: Hit_ID=Q0JMY6; Match level="QueryCoverage=98%, HitCoverage=28%, E-value=1e-43, Identity=92%"; Hit description =Serine/threonine protein phosphatase
ADKLVEFLEKNDLDLVCRAHQVVEDGYEFFAERRLVTIFSAPNYCGEFDNAGALLSIDESLMCSFQILKPNETGAPHSRKPLPNKTPKGENV

SEQ ID NO: 91548 - protein, 91 aa, Setaria italica
  Transcript Sequence Number=SeqID_25574
  Subcellular localization annotation: CTP_CleavageSite=46; ConfidenceScore=5.34e-01
PHLAPVHTTTTTRSRRRSRCRVLGRGGASARLLRGKGVLPACLLVRGGRLGGRRSGRLCYGAPRARGAPDAAGSRGRRPGPRDSARFGRGR

SEQ ID NO: 91549 - protein, 84 aa, Setaria italica
  Transcript Sequence Number=SeqID_25575
  Subcellular localization annotation: CTP_CleavageSite=57; ConfidenceScore=5.76e-01
ASAPLRSALLRVVAGGSRAHPPRAERCHRPRPRLPWPSSAATSSASSSPPPSFAPAPASAASSRPEAADQSASAALAELSGLLR

SEQ ID NO: 91550 - protein, 79 aa, Setaria italica
  Transcript Sequence Number=SeqID_25576
LFFFALASLLVACCCCGRGSGGEPAAKKRKRRGRVGLEDGDGALFGHLKGEQPARPGSAGRCSDGGDSDGARSKLVFFG

SEQ ID NO: 91551 - protein, 104 aa, Setaria italica
  Transcript Sequence Number=SeqID_25577
  Homolog annotation: Hit_ID=Q9FLF8; Match level="QueryCoverage=56%, HitCoverage=10%, E-value=5e-14, Identity=64%"; Hit description=Auxin- independent growth promoter-like protein
TSNLSILVELFDLLEKGELMEGPKLSSVVTDMHKYRQGAPRKRYGSLPGSKGRARLRTEESFYETHSCTVAWLWGPVHLGQQGHWMLITGRKASFTASCHRVSV

SEQ ID NO: 91552 - protein, 151 aa, Setaria italica
  misc_feature (33)..(33): Xaa can be any naturally occurring amino acid
  misc_feature (48)..(48): Xaa can be any naturally occurring amino acid
  Transcript Sequence Number=SeqID_25578
  Gene Ontology: Mol. function=zinc ion binding; Biological process=DNA integration
  Homolog annotation: Hit_ID=Q10DV6; Match level="QueryCoverage=88%, HitCoverage=32%, E-value=3e-56, Identity=66%"; Hit description =Transposon protein, putative, unclassified, expressed
  Pfam annotation: Domain name=FAR1; Domain location=54-145; Score =132.0; E_value=2e-36; Accession=PF03101.7; Description=FAR1 family
MSILILDDDHIENQMAFDIISDLVDMNSNPSKXNLENGEPFVGMEFEXEEAAKVFYIAYASQVGFSVCISKSRRSRNDESIIMRRFVCSKEDFHNKKQNYDTGKRERSHATIREGCHAMIEVTQKYYGWWVVIKLIKEHNHVLEAPSISCS

SEQ ID NO: 91553 - protein, 310 aa, Setaria italica
  Transcript Sequence Number=SeqID_25579
  Pfam annotation: Domain name=DUF506; Domain location=1-219; Score =284.4; E_value=2.5e-82; Accession=PF04720.4; Description=Protein of unknown function (DUF506)
LSFMEEAAAVERPPRGRCNCFNGSNHEESDDEEFDFLPSEHTSSAATAGAGDAWEALKGLVQSASVAERNLLADTSRIADKCGKSCKGKAECRRAVADGLRALGYDAAVCKSRWEKTPSYPAGEHEYIDAVAVVGKEEVRLIVEVDFRSQFELARSTKAYRAALQALPPLFVGTPDRLGQIVAVVAEAARQSLKKKGLHFPPWRKPEYMRAKWLSPHVRCGGDKAVAPGPGAAAAAAPLSAATPVKAASFSGEFELVFDRKPNKDAAAAGGGGVGEKITVVVSPWRPTEEASKKQQVPKAKVLTGLAAVL

SEQ ID NO: 91554 - protein, 89 aa, Setaria italica
  Transcript Sequence Number=SeqID_25580
  Gene Ontology: Mol. function=transferase activity, transferring groups other than amino-acyl groups; Cellular component=cytoplasm; Biological process=biosynthetic process
  Homolog annotation: Hit_ID=A2I5G2; Match level="QueryCoverage=89%, HitCoverage=20%, E-value=6e-25, Identity=63%"; Hit description =Chalcone synthase
  Pfam annotation: Domain name=Chal_sti_synt_N; Domain location=8-89; Score=-61.5; E_value=0.0015; Accession=PF00195.11; Description =Chalcone and stilbene synthases, N-te
MGRAPAPANVHEICRARRADGPAAVLAIGTANPGNCVLQEDFPDFYFRATKSEHLTGLKEKFKRVCQKLGVQRRYLHHTEELLSAHPEF

SEQ ID NO: 91555 - protein, 160 aa, Setaria italica
  Transcript Sequence Number=SeqID_25581
  Gene Ontology: Mol. function=electron carrier activity; Cellular component=extracellular region; Biological process=response to oxidative stress
  Homolog annotation: Hit_ID=B6SIA9; Match level="QueryCoverage=95%, HitCoverage=46%, E-value=2e-64, Identity=76%"; Hit description =Peroxidase 1
  Pfam annotation: Domain name=peroxidase; Domain location=1-131; Score= 0.6; E_value=6e-10; Accession=PF00141.15; Description=Peroxidase
PSPLRLPVGHPPSLTKIFAANGLDLKDLVVLSGAHTLGTAHCPSYAARLYNFSSAYNADPTLDSEYADRLRTRCKSVDDTAMLSEMDPGSYKTFDTSYYRHVAKRRGLFQSDAALLTDAATREYVQRIATGKFDDMYFEDFGESMVKMGNAGVLTGAQGE

SEQ ID NO: 91556 - protein, 109 aa, Setaria italica
  Transcript Sequence Number=SeqID_25582
  Gene Ontology: Mol. function=sequence-specific DNA binding; Cellular component=nucleus; Biological process=regulation of transcription, DNA-dependent
  Homolog annotation: Hit_ID=Q6VBA4; Match level="QueryCoverage=66%, HitCoverage=21%, E-value=5e-24, Identity=79%"; Hit description=Heat stress transcription factor C-1a
EEREALLEEVQRLRREQTAIGEELAQMSRRLQATERRPDQLMSFLARLAEDPDGVTRHLVEQAAEKKRRRMQLSSQAISTLPPPLLALGGKDCDGWQWAEQKPAIVLPS

SEQ ID NO: 91557 - protein, 46 aa, Setaria italica
  Transcript Sequence Number=SeqID_25583
  Gene Ontology: Mol. function=nucleotide binding; Cellular component =myosin complex
  Homolog annotation: Hit_ID=Q6L5H7; Match level="QueryCoverage=97%, HitCoverage=1%, E-value=8e-14, Identity=68%"; Hit description =Putative myosin heavy chain
  Pfam annotation: Domain name=Myosin_N; Domain location=10-46; Score =27.3; E_value=6.3e-05; Accession=PF02736.11; Description=Myosin N -terminal SH3-like domain
MASMLNIVIGSHVWVEDKDLAWVDGEVFRIDGQNAHVRTTKGKTVI

SEQ ID NO: 91558 - protein, 92 aa, Setaria italica
  Transcript Sequence Number=SeqID_25584
  Subcellular localization annotation: CTP_CleavageSite=53; ConfidenceScore=5.53e-01
RPQQGKRRPRTPSSCAPAQKPARAFTLSISTVAARSQLGSHRPQPQPLSQGGAAATPPHFPPPYLHLRTPRHRKPQRLSPSPPPAPPPHLLL

SEQ ID NO: 91559 - protein, 225 aa, Setaria italica
  misc_feature (217)..(217): Xaa can be any naturally occurring amino acid
  Transcript Sequence Number=SeqID_25585
  Gene Ontology: Mol. function=protein serine/threonine kinase activity; Biological process=protein amino acid phosphorylation
  Homolog annotation: Hit_ID=C4P7U2; Match level="QueryCoverage=100%, HitCoverage=52%, E-value=1e-118, Identity=91%"; Hit description=CBL -interacting protein kinase 15
  Pfam annotation: Domain name=Pkinase; Domain location=15-223; Score =252.5; E_value=1e-72; Accession=PF00069.17; Description=Protein kinase domain
  Pfam annotation: Domain name=Pkinase_Tyr; Domain location=15-225; Score=-7.8; E_value=3.3e-13; Accession=PF07714.9; Description =Protein tyrosine kinase
  Pfam module annotation: Pfam domain module=Pkinase::Pkinase_Tyr; Domain location=15-223::15-225
MMEAEKNGNILMQRYEVGKLLGQGTFAKVYHARNIVTSQSVAIKVIDKDKIFKVGLMEQIKREISVMKLVRHPNIIQLYEVMATKSKIYFVLEYVKGGELFNKIAKGKLREDAARKYFQQLVSAVDFCHSRGVYHRDLKPENLLVDDNGNLKISDFGLSALAESRRQDGLLHTTCGTPAYVAPEVISRKGYDGAKVDTWSCGVILFVLMAGYLPFQXSNLMEMYR

SEQ ID NO: 91560 - protein, 75 aa, Setaria italica
  misc_feature (66)..(66): Xaa can be any naturally occurring amino acid
  Transcript Sequence Number=SeqID_25586
APSPLLPSRLLTGAVKRKASMEEPLLAGATGTKHGGDEEESLAVREVKKQLYLAVPLVVGLLLQNXVQMVSVMFV

SEQ ID NO: 91561 - protein, 216 aa, Setaria italica
  Transcript Sequence Number=SeqID_25587
  Gene Ontology: Mol. function=transferase activity, transferring groups other than amino-acyl groups; Biological process=paclitaxel biosynthetic process
  Homolog annotation: Hit_ID=B6TZX2; Match level="QueryCoverage=100%, HitCoverage=49%, E-value=1e-82, Identity=69%"; Hit description =Taxadien-5-alpha-ol O-acetyltransferase
GSVVAGEACVECSDDGAWFVEAVADCSLEDVNGLDYPLIVSEEELLPVPEEGVDPTSIPIMMQVTEFACGGFVVGLVAVHTLADGLGAAQFINTISEFARGMGKPTIAPIWARALIPNPPKLPPGPPPSFQSFEFQHFTIDVTSDLIVHIKAEYFQATGQYCSTFDVAVAKVWQARAKAIKYNLESEVHVCFFANTRHLLTQVLPKDRGFYGNCFY

SEQ ID NO: 91562 - protein, 199 aa, Setaria italica
  misc_feature (181)..(181): Xaa can be any naturally occurring amino acid
  Transcript Sequence Number=SeqID_25588
  Gene Ontology: Mol. function=metal ion binding; Cellular component =integral to membrane; Biological process=positive regulation of I -kappaB kinase/NF-kappaB cascade
  Homolog annotation: Hit_ID=Q52T38; Match level="QueryCoverage=98%, HitCoverage=30%, E-value=2e-75, Identity=70%"; Hit description=S -acyltransferase TIP1
  Pfam annotation: Domain name=Ank; Domain location=109-141; Score =34.7; E_value=3.7e-07; Accession=PF00023.22; Description=Ankyrin repeat
  Pfam annotation: Domain name=Ank; Domain location=142-175; Score=4.6; E_value=8; Accession=PF00023.22; Description=Ankyrin repeat
  Pfam annotation: Domain name=Ank; Domain location=76-108; Score=29.5; E_value=1.4e-05; Accession=PF00023.22; Description=Ankyrin repeat
  Pfam module annotation: Pfam domain module=Ank::Ank::Ank; Domain location=109-141::142-175::76-108
MASSEIEVVDDTETVSTAAATGDGAGPVVAAGAGQEGEEEAALKDDVYTGAAYGDLEKLHRLVEREGRSVTEPDALGYHALQWAALNNRVAAAQYILEHGADVNAIDHTGQTALHWSAVRGHIQVAELLLKEGAKMDAADLYGYQTTHVAAQYGQTAFLCHIIAKRNADHDVPDNDGRSPXHWAAYKGFADTIRLLLFL

SEQ ID NO: 91563 - protein, 93 aa, Setaria italica
  Transcript Sequence Number=SeqID_25589
MGCFLSCFRGGSEPSGDLRDPLVRESRIGDAFLNDDKRIEAGGRLDVEAANGGGVDEELRREANYLKSCGTISQTPPEILEFSSPATSEDTNE

SEQ ID NO: 91564 - protein, 143 aa, Setaria italica
  misc_feature (118)..(118): Xaa can be any naturally occurring amino acid
  Transcript Sequence Number=SeqID_25590
  Gene Ontology: Mol. function=DNA binding; Cellular component=nucleus; Biological process=regulation of transcription
  Homolog annotation: Hit_ID=Q5Y5S5; Match level="QueryCoverage=99%, HitCoverage=32%, E-value=2e-28, Identity=54%"; Hit description=Myb transcription factor
  Pfam annotation: Domain name=Myb_DNA-binding; Domain location=1-41; Score=27.5; E_value=5.4e-05; Accession=PF00249.23; Description=Myb -like DNA-binding domain
PQEEDLIVSLHAILGNRWSQIAARLPGRTDNEIKNFWNSTIKKRLKNSSSASSPAATDCASPTEPSSKVAGIDISGATSCPDLAGLDHHHQDGGHHHAMMTTGLWMVDSSSSNFLIDXSPMQSRPPPSAIAAAVARSYGGLLP

SEQ ID NO: 91565 - protein, 399 aa, Setaria italica
  Transcript Sequence Number=SeqID_25591
  Gene Ontology: Mol. function=iron ion transmembrane transporter activity; Cellular component=integral to membrane; Biological process=iron ion transport
  Homolog annotation: Hit_ID=B9SL35; Match level="QueryCoverage=100%, HitCoverage=81%, E-value=1e-121, Identity=54%"; Hit description =Transporter, putative
  Pfam annotation: Domain name=FPN1; Domain location=214-310; Score =19.7; E_value=0.0012; Accession=PF06963.4; Description=Ferroportin1 (FPN1)
MWEFSVGLYMIRICPGSLLFTAIYGVVESASVAVFGPMVGILVDKLTYLQVLGIWLLVQSLSFIIAGVSVTALLIYEDLKDANFPVFMSLVIVTNVSGALAALSTLAGTILIEREWVVVISCGHPPSVLTGINSVIRRIDLSCKLLAPVFSGMVFSFVSAQASAVALALWNVASVGLEYWLFVSVYNGVPALNAENGRQRAADVLSSSEEIAAPAERAADWRTRLTEQLSIIPCWESWVVYVRQDVALPGVALSILYFTVLSFGTLMTATLDWKGIPAYVISLARGFSAIVGIGATLLYPMVHSWVSTLRTGLWSIWMQWCCLLVCVGSIWASSSVASAWMLMAGVAASRLGLWMFDLAVMQLMQDGVPEHERCVVGGVQNSLQSVFDLLTYIMGIIIS

SEQ ID NO: 91566 - protein, 127 aa, Setaria italica
  Transcript Sequence Number=SeqID_25592
TNCRYGVENNTLPLHINTNEHTVQCSPTSSDVSANKETHVGVGAATVEVRSPELSQKQTRHRQAEDGVASPASVAPGRTPRADNAAQAHLTPLVVFHRLASGGRHPQPHHHHGLDRPDRGLRVLILL

SEQ ID NO: 91567 - protein, 91 aa, Setaria italica
  Transcript Sequence Number=SeqID_25593
  Gene Ontology: Mol. function=protein serine/threonine kinase activity; Cellular component=plasma membrane; Biological process =protein amino acid phosphorylation
  Homolog annotation: Hit_ID=Q9XGZ2; Match level="QueryCoverage=93%, HitCoverage=8%, E-value=3e-13, Identity=41%"; Hit description =Leucine-rich repeat receptor-like protein kinase
  Pfam annotation: Domain name=LRR_1; Domain location=21-43; Score=0.7; E_value=2.2e+02; Accession=PF00560.25; Description=Leucine Rich Repeat
  Pfam annotation: Domain name=LRR_1; Domain location=45-67; Score =11.4; E_value=2; Accession=PF00560.25; Description=Leucine Rich Repeat
  Pfam annotation: Domain name=LRR_1; Domain location=69-91; Score=7.8; E_value=10; Accession=PF00560.25; Description=Leucine Rich Repeat
  Pfam module annotation: Pfam domain module=LRR_1::LRR_1::LRR_1; Domain location=21-43::45-67::69-91
NATDAATLCSWPHVGCDAAGRVVNLTLANANVAGPFPDAVGDLTGLTYLDVSSNNITGVFPTTLYRCASLQYLNLSLNYFGGALPANIGST

SEQ ID NO: 91568 - protein, 90 aa, Setaria italica
  Transcript Sequence Number=SeqID_25594
  Subcellular localization annotation: CTP_CleavageSite=31; ConfidenceScore=5.09e-01
TKTLNRDLSFKFLLARSKKLTYSDWCFGNVNCFSVNSIDGLSLRKVCRPKPVANQFPTWILLVFSFTMVSRDNWHEASQGPMTSNMYRGV

SEQ ID NO: 91569 - protein, 269 aa, Setaria italica
  misc_feature (44)..(44): Xaa can be any naturally occurring amino acid
  Transcript Sequence Number=SeqID_25595
  Gene Ontology: Mol. function=microtubule binding; Cellular component =cortical microtubule cytoskeleton; Biological process=negative regulation of microtubule polymerization
  Homolog annotation: Hit_ID=B6TN74; Match level="QueryCoverage=100%, HitCoverage=100%, E-value=1e-131, Identity=85%"; Hit description =ATEB1A
  Pfam annotation: Domain name=CH; Domain location=17-118; Score=57.4; E_value=5.4e-14; Accession=PF00307.23; Description=Calponin homology (CH) domain
  Pfam annotation: Domain name=EB1; Domain location=203-242; Score =77.3; E_value=5.5e-20; Accession=PF03271.9; Description=EB1-like C -terminal motif
  Pfam module annotation: Pfam domain module=CH::EB1; Domain location =17-118::203-242
MAAAVPSIGIMDGAYFVGRGEILHWINATLQLSLAKVEEAASGXVQCQLMDMVHPGVVPMHKVNFDAKTEYDMIQNYKVLQDVFNKLRIVKNIEVNKLVKGRPLDNLEFLQWLKRYCDSVNGGIMNENYNPVERRSKGCKERGSKGSNKSSKSLQANRLSGGDSADGGPGVGKVCNTFAEEHYVEQIQQLSEKIADLKVSVDSMEKERDFYFSKLRDIEILFQRPELEHLPMTKAVRKILYAADAKDSPLPDANDIITKSPGLFSDEAE

SEQ ID NO: 91570 - protein, 143 aa, Setaria italica
  Transcript Sequence Number=SeqID_25596
KNKSSWPKGSMGSSDELGNLQQTDQAIVQSLEGNGNQAEQTKAHDTETGGPEDMKAPENTNQKNNRMSQVETSNHSGKEASGVQRLGESTRDTPNSTEGAPGDVQAIGKSKESSRSSEESKVQLQSDDKTGETEEPSSENRAT

SEQ ID NO: 91571 - protein, 62 aa, Setaria italica
  misc_feature (50)..(51): Xaa can be any naturally occurring amino acid
  Transcript Sequence Number=SeqID_25597
  Gene Ontology: Mol. function=small conjugating protein ligase activity; Biological process=regulation of protein metabolic process
  Homolog annotation: Hit_ID=Q5RLI8; Match level="QueryCoverage=93%, HitCoverage=11%, E-value=6e-18, Identity=63%"; Hit description =Ubiquitin-conjugating enzyme E2
SLFQPARAWSKRVQHDWKLLEKDLPASIYVRVAEDRIDLLRAAIIGPKGXXYHDGLFFFDVH

SEQ ID NO: 91572 - protein, 153 aa, Setaria italica
  Transcript Sequence Number=SeqID_25598
  Gene Ontology: Mol. function=small conjugating protein ligase activity; Biological process=regulation of protein metabolic process
  Homolog annotation: Hit_ID=B9T0E4; Match level="QueryCoverage=79%, HitCoverage=18%, E-value=7e-41, Identity=62%"; Hit description =Ubiquitin conjugating enzyme, putative
NNCGKVCLSLLGTWTGNGCEKWNPAQSTLLQVLVSIQALILNENPYYNEPGYEASANTPHGQRKSLEYNDTTFLHSCRTMLYSLRRPPEHFADLVAGHFRVHGHTILAACKHYMEGHDVGSVVPEEESDCKSSEAGAASSSSSNAPKQGPAVN

SEQ ID NO: 91573 - protein, 446 aa, Setaria italica
  misc_feature (348)..(348): Xaa can be any naturally occurring amino acid
  Transcript Sequence Number=SeqID_25599
  Gene Ontology: Mol. function=small conjugating protein ligase activity; Biological process=regulation of protein metabolic process
  Homolog annotation: Hit_ID=Q5RLI8; Match level="QueryCoverage=78%, HitCoverage=65%, E-value=6e-88, Identity=46%"; Hit description =Ubiquitin-conjugating enzyme E2
  Pfam annotation: Domain name=UQ_con; Domain location=171-320; Score =117.0; E_value=6.1e-32; Accession=PF00179.18; Description=Ubiquitin -conjugating enzyme
MDAEYLGLQQGSSSSCRTADAAAWGAAQQQKRQRCQGSSSTSTLQISEPEPQDLDSGEIEEEEDYYMEDDCDDDVDGYDEDDYDFDEADFNQHLADKFDDLDLPPGVEATVPWLQKIAAKEEAKEPSKSNTEDENANKYKQFKQFDTVQNFSDHHFAKCSQGEPARAWSKRVQHDWKLLEKDLPASIYVRVAEDRIDLLRAAIIGPKGTPYHDGLFFFDVHIPSSYPSGPPLVHYHSGGLRINPNLYNCGKVCLSLLGTWTGNGCEKWNPAQSTLLQVLVSIQALILNENPYYNEPGYEASANTPHGQRKSLEYNDTTFLHSCRTMLYSLRRPPEHFADLVAGHFRVXGHTILAACKHYMEGHDVGSVVPEEESDCKSSEAGAASSSSSNAPKQGPAVNAANPLSRRAITFNTSLKTLYEDLLMEFNVKGADTRKFIVEKLKNKPA

SEQ ID NO: 91574 - protein, 76 aa, Setaria italica
  Transcript Sequence Number=SeqID_25600
LQPASFYLKPKLDRSAIHSRQVQIGSMTLFIHIASFLNARDSIPVHFEKRMCICTPRLRRDMRAIGTCTATFHYQI

SEQ ID NO: 91575 - protein, 57 aa, Setaria italica
  Transcript Sequence Number=SeqID_25601
TRRLAALLLLPLFSMAGSGWMHYCLIASTDSTWFGSPPRTSCSAHTFIYICRDEVQR

SEQ ID NO: 91576 - protein, 282 aa, Setaria italica
  Transcript Sequence Number=SeqID_25602
  Gene Ontology: Cellular component=plasma membrane
  Homolog annotation: Hit_ID=Q9ATP0; Match level="QueryCoverage=100%, HitCoverage=100%, E-value=1e-138, Identity=86%"; Hit description =Hypersensitivity-induced response-like protein
  Pfam annotation: Domain name=Band_7; Domain location=8-181; Score =146.8; E_value=6.9e-41; Accession=PF01145.17; Description=SPFH domain  Band 7 family
MGQVLGLVQVDQSTVAIKETFGKFSEVLEPGCHFLPWCIGQQVAGYLSLRVRQLDVRCETKQGNVFVTVVASVQYRALADKASDAFYKLSNTREQIQSYVFDVIRATVPKLELDDAFEQKNDIAKAVEEELEKAMSTYGYEIVQTLIVDIEPDDRVKRAMNEINAAARMRLAASEKAEAEKIIQIKKAEGEAESKYLAGVGIARQRQAIVDGLRDSVLAFSENVPGTTAKDIMDMVLVTQYFDTMKEIGASSKSSSVFIPHGPGAVKDVAAQIRDGLLQASQ

SEQ ID NO: 91577 - protein, 100 aa, Setaria italica
  Transcript Sequence Number=SeqID_25603
  Subcellular localization annotation: CTP_CleavageSite=59; ConfidenceScore=5.86e-01
MYLSAVASTAAPAAASTSLSSVNRRRSSPAYRIPAPLPRPLPCRLLSSSAPSHSPLRPVSAMASYPAAAGEAASRKKLIIFDAEEDLAASLAKRTAELSD

SEQ ID NO: 91578 - protein, 163 aa, Setaria italica
  misc_feature (24)..(24): Xaa can be any naturally occurring amino acid
  Transcript Sequence Number=SeqID_25604
  Gene Ontology: Mol. function=nucleic acid binding; Cellular component= intracellular
  Homolog annotation: Hit_ID=Q6K687; Match level="QueryCoverage=100%, HitCoverage=31%, E-value=2e-67, Identity=73%"; Hit description=Zinc finger CCCH domain-containing protein 18
  Pfam annotation: Domain name=zf-CCCH; Domain location=94-119; Score =22.6; E_value=0.0016; Accession=PF00642.16; Description=Zinc finger C-x8-C-x5-C-x3-H type (and similar)
KDAKEGLLDLKRSRVVKQVDDIFXNEEPASQAPEVAPEPLDPDDVEPEPLVSHDFSVGSKCRFRHNNGRWYNGCIIGFEGSSDARISFLTPTSENMAMCKFFLQQRCRFGSNCRMSHGIVIPTSALKKFTPTRWQQSLVGSSILAASGRHSGLWRRAELESWD

SEQ ID NO: 91579 - protein, 229 aa, Setaria italica
  Transcript Sequence Number=SeqID_25605
  Gene Ontology: Mol. function=nucleic acid binding; Cellular component= intracellular
  Homolog annotation: Hit_ID=Q6K687; Match level="QueryCoverage=87%, HitCoverage=41%, E-value=7e-82, Identity=72%"; Hit description=Zinc finger CCCH domain-containing protein 18
MAGDGEDEAAAIERQLEEQLQEQQSSLAAVDEALAADPSNADLLEVHEELLAAIKDAKEGLLDLKRSRVVKQVDDIFSNEEPASQAPEVAPEPLDPDDVEPEPLVSHDFSVGSKCRFRHNNGRWYNGCIIGFEGSSDARISFLTPTSENMAGSNCRMSHGIVIPTSALKKFTPTRWQQSLVGSSILAASGRHSGLWRRAELESWDDNLKLGQVVFLDDGSSARLTSDSL

SEQ ID NO: 91580 - protein, 85 aa, Setaria italica
  misc_feature (51)..(51): Xaa can be any naturally occurring amino acid
  Transcript Sequence Number=SeqID_25606
MDDSLYDEFGNYIGPELADSDADDDSDAGGASPSPSASRSPSPAARSPSGXSPSRPAALMDVDDDEDGDPSQQAVVLAEDKKYYP

SEQ ID NO: 91581 - protein, 113 aa, Setaria italica
  Transcript Sequence Number=SeqID_25607
  Gene Ontology: Mol. function=acyltransferase activity; Cellular component=chloroplast envelope; Biological process=metabolic process
  Homolog annotation: Hit_ID=B4G1C9; Match level="QueryCoverage=64%, HitCoverage=15%, E-value=2e-29, Identity=86%"; Hit description =Dihydrolipoyllysine-residue acetyltransferase component of pyruvatedehydrogenase complex
  Pfam annotation: Domain name=Biotin_lipoyl; Domain location=1-64; Score=47.3; E_value=6.1e-11; Accession=PF00364.14; Description =Biotin-requiring enzyme
TMTEGKIVSWSAAEGDRVTKGDAVVVVESDKADMDVETFHDGIVAAVLVPAGESAPVGAPIALLAESEEEVPLALAKAKELSNGQSQQAAPAPAEEAAATPPPPPPPTPAAAP

SEQ ID NO: 91582 - protein, 214 aa, Setaria italica
  Transcript Sequence Number=SeqID_25608
KITDCTIHPFLAERTLSKRELQQDPSYTYCSSSSSEQTSDSASLFDKADTRASNPQTRQAKSKNGFQALDSCKRFSVIGRQPSVSSISRSGTTAHFLHKPQPRCSSNQLRQRQEGIQQSKNRIQRRKNTFEHNSNATKFHSTMPPQTAASRGKASRKGFAVASFKRPKSKEKTNDEPPAGRTSPEKTKGSTSEPAKKLIRRRKKLLRSHCSPQP

SEQ ID NO: 91583 - protein, 66 aa, Setaria italica
  Transcript Sequence Number=SeqID_25609
LLLTIYLDGKLIHQEPVTVDSCLHDLAGATLPVNIFFAEPVSDGRDCGVLNSLAYCMSFTFREHRG

SEQ ID NO: 91584 - protein, 258 aa, Setaria italica
  misc_feature (8)..(8): Xaa can be any naturally occurring amino acid
  Transcript Sequence Number=SeqID_25610
  Gene Ontology: Mol. function=electron carrier activity; Cellular component=extracellular region; Biological process=hydrogen peroxide catabolic process
  Homolog annotation: Hit_ID=Q94IQ0; Match level="QueryCoverage=98%, HitCoverage=77%, E-value=1e-100, Identity=67%"; Hit description =Peroxidase
  Pfam annotation: Domain name=peroxidase; Domain location=1-219; Score= 316.0; E_value=7.7e-92; Accession=PF00141.15; Description=Peroxidase
CDASVLLXDTEEVVSEKNAIPNKNSIRGFEVIDEIKAALEEACPHTVSCADTIALAARGSTVLSGGPYWELPLGRRDSKTANMKLANKYLPPPNATLHRLIKFFQRQGLDKVDLVALSGSHTIGKARCVSFKQRLYNQHRDNRPDITLEKSFYHTLALACPHTGGDNNIRSLDFVSPSKFDNSYYKLIMEGRGLLNSDEVLWTGKDPEIAGLVKSYAENEPLFFEHYVNSITKMGNINPLMGHNGEIRKNCRRVNQEI

SEQ ID NO: 91585 - protein, 95 aa, Setaria italica
  Transcript Sequence Number=SeqID_25611
  Gene Ontology: Mol. function=drug transporter activity; Cellular component=membrane; Biological process=multidrug transport
  Homolog annotation: Hit_ID=Q9LUH2; Match level="QueryCoverage=78%, HitCoverage=15%, E-value=1e-23, Identity=65%"; Hit description =Aberrant lateral root formation 5
VPMVLTSMAFYGIPLVSVMFSGHLGDVQLAGATLGNSWATVTGYAFVTGLSGALETLCGQAYGARLYRMLGLYLQSSLIMSGVVSVLVSSLWRSS

SEQ ID NO: 91586 - protein, 101 aa, Setaria italica
  misc_feature (39)..(39): Xaa can be any naturally occurring amino acid
  Transcript Sequence Number=SeqID_25612
  Gene Ontology: Mol. function=RNA binding; Cellular component =ribosome; Biological process=translation
  Homolog annotation: Hit_ID=A6N017; Match level="QueryCoverage=97%, HitCoverage=45%, E-value=1e-42, Identity=89%"; Hit description=30S ribosomal protein S1 (Fragment)
RRHLKVMILSHDRERGRVSLSTKKLEPTPGAMSANPSLXFEKADEMAQIFRQRIAQAEAMARADMLRFQPESGLTLSSEGILGPLSSDTPSEDSAEESTDE

SEQ ID NO: 91587 - protein, 397 aa, Setaria italica
  Transcript Sequence Number=SeqID_25613
  Gene Ontology: Mol. function=RNA binding; Cellular component =ribosome; Biological process=translation
  Homolog annotation: Hit_ID=Q10MB2; Match level="QueryCoverage=92%, HitCoverage=92%, E-value=0.0, Identity=91%"; Hit description=30S ribosomal protein S1, chloroplast, putative, expressed
  Pfam annotation: Domain name=S1; Domain location=170-238; Score=55.5; E_value=2.1e-13; Accession=PF00575.15; Description=S1 RNA binding domain
  Pfam annotation: Domain name=S1; Domain location=247-319; Score =106.9; E_value=6.7e-29; Accession=PF00575.15; Description=S1 RNA binding domain
  Pfam annotation: Domain name=S1; Domain location=82-156; Score=31.0; E_value=5e-06; Accession=PF00575.15; Description=S1 RNA binding domain
  Pfam module annotation: Pfam domain module=S1::S1::S1; Domain location=170-238::247-319::82-156
  Subcellular localization annotation: CTP_CleavageSite=10; ConfidenceScore=5.18e-01
VAGLPCPPLSGASRSRRRPAAPRQPPSALVCGTYALTKEERERERMRQQFDEASERCRTAPMEGVAFSPEDLDTAVESTDIDTEIGSLIKGTVFMTTSNGAYIDIQSKSTAFLPLDEACLLDIDNVEDAGIRPGLVEEFMIIDENPSDETLILSLQAIQQELAWERCRQLQAEDVVTTGRVIGGNKGGVVALVEGLKGFVPFSQVSSKTTAEELLGKELPLKFVEVDEEQGRLVLSNRKAMADSQAQLGIGSVVMGTVESLKPYGAFIDIGGINGLLHVSQISHDRVADISTVLQPGDTLKVMILSHDRERGRVSLSTKKLEPTPGDMIRNPKLVFEKADEMAQIFRQRIAQAEAMARADMLRFQPESGLTLSSEGILGPLSSDTPSEDSAEESTDE

SEQ ID NO: 91588 - protein, 80 aa, Setaria italica
  Transcript Sequence Number=SeqID_25614
SCYSACTYGLWLVVAEGSTFISFVFPFPQKNKTSYIHSGICLWSLVRTERNMAQSFDSPHFDSESISQFNFRFSNWYHIR

SEQ ID NO: 91589 - protein, 106 aa, Setaria italica
  misc_feature (92)..(92): Xaa can be any naturally occurring amino acid
  Transcript Sequence Number=SeqID_25615
  Gene Ontology: Cellular component=plasma membrane
  Homolog annotation: Hit_ID=B6U7W3; Match level="QueryCoverage=96%, HitCoverage=15%, E-value=5e-28, Identity=64%"; Hit description =Nitrate and chloride transporter
VFAAISEIFGLKYYSTLYNFGGMASPVGSYILNVRVAGRLYDAEAARQGNVVGVGAGGTKHERVCLGVECFKRSFLIITAATVVGAAVSLVXVWRTWGFYEGGHLR

SEQ ID NO: 91590 - protein, 51 aa, Setaria italica
  misc_feature (23)..(23): Xaa can be any naturally occurring amino acid
  Transcript Sequence Number=SeqID_25616
KAGEGGCGGLVPACREPCGLGEXFQDAATYIEDLQVQVKVMRMLLDKLSDE

SEQ ID NO: 91591 - protein, 84 aa, Setaria italica
  Transcript Sequence Number=SeqID_25617
  Subcellular localization annotation: CTP_CleavageSite=50; ConfidenceScore=5.01e-01
GKANFFLMIPASAFIRYATLLSLINKVANHIPLFQNISRLSFSKSTGVSREAKITGNIIIPLDIQMHNNIYKLTYNLERTEFYL

SEQ ID NO: 91592 - protein, 267 aa, Setaria italica
  misc_feature (22)..(22): Xaa can be any naturally occurring amino acid
  misc_feature (154)..(154): Xaa can be any naturally occurring amino acid
  misc_feature (172)..(172): Xaa can be any naturally occurring amino acid
  Transcript Sequence Number=SeqID_25618
  Gene Ontology: Mol. function=integrase activity; Biological process =DNA integration
MSSGSAVTGSGAEEEAVAVPLXGQNLLVHVAENGHSLEIRCFGDTLVEAIQQSIERYCGIPPGDQRLLCGNTSLDGAHPLAYYRLPRDDREVFLYNKARLLADSRPPPPESVYIPEPKIPPAPRPQDSPPVEVSADPALKALVSYEIRFRYHFXQVANAVYRCSDTKFELCXRLLREQQVQERALDTARSNLDHTFKKVSQRYLEFVRCFSQQHRAHMELLTNFERDLQRLRAVRLHPALQCEGRQCLLDLLKENDMRKLADGCFSS

SEQ ID NO: 91593 - protein, 445 aa, Setaria italica
  Transcript Sequence Number=SeqID_25619
  Gene Ontology: Mol. function=RNA binding; Cellular component =ribosome; Biological process=translation
  Homolog annotation: Hit_ID=Q6L5I7; Match level="QueryCoverage=93%, HitCoverage=69%, E-value=1e-129, Identity=62%"; Hit description =Putative 30S ribosomal protein S1
  Pfam annotation: Domain name=S1; Domain location=213-285; Score=21.1; E_value=0.0047; Accession=PF00575.15; Description=S1 RNA binding domain
  Pfam annotation: Domain name=S1; Domain location=292-365; Score=41.6; E_value=3.2e-09; Accession=PF00575.15; Description=S1 RNA binding domain
  Pfam module annotation: Pfam domain module=S1::S1; Domain location =213-285::292-365
EKPSPSVAEDAEEEEPEPVPVLSTEEALAPFLKFFQVKSTDPDAEADAAAGERAESDAAGEAARSVGLSAGGRVVRYYDPKPGDFVAGVVVRSDGRTLDVDIGAGGEPALMLNKEAVPMPGEEFGYLACDVGSERAAEFATEGRVGVMVRQIGGGEEDGVLTSGRNVKEKGAAVAGVGAIVFAEVLGRTLGGRPLVSARRLFRRVAWHRARQIKQLNVPIKVKIYEWNAGGLLSRIEGLRAFLPKPEMMTRPRNFTDLKNKVGQEIHVCITRIDEGANELIISEKEAWAVTYLREGTLLQGTVRKLFPYGAQIRIGETNRGGLLHMSNITHGQLRSVADVLRVGETVKALVIKSTTPDRIALSTKDLESEPGLFITDKEKVFSEAEEMGQRYREQIAEPPRSGKAQDPCNDAVPFDNEAQSYANWKWLRFSKPDEAVNRKSRSEF

SEQ ID NO: 91594 - protein, 64 aa, Setaria italica
  Transcript Sequence Number=SeqID_25620
VARYLWFSLHAAVRDLIVFNLRLGLTFEIMIKLTYFVLWSGLWFNLFHHLPIVTLWCSFCYLFI

SEQ ID NO: 91595 - protein, 165 aa, Setaria italica
  misc_feature (16)..(16): Xaa can be any naturally occurring amino acid
  Transcript Sequence Number=SeqID_25621
WSPRPNPRPSPRPPAXQRVGEGWSMLSRARALLEEGKPSLALQAVLLAIRSQGGEQALIQTMDRACELYTQRLQATPSVDELASLLAQCAIAEAQSSNANPPRGPGSDPVDMLNSDEACILAVSGRKQIILDAFADGSSFICLKCGGLYSTSRKDEHLAYWCRTA

SEQ ID NO: 91596 - protein, 133 aa, Setaria italica
  Transcript Sequence Number=SeqID_25622
  Gene Ontology: Mol. function=transferase activity
  Homolog annotation: Hit_ID=B6U4E7; Match level="QueryCoverage=36%, HitCoverage=9%, E-value=9e-10, Identity=62%"; Hit description =Glycosyltransferase
  Subcellular localization annotation: CTP_CleavageSite=50; ConfidenceScore=5.23e-01
MSSCKERSGKNTKSWTPIVHLNVGFVVGVLFVLLTFLVFSQKAAISGLNVATTVAQPSIKGPGETFVTSGVQIQGSGGSAEKGTVVYNTKGGYSETCEVDGDVRINCSALSVFLVPTASSERHEWSILPYSRK

SEQ ID NO: 91597 - protein, 107 aa, Setaria italica
  Transcript Sequence Number=SeqID_25623
  Gene Ontology: Mol. function=oxidoreductase activity, acting on single donors with incorporation of molecular oxygen, incorporation of two atoms of oxygen
  Homolog annotation: Hit_ID=B4FQ23; Match level="QueryCoverage=88%, HitCoverage=42%, E-value=2e-42, Identity=82%"; Hit description =Lactoylglutathione lyase
MVNTKCVEPAVQGGGLPLAALNHISVVCRSLDSSQRFYRDVLGFIPIRRPGSFDFDGAWLFNYGIGIHLLQAEDPESMPPKKTEINPKDNHISFQCESMEAVQRRLK

SEQ ID NO: 91598 - protein, 307 aa, Setaria italica
  Transcript Sequence Number=SeqID_25624
  Gene Ontology: Mol. function=catalytic activity; Cellular component =plasma membrane; Biological process=cellular metabolic process
  Homolog annotation: Hit_ID=B6STR1; Match level="QueryCoverage=93%, HitCoverage=93%, E-value=1e-156, Identity=92%"; Hit description=dTDP- 4-dehydrorhamnose reductase
  Pfam annotation: Domain name=Epimerase; Domain location=22-218; Score= -6.7; E_value=1.3e-06; Accession=PF01370.13; Description=NAD dependent epimerasedehydratase family
  Pfam annotation: Domain name=RmlD_sub_bind; Domain location=20-298; Score=-111.0; E_value=4e-06; Accession=PF04321.9; Description=RmlD substrate binding domain
  Pfam module annotation: Pfam domain module=Epimerase::RmlD_sub_bind; Domain location=22-218::20-298
MGVATNGSAAEQAPAPASALKFLIYGRTGWIGGLLGGLCAAQGIPFAYGAGRLENRAQLEADIDAAAPTHVFNAAGVTGRPNVDWCETHRAETVRANVVGTLTLADVCRGRGLVLINYATGCIFEYDDAHPLGSGVGFKEEDTPNFVGSFYSKTKAMVEELLKNYENVCTLRVRMPISSDLSNPRNFITKITRYEKVVNIPNSMTILDELLPISIEMAKRNLTGIWNFTNPGVVSHNEILEMYRDCIDPSFSWKNFNLEEQAKVIVAPRSNNELDQTKLKNEFPELLSIKESLIKYVFEPNRKTPKA

SEQ ID NO: 91599 - protein, 364 aa, Setaria italica
  Transcript Sequence Number=SeqID_25625
  Gene Ontology: Mol. function=protein tyrosine kinase activity; Cellular component=plasma membrane; Biological process=protein amino acid phosphorylation
  Homolog annotation: Hit_ID=Q10E34; Match level="QueryCoverage=99%, HitCoverage=80%, E-value=1e-161, Identity=53%"; Hit description =Receptor protein kinase CLAVATA1, putative, expressed
  Pfam annotation: Domain name=LRR_1; Domain location=109-131; Score =13.7; E_value=0.73; Accession=PF00560.25; Description=Leucine Rich Repeat
  Pfam annotation: Domain name=LRR_1; Domain location=12-31; Score =15.2; E_value=0.28; Accession=PF00560.25; Description=Leucine Rich Repeat
  Pfam annotation: Domain name=LRR_1; Domain location=133-155; Score =9.0; E_value=5.7; Accession=PF00560.25; Description=Leucine Rich Repeat
  Pfam annotation: Domain name=LRR_1; Domain location=157-179; Score =7.2; E_value=13; Accession=PF00560.25; Description=Leucine Rich Repeat
  Pfam annotation: Domain name=LRR_1; Domain location=181-203; Score =13.3; E_value=0.85; Accession=PF00560.25; Description=Leucine Rich Repeat
  Pfam annotation: Domain name=LRR_1; Domain location=205-227; Score =6.2; E_value=20; Accession=PF00560.25; Description=Leucine Rich Repeat
  Pfam annotation: Domain name=LRR_1; Domain location=229-250; Score =6.5; E_value=18; Accession=PF00560.25; Description=Leucine Rich Repeat
  Pfam annotation: Domain name=LRR_1; Domain location=36-58; Score=4.3; E_value=47; Accession=PF00560.25; Description=Leucine Rich Repeat
  Pfam annotation: Domain name=LRR_1; Domain location=60-82; Score=9.6; E_value=4.5; Accession=PF00560.25; Description=Leucine Rich Repeat
  Pfam annotation: Domain name=LRR_1; Domain location=84-106; Score =5.8; E_value=24; Accession=PF00560.25; Description=Leucine Rich Repeat
  Pfam module annotation: Pfam domain module=LRR_1::LRR_1::LRR_1::LRR _1::LRR_1::LRR_1::LRR_1::LRR_1::LRR_1::LRR_1; Domain location=109 -131::12-31::133-155::157-179::181-203::205-227::229-250::36-58::60 -82::84-106
GGVPRRLGRNGRLQLLDLSSNKLTGTLPPELCAGGKLQTLIALGNFLFGAIPDSLGQCKSLSRVRLGENYLNGSIPKGLFELPKLTQVELQDNLLTGNFPAVIGVAAPNLGEISLSNNQLTGALPASLGSFSGIQKLLLDRNSFSGAVPPEIGRLQQLSKADLSSNKFEGGVPPEIGKCRLLTYLDMSQNNLSGKIPPAISGMWILNYLNLSRNHLDGEIPPSIATMQSLTAVDFSYNNLSGLVPGTGQFTYFNATSFVGNPGLCGPYLGPCRPGIAGADHTPHGHGGLTNTVKLLIVLGLLVCSIAFAAAAILKARSLKKASEARVWKLTAFQRLDFTSDDVLDCLKEENIIGKVGCPGILFC

SEQ ID NO: 91600 - protein, 192 aa, Setaria italica
  Transcript Sequence Number=SeqID_25626
  Gene Ontology: Mol. function=flavin-containing monooxygenase activity; Cellular component=intrinsic to endoplasmic reticulum membrane; Biological process=oxidation reduction
  Homolog annotation: Hit_ID=B6SWP3; Match level="QueryCoverage=92%, HitCoverage=33%, E-value=1e-74, Identity=75%"; Hit description =Monooxygenase/ oxidoreductase
RLEEGSIVLKKSKTFSFCKEGVIVREGESSLIKSDIVIFGTGFKGDEKIKDIFTSEYFRSIAVGSTSTTVPLYRECIHPKIPQLAVIGYSESISNLYTSEIRAKWLAHFMDGGFTLPNITAMQKDVIEWEKYMKRYSGRYFRRSGIAIIHTWYNDQLCRDMGCNPRRKKGFFKELFEVYGPGDYVDLRPKKE

SEQ ID NO: 91601 - protein, 80 aa, Setaria italica
  Transcript Sequence Number=SeqID_25627
  Gene Ontology: Mol. function=protein serine/threonine kinase activity; Biological process=protein amino acid phosphorylation
  Homolog annotation: Hit_ID=Q9SA26; Match level="QueryCoverage=98%, HitCoverage=6%, E-value=6e-32, Identity=75%"; Hit description=F3O9.7 protein
SKKNLLDRRKRITLAMDVAIGMEYLHSKDIIHFDLKCDNLLVNLNDPSRPICKVADFGLSKVKQTTMVSVGMRGTLPWMA

SEQ ID NO: 91602 - protein, 154 aa, Setaria italica
  Transcript Sequence Number=SeqID_25628
  Subcellular localization annotation: CTP_CleavageSite=50; ConfidenceScore=5.70e-01
AAAAAAAASVSAPPGPSTASVITAPPPPFPDFSHSSLQRSSSTPNIPMPDQMAGAKNRPPADAAIREEDEDEDEDEDEDDGHIRTDSDDDDEDDSDDDDDDHHEHDDVSVDGMVHGQPAKRVVMDSVGSSPVTPPPPPRLNQTPPTSATTTPPP

SEQ ID NO: 91603 - protein, 69 aa, Setaria italica
  Transcript Sequence Number=SeqID_25629
MQPLFRLWHGHVYSCYSAMVQEDKSSMHSAGVASSGVSVAAHVGSPDASVGTNNAAGTAPPATPGNNNK

SEQ ID NO: 91604 - protein, 172 aa, Setaria italica
  Transcript Sequence Number=SeqID_25630
  Gene Ontology: Mol. function=calcium ion binding
  Homolog annotation: Hit_ID=B6SL16; Match level="QueryCoverage=98%, HitCoverage=36%, E-value=5e-76, Identity=82%"; Hit description =Calcium binding atopy-related autoantigen 1
  Pfam annotation: Domain name=efhand; Domain location=111-139; Score =24.1; E_value=0.00057; Accession=PF00036.24; Description=EF hand
  Pfam annotation: Domain name=efhand; Domain location=3-31; Score=1.9; E_value=13; Accession=PF00036.24; Description=EF hand
  Pfam module annotation: Pfam domain module=efhand::efhand; Domain location=111-139::3-31
MRIVRLEFSHYDVKSSQTIPVKDFALSMVASADMNHINKLLDRVDDLDDNADLKDLRITFEEFKAFADLRRRLEPFAMAIFSYGKINGLLTKQDLKRAASHVCGVDLTDNVVDIIFHVFDADRDGNLSSEEFLRSLQRRESDIRQPTTSGFLGVVACWLNCTKCSLQQMLPQ

SEQ ID NO: 91605 - protein, 146 aa, Setaria italica
  Transcript Sequence Number=SeqID_25631
LYIFKQYASQTAPRARTANYTEAAGHCTVPWVEKQRTQQVMLPRQLTQQPCRRPRTNHSSSTPWRPQESPRERAAHARLVAPLGLGRIPPVDRRRRAPVGYYAGVDDDAAAAAASSCSTRSSALPGAAARRSCRARTHRNAPSATW

SEQ ID NO: 91606 - protein, 160 aa, Setaria italica
  Transcript Sequence Number=SeqID_25632
QQRAERDAAIARLEQSRLVLAMRLAEHQGKRYRVIDEALAFVGEVSDKSRFISPEDVRATQTEDNAEGNRGSGSRIMSNVLACSLSLAKNSFRLDKIGGALGNAAVFAVSMLAFLQLHQIALGSRTPAMGYRKRIEYSFQSGSSQQNGKGKHLEVYLARG

SEQ ID NO: 91607 - protein, 134 aa, Setaria italica
  Transcript Sequence Number=SeqID_25633
  Gene Ontology: Mol. function=electron carrier activity; Cellular component=integral to membrane; Biological process=oxidation reduction
  Homolog annotation: Hit_ID=Q94IW5; Match level="QueryCoverage=85%, HitCoverage=23%, E-value=5e-52, Identity=88%"; Hit description =Cytochrome P450 90D2
LSPPRSSALWTLLSWPGWRRGAGKEQAARLPPGSFGWPLVGETLDFVSCAYSARPEAFVDKRRLRHGSPVFRSHLFGSATVVTSDAEVSRFVLQSDARAFVPWYPRSLTELMGKSSILLINGSLQRRVHGLVGA

SEQ ID NO: 91608 - protein, 184 aa, Setaria italica
  Transcript Sequence Number=SeqID_25634
  Homolog annotation: Hit_ID=B6SJK3; Match level="QueryCoverage=89%, HitCoverage=40%, E-value=2e-62, Identity=69%"; Hit description=mTERF family protein
HAVDCRADTLVRAEDASEELDNSMRPAVEAFRRHGLPEESIAKLLLIHLGVLMVPVDRIAEAFDDLQDLGLRVTDTGFLYGFRVISILKRETWVRKVALYRSFGVCEADLLRAFKTQPTILLVSDESVKKKIRFYLDVLKVGIGDVMAQPMILSLSLEKNIMPRCAVLSVLMREGKIERKLKFE

SEQ ID NO: 91609 - protein, 179 aa, Setaria italica
  Transcript Sequence Number=SeqID_25635
  Gene Ontology: Mol. function=nucleotide binding
  Homolog annotation: Hit_ID=B6SJK3; Match level="QueryCoverage=100%, HitCoverage=45%, E-value=8e-65, Identity=67%"; Hit description=mTERF family protein
RRRLAIPLAPVLAGGGGGKNPIHSSPVAVLLSHGYYSTAVAAGPEPCPATVSYLVSCGLSPAAAAARNVRIRDTNRADAVRAVLREYGFSEAEITRTVRQDPVLLNFDADRIIRPKLDFFLSLGFQPRFLAAEPHILARSLDNHLAPCIEFLRSILGSDECVRTAVYRVPRALLADLDN

SEQ ID NO: 91610 - protein, 96 aa, Setaria italica
  Transcript Sequence Number=SeqID_25636
  Subcellular localization annotation: CTP_CleavageSite=56; ConfidenceScore=5.42e-01
RPCLRFTLLTRSPLPTQKPRPRRPQGSIQPGISLSISGSPSWCQASNSHRREEQARESNGGPGAAPRPRLPGRLRARRRPLRLLRLGRHLHDRLPA

SEQ ID NO: 91611 - protein, 69 aa, Setaria italica
  Transcript Sequence Number=SeqID_25637
MAMMSRTRDLLMEGFEGLVREGSFKWGLPRREEEEEDEDDDSSHSGKRPSIAGLSFKANSVVARCSRIL

SEQ ID NO: 91612 - protein, 92 aa, Setaria italica
  Transcript Sequence Number=SeqID_25638
  Gene Ontology: Mol. function=oxidoreductase activity; Cellular component=cytoplasm; Biological process=oxidation reduction
  Homolog annotation: Hit_ID=B9RKT3; Match level="QueryCoverage=94%, HitCoverage=17%, E-value=2e-31, Identity=67%"; Hit description =Aldehyde dehydrogenase, putative
RTVGREAIARANGTTYGLGAGVVTRDLDVANRVVRSVRAGLVWVNCYFAVSSDCPFGGRKMSGFGKDEGMHALDKFLAVKSVVTPLRDSPWL

SEQ ID NO: 91613 - protein, 238 aa, Setaria italica
  Transcript Sequence Number=SeqID_25639
  Gene Ontology: Cellular component=integral to membrane
  Homolog annotation: Hit_ID=B6U2S9; Match level="QueryCoverage=98%, HitCoverage=85%, E-value=4e-81, Identity=70%"; Hit description =Senescence-associated protein DH
  Pfam annotation: Domain name=Tetraspannin; Domain location=9-228; Score=67.2; E_value=6.3e-17; Accession=PF00335.12; Description =Tetraspanin family
PGLSTDCERFLERPVIALGVLLLALSLAGLAGALCRASCLLWLYLLALFLLIVLLFAFTIFAFVVTNRGAGWVVSGRGYKEYRLGDYSTWLQRRVENAGNWAKVRSCLQDGKVCQKLADRKETVTQFVNSNLSPIQSGCCKPPTGCNFTYQSETVWIKPTGFNTTTDDPDCTTWSNDQTALCYDCMACKAGVLANLKNDWKKIATINIVFLIFLIVIYSVGCCAFRNNRQDNSYPAWK

SEQ ID NO: 91614 - protein, 412 aa, Setaria italica
  Transcript Sequence Number=SeqID_25640
  Gene Ontology: Mol. function=DNA-directed RNA polymerase activity; Cellular component=nucleus
  Homolog annotation: Hit_ID=B6TU28; Match level="QueryCoverage=99%, HitCoverage=92%, E-value=1e-176, Identity=76%"; Hit description=A49 -like RNA polymerase I associated factor family protein
  Pfam annotation: Domain name=RNA_pol_I_A49; Domain location=45-412; Score=53.4; E_value=8.6e-13; Accession=PF06870.4; Description=A49 -like RNA polymerase I associated f
LNVTVDASLTGGRTAAAPAPAPAVAYFPTGYDPLAAAAVAAEEDESAPNARLFRHEKHPTWVDLVVGSSGGGPDFVGRSYAGEAATPQLCEYALGVLDKASGTLRVVPIAANKILRLEPHLEVQQPAHSQHSEVASEAGSVAGNDELKVQDLTMMYGTKTDRDKDNKWRSLNEQRNDPSAYEDIDLGTSNVHTNDSQEPVIVRNIPPYDPTADTSEKAYLLDEIIPKNMRQHLLEIVDHFESGQISSKGYSSFVSNRVQKLQELQGQDKERLAWILSYIQHLLSLYERNGGMSKHHRKHRKENKANHGPGTPLAVYRNLLLIFTEPGSSSMSSEKNELLINYILVLTLFADDFRSDPKDICADLKMTRQMLKPYYDQLGCKSVSAGAFKSTFMTLPAPLNFPQDVTRRKRRR

SEQ ID NO: 91615 - protein, 52 aa, Setaria italica
  Transcript Sequence Number=SeqID_25641
  Gene Ontology: Mol. function=nucleoside-triphosphatase activity; Cellular component=mitochondrial matrix; Biological process=ATP -dependent proteolysis
  Homolog annotation: Hit_ID=P93648; Match level="QueryCoverage=100%, HitCoverage=5%, E-value=4e-18, Identity=82%"; Hit description=Lon protease homolog 2, mitochondrial
VIALPLLQRPLFPGFHMPIYVKDPKLLQALVENSKRSGPYAGAFLVKDDEGT

SEQ ID NO: 91616 - protein, 460 aa, Setaria italica
  Transcript Sequence Number=SeqID_25642
  Gene Ontology: Mol. function=sodium:hydrogen antiporter activity; Cellular component=integral to membrane; Biological process=sodium ion transport
  Homolog annotation: Hit_ID=B6U2S2; Match level="QueryCoverage=100%, HitCoverage=84%, E-value=0.0, Identity=81%"; Hit description =Sodium/hydrogen exchanger
  Pfam annotation: Domain name=Na_H_Exchanger; Domain location=1-358; Score=97.9; E_value=3.6e-26; Accession=PF00999.13; Description =Sodiumhydrogen exchanger family
  Subcellular localization annotation: CTP_CleavageSite=27; ConfidenceScore=5.03e-01
LLPPIIFNAGFQVKKKQFFRNFITITLFGAVGTLISFTVISLGALGLISRLNIGALELGDYLALGAIFSATDSVCTLQVLSQDETPFLYSLVFGEGVVNDATSVVLFNAIQNFDLGNINTAKLLKFIGSFLYLFSSSTILGVAAGLLSAYIIKKLYFGRHSTDREVSIMMLMAYLSYMLAELLDLSGILTVFFCGIVMSHYTWYSVTESSRVTTKHAFATLSFIAETFLFLYVGMDALDIEKWKIVGQTYSPVKSIALSSTILALVLVSRAAFVFPLSFLSNLTKKTPEGKISFKQQVIVWWAGLMRGAVSIALAYNKFTRSGHTQQPSNAIMITSTIIVVLFSTFVFGLLTKPLIRLLIPPRHLSREPSALSEPSSPKSFLEHLAANSPGHPDLENGISLRRPASLRLLLVSPTRSVHHYWRKFDDGFMRPVFGGRGFVPFVPGSPTESSVPLLAGNEN

SEQ ID NO: 91617 - protein, 79 aa, Setaria italica
  Transcript Sequence Number=SeqID_25643
VYTYRYKLNSETIQQFTFNCKRKNMVKCKHLPMKSQQISSSGHVVPVQLTSRAASSQEEMDFWKLVALERHVQLARGDW

SEQ ID NO: 91618 - protein, 89 aa, Setaria italica
  misc_feature (53)..(53): Xaa can be any naturally occurring amino acid
  Transcript Sequence Number=SeqID_25644
  Subcellular localization annotation: CTP_CleavageSite=49; ConfidenceScore=5.46e-01
EQNQRHRADPRGPPPPPPPHHLRPRGQSPPPPRPRSPPRERRRRRELPNAAAXRQWPARALAPSIGHRAATSRIQQGGVVEAGERGIWG

SEQ ID NO: 91619 - protein, 586 aa, Setaria italica
  misc_feature (78)..(78): Xaa can be any naturally occurring amino acid
  misc_feature (82)..(82): Xaa can be any naturally occurring amino acid
  misc_feature (150)..(150): Xaa can be any naturally occurring amino acid
  Transcript Sequence Number=SeqID_25645
  Gene Ontology: Mol. function=DNA binding; Cellular component=nucleus; Biological process=chromatin modification
  Homolog annotation: Hit_ID=B9S516; Match level="QueryCoverage=50%, HitCoverage=14%, E-value=4e-46, Identity=39%"; Hit description=DNA binding protein, putative
  Pfam annotation: Domain name=HSA; Domain location=318-385; Score =56.3; E_value=1.2e-13; Accession=PF07529.5; Description=HSA
VSSIKQSGSNCDNAPKNAASDGQAEMELDGIQAIHESECVVNEEAKQADNNSKAKEVSSTDANHNRLPVGCGEISDAXVSSXASAETPDTSLKVPRPCYPSASTHDERESCPVDEKADYGHLDEHMAHIHAGQPDSRRKVLVCAVEASTXLKNAVGPPCEGPMNIVDNHSDGDTNLVAAKIDVKSHEDLDSSRCYSAKESSDLVQPEANNILHMKDEMEICDSATVAQKDTGCLSSGQTMNIEESPASDRKNSCVGDLKSAHPISDGTDLPKALPSPKYGESNLENELKKSKAYEDSVLKEAHVIEASIKRAGERSHCNIALEKRSKSHWDFVLEEMAWMANDFMQERLWKSVAAAKVCHWIASDGRGKFEEASIQRKQKAVMKIIAKGITSFWRSAEALQTADTAKMMQAHNSTMLEETQPSGTKAEKEHVYKSLEAKESRQPRQSQILGYAVRFLEYNSRVADSHVLPEAPPTPERLNDFGILKVSDHLSEESLFYTVAPGLMLAYRESLESLSVYHKEVGNAELNDDYEASVCDSAAVCSDLLWENAYEEDEGETCTYLSPKAYDGGCLSNMGHKKKHQMQQR

SEQ ID NO: 91620 - protein, 245 aa, Setaria italica
  Transcript Sequence Number=SeqID_25646
  Homolog annotation: Hit_ID=Q7XS46; Match level="QueryCoverage=77%, HitCoverage=53%, E-value=3e-24, Identity=34%"; Hit description =OSJNBa0035M09.18 protein
  Pfam annotation: Domain name=DUF266; Domain location=1-235; Score =325.3; E_value=1.2e-94; Accession=PF03267.6; Description=Arabidopsis protein of unknown function, DUF266
  Subcellular localization annotation: CTP_CleavageSite=30; ConfidenceScore=5.40e-01
HADPAAALTSPPTPSFRGRVIPGKATQRASATLISAARRLLATALLDDPANHFFAPLSQSCVPLHPFPSLYRTLTGDNGGPKGRHRSFIEILDAEPTLHDRYYARGDDVMLPEVPYDSFRVGSQFFVLTRRHAVMVVRDRRLWNKFKLPCLVKRKYSCYPEEHYFPTLLDMQDPGGSTKFTLTRVNWTDSSDGHPHTYQPEEVSGELIRELRKSNGTYSHMFARKFAPECLGPLMKIADSVILRD

SEQ ID NO: 91621 - protein, 34 aa, Setaria italica
  Transcript Sequence Number=SeqID_25647
MQKQTGKSGGSGGGTPAKRGRPFGSTTGSGAAAA

SEQ ID NO: 91622 - protein, 414 aa, Setaria italica
  Transcript Sequence Number=SeqID_25648
  Gene Ontology: Cellular component=chloroplast envelope
GRRRGGAFGAVTPENAPLDLAKRLKKAHPELATAGGGGDIGKKIGHGGGDGGDDDGDDDDYFDDFEDGDEEGGFFKRRIVIQELFNREFIDAVLQEWYKSMSNLPAGLRQAYEMGLVSSAQMVQYLSIFGRPTKARYFSRAFPGFFSRGLVGRMLADPSFLHKMTLEFLATITSSVWWEMENRKERFQQELDLVFVNVFTATICNLAVFCCLAPCRSYTIQRVPNNIFEKSYPMRQFDLLRRTQSFFSKAAQLCLGGLVVGSIQGGLSKVISARKERLSIPIPSISTNALSYGAFYGLYANLRYQMLCGFDRSMLHHFDVLGVAIFFSTAIRLMNIQIGEVSRRGWIGEEADLLRSDNLLRGYGGLAELAGEQQSGWFLSNNAISSGLGLLGINHGDAPSKPRRKRIVRKVPAN

SEQ ID NO: 91623 - protein, 217 aa, Setaria italica
  misc_feature (200)..(200): Xaa can be any naturally occurring amino acid
  Transcript Sequence Number=SeqID_25649
  Gene Ontology: Mol. function=oxidoreductase activity; Cellular component=extracellular region; Biological process=lignin catabolic process
  Homolog annotation: Hit_ID=Q339K6; Match level="QueryCoverage=100%, HitCoverage=36%, E-value=7e-67, Identity=58%"; Hit description =Laccase-15
  Pfam annotation: Domain name=Cu-oxidase_2; Domain location=71-213; Score=145.9; E_value=1.2e-40; Accession=PF07731.6; Description =Multicopper oxidase
VPTRVDERCSSHSAWASICRQGHSSCERSESPDSLIVATMNNVSFQQPALEMPLLEMHYYNPDRVATMLQELPKEPPMVYNYTDPALIPLGPKEAKLEPSSEATVARRFRQGSVVEVVFQGTALLQSESNPMHLHGHDVFVLAQGEGTYDAGRDAARYNLVNPPIKNTVHVPRLGWVALRFVADNPGIWYMHCHFGFHLXMGMLALFIVEDGTTVGT

SEQ ID NO: 91624 - protein, 79 aa, Setaria italica
  Transcript Sequence Number=SeqID_25650
MADIALLVVEEFERGTKRAAALRRGSQEPPAGDGDGCDRAASAYGRSKQSAWVAALGAGTRSETGGALGLAAADGFFSA

SEQ ID NO: 91625 - protein, 52 aa, Setaria italica
  Transcript Sequence Number=SeqID_25651
GTGTQAAAAWAPAQASPLLLLLLLSAHRIDSAVAGCAQCTIAPKQDSPVGAW

SEQ ID NO: 91626 - protein, 154 aa, Setaria italica
  Transcript Sequence Number=SeqID_25652
  Gene Ontology: Mol. function=metalloendopeptidase activity; Cellular component=extracellular space; Biological process=proteolysis
  Homolog annotation: Hit_ID=B8MEM3; Match level="QueryCoverage=77%, HitCoverage=11%, E-value=7e-15, Identity=35%"; Hit description =Metalloprotease, putative
NNISRRCQQFNELLHDGISSDISPCFHQVIKEDLERAYKNTNMKPMSHSTYLRLQVLREIFWDVDEKLEVLMNLTFTDLVTFVPKILSQLHIEGLCHGNLSEEEAINISKIFRNTLSAQTLPEEARHGVRVICIPNGANFVRSVRVKNDLEEIL

SEQ ID NO: 91627 - protein, 590 aa, Setaria italica
  Transcript Sequence Number=SeqID_25653
  Gene Ontology: Mol. function=metalloendopeptidase activity; Cellular component=extracellular space; Biological process=proteolysis
  Homolog annotation: Hit_ID=A2R707; Match level="QueryCoverage=92%, HitCoverage=46%, E-value=2e-79, Identity=32%"; Hit description =EC:3.4.99.-
  Pfam annotation: Domain name=Peptidase_M16_C; Domain location=297 -483; Score=46.7; E_value=9e-11; Accession=PF05193.13; Description =Peptidase M16 inactive domain
FSSKSIVFCCSEEQPPDDYAVDLAENMLFYSEKHIVCGEYIHEDWDPELVKHALCFFNPDNMRVDVLSRSFDKQSQAIQCEPWFGSQYIEEDIPSSLIESWRNPVQIDPNLHLPRKNEFIPGDFTLRNANYPRSSSDDNPRCIVDEPFIKLWYKMDMTFNVPRANTYFLISVNDGCSSLENSVLTELFANLLKDELNEVLYQAYVAKLETSMSVVGSNLEIKLYGYNDKLPTLLSNILSAFRSFSPKTDRFEVIKEDLERAYKNTNMKPMSHSTYLRLQVLREIFWDVDEKLEVLMNLTFTDLVTFVPKILSQLHIEGLCHGNLSEEEAINISKIFRNTLSAQTLPEEARHGVRVICIPNGANFVRSVRVKNDLEENSVVEVYFPIEQDIGKEATRLRAITDLFSSIIEEPCFDQLRTKEQLGYTVDSSPRMTYRMLAYCFRVMSSKYSPIYLQSRIDNFINGLSTLLDGLDDETFEHHRSGLIADKLEKEPSLSYQTGDYWSQIVDKRYLFDMPKLEAEELRTIQKADVIAWYNTYIRSSAPKRRRLAIHVYGCNSDIAEAAKLQEQSWTVIDDVKSLKVSSQFYSSLC

SEQ ID NO: 91628 - protein, 42 aa, Setaria italica
  Transcript Sequence Number=SeqID_25654
FIDRSDLGRRRCRRAGFGRRIRAGVRAADCMGPRVRIGRMSL

SEQ ID NO: 91629 - protein, 130 aa, Setaria italica
  misc_feature (64)..(64): Xaa can be any naturally occurring amino acid
  misc_feature (123)..(123): Xaa can be any naturally occurring amino acid
  Transcript Sequence Number=SeqID_25655
  Gene Ontology: Mol. function=structural constituent of ribosome; Cellular component=ribonucleoprotein complex; Biological process =translation
  Homolog annotation: Hit_ID=B6SST7; Match level="QueryCoverage=100%, HitCoverage=45%, E-value=2e-65, Identity=93%"; Hit description=50S ribosomal protein L5
  Pfam annotation: Domain name=Ribosomal_L5; Domain location=1-53; Score=72.6; E_value=1.4e-18; Accession=PF00281.11; Description =Ribosomal protein L5
  Pfam annotation: Domain name=Ribosomal_L5_C; Domain location=57-130; Score=37.5; E_value=5.2e-08; Accession=PF00673.13; Description =ribosomal L5P family C-terminus
  Pfam module annotation: Pfam domain module=Ribosomal_L5::Ribosomal_L5_ C; Domain location=1-53::57-130
VPKLEKIVVNCGLGADAGNNKGLESAMKDLANITGQWPVKTKAKKSVASFKIREGNTIGIAVTXRGRIMYNFLDRLINLGLPRTMDFLGVNPNSFDGHGNYSLGLRDQGVFPEIPYEVGGKKXNGMDVCI

SEQ ID NO: 91630 - protein, 66 aa, Setaria italica
  Transcript Sequence Number=SeqID_25656
  Subcellular localization annotation: CTP_CleavageSite=48; ConfidenceScore=5.16e-01
KKNQKTERVNSPKLQLLAPNSKSNFQGTTSLQFHGLVSHTVVITLRKREKEKKGKEGRIRAISHLG

SEQ ID NO: 91631 - protein, 160 aa, Setaria italica
  misc_feature (137)..(137): Xaa can be any naturally occurring amino acid
  Transcript Sequence Number=SeqID_25657
  Gene Ontology: Mol. function=binding
  Homolog annotation: Hit_ID=Q10D20; Match level="QueryCoverage=100%, HitCoverage=4%, E-value=1e-58, Identity=71%"; Hit description=WD-40 repeat family protein, putative, expressed
EYAVTVVNCIPEQELLSLCCLLQQPISTSLKHTVLSFFVKLLSFDQQYKKVLREVGVLGVLLDDLKQNKLFFGDEQHNKAFESTERISNASNFQKTVDNKDAILSPKLMASSSAKFPMFEDEGTITVAWDCLFYLLXKRAEPNQQSFRSSNGVNIISSFL

SEQ ID NO: 91632 - protein, 54 aa, Setaria italica
  Transcript Sequence Number=SeqID_25658
FQKKELVILIELCIFFIFRTLHYLRGNMPKKTIRRKYNASFYYACMHSIILYGR

SEQ ID NO: 91633 - protein, 103 aa, Setaria italica
  Transcript Sequence Number=SeqID_25659
  Subcellular localization annotation: CTP_CleavageSite=33; ConfidenceScore=5.39e-01
EDDVGSPCRRRRKRPPSFGFASCGGRGQNFSSCSAMPMCPTCSISQLVERASPSLVFVEGGLVMYHYHLVCPCSSCFTLLGPSPAWIPCVHLPKAVTRDLYLP

SEQ ID NO: 91634 - protein, 86 aa, Setaria italica
  Transcript Sequence Number=SeqID_25660
  Gene Ontology: Cellular component=membrane
GPVQDIVVTVVNERDLLFVLHLDGHLRIWDNHTKLLNYNVCSNDIEGHPSRLWVGEADDDQEMISLAVLHQNTVVQDCDHVALYGF

SEQ ID NO: 91635 - protein, 355 aa, Setaria italica
  misc_feature (8)..(8): Xaa can be any naturally occurring amino acid
  Transcript Sequence Number=SeqID_25661
  Gene Ontology: Mol. function=protein dimerization activity
  Homolog annotation: Hit_ID=Q8S7P4; Match level="QueryCoverage=99%, HitCoverage=43%, E-value=1e-122, Identity=60%"; Hit description =Putative transposase
  Pfam annotation: Domain name=hATC; Domain location=238-329; Score =39.9; E_value=1e-08; Accession=PF05699.6; Description=hAT family dimerisation domain
GELESGSXLNQEMSLPRPGETRWGSHYKTICSIITMYSSIHDALIDLGDDISHKDDWTKIHFVLGAFETFEFVFFVHLMFVILGYTNELSECLQRRDQDILNAISLVNVAKNKMQQLRFDGWDHFLERVTSFCIKHDVEVPAMDGDYVPYGKSARYARARNQTNDDHFRREVYIGVIDQISQELDNRFDEINMELLSCMSAFSPSNSFASFDAQKVRRLAEFYPKDFSNNDLLKLELQLDNYIDDMRRDDSFKGLDSIVDLSVKLVQTRRQKVYDMVYLLLKMILLLPVATASVERVFSAMVKVKIKSRNKLGDSVLDDCLVTFIERDIFFQVNEEDIINTFMLFKKRRVNKADK

SEQ ID NO: 91636 - protein, 355 aa, Setaria italica
  Transcript Sequence Number=SeqID_25662
  Gene Ontology: Mol. function=DNA binding; Cellular component=nucleus; Biological process=regulation of transcription
  Homolog annotation: Hit_ID=Q70KU5; Match level="QueryCoverage=74%, HitCoverage=99%, E-value=1e-111, Identity=71%"; Hit description =MYBY1 protein (Fragment)
  Pfam annotation: Domain name=Myb_DNA-binding; Domain location=46-92; Score=54.3; E_value=4.7e-13; Accession=PF00249.23; Description=Myb -like DNA-binding domain
  Pfam annotation: Domain name=Myb_DNA-binding; Domain location=98-143; Score=49.9; E_value=9.8e-12; Accession=PF00249.23; Description=Myb -like DNA-binding domain
  Pfam module annotation: Pfam domain module=Myb_DNA-binding::Myb_DNA -binding; Domain location=46-92::98-143
TPRTPNLPYREDDDVVAVSGASVGGDAADSAAASAAATATAEERVRGPWSPEEDTVLSNLVEKLGARNWTLIARGIPGRSGKSCRLRWCNQLDPQVKRKPFTEEEDRIIIAAHAIHGNKWACIAKLLDGRTDNAIKNHWNSTLRRRYCNDGRCKHGGSVERSTPEVSRAVSKEPWPSKDLSSFTAMDVRDAPVKTVPETSAGAWHVADQYYSTQAVDPPYLSRPAAKIGAFRPYNPGNAEPTQQETPSSVFKFDSTLKALTPESEVFKFADPTYFAAEVPNKCGHGCCTTHGRPRKNSLLGPEFNEFEDHPPILNSSFASLVSEISSIAWMRSGMQSGDASSLLQSAPPGASLTN

SEQ ID NO: 91637 - protein, 140 aa, Setaria italica
  Transcript Sequence Number=SeqID_25663
MHTAMSRAFLPTVLIGLVAVLSSSTASADTPDCPYPCLPPPTSGGAINSYPPPQPSTGAGGGFGGSYPPPPPGSYQLTPPGVMPGFSPPYGGFPSGPTPPPPNPVLPWFPWYYQHTNPITATTSSASSPAMDGRSRITVG

SEQ ID NO: 91638 - protein, 85 aa, Setaria italica
  Transcript Sequence Number=SeqID_25664
GQYCKCRFELDEKELEEEEGDSLGSVSPMSSEAENGKELEEELSRMRINGDSSGRNCHEDYDKEARVPLPWELLQPVMRVLGHCL

SEQ ID NO: 91639 - protein, 261 aa, Setaria italica
  misc_feature (19)..(19): Xaa can be any naturally occurring amino acid
  Transcript Sequence Number=SeqID_25665
  Homolog annotation: Hit_ID=Q6YSC2; Match level="QueryCoverage=36%, HitCoverage=18%, E-value=1e-10, Identity=37%"; Hit description =Putative storekeeper protein
  Pfam annotation: Domain name=DUF573; Domain location=80-171; Score =26.3; E_value=7e-07; Accession=PF04504.6; Description=Protein of unknown function, DUF573
DEDEDEEEEEEEEEENHVXPPLATKNPSPPPPNREESESSGDEEEEETDDEAPQAKPAPNQEAEGKGAKPSSSEDKKPGAPFQRTWSTDDEVRILEALAAHRREHGTLPQVDALAATLAGTLDNSGSSIALLQGKLKSLKRRYSLAANKGERPSKDHDRRLFDLSKSVWGSTTAAANGGARREVAEMCELYPYLAEEVKALQKAHPGLFKREFGMIDDDKARALDTKIKRQRLHQAKVIQRRCDLIKEVTKTLIDLVESTI

SEQ ID NO: 91640 - protein, 83 aa, Setaria italica
  misc_feature (54)..(54): Xaa can be any naturally occurring amino acid
  Transcript Sequence Number=SeqID_25666
MPCATELVHGEGGAIKVGTTGTIGSLMTRELDSIKVAPQAAATPRLRRQGCPVXVSCGTPRKIVLRKSSSDVSSSSNGNRTDR

SEQ ID NO: 91641 - protein, 467 aa, Setaria italica
  Transcript Sequence Number=SeqID_25667
  Gene Ontology: Mol. function=protein serine/threonine kinase activity; Biological process=protein amino acid phosphorylation
  Homolog annotation: Hit_ID=B9SAC0; Match level="QueryCoverage=89%, HitCoverage=88%, E-value=1e-144, Identity=64%"; Hit description =Protein kinase APK1B, chloroplast, putative
  Pfam annotation: Domain name=Pkinase; Domain location=71-348; Score =188.4; E_value=2.1e-53; Accession=PF00069.17; Description=Protein kinase domain
  Pfam annotation: Domain name=Pkinase_Tyr; Domain location=71-348; Score=105.6; E_value=1.7e-28; Accession=PF07714.9; Description =Protein tyrosine kinase
  Pfam module annotation: Pfam domain module=Pkinase::Pkinase_Tyr; Domain location=71-348::71-348
MGACFSQEEHRLQSRPAEAAGPDGLRKSKSDSKAIASVLAPPKDVVDLQVEGYGNVNIFTYNELRAATKNFRPDQILGEGGFGVVYKGVIDENVRVGFPSRQVAVKELNPEGFQGDKEWLAEVNYLGQLSHPNLVELIGYCCEGSHRLLVYEYMACGSLEKHLFRRVCLNMPWSTRMKIALGAARGLEYLHGAERSIIYRDFKTSNILLDADYNAKLSDFGLARTGPSGDQTHVSTRVMGTYGYAAPEYVMTGHLTARSDVYGFGVVLLEMIIGRRAVDKSRPTREHNLVDWARPLLVHNRKLFRIIDPRMEGQYSTKAAIEVASLAYRCLSQNPKGRPTMSQVVETFEAVQNMPECQDILLQNSITGAVTLYEVPKEPAESVEKEKAKQEPAVKTAAVPPVNGKPVPQSRRTRPGNGRSKSEPSLECKMYIPSPDSDGQQLGLETLASPSRNGSMQDPPDEDLYKI

SEQ ID NO: 91642 - protein, 129 aa, Setaria italica
  Transcript Sequence Number=SeqID_25668
IPGHHSRICTTWIYGEQIHGEKSSWLWIHVLRGWAWRPTRSVEVAARSDEAAVRSPSPPLSPLTLLLLHGHEPLRRDPCARRPRLPRCSIPTTTLGIFAWSRGGRIPRGQAGSWTVNTGGRRIYQHLPR

SEQ ID NO: 91643 - protein, 267 aa, Setaria italica
  Transcript Sequence Number=SeqID_25669
  Homolog annotation: Hit_ID=Q94JA3; Match level="QueryCoverage=17%, HitCoverage=51%, E-value=7e-14, Identity=87%"; Hit description =P0047B08.8 protein
  Pfam annotation: Domain name=NUC189; Domain location=119-205; Score =118.8; E_value=1.8e-32; Accession=PF08162.3; Description=NUC189 domain
MDMQEKTIPAQQGKEKKKESAKKRGRARARSSSVLDSTNDTVINEEMPEYNLDGPTIGEKLATLDLINRDNERKGTEEQTLAMALPSADSVHILLKQALRADDNMSLLTCLYNRDEKVIAKSISLLTPADVVKLLKFFVLQIQSRGAVLVCLLPWLQTLLSQHMSSIVSQESSLSLLNSLYQLIDARTSTFKSALQLSTTLDYLFSEIADDEADDEEVAPPIIYEDKDTDDEESEADAMETDGEEAEELGDVTDASEHSDGSEIMSD

SEQ ID NO: 91644 - protein, 95 aa, Setaria italica
  Transcript Sequence Number=SeqID_25670
  Subcellular localization annotation: CTP_CleavageSite=56; ConfidenceScore=5.75e-01
GRFRPHFSRLLPVSKSPKSQHRAFEFPPLHDSSSPSPSVVVARSPPFGNRGQSSDRAARFEALGWRPRRVDLESRLLGARTWSASKNNAVKLCHK

SEQ ID NO: 91645 - protein, 244 aa, Setaria italica
  Transcript Sequence Number=SeqID_25671
  Gene Ontology: Mol. function=protein prenyltransferase activity; Cellular component=cytoplasm; Biological process=protein amino acid prenylation
  Homolog annotation: Hit_ID=B6TEY3; Match level="QueryCoverage=100%, HitCoverage=74%, E-value=1e-107, Identity=78%"; Hit description =Protein farnesyltransferase/geranylgeranyltransferase type I alphasubunit
  Pfam annotation: Domain name=PPTA; Domain location=120-149; Score =22.5; E_value=0.0017; Accession=PF01239.14; Description=Protein prenyltransferase alpha subunit repeat
  Pfam annotation: Domain name=PPTA; Domain location=45-75; Score=46.4; E_value=1.1e-10; Accession=PF01239.14; Description=Protein prenyltransferase alpha subunit repeat
  Pfam annotation: Domain name=PPTA; Domain location=79-109; Score =37.2; E_value=6.7e-08; Accession=PF01239.14; Description=Protein prenyltransferase alpha subunit repeat
  Pfam annotation: Domain name=PPTA; Domain location=9-39; Score=51.0; E_value=4.7e-12; Accession=PF01239.14; Description=Protein prenyltransferase alpha subunit repeat
  Pfam module annotation: Pfam domain module=PPTA::PPTA::PPTA::PPTA; Domain location=120-149::45-75::79-109::9-39
EALDSDLLEEMNFVEKIALCNPKNYQIWHHKRWLAEKLGPGVANKEHEFTMKILAIDAKNYHAWSHRQWVLQALGGWESELQYCNQLLEEDVFNNSAWNQRYLVITRSPLLGGLKAMRDSEVDYTIEAIVANPQNESPWRYLKGLYKGENNLLVCDERISDVCLKVLKNDWSCVFALSLLLDLLRSGLQPSDELKATLEPIRNSDPEVADADLATTVCCILQKCDPLRVNYWSWYKTTLSSQIS

SEQ ID NO: 91646 - protein, 81 aa, Setaria italica
  misc_feature (57)..(57): Xaa can be any naturally occurring amino acid
  Transcript Sequence Number=SeqID_25672
  Gene Ontology: Mol. function=protein tyrosine kinase activity; Biological process=protein amino acid phosphorylation
  Homolog annotation: Hit_ID=Q69MM4; Match level="QueryCoverage=100%, HitCoverage=10%, E-value=5e-27, Identity=71%"; Hit description =Putative receptor kinase 5
MWMEGNIKNLADSSITNSCLLDEVLLCSHVALLCVQEKPDDRPVMSKVVYALDNGSXNTLPSPNHPAYFAHRSNEIEQARD

SEQ ID NO: 91647 - protein, 108 aa, Setaria italica
  Transcript Sequence Number=SeqID_25673
RAEAAVASVVTVLPHEIPPLLSAAATFFFILSAYFVVLPLRDEGAISLGLDTLPGLFAGSLLLTVLAAPVASLAFSLPSIPKPRALILIHRFFSISLLAFFGLWFAST

SEQ ID NO: 91648 - protein, 94 aa, Setaria italica
  Transcript Sequence Number=SeqID_25674
  Subcellular localization annotation: CTP_CleavageSite=43; ConfidenceScore=5.40e-01
FSPAASSSAATNDSVRARRRHVSSVAASLRLYLHRIFSSSGARDATVAGREEEEAVTTTVSSPLARSLPPQPSASVVLSTPSSPCASSSPFMSP

SEQ ID NO: 91649 - protein, 45 aa, Setaria italica
  Transcript Sequence Number=SeqID_25675
  Homolog annotation: Hit_ID=B9SZN4; Match level="QueryCoverage=84%, HitCoverage=14%, E-value=7e-10, Identity=73%"; Hit description=Zinc ion binding protein, putative
MIMQAMWKPAWLEALNTQKFFVACSFMSMTKKNEKNICCLDCCTS

SEQ ID NO: 91650 - protein, 94 aa, Setaria italica
  Transcript Sequence Number=SeqID_25676
AARILIVWPRRAVGTHSWQFGQRRRRSWGKEGGGRAAASDGLLCVGGGRRNRVARVAPSLRWLISSSLLPIQDREARMAVDIAAQGRSMQSCEP

SEQ ID NO: 91651 - protein, 60 aa, Setaria italica
  Transcript Sequence Number=SeqID_25677
FFPFSFCFLLFLKKLVFAVLIKSTCSVFPFLKIKLCFKWPNSWSNGKKKLVAIQWFRICA

SEQ ID NO: 91652 - protein, 43 aa, Setaria italica
  Transcript Sequence Number=SeqID_25678
VQLRPLSSRLHVNLLYCVDLKLLLKRCILATTLTWLKAICIDA

SEQ ID NO: 91653 - protein, 132 aa, Setaria italica
  Transcript Sequence Number=SeqID_25679
  Gene Ontology: Mol. function=NAD+ ADP-ribosyltransferase activity; Cellular component=nucleus
  Homolog annotation: Hit_ID=A2Q3R6; Match level="QueryCoverage=61%, HitCoverage=14%, E-value=4e-10, Identity=33%"; Hit description =Poly(ADP-ribose) polymerase, catalytic region
EFQRSAAPARFLCFHDGGWVDVDGEAVGQLRRAFQDRRAMVEAACGGKAYLFDFLRMVRIDAATGEEAALGWIDDRGACFFPAPDCGGGRKRRRDGAPAEDEAESSSGVNERSGESRGAEAAAKRRKAGGAW

SEQ ID NO: 91654 - protein, 84 aa, Setaria italica
  Transcript Sequence Number=SeqID_25680
  Gene Ontology: Mol. function=protein serine/threonine kinase activity; Cellular component=plasma membrane; Biological process =protein amino acid phosphorylation
  Homolog annotation: Hit_ID=B9TAC6; Match level="QueryCoverage=98%, HitCoverage=8%, E-value=1e-27, Identity=71%"; Hit description =Receptor protein kinase CLAVATA1, putative
RRAVEAEFGEGQDIVGWVREKIRSNTVEEHLDANVGGRCAHVREEMLLVLRIAVLCTARAPRDRPSMRDVITMLGEAKPRRKSG

SEQ ID NO: 91655 - protein, 106 aa, Setaria italica
  Transcript Sequence Number=SeqID_25681
  Gene Ontology: Cellular component=plasma membrane
  Homolog annotation: Hit_ID=B6U8U8; Match level="QueryCoverage=96%, HitCoverage=16%, E-value=3e-30, Identity=64%"; Hit description =Nodulin-like protein
  Pfam annotation: Domain name=Nodulin-like; Domain location=15-106; Score=-66.8; E_value=7e-07; Accession=PF06813.5; Description=Nodulin- like
MGRLGDRVRAFYTNRWLVFVAAMWLQSMAGIGYLFGAISPVVKEALGYNQRQLAALGVAKDLGDCVGFFAGSLSAMLPSWAMLLIGAASSNFPSVLRSWLWLIRST

SEQ ID NO: 91656 - protein, 592 aa, Setaria italica
  Transcript Sequence Number=SeqID_25682
  Gene Ontology: Cellular component=plasma membrane
  Homolog annotation: Hit_ID=B6U8U8; Match level="QueryCoverage=100%, HitCoverage=100%, E-value=0.0, Identity=62%"; Hit description =Nodulin-like protein
  Pfam annotation: Domain name=MFS_1; Domain location=22-505; Score =1.1; E_value=0.027; Accession=PF07690.8; Description=Major Facilitator Superfamily
  Pfam annotation: Domain name=Nodulin-like; Domain location=15-262; Score=416.7; E_value=3.7e-122; Accession=PF06813.5; Description =Nodulin-like
  Pfam module annotation: Pfam domain module=MFS_1::Nodulin-like; Domain location=22-505::15-262
MGRLGDRVRAFSTNRWLVFVAAMWLQSMAGIGYLFGAISPVVKEALGYNQRQLAALGVAKDLGDCVGFFAGSLSAMLPSWAMLLIGAAQNFLGYGWLWLIVTRQAPALPLWMMCVLIFVGTNGETYFNTTALVTCIQNFPKSRGPTVGIMKGFAGLSSAILTQLYAVMHTPDHATLVFMVAVGPSLVAIGLMFIIRPVGGHRQVRPSDKNSFMFIYTICLLLASYLVGVMLVQNFMQLSDNVVNSLTVILLILLISPIAIPVTLTLSSKAQHPTEEALLSEPSKGETSTSQEKEDQPEVILSEVEEQKPKEIDSLPPSERRKRIAELQTKLVQAAARGGVRIRRQPHRGENFTLMQAMVKADFWLIWCSLLLGSGSGLTVIDNLGQMSQSVGFKDAHIFVSLISIWNFLGRVGGGYFSEIVVREHTYPRHIALAIAQILMAAGHFLFAMAWPGTLYIGTFLVGLGYGAHWAIVPAAVSELFGVKHFGAMYNFLTVANPAGSLVFSGLIASNLYDYEAEKQAQLHHMTALQSPRLLHNMGLVADGPLKCEGSVCFFVSSLIMSAFCVVGAGLSLIIVQRTKQVYVHLYRSART

SEQ ID NO: 91657 - protein, 52 aa, Setaria italica
  Transcript Sequence Number=SeqID_25683
ALLTLPVAKHNKYMFLPHSINFLYELELRIIQPVKMIMARIYHPNYTHTHPS

SEQ ID NO: 91658 - protein, 57 aa, Setaria italica
  Transcript Sequence Number=SeqID_25684
GFSKCYREVGVPFFFSKNKSTVRWISCKKDGLPVKVIIQPQSGCSCVPFSHYRGGFE

SEQ ID NO: 91659 - protein, 105 aa, Setaria italica
  misc_feature (13)..(13): Xaa can be any naturally occurring amino acid
  misc_feature (18)..(18): Xaa can be any naturally occurring amino acid
  misc_feature (46)..(46): Xaa can be any naturally occurring amino acid
  Transcript Sequence Number=SeqID_25685
  Subcellular localization annotation: CTP_CleavageSite=62; ConfidenceScore=5.28e-01
PFPPLPPPSTPPXVVGSXAGSDPPPSLPDPAAPTLLEPPTRSPSPXNNCGHDTPTIGPPRPASTTVPGSASPFHRHTATTTSPADSPAIPLNPAGTNPLPTPKPP

SEQ ID NO: 91660 - protein, 247 aa, Setaria italica
  Transcript Sequence Number=SeqID_25686
  Gene Ontology: Mol. function=hydrolase activity; Biological process =metabolic process
  Homolog annotation: Hit_ID=B6T2X8; Match level="QueryCoverage=72%, HitCoverage=57%, E-value=5e-80, Identity=83%"; Hit description =Gibberellin receptor GID1L2
  Pfam annotation: Domain name=Abhydrolase_3; Domain location=144-247; Score=-10.1; E_value=7.8e-07; Accession=PF07859.5; Description =alphabeta hydrolase fold
MMRALCHKIRAIPYCHRTELRILSTPWIPATWPGSIGYGIDFPSRKNPSYLRKPASVSTKATPAPSSMVMEPTADEVAFESPAHFRIYKSGKIERLNRPPVLPAGLDEATGVTSKDVVLDAETGLSARLYLPKLQEPSKKLPVVVYIHGGAFLLESADSATYHTYVNPLAAAAGVLVVSVSYRLAPEHPLPAAYEDSWAALRWAASAQDEWIAEHGDVARLFLAGDSAGANIVHDMLLRASGDGGPR

SEQ ID NO: 91661 - protein, 71 aa, Setaria italica
  Transcript Sequence Number=SeqID_25687
  Gene Ontology: Mol. function=galactosyltransferase activity; Cellular component=membrane
CPCAVRNVQLDARGFATTVDVDPAAFRADDGGVYLVNGGEPIASMATVSFQYAWDHFFQMTPRKFEVDGQC

SEQ ID NO: 91662 - protein, 96 aa, Setaria italica
  misc_feature (7)..(7): Xaa can be any naturally occurring amino acid
  Transcript Sequence Number=SeqID_25688
  Gene Ontology: Mol. function=hydrolase activity; Biological process =metabolic process
  Homolog annotation: Hit_ID=B6TKK2; Match level="QueryCoverage=90%, HitCoverage=24%, E-value=5e-24, Identity=57%"; Hit description =Gibberellin receptor GID1L2
RTTRDHXTARVCGDGVEIAEAFPPAMVVVGGFDLLKDWHTRYVETLRRKGKVVSVVEYPDAFHGFYAFPELADSRKFVEDMRLFVDEHRSKRSLLV

SEQ ID NO: 91663 - protein, 159 aa, Setaria italica
  misc_feature (145)..(145): Xaa can be any naturally occurring amino acid
  Transcript Sequence Number=SeqID_25689
  Homolog annotation: Hit_ID=B9RGU0; Match level="QueryCoverage=100%, HitCoverage=13%, E-value=6e-62, Identity=70%"; Hit description =Pentatricopeptide repeat-containing protein, putative
MGDWVIGALINIVGSVAINFGTNLLKLGHDQREKLSAINNSEGNEKFVPKSVMHFQTWRIGILFFAAGNCLNFMSFAYAAQSLLAALGSIQFVSNIAFAYFVLNKTISVKVMVATTFIVFGNIFLVSFGNHQSPVYTPEQLIAKXSNLVFVLYCMSLVF

SEQ ID NO: 91664 - protein, 144 aa, Setaria italica
  Transcript Sequence Number=SeqID_25690
  Gene Ontology: Cellular component=vacuole
  Homolog annotation: Hit_ID=Q7XV19; Match level="QueryCoverage=86%, HitCoverage=28%, E-value=3e-49, Identity=74%"; Hit description =OSJNBa0064H22.7 protein
PLPTPNQPTRPGPPLRSCGWWAAACALEVASWVYRVALFFMVCVLFRVICYLQILRMVGFAREVGRFADVGTVLQHHRRIREQLRKISHRYRKFIVCSLVLVSATQFAALLAATRPHSVVNLATAGELALSSISLVAGLLVCLH

SEQ ID NO: 91665 - protein, 88 aa, Setaria italica
  Transcript Sequence Number=SeqID_25691
  Homolog annotation: Hit_ID=Q7XV19; Match level="QueryCoverage=63%, HitCoverage=12%, E-value=4e-14, Identity=71%"; Hit description =OSJNBa0064H22.7 protein
MFFSAPNRICKMVNREWLIVCLANQVSFGGFALQLSSISLVAGLLVCLHSAAKITHKTQAMTSVAAAWHADATVQAFDNDLENPDRDP

SEQ ID NO: 91666 - protein, 256 aa, Setaria italica
  Transcript Sequence Number=SeqID_25692
  Gene Ontology: Cellular component=vacuole
  Homolog annotation: Hit_ID=Q7XV19; Match level="QueryCoverage=99%, HitCoverage=56%, E-value=1e-82, Identity=63%"; Hit description =OSJNBa0064H22.7 protein
VRVFFLSLVCVTTYRRTICYLQILRMVGFAREFGRFADVGTVLQHHRRIREQLRKISHRYRKFIVCSLVLLSATQFAALLAATRPHSVVNLATAGELALSSISLVAGLLVCLHSAAKITHKTQAMTSVAAAWHADATVQAFDNDLENPDRDPDLPPTAGYLAPANAYRVAAGEESGSDDDDDCGSETSSLDDPKYVPFQANNICFQKRQALVTYLENNRAGITVYGFVVDRAWLHALFMIEFSLVMWLLGKTVGIS

SEQ ID NO: 91667 - protein, 51 aa, Setaria italica
  Transcript Sequence Number=SeqID_25693
GHRTCSCNCIASRFNMSELLKTRLDQEARTSQGGNRFRKNEANSYSRETHS

SEQ ID NO: 91668 - protein, 285 aa, Setaria italica
  Transcript Sequence Number=SeqID_25694
  Gene Ontology: Mol. function=transporter activity; Cellular component= intracellular; Biological process=transport
  Homolog annotation: Hit_ID=B6U127; Match level="QueryCoverage=100%, HitCoverage=47%, E-value=1e-152, Identity=90%"; Hit description =Phosphatidylinositol transporter/ transporter
  Pfam annotation: Domain name=CRAL_TRIO; Domain location=18-204; Score= 151.9; E_value=2e-42; Accession=PF00650.12; Description=CRALTRIO domain
ILEDFEFNELDDVLRYYPQGYHGVDLSGRPVYIERLGKVDPNKLMQITSVDRYIKYHVQEFERAFREKFPACTLAAKRHIDSTTTILDVHGVGFKNFSKTARELVQRMQRIDSDYYPETLHQMYVVNAGSGFKLIWNSVKGFLDPKTSSKIHVLGSNYQSRLIEVIDSSELPEFLGGSCTCSDKGGCLGSNKGPWNDPAILKLIHSMEGGGSMRETKQISDGYERSGSSLRAENLKGMLSDVSNAESESDVDDIGLSVSQKITDHSLLTPVREEVKGSDSSASCS

SEQ ID NO: 91669 - protein, 388 aa, Setaria italica
  misc_feature (84)..(84): Xaa can be any naturally occurring amino acid
  Transcript Sequence Number=SeqID_25695
  Gene Ontology: Mol. function=protein binding
  Homolog annotation: Hit_ID=Q2R0M3; Match level="QueryCoverage=97%, HitCoverage=34%, E-value=1e-113, Identity=56%"; Hit description =Leucine Rich Repeat family protein, expressed
  Pfam annotation: Domain name=LRR_1; Domain location=118-140; Score =6.9; E_value=15; Accession=PF00560.25; Description=Leucine Rich Repeat
  Pfam annotation: Domain name=LRR_1; Domain location=24-45; Score=0.4; E_value=2.5e+02; Accession=PF00560.25; Description=Leucine Rich Repeat
  Pfam annotation: Domain name=LRR_1; Domain location=254-276; Score =0.0; E_value=3e+02; Accession=PF00560.25; Description=Leucine Rich Repeat
  Pfam annotation: Domain name=LRR_1; Domain location=303-326; Score =0.6; E_value=2.4e+02; Accession=PF00560.25; Description=Leucine Rich Repeat
  Pfam annotation: Domain name=LRR_1; Domain location=47-68; Score=9.8; E_value=4; Accession=PF00560.25; Description=Leucine Rich Repeat
  Pfam annotation: Domain name=LRR_1; Domain location=70-92; Score=9.2; E_value=5.4; Accession=PF00560.25; Description=Leucine Rich Repeat
  Pfam annotation: Domain name=LRR_1; Domain location=94-116; Score =12.4; E_value=1.3; Accession=PF00560.25; Description=Leucine Rich Repeat
  Pfam module annotation: Pfam domain module=LRR_1::LRR_1::LRR_1::LRR _1::LRR_1::LRR_1::LRR_1; Domain location=118-140::24-45::254-276::303- 326::47-68::70-92::94-116
MRPSEQSQCEITEIPQMFFQSFRRIHTLSFRATKIRMLPTKFSDPDRVKYLNLSHAAIENIPGSISRLQSLQTLILSYCDTLSXLHPNTTKLTQLQKLDLEGCCNLVELPQDMGKMRSLEYLNVAECSSLAQLPRGMGQLKSLQMFLGYVVTDGSSILELQSLGNLHKLSLWSLEKASDLVNVRMARLEYKTNLESLSLHWNMDDSNDAALDSVVLETLQPHQRLKALEIVGYDGKNLPSWITTTEPYLESLVEIKLINLRSCERVLPPLGLLPCLKIAEISGAETVVSVSTNFYGHKGTFRSLEKLTFSYMHNLEVWEQAQWSGMFPRLAELAIIQCPKLRALHMELPSLEKLILWMNNKMLYDLKGALRGVAKTLEHISISLVKGF

SEQ ID NO: 91670 - protein, 117 aa, Setaria italica
  Transcript Sequence Number=SeqID_25696
MGNCLVIKVRKEIKIMSVDGSEVLKMPSSTSSLKVQESLPDVLPVKAPAAVVDPGAAVRVKLVISKQELKKMLDKEGMSLDDMVSLMRKEQAKDDREQECCGGWRPALESIPEGRDL

SEQ ID NO: 91671 - protein, 141 aa, Setaria italica
  Transcript Sequence Number=SeqID_25697
SSKPCLTLNLSSSQSSSSCTCSYRLSVIIMGNCLVIQDRKEIKIMSVVDGSEVLKVPSPGSDESLTSRLPVKAPAAVVDPGSVRVKLVISKQELKKMLDKEGMSLDDMVSLMRKEQASDREQDCCGGWRPALESIPEGRDL

SEQ ID NO: 91672 - protein, 66 aa, Setaria italica
  Transcript Sequence Number=SeqID_25698
  Subcellular localization annotation: CTP_CleavageSite=24; ConfidenceScore=5.02e-01
CCREFVRGLAVSPASVGFVGLIIRLSPATGDGTGRAAPVAPASAPRVTVALPPPLLVALLPFATPL

SEQ ID NO: 91673 - protein, 60 aa, Setaria italica
  Transcript Sequence Number=SeqID_25699
TSNPIQQGQRLPPTFSSIPMSIHLSHVPIKLNKSKYPSVSLLIRPYKYASRHRHLINIQS

SEQ ID NO: 91674 - protein, 166 aa, Setaria italica
  Transcript Sequence Number=SeqID_25700
  Gene Ontology: Mol. function=metal ion binding
  Homolog annotation: Hit_ID=B9SJF7; Match level="QueryCoverage=60%, HitCoverage=8%, E-value=1e-09, Identity=40%"; Hit description=Ran GTPase binding protein, putative
LGQLQKVQEAMTLVAEESAKSKAAKEVIKSLTAQLKDMAERLPPDHCAYNVNETKQAHIPNGIESHVASYSSMNGIHPPRNELLNASIAHSPNSGRSSHSNGISGQHKLLGNVSENSDCSTHSLRITSPLDSELPSRRARSSSDEMLTAGSRVDDNLSMDARSLQN

SEQ ID NO: 91675 - protein, 70 aa, Setaria italica
  Transcript Sequence Number=SeqID_25701
VLHTVAVVLSSLDSQHNKALAFDQRQAQLIRDLVLLLPALQRHSARVAKARALVVTWKLSEKARPQSELS

SEQ ID NO: 91676 - protein, 77 aa, Setaria italica
  Transcript Sequence Number=SeqID_25702
GGGGGERGHVLGLHLRRSTRLAASASPGRGPAAAVLHTVAVVLSSLDSQHNKALAFDQRQAQLIRDLVLLLPALGGQ

SEQ ID NO: 91677 - protein, 130 aa, Setaria italica
  Transcript Sequence Number=SeqID_25703
  Gene Ontology: Mol. function=structural constituent of ribosome; Cellular component=ribonucleoprotein complex; Biological process =translation
  Homolog annotation: Hit_ID=Q9LX88; Match level="QueryCoverage=100%, HitCoverage=100%, E-value=5e-68, Identity=96%"; Hit description=40S ribosomal protein S15a-4
  Pfam annotation: Domain name=Ribosomal_S8; Domain location=5-130; Score=221.1; E_value=2.8e-63; Accession=PF00410.11; Description =Ribosomal protein S8
MVRVSVLNDALKSMYNAEKRGKRQVMIRPSSKVIIKFLIVMQKHGYIGEFEFVDDHRSGKIVVELNGRLNKCGVISPRFDVGVKEIESWTARLLPSRQFGYIVLTTSAGIMDHEEARRKNVGGKVLGFFY

SEQ ID NO: 91678 - protein, 106 aa, Setaria italica
  Transcript Sequence Number=SeqID_25704
  Gene Ontology: Mol. function=DNA binding
  Pfam annotation: Domain name=Remorin_C; Domain location=1-102; Score =113.1; E_value=9.1e-31; Accession=PF03763.5; Description=Remorin, C -terminal region
KAWEESEKSKAENKAQKKMSSIMSWENTKKAAVEAKLRTREEKLEKKKAEYAEKMRNQIAAIHKEAEEKRAAVEAMRHEAILKYEDMAAKHRSKGTTPAKKFLGCF

SEQ ID NO: 91679 - protein, 105 aa, Setaria italica
  Transcript Sequence Number=SeqID_25705
  Gene Ontology: Mol. function=flavin-containing monooxygenase activity; Biological process=cellular aromatic compound metabolic process
  Homolog annotation: Hit_ID=B9RS61; Match level="QueryCoverage=98%, HitCoverage=23%, E-value=1e-33, Identity=64%"; Hit description =Monooxygenase, putative
RPAVRKISGRDVEFVDGQLEGFDAIVLATGYKSNVPFWLKDRELFSEKDGLPRKAFPNGWKGENGLYSVGFTRRGLMGTSLDARRIAHDIEQQWKAKGTRPDVFL

SEQ ID NO: 91680 - protein, 138 aa, Setaria italica
  Transcript Sequence Number=SeqID_25706
  Gene Ontology: Mol. function=serine-type carboxypeptidase activity; Cellular component=extracellular region; Biological process =proteolysis
  Homolog annotation: Hit_ID=B6TG69; Match level="QueryCoverage=74%, HitCoverage=23%, E-value=1e-34, Identity=66%"; Hit description =Serine carboxypeptidase 1
  Subcellular localization annotation: CTP_CleavageSite=18; ConfidenceScore=5.16e-01
TRFPGKLCCATFFFFLLCCSYASRPSRPPISNSSGGDAITPLPGFQGPLPFHLQTGYVEVDQSNGVRLFYYFVRSERSPADDPLMLWLTGGPGCSVLSGLAYEIGPLSFDIKGNVDGFPKLMYNQDSWTKVSNVIFLD

SEQ ID NO: 91681 - protein, 80 aa, Setaria italica
  Transcript Sequence Number=SeqID_25707
  Gene Ontology: Mol. function=protein serine/threonine kinase activity; Biological process=protein amino acid phosphorylation
  Homolog annotation: Hit_ID=Q2QZL9; Match level="QueryCoverage=92%, HitCoverage=11%, E-value=2e-11, Identity=43%"; Hit description =Protein kinase domain containing protein, expressed
RFELIDPTLGECGEVATIMRCVKVALLCVQDSAADRPTMADVTAMLAAGCDGGGSSSLPDPKRPPHFSLRVSSSEDGSEA

SEQ ID NO: 91682 - protein, 186 aa, Setaria italica
  misc_feature (9)..(9): Xaa can be any naturally occurring amino acid
  Transcript Sequence Number=SeqID_25708
  Homolog annotation: Hit_ID=B9SDN5; Match level="QueryCoverage=100%, HitCoverage=22%, E-value=3e-87, Identity=78%"; Hit description =Transferase, transferring glycosyl groups, putative
  Pfam annotation: Domain name=JmjC; Domain location=16-127; Score =35.7; E_value=1.9e-07; Accession=PF02373.14; Description=JmjC domain
EDLFSVLGXERPDYRWVIIGPAGSGSSFHVDPNSTSAWNAIIKGSKKWVMFPPEVVPPGVHPSADGAEVTSPVSIMEWFMNFYGACKTWEKRPIECVCRAGEVVFVPNGWWHLVINLEESIAITQNYVSRRNLLNVLDFLKKPNASELVSGTKDRVNLHDKFCGAIEATHPGMINQLQLEAQQKAA

SEQ ID NO: 91683 - protein, 192 aa, Setaria italica
  misc_feature (177)..(177): Xaa can be any naturally occurring amino acid
  Transcript Sequence Number=SeqID_25709
MSRYHLKQYEKEHMKMAMLKQEETFKQQVQELHRLYRVQKLLMTDAASAATAMPAATRCDLEDERRAAENDAGSSRSWDDAYPEKGKKAAAPRLVLQESDLELTLSLGCFGTTGATNKAAKKEASSSVDSRTSGSSSSTESGSPDRRVVVLPAPSLIGSATTKPGAGSVGQRLEQDXLQQPPWLHKCLNLAR

SEQ ID NO: 91684 - protein, 81 aa, Setaria italica
  Transcript Sequence Number=SeqID_25710
  Gene Ontology: Mol. function=transferase activity, transferring groups other than amino-acyl groups
  Homolog annotation: Hit_ID=B6ST92; Match level="QueryCoverage=100%, HitCoverage=18%, E-value=4e-35, Identity=89%"; Hit description =Agmatine coumaroyltransferase
HVWRTMTRARGLGNPLQTSTIRISVDGRPRLAAPPGYFGNLVLWAFPRATVGDLLNRPLRHAAQAIHDAVARVDGAYFRSF

SEQ ID NO: 91685 - protein, 88 aa, Setaria italica
  Transcript Sequence Number=SeqID_25711
  Gene Ontology: Mol. function=hydrolase activity, hydrolyzing O -glycosyl compounds; Cellular component=cell wall; Biological process= carbohydrate metabolic process
  Homolog annotation: Hit_ID=B6TWP1; Match level="QueryCoverage=100%, HitCoverage=27%, E-value=6e-17, Identity=53%"; Hit description =Xyloglucan endotransglucosylase/hydrolase protein 26
  Pfam annotation: Domain name=XET_C; Domain location=34-88; Score =45.2; E_value=2.6e-10; Accession=PF06955.4; Description=Xyloglucan endo-transglycosylase (XET)
RVKTDWSKAPFVANYDNIHLNICECGSGGYGGGCATGCPAAAATPYNGACQLSPAELGQMQWVQGTYRIYDYCVDYKRWVNGQKPVEC

SEQ ID NO: 91686 - protein, 233 aa, Setaria italica
  Transcript Sequence Number=SeqID_25712
  Gene Ontology: Mol. function=protein binding; Cellular component =plasma membrane
  Homolog annotation: Hit_ID=Q75I37; Match level="QueryCoverage=100%, HitCoverage=52%, E-value=1e-119, Identity=87%"; Hit description =Lipase, putative, expressed
  Pfam annotation: Domain name=DUF620; Domain location=1-178; Score =410.6; E_value=2.6e-120; Accession=PF04788.4; Description=Protein of unknown function (DUF620)
RHTPWLGAHAAKGPVRQLRRSLQGLDPLITASMFAGARCIGEKKVNGEDCFILKLSTDAETLKARSEGFAEMIRHVMFGYFSQRTGLLVHIEDSHLTRIQSNTGGDAIYWETTISSFMEDYRPVDGIMIAHSGRSVVTLFRFGEVAMSHTKTRMEEVWSIEEVAFNVPGLSMDCFIPPTDIKSGSVDETMELTNGERSRAGPPPGHRAKVAALEKAEEDKVAWGGGTILENHN

SEQ ID NO: 91687 - protein, 139 aa, Setaria italica
  Transcript Sequence Number=SeqID_25713
  Gene Ontology: Mol. function=electron carrier activity; Biological process=oxidation reduction
  Homolog annotation: Hit_ID=Q9ATV0; Match level="QueryCoverage=43%, HitCoverage=11%, E-value=7e-15, Identity=54%"; Hit description =Putative cytochrome P450
RWFLEDLVYSSISGIALYLNTSTDYFLPLFLCLMEELPALTIALLILSLALSYLLHQVCLRSENIRKKLKRQGIKGPEPTVLYGNTREMKRIKEGLKIVQTQDANNYLSSVFPYLLLWRKLMVRLMPASCFNVYFGFLF

SEQ ID NO: 91688 - protein, 125 aa, Setaria italica
  Transcript Sequence Number=SeqID_25714
  Gene Ontology: Mol. function=electron carrier activity; Biological process=oxidation reduction
  Homolog annotation: Hit_ID=Q9ATV0; Match level="QueryCoverage=88%, HitCoverage=21%, E-value=5e-34, Identity=60%"; Hit description =Putative cytochrome P450
MEGIFRVDWQKPMVCLRSENIRKKLKRQGIKGPEPTVLYGNTREMKRIKEGLKIVQTQDANNYLSSVFPYLLLWRETYGPVFVYSTGALEILHVSDPEMVKDIGHRTPSELGKPNYLKRSRKALL

SEQ ID NO: 91689 - protein, 88 aa, Setaria italica
  Transcript Sequence Number=SeqID_25715
  Gene Ontology: Mol. function=protein tyrosine kinase activity; Biological process=protein amino acid phosphorylation
  Homolog annotation: Hit_ID=B6SWU9; Match level="QueryCoverage=98%, HitCoverage=12%, E-value=9e-39, Identity=87%"; Hit description =Lectin-like receptor kinase 7
PQTTHVVGTMGYLAPELARSGKASPLTDVFAFGAFILEVVCGRRPVEQSMADNRLMLVDWVLDHWQNESLAEVVDAKLEGSYDAGEAT

SEQ ID NO: 91690 - protein, 89 aa, Setaria italica
  Transcript Sequence Number=SeqID_25716
  Gene Ontology: Mol. function=protein serine/threonine kinase activity; Biological process=protein amino acid phosphorylation
  Homolog annotation: Hit_ID=B9A1H1; Match level="QueryCoverage=100%, HitCoverage=8%, E-value=4e-24, Identity=62%"; Hit description =Putative LRR-kinase protein
  Pfam annotation: Domain name=LRR_1; Domain location=12-34; Score=6.6; E_value=16; Accession=PF00560.25; Description=Leucine Rich Repeat
  Pfam annotation: Domain name=LRR_1; Domain location=66-88; Score =14.8; E_value=0.37; Accession=PF00560.25; Description=Leucine Rich Repeat
  Pfam module annotation: Pfam domain module=LRR_1::LRR_1; Domain location=12-34::66-88
GAIPPSLGNLSALTKLILQENGFIGYVPSALGKLQSLTALFLGVNRLGANDSQGWEFITSLANCSQLQVLVLGNNSFSGQLPNSVTNLS

SEQ ID NO: 91691 - protein, 163 aa, Setaria italica
  misc_feature (15)..(15): Xaa can be any naturally occurring amino acid
  Transcript Sequence Number=SeqID_25717
  Homolog annotation: Hit_ID=B6SQ86; Match level="QueryCoverage=100%, HitCoverage=62%, E-value=4e-64, Identity=77%"; Hit description =Harpin-induced protein
  Pfam annotation: Domain name=Hin1; Domain location=6-147; Score=45.1; E_value=2.8e-10; Accession=PF07320.5; Description=Harpin-induced protein 1 (Hin1)
  Subcellular localization annotation: CTP_CleavageSite=59; ConfidenceScore=5.54e-01
AGAALFLLFRPRPPXIAVAAVRLPSFAAANGTVAFTFQQTASVRNPNRSPLAHFDSELRVAYAGGELGSVYIPAGLIDGGRTKDMSATFDVPAIPVAAQPTQMGIAAAEDQQQQAPAVIEVDSLLVVKGRVKMLRLLTHRVQAAKVCRVGVSPIDGRVLGFRC

SEQ ID NO: 91692 - protein, 174 aa, Setaria italica
  misc_feature (42)..(42): Xaa can be any naturally occurring amino acid
  Transcript Sequence Number=SeqID_25718
  Gene Ontology: Mol. function=oxidoreductase activity; Cellular component=membrane; Biological process=potassium ion transport
  Homolog annotation: Hit_ID=B6TBV5; Match level="QueryCoverage=75%, HitCoverage=36%, E-value=8e-48, Identity=68%"; Hit description =Leucoanthocyanidin dioxygenase
AKIKTNGGYCREAHPQGKRITGATAALFAGSVEVPERFLRTXEVQAAGVVVGDDETFELPVVNMAKLLDPELSASETAKLGSACRGWGFFQLTNHGFDEAATQLMKDSTAQFFNLPLESKNTVAVREGGFEGFGHHYNGSSSDKLDWAENLFLYTQPVQDRDMGVLACLTPPHP

SEQ ID NO: 91693 - protein, 75 aa, Setaria italica
  Transcript Sequence Number=SeqID_25719
  Subcellular localization annotation: CTP_CleavageSite=67; ConfidenceScore=5.15e-01
MTARASHLRALLSRAVAPSLPPPPARALHQIAGLGAPQLGAAFLSRARFFSADASTAAAQGGSKAPAAAAAPATG

SEQ ID NO: 91694 - protein, 44 aa, Setaria italica
  Transcript Sequence Number=SeqID_25720
PSSEITGVSSLKLLCSTLGHSSSSLCITRESEAPFLLAALHLHY

SEQ ID NO: 91695 - protein, 90 aa, Setaria italica
  misc_feature (11)..(11): Xaa can be any naturally occurring amino acid
  Transcript Sequence Number=SeqID_25721
  Gene Ontology: Mol. function=extracellular-glutamate-gated ion channel activity; Cellular component=integral to membrane; Biological process=G-protein coupled receptor protein signaling pathway
  Homolog annotation: Hit_ID=Q69L09; Match level="QueryCoverage=100%, HitCoverage=9%, E-value=2e-25, Identity=60%"; Hit description =Putative Avr9/Cf-9 rapidly elicited protein 141
SYSATSPYLSXSTPKYFVRTALDDSSQVPAIASLVQLFNWHQVVPIYEDSDFGRGIIPHLVDALQDIDAHIPYRSVIPSVPTEDQIKAEL

SEQ ID NO: 91696 - protein, 114 aa, Setaria italica
  Transcript Sequence Number=SeqID_25722
TIKKIQSAAQAHIEEHQQLLRRGHLRRRVLSASTQMDPNRSHRTIKKRILPDLSWRSKIHPVEPLSPTIVGRNISRKGTNVTPSIRMQANKIDDIVPPANPSSTANLQRRANSR

SEQ ID NO: 91697 - protein, 223 aa, Setaria italica
  Transcript Sequence Number=SeqID_25723
  Gene Ontology: Mol. function=pseudouridine synthase activity; Biological process=pseudouridine synthesis
  Homolog annotation: Hit_ID=B8A3F7; Match level="QueryCoverage=98%, HitCoverage=81%, E-value=1e-112, Identity=89%"; Hit description =Pseudouridylate synthase
  Pfam annotation: Domain name=PseudoU_synth_1; Domain location=87-194; Score=99.8; E_value=9.5e-27; Accession=PF01416.12; Description=tRNA pseudouridine synthase
MHGVAHFTTPFAYDCLHSIHSAINGLLPPEIRVREISAARPEFHARSSTKSKIYHYKIYNEAIMDPFHNCYAYHSAYKLNPHAMRQAAKHFVGIHDFTSFANAAHNDRERSPIKKITRFDVTEMGALLQLEVEGTGFLYRQVRNMVALLLQVGKEALPPDIVPVIIAARDRKELARVALSAPPHGLYLMSVNYDEEILKPPEGSPPNSFGRTHQLSKCRIPFY

SEQ ID NO: 91698 - protein, 49 aa, Setaria italica
  Transcript Sequence Number=SeqID_25724
  Gene Ontology: Mol. function=phenylalanine ammonia-lyase activity; Cellular component=cytoplasm; Biological process=phenylpropanoid metabolic process
  Homolog annotation: Hit_ID=Q7F929; Match level="QueryCoverage=100%, HitCoverage=6%, E-value=9e-14, Identity=78%"; Hit description =Phenylalanine ammonia-lyase
MECENGHVVAANGNGVCLPVPPRADPLNWGKAAEDLSGSHLEAVKRMVE

SEQ ID NO: 91699 - protein, 107 aa, Setaria italica
  misc_feature (71)..(71): Xaa can be any naturally occurring amino acid
  Transcript Sequence Number=SeqID_25725
  Gene Ontology: Mol. function=electron carrier activity; Cellular component=nucleus; Biological process=oxidation reduction
  Homolog annotation: Hit_ID=Q8L520; Match level="QueryCoverage=99%, HitCoverage=53%, E-value=7e-38, Identity=75%"; Hit description =Putative cytochrome P450
EKVQELVDHVGRLARESAAVDVGRVVFTTGLNLLSRTMFSRDLTSLEDHGGSKEFQEVVTEIMETAGSPNXLSDFFPALAAVDPQRLRQKLAGLFARLHQLFDVEVN

SEQ ID NO: 91700 - protein, 671 aa, Setaria italica
  misc_feature (9)..(9): Xaa can be any naturally occurring amino acid
  Transcript Sequence Number=SeqID_25726
  Gene Ontology: Mol. function=ubiquitin-protein ligase activity; Biological process=multicellular organismal development
  Homolog annotation: Hit_ID=B9SIX2; Match level="QueryCoverage=95%, HitCoverage=14%, E-value=0.0, Identity=63%"; Hit description =Ubiquitin-protein ligase, putative
  Pfam annotation: Domain name=ZZ; Domain location=106-149; Score=40.9; E_value=5.1e-09; Accession=PF00569.9; Description=Zinc finger, ZZ type
NSLVVPCVXFIYSYAECLALHSNENSGVSVGPAVALLKKLLFAPYEAVQTSSSLAISSRFLQVPFPKQTMIANDDAPENHAKPSASAMGSSSGNAQVMIEEDPASSSVQYCCDGCSTVPILRRRWHCNICPDFDLCETCYEILDADRLPVPHSKDHPMSAIPIELDTFGGEGNEIHFSIDELTDSGVLHPPADRSVQTSPSSIHVFDASESADFPETIAGQTTVSISASKRAINSLLLSHLIEELRGWMGTTAGTRAIPLMQLFYRLSSAVGGPFMDSSKPENLDLEKFVKWLMDEININKPFPAKTRCTFGEVSILVFMFFTLMFRNWHQPGSDSSHSKSSGSSDLTEKGPVQVPASTTVALPSSRGDQDKNEFASQLVRACSALRQQSFLNYLMDILQQLVHTFKSSSINGEAGSSGSGCGSLLTVRRELPAGNFSPFFSDSYAKSHPTDLFTDYYKLLLENTFRLVYSMVRPEKEKSAEKDRSYKVPNTKDLKLDGYQDVLCSYISNPHTSFVRRYARRLFLHLCGSKTHYYSVRDSWQYSHEVKKLHKIVNKSGGFRNPVPYERSVKLIKCLSILCDVAAARPKNWQKFCLKHMDLLPFLVDNFYHFSEECIIQTLKLLNLAFYSGKDANHNAQKPECADLGGSTRTSSQSSDSKKKRKVDDGSEGS

SEQ ID NO: 91701 - protein, 77 aa, Setaria italica
  Transcript Sequence Number=SeqID_25727
QPFMYETALTVRIRKCVYLQNALGKIAIKSGFTNDQDDTVMLFVCRVHKSQHQMFVRYWVQSTNAKPSKQFDECVGI

SEQ ID NO: 91702 - protein, 89 aa, Setaria italica
  misc_feature (75)..(75): Xaa can be any naturally occurring amino acid
  Transcript Sequence Number=SeqID_25728
  Homolog annotation: Hit_ID=B2ZX90; Match level="QueryCoverage=94%, HitCoverage=8%, E-value=8e-25, Identity=76%"; Hit description =Chromatin assembly factor-1
RKKSAFVGPRCPLKMDPDLDYEVDSDDEWEEEDPGESLSDCEKDGDEVMEEDSKITDEEDEDSFVVPDGYLSDNXEGIQIESLMASSSL

SEQ ID NO: 91703 - protein, 118 aa, Setaria italica
  misc_feature (42)..(42): Xaa can be any naturally occurring amino acid
  misc_feature (71)..(71): Xaa can be any naturally occurring amino acid
  Transcript Sequence Number=SeqID_25729
  Subcellular localization annotation: CTP_CleavageSite=23; ConfidenceScore=5.73e-01
PPPFVPPPPPSPPFPPPPPPPPCAFPPPPPPPPITTLPCPSXLPLPLPPSPLPSIPRPRPWLLPRPIPLPXPLPLPPPSPPLSSPLLPSSPPPPPPPPPPPPPPPPPPPPPLSLGSTS

SEQ ID NO: 91704 - protein, 125 aa, Setaria italica
  Transcript Sequence Number=SeqID_25730
ASATATPPPPRGNHAEAEVMPSSNMCSWADVAERYVGAVKEWFLLPQVVGNALWCVNCKPLAARYYAGVTAAWLLPHVYGYLRPPVPGALYYYSAAGAVAVPGVGVALALLVFVQQRWNYKIVGW

SEQ ID NO: 91705 - protein, 62 aa, Setaria italica
  Transcript Sequence Number=SeqID_25731
  Gene Ontology: Mol. function=ammonia ligase activity; Cellular component=cytoplasm; Biological process=phenylpropanoid metabolic process
  Homolog annotation: Hit_ID=A2IBN5; Match level="QueryCoverage=83%, HitCoverage=7%, E-value=3e-15, Identity=73%"; Hit description =Phenylalanine ammonia-lyase
MACNTAIVTSDPLNWGKAAAELTGSHLDEVRRMVAQSREPIVRVDGSRLHVGKVAAVAAAKD

SEQ ID NO: 91706 - protein, 270 aa, Setaria italica
  misc_feature (35)..(35): Xaa can be any naturally occurring amino acid
  Transcript Sequence Number=SeqID_25732
  Gene Ontology: Mol. function=protein serine/threonine kinase activity; Cellular component=integral to membrane; Biological process=protein amino acid phosphorylation
  Homolog annotation: Hit_ID=B9TAC6; Match level="QueryCoverage=97%, HitCoverage=65%, E-value=9e-74, Identity=40%"; Hit description =Receptor protein kinase CLAVATA1, putative
  Pfam annotation: Domain name=LRR_1; Domain location=23-45; Score =12.6; E_value=1.2; Accession=PF00560.25; Description=Leucine Rich Repeat
  Pfam annotation: Domain name=LRR_1; Domain location=47-69; Score =11.9; E_value=1.6; Accession=PF00560.25; Description=Leucine Rich Repeat
  Pfam annotation: Domain name=LRR_1; Domain location=71-93; Score =16.4; E_value=0.12; Accession=PF00560.25; Description=Leucine Rich Repeat
  Pfam annotation: Domain name=LRR_1; Domain location=95-116; Score =9.6; E_value=4.5; Accession=PF00560.25; Description=Leucine Rich Repeat
  Pfam module annotation: Pfam domain module=LRR_1::LRR_1::LRR_1::LRR _1; Domain location=23-45::47-69::71-93::95-116
QTFAAADNELTGGVPDEIGDCPSLSALDLSSNRLXGAIPASLASCQRLVSLSLRSNQFTGQIPGAIAKMSTLSVLDLSNNFFSGEIPSNFGTSPALEMLNLAYNNLTGPVPTTGLLRTINPDDLAGNPGLCGGVLPPCGSSSLRASSSETSGLRRSHMKHIAAGWAIGISALIVACGVVFIGKQLYQRWYVNGGCCDDAALEEDGSGSWPWRLTAFQRLSFTSAEVLACIKEDNIVGMGGTGVVYRADMPRHHAVVAVKKLWRAAGCPEE

SEQ ID NO: 91707 - protein, 386 aa, Setaria italica
  misc_feature (146)..(146): Xaa can be any naturally occurring amino acid
  Transcript Sequence Number=SeqID_25733
  Gene Ontology: Mol. function=molecular_function; Cellular component =cellular_component; Biological process=biological_process
  Homolog annotation: Hit_ID=O80479; Match level="QueryCoverage=100%, HitCoverage=58%, E-value=1e-95, Identity=50%"; Hit description =T12M4.1 protein
  Pfam annotation: Domain name=Abhydrolase_2; Domain location=172-386; Score=-62.4; E_value=0.004; Accession=PF02230.8; Description =PhospholipaseCarboxylesterase
  Pfam annotation: Domain name=FSH1; Domain location=151-384; Score =0.5; E_value=2.4e-07; Accession=PF03959.5; Description=Serine hydrolase (FSH1)
  Pfam module annotation: Pfam domain module=Abhydrolase_2::FSH1; Domain location=172-386::151-384
YIRSKGEGFENVFQLYGGIQRYLEQFPDGGYFEGKNFVFDHRISVGSLKENILGTCLICGSSYDDYSSRCRCSNCRMLVLVCSTCQDSTKEYVCELCQKNGKEPCQISTRQDCEIQTGLSEPSGFEKPSISNHILTSKVPWCNGKXSEQLKKLRILCLHGFRQNASNFKGRMSALAKKLKHIAELVFIDAPHELPFVYQPTQSHCSDKPSPPPETPKRKFAWLIAPNSSCSTEQDWKVADAPFDPLQYQQQTEGFEESYTYLENTISQMGCFDGILGFSQGAAMAALFCRKQQKTSGAPKFRFGMFCSGYPAPVGDFDAELIKLPSLHCFGNGEGHDRQIANRASCELADQFQQDCCSIVEHDMGHIIPTRSPYIDRIKDFLSGFL

SEQ ID NO: 91708 - protein, 50 aa, Setaria italica
  Transcript Sequence Number=SeqID_25734
GALIMICYHLMSVDLSVLPWIPYSFGQASYSCRYKCLLCGVHVSFLMTCT

SEQ ID NO: 91709 - protein, 41 aa, Setaria italica
  Transcript Sequence Number=SeqID_25735
  Pfam annotation: Domain name=zf-C3HC4; Domain location=10-41; Score =1.6; E_value=0.067; Accession=PF00097.17; Description=Zinc finger, C3HC4 type (RING finger)
MEAPDQSNPCAICLGGMGAAGGQAIFTAECSHTFHFHCISA

SEQ ID NO: 91710 - protein, 178 aa, Setaria italica
  misc_feature (1)..(1): Xaa can be any naturally occurring amino acid
  Transcript Sequence Number=SeqID_25736
  Gene Ontology: Mol. function=protein binding; Cellular component=cell wall
  Homolog annotation: Hit_ID=O65375; Match level="QueryCoverage=82%, HitCoverage=20%, E-value=1e-38, Identity=53%"; Hit description =F12F1.9 protein
XFINNNRLTRPIPANLGNSPASVVVLAHNRLGGCIPPSIGRMAATLNEIVLIDDELSGCIPPQVGLLSQVTVFDVSGNHLQGPLPGSVAGMSALQQLNVAGNLLRGPIPPAVCGLQRSLRNFTYEDNFFTSRPGCPAATADGRWNCIPGAPAQRPPAQCAAAGVPFDCSTAQLPGYRL

SEQ ID NO: 91711 - protein, 91 aa, Setaria italica
  Transcript Sequence Number=SeqID_25737
  Subcellular localization annotation: CTP_CleavageSite=28; ConfidenceScore=5.22e-01
RAVGAPFFRGKGGVPPVLAAGSIHPSPRAGARSNLFPCARAPPAAIIGRACGAEMHCYNWPCSPQPGTELFFFAPARDPLNSGWLSPVARA

SEQ ID NO: 91712 - protein, 100 aa, Setaria italica
  Transcript Sequence Number=SeqID_25738
  Gene Ontology: Mol. function=catalytic activity; Biological process =metabolic process
  Homolog annotation: Hit_ID=B9RMA4; Match level="QueryCoverage=91%, HitCoverage=26%, E-value=1e-33, Identity=70%"; Hit description =Aminocarboxymuconate-semialdehyde decarboxylase, putative
CHDALLQQVYVKYSALFRISREAYPYEDTAQLLSHVISIYGANRIMWGSDFPYVVPECGYKGAKDAVSHVAGKVSVSPSDLEWILGKTVSQLFQGAWVAP

SEQ ID NO: 91713 - protein, 100 aa, Setaria italica
  misc_feature (86)..(86): Xaa can be any naturally occurring amino acid
  Transcript Sequence Number=SeqID_25739
  Gene Ontology: Mol. function=DNA binding; Biological process =regulation of transcription
  Homolog annotation: Hit_ID=Q6JAH1; Match level="QueryCoverage=44%, HitCoverage=7%, E-value=1e-11, Identity=70%"; Hit description =Putative NAM protein
MRIMLELLFVSKSGWLTIEKFMVLRPNKDSDVSILPSSIFLATINLETSRVTRRVADMEAAEETPSGGGDDEKVKYPVGFRFKPNXQELVEFYLLPKLLD

SEQ ID NO: 91714 - protein, 75 aa, Setaria italica
  Transcript Sequence Number=SeqID_25740
  Gene Ontology: Mol. function=metal ion binding
  Pfam annotation: Domain name=zf-C3HC4; Domain location=5-33; Score =5.6; E_value=0.023; Accession=PF00097.17; Description=Zinc finger, C3HC4 type (RING finger)
PGDRCRRLPRCEHSFHAECVDSWLRKSSACPVCRADVVDRPPKGEGKAAAAGEAGVPGALEMAERRSPVAVGGRR

SEQ ID NO: 91715 - protein, 192 aa, Setaria italica
  Transcript Sequence Number=SeqID_25741
  Gene Ontology: Mol. function=amino acid transmembrane transporter activity; Cellular component=integral to membrane; Biological process=amino acid transport
  Homolog annotation: Hit_ID=B6UB79; Match level="QueryCoverage=95%, HitCoverage=37%, E-value=1e-88, Identity=89%"; Hit description =Cationic amino acid transporter
TGCNVYQNAGMIAGRWLKYWIEVGAVLSSIGLYSATLSSAAFQLLGMADLGLLPSAFATRAPVFNTPWVSIVTTSAITLGMSFFSFNNIVAAANFLYSLGMLLEFAAFIWLRIKRPDLSRPYRVPARLPGAVALCLVPSAFLVFVMAIAGWKVYAISAAFTAAGVGVYYLMRFCKERGCLRFSDGGDEGAAA

SEQ ID NO: 91716 - protein, 109 aa, Setaria italica
  Transcript Sequence Number=SeqID_25742
  Gene Ontology: Mol. function=nucleoside-triphosphatase activity; Cellular component=membrane; Biological process=lipid transport
  Homolog annotation: Hit_ID=B9P510; Match level="QueryCoverage=96%, HitCoverage=17%, E-value=1e-30, Identity=60%"; Hit description=White- brown-complex ABC transporter family (Fragment)
GFFRLPNDLPKLVWKYPMYFISYHKYGIQGLYKNEFQGLTFEDQLNRNGVLSGGDNILKNYLQVEIGYSKWVDLAIMCAMVIIYRAMFLATIKLTEIRGPIIKCGRMKV

SEQ ID NO: 91717 - protein, 84 aa, Setaria italica
  Transcript Sequence Number=SeqID_25743
RPEDRPMMKDVAALLRGIQHDDGIEARKAGGGGGAEAEAGVGKWADPKQPISPTKLMALAQPAQAQAQARESSGSQSLLKNREG

SEQ ID NO: 91718 - protein, 89 aa, Setaria italica
  Transcript Sequence Number=SeqID_25744
  Gene Ontology: Mol. function=transferase activity, transferring nitrogenous groups; Biological process=cellular amino acid and derivative metabolic process
  Subcellular localization annotation: CTP_CleavageSite=72; ConfidenceScore=5.04e-01
AAGATPRAWRICRQSVGVPLSAAGAMSIRAVLDRVFSAVDSSGPRPVLAIGNGDPTASASFRPPLEAEEAVVEALRSKKHNGYSPTVRF

SEQ ID NO: 91719 - protein, 269 aa, Setaria italica
  misc_feature (235)..(235): Xaa can be any naturally occurring amino acid
  misc_feature (251)..(251): Xaa can be any naturally occurring amino acid
  Transcript Sequence Number=SeqID_25745
  Gene Ontology: Mol. function=electron carrier activity; Cellular component=endoplasmic reticulum membrane; Biological process =oxidation reduction
  Homolog annotation: Hit_ID=Q5H9W6; Match level="QueryCoverage=100%, HitCoverage=50%, E-value=4e-95, Identity=64%"; Hit description =B1168G10.4 protein
  Pfam annotation: Domain name=p450; Domain location=1-263; Score= -133.8; E_value=3.4e-05; Accession=PF00067.14; Description=Cytochrome P450
GRRHFATAPPACGTGGPGRDEAEHVDALFATLNYLDAFCVSDYFPALVGLDLDGHERVVRGIMRTLRRLHDPVVEERVEEWRQLRKAGERRDPADFLDVLASLDDAAGRPLLTVDEIKAQTIDIMIATGDNPSNAAEWALAEMLNRPEVMARAVAELDAVVGRDRLVAERDVRELSYLKACIREAFRLHPYHPFNPPRVAMADTSVVGYAIPKGSQVILSRVGLGRNPNVWEDPXLEFRPERHLLDGGGVXALRARSLRFISFSTGSGG

SEQ ID NO: 91720 - protein, 41 aa, Setaria italica
  Transcript Sequence Number=SeqID_25746
DTITEYDQQKPNLNCSAILLQTMKCSNIRLREPQKYSFYQI

SEQ ID NO: 91721 - protein, 80 aa, Setaria italica
  Transcript Sequence Number=SeqID_25747
  Gene Ontology: Mol. function=pantothenate kinase activity; Biological process=coenzyme A biosynthetic process
  Homolog annotation: Hit_ID=Q8L5Y9; Match level="QueryCoverage=82%, HitCoverage=7%, E-value=3e-18, Identity=69%"; Hit description =Pantothenate kinase 2
ELPEIIAEASKHCGILRKAAEAGGLLVDAMAGIQDDLKDAPESVPLIVVENGCGSPCIDFRQVSSELAAAAKDADLVRSL

SEQ ID NO: 91722 - protein, 863 aa, Setaria italica
  misc_feature (121)..(121): Xaa can be any naturally occurring amino acid
  Transcript Sequence Number=SeqID_25748
  Gene Ontology: Mol. function=pantothenate kinase activity; Cellular component=cytoplasm; Biological process=coenzyme A biosynthetic process
  Homolog annotation: Hit_ID=Q8L5Y9; Match level="QueryCoverage=99%, HitCoverage=98%, E-value=0.0, Identity=78%"; Hit description =Pantothenate kinase 2
  Pfam annotation: Domain name=DUF89; Domain location=518-856; Score =201.4; E_value=2.5e-57; Accession=PF01937.11; Description=Protein of unknown function DUF89
  Pfam annotation: Domain name=Fumble; Domain location=39-390; Score =681.1; E_value=9.8e-202; Accession=PF03630.6; Description=Fumble
  Pfam module annotation: Pfam domain module=DUF89::Fumble; Domain location=518-856::39-390
MLPRSSSRPQLDLSGAAIHGTLEDRNPTILLPNQSDDISHLALDIGGSLIKLVYFSRHAELSTEDKRKISTKRRLGMFNGGRRSYPILGGRLHFVKFETEKLNECLDFISSKQLHRGVICXGVDSPSWRSGAQPDDIVIKATGGGAYKYADLFKERLGVSLEKEDEMDCLVAGANFLLKAIRHEAFTHMDGHKEYVQIDQNDLFPFLLVNVGSGVSIIKVDGHGKFQRVSGTNVGGGTYWGLGRLMTKCKSFDELLELSQRGDNSTIDMLVGDIYGGLDYSKIGLSASTIASSFGKTISENKELSDYRPEDISLSLLRMISYNIGQISYLNALRYGLKRIFFGGFFIRGHAYTMDTISFAVNFWSKGEAQAMFLRHEGFLGALGAFMSYEKHGLDDLRIHHLVERFPMGAPYVGGKIHGPPLGDLNEKISWMEKFVQKGTQIIAPVPMGVPATTGMGGFERPTSKGDILRSDASAALNVGVLHLVPTLDVFPLLEDPKTYEPNTIDLDQDEFKYWFKILSDHLPDLVDKAVASEGGTDDAKKRGDAFAHAFSAHLARLMEEPAAYGKFGLANLLELREECLREFQFVDAYISIKQRENEASLAVLPDLLMELDSMNEEARLLALIEGVLAANIFDWGSRACVELYHKGTIIEIYRMSRKKMQRPWRIDDFDMFKKRMLTDRKNQPYKRALLFVDNSGADVVLGMLPLARELLRHGTEVVLVANSLPALNDVTANELPEIIAEASKHCGILRKAAEAGGLLVDAMAGIQDDLKDAPESVPLMVVENGCGSPCIDFRQVSSELAAAAKDADLLILEGMGRALHTNLNARFKCDALKLAMVKNQRLAEKLFNGNIYDSICKFEPVC

SEQ ID NO: 91723 - protein, 113 aa, Setaria italica
  misc_feature (66)..(66): Xaa can be any naturally occurring amino acid
  misc_feature (84)..(84): Xaa can be any naturally occurring amino acid
  Transcript Sequence Number=SeqID_25749
  Gene Ontology: Mol. function=protein kinase activity; Biological process=protein amino acid phosphorylation
  Homolog annotation: Hit_ID=Q5JNI4; Match level="QueryCoverage=97%, HitCoverage=45%, E-value=1e-55, Identity=95%"; Hit description =Ankyrin-kinase-like
ANRNILRDDTGHLKVADFDLCKMLKWRRKVREEKAVTSPGNACRYVAPEVLRNEEYDTKVDVFSFXALILQEMIEGCLPYYDKXNDEIEKAHNSKERPPFRAPPKHYAHGLRE

SEQ ID NO: 91724 - protein, 421 aa, Setaria italica
  Transcript Sequence Number=SeqID_25750
  Gene Ontology: Mol. function=protein kinase activity; Biological process=protein amino acid phosphorylation
  Homolog annotation: Hit_ID=B9S8G7; Match level="QueryCoverage=95%, HitCoverage=85%, E-value=1e-152, Identity=64%"; Hit description =Protein kinase, putative
  Pfam annotation: Domain name=Ank; Domain location=3-30; Score=9.6; E _value=1.5; Accession=PF00023.22; Description=Ankyrin repeat
  Pfam annotation: Domain name=Ank; Domain location=31-63; Score=44.5; E_value=4.1e-10; Accession=PF00023.22; Description=Ankyrin repeat
  Pfam annotation: Domain name=Ank; Domain location=64-100; Score=7.6; E_value=2.9; Accession=PF00023.22; Description=Ankyrin repeat
  Pfam annotation: Domain name=Pkinase; Domain location=116-373; Score =195.3; E_value=1.6e-55; Accession=PF00069.17; Description=Protein kinase domain
  Pfam annotation: Domain name=Pkinase_Tyr; Domain location=116-373; Score=160.7; E_value=4.3e-45; Accession=PF07714.9; Description =Protein tyrosine kinase
  Pfam module annotation: Pfam domain module=Ank::Ank::Ank::Pkinase::Pki nase_Tyr; Domain location=3-30::31-63::64-100::116-373::116-373
FQLMYLAHEGNAEGIRELLDGGADPNFRDSDGRTALHIAACEGHADVVELLLQRGAEAAVEDQWGSTPLADAMHYQNHDVIKILEKHGSKYKIAPMHVNNVREVPEYEIDPSELDFSNGNDLSKGTFRKATWRGIPVAVKKLDDDLLVDENKVRAFRDELDVLQLIRHPNVVQFLGAVTQSNPMMIVMEFMHKGDLRTHLNKKGALPPSYAVKLALDIARGMSYLHEHKPQAIIHRDLEPSNILRDDTGHLKVADFDLCKMLKWRRKVREEKAVTSPGNACRYVAPEVLRNEEYDTKVDVFSFALILQEMIEGCLPYYDKRNDEIEKAHNSKERPPFRAPPKHYAHGLRELIEQCWSENPAHRPDFREIINRLSAIQNEIAQRNRWKVRPLRCFLSFEGMWKKDRNEGSTTRSSRSSRSNF

SEQ ID NO: 91725 - protein, 175 aa, Setaria italica
  Transcript Sequence Number=SeqID_25751
  Gene Ontology: Cellular component=intracellular; Biological process =ribosome biogenesis
  Homolog annotation: Hit_ID=A8IK52; Match level="QueryCoverage=90%, HitCoverage=62%, E-value=2e-66, Identity=77%"; Hit description=Low -CO2-inducible protein
  Pfam annotation: Domain name=Ribosomal_S8e; Domain location=5-152; Score=176.7; E_value=6.5e-50; Accession=PF01201.14; Description =Ribosomal protein S8e
LIVHFQSLLHLRLLGKRAKVLSNTIKQKRKEKAGKWDVPLPKVRPVAEEEMFKVLRTGKRKTKQWKRMVTKATFVGSGFTRKPPKYERFIRPTGLRFTKAHVTHPELKCTFNLDINLNDGTPCHNTKRCIHWTIIEVNVSELGLVTPAGKVVWGKYAQVTNNPENDGCINAVLLV

SEQ ID NO: 91726 - protein, 259 aa, Setaria italica
  Transcript Sequence Number=SeqID_25752
  Gene Ontology: Cellular component=intracellular; Biological process =ribosome biogenesis
  Homolog annotation: Hit_ID=A8IK52; Match level="QueryCoverage=100%, HitCoverage=100%, E-value=1e-114, Identity=76%"; Hit description=Low- CO2-inducible protein
  Pfam annotation: Domain name=Ribosomal_S8e; Domain location=1-236; Score=457.9; E_value=1.5e-134; Accession=PF01201.14; Description =Ribosomal protein S8e
MPQGDYIELHQKRHGRRPDYEERKRKRQAREVHKNSKQAQKLLGAKGKRFAKKRYAEKAQMKKTLKMHDESTKRDKVEDVQEGALPPYLLDRDQTQRAKVLSNTIKQKRKEKAGKWDVPLPKVRPVAEEEMFKVLRTGKRKTKQWKRMVTKATFVGSGFTRKPPKYERFIRPTGLRFTKAHVTHPELKCTFNLDIISVKKNPNGPMYTSLGVMTRGTIIEVNVSELGLVTPAGKVVWGKYAQVTNNPENDGCINAVLLV

SEQ ID NO: 91727 - protein, 141 aa, Setaria italica
  misc_feature (10)..(10): Xaa can be any naturally occurring amino acid
  Transcript Sequence Number=SeqID_25753
  Gene Ontology: Mol. function=ATP-dependent DNA helicase activity; Cellular component=nucleus; Biological process=double-strand break repair via nonhomologous end joining
  Homolog annotation: Hit_ID=B6SWG7; Match level="QueryCoverage=100%, HitCoverage=20%, E-value=4e-67, Identity=85%"; Hit description=KAP-2
  Pfam annotation: Domain name=Ku_N; Domain location=1-141; Score= -12.2; E_value=0.0029; Accession=PF03731.7; Description=Ku70Ku80 N -terminal alphabeta domain
VGPSMHGVAXEVKNICSTLVHKKLVYNRSDEVGIVLFGTKETCNELAKELGGYKHVTVAHDIKVVDEGTSQALQNLPAGSVPGDFLDAVVVGLDMLIRKYGNTKGKRRLCLITSAQHRLRDPPEGTKEDQVDTIADQMKRH

SEQ ID NO: 91728 - protein, 160 aa, Setaria italica
  Transcript Sequence Number=SeqID_25754
  Gene Ontology: Mol. function=ATP-dependent DNA helicase activity; Cellular component=nucleus; Biological process=double-strand break repair via nonhomologous end joining
  Homolog annotation: Hit_ID=B6SWG7; Match level="QueryCoverage=97%, HitCoverage=22%, E-value=1e-72, Identity=83%"; Hit description=KAP-2
  Pfam annotation: Domain name=Ku; Domain location=1-153; Score=55.6; E_ value=1.9e-13; Accession=PF02735.8; Description=Ku70Ku80 beta-barrel domain
VPPDQRIKGYLYGPQVVPISSAEWEAVKFKPEKGVKLLGFTDRSSILRHHFMKDVCLFIPEPGNTKATLAVSAIARAMHQMNKVAIVRCVWRQGQGNVAFGVLTPNISSVNNIQDSFYFNVLPFAEDIREFQFRSFSSLPSSSQPTDEQQEAADNLSEDC

SEQ ID NO: 91729 - protein, 515 aa, Setaria italica
  misc_feature (29)..(29): Xaa can be any naturally occurring amino acid
  misc_feature (218)..(218): Xaa can be any naturally occurring amino acid
  Transcript Sequence Number=SeqID_25755
  Gene Ontology: Mol. function=ATP-dependent DNA helicase activity; Cellular component=nucleus; Biological process=double-strand break repair via nonhomologous end joining
  Homolog annotation: Hit_ID=B6SWG7; Match level="QueryCoverage=94%, HitCoverage=74%, E-value=0.0, Identity=78%"; Hit description=KAP-2
  Pfam annotation: Domain name=Ku; Domain location=96-280; Score=86.7; E_value=8e-23; Accession=PF02735.8; Description=Ku70Ku80 beta-barrel domain
  Pfam annotation: Domain name=Ku_C; Domain location=296-389; Score =16.9; E_value=0.0074; Accession=PF03730.6; Description=Ku70Ku80 C -terminal arm
  Pfam annotation: Domain name=Ku_PK_bind; Domain location=412-515; Score=107.4; E_value=4.8e-29; Accession=PF08785.3; Description=Ku C terminal domain like
  Pfam module annotation: Pfam domain module=Ku::Ku_C::Ku_PK_bind; Domain location=96-280::296-389::412-515
TTRKNKENSRLTKLRKEDQVDTIADQMKXHDIKMECIVFREPGIHHNAVMDENDWLLYQFRNRSVAKVVQVDSPTSLLGALKTRNVLPVTVFRGDLEVSSNFKIKVWVYKKTAEEKFPTLKKYSDKAPPSDKFASHEVKVDYEYKSVVEPDKVVPPDQRIKGYLYGPQVVPISSAEWEAVKFKPEKGVKLLGFTDRSSILRHHFMKDVCLFIPEPNSXRQGQGNVAFGVLTPNISSVNNIQDSFYFNVLPFAEDIREFQFRSFSSLPSSSQPTDEQQEAADNLVKMLDLAPPGREVLKPEFTPNPMLERFYSYLDLKAKQPDANVPPLERCLRRITEPDPDVIDQQTPLIQNLGKAFELKENPKKKKARTQDRLAYTGAGDQAKSVAEPSAEKDGVLVVLYPPTENIGEIRDLHPVQDFEAMLAKRSSSTWVQKAIEEMQKYTTALLENSRDGDNYSKALECFAALRKACIIEQEPEEFNQFLTKTYERLKKGDVANFFQLLSSKNISLISKGEA

SEQ ID NO: 91730 - protein, 158 aa, Setaria italica
  Transcript Sequence Number=SeqID_25756
  Homolog annotation: Hit_ID=Q7XLY7; Match level="QueryCoverage=45%, HitCoverage=18%, E-value=4e-20, Identity=77%"; Hit description =H0502B11.11 protein
  Subcellular localization annotation: CTP_CleavageSite=56; ConfidenceScore=5.17e-01
QRRRRRAAVARRNSVSVASASSAALGGRLEAIVEPESPGRRSEGSSSSSFGRKVARSRSVGCGSRSFSGDFLERLSTGFGDCALRRVESHREPKPKAAGALGHLGGAHGDDGDHDHDQHHRIKCAGFFGGGLGAAPPPSSSYWLSAPDGASGGGAGGG

SEQ ID NO: 91731 - protein, 81 aa, Setaria italica
  misc_feature (60)..(60): Xaa can be any naturally occurring amino acid
  Transcript Sequence Number=SeqID_25757
  Gene Ontology: Mol. function=transposase activity; Biological process= transposition, DNA-mediated
  Homolog annotation: Hit_ID=Q7FA01; Match level="QueryCoverage=51%, HitCoverage=5%, E-value=1e-09, Identity=67%"; Hit description =OSJNBa0079C19.15 protein
MVTSFHIHIQVHYSIHDHYYLLHELLHLPDNNIFICREFYLVDSRYPNCPAYFAPYKGTXHLPEFRSGPMPKGMKETFNFT

SEQ ID NO: 91732 - protein, 111 aa, Setaria italica
  Transcript Sequence Number=SeqID_25758
  Homolog annotation: Hit_ID=Q6YXW3; Match level="QueryCoverage=94%, HitCoverage=64%, E-value=2e-20, Identity=55%"; Hit description=Auxin- induced protein-like
  Pfam annotation: Domain name=Auxin_inducible; Domain location=31-93; Score=131.1; E_value=3.5e-36; Accession=PF02519.6; Description=Auxin responsive protein
  Subcellular localization annotation: CTP_CleavageSite=15; ConfidenceScore=5.34e-01
QLLKKWKKLATVTPSASGSGGKGGGRSSVPRGSFAVYVGEEMRRFVIPTEYLGHWAFAELLREAEEEFGFQHEGALRIPCDVEVFEGILRLVRGGGKKDAAAAMCDCSCSL

SEQ ID NO: 91733 - protein, 136 aa, Setaria italica
  Transcript Sequence Number=SeqID_25759
  Gene Ontology: Mol. function=glyceraldehyde-3-phosphate dehydrogenase (NADP+) (phosphorylating) activity; Cellular component=chloroplast; Biological process=reductive pentose-phosphate cycle
  Homolog annotation: Hit_ID=P09315; Match level="QueryCoverage=97%, HitCoverage=32%, E-value=1e-60, Identity=86%"; Hit description =Glyceraldehyde-3-phosphate dehydrogenase A, chloroplastic
  Pfam annotation: Domain name=Gp_dh_C; Domain location=1-114; Score =172.2; E_value=1.5e-48; Accession=PF02800.12; Description =Glyceraldehyde 3-phosphate dehydrogenas
  Subcellular localization annotation: CTP_CleavageSite=54; ConfidenceScore=5.35e-01
AAALNIVPTSTGAAKAVALVLPNLKGKLNGIALRVPTPNVSVVDLVVQVSKKTLAEEVNQAFRDSAANELAGILEVCDAPLVSVDFRCSDVSSTVDASLTMVMGDDMVKVIAWYDNEWGYSQRVVDLADIVANNWK

SEQ ID NO: 91734 - protein, 60 aa, Setaria italica
  Transcript Sequence Number=SeqID_25760
  Gene Ontology: Mol. function=ATP binding; Biological process=apoptosis
  Homolog annotation: Hit_ID=Q2R1P5; Match level="QueryCoverage=100%, HitCoverage=4%, E-value=2e-21, Identity=86%"; Hit description =Leucine Rich Repeat family protein, expressed
MAELASGAVSSLLVVIRNEALLLRGVQDDVQFIKEEMESMKSFLAHLARSAPPGGEHDEQ

SEQ ID NO: 91735 - protein, 102 aa, Setaria italica
  Transcript Sequence Number=SeqID_25761
  Gene Ontology: Mol. function=substrate-specific transmembrane transporter activity; Cellular component=integral to membrane; Biological process=transmembrane transport
  Homolog annotation: Hit_ID=B6TEX4; Match level="QueryCoverage=98%, HitCoverage=19%, E-value=7e-39, Identity=82%"; Hit description=Sugar transport protein 5
FSVVVTCLMAASGGLIFGYDIGISGGVTAMESFLSAFFPGVLRRMAAARRDQYCVYDSHALTAFTSSLYLAGLAASLVASRVTRAVGRQAVMLAGGALFFAG

SEQ ID NO: 91736 - protein, 70 aa, Setaria italica
  Transcript Sequence Number=SeqID_25762
  Homolog annotation: Hit_ID=B9R9B3; Match level="QueryCoverage=91%, HitCoverage=12%, E-value=9e-13, Identity=46%"; Hit description=KDEL motif-containing protein 1, putative
  Pfam annotation: Domain name=DUF821; Domain location=1-64; Score= -351.3; E_value=0.042; Accession=PF05686.4; Description=Arabidopsis thaliana protein of unknown function (DUF821)
KVEVCSESLACQADGLEKKFLVDSMVKSSHDAGPCNLPPPFSSHELKMLKQRKENSVKQIEMWEQKASGA

SEQ ID NO: 91737 - protein, 38 aa, Setaria italica
  Transcript Sequence Number=SeqID_25763
LGTSDGLIFISRCCCHANLVHSSSALIICAPSHAVVAM

SEQ ID NO: 91738 - protein, 263 aa, Setaria italica
  Transcript Sequence Number=SeqID_25764
SSVWPRSSARMKAGGGAKKRKLSGWPESEASNKAIEFNSILHGNSSGLEVLLLNRIAIAKSLSPPPIVYDLDWNPKPRSCNGKNAIAMLACASSYGAHIYYYPRSTRTWTTVVMMNRPTRKGDCIRWHKSGRTLATTSNYSDEKDGKVTIFSYDNKTLCFDATGSYSIKEHRNVSSLAWITGTEILVGAIFPSSWLYFFELKEGLISCVHQEECNGFPTNSPIVLQPDPNTTYFFAACEDATKILVWNKLEGSDHIWTIIRSV

SEQ ID NO: 91739 - protein, 300 aa, Setaria italica
  Transcript Sequence Number=SeqID_25765
HLRSLLLFFFVLQWPVRMLQKFWWNKLEGSDHIWTIIRSVDCDRGICGMQFGMLTRSLITIQKGHWNVWHWVEQKDLKLQFTSLNEHKIVKGKRLKYRSELISLGVSCTGKVVASGGTGDTFLVYAMTGTAAGPPIAVHWNPACSRNSNFCYGEVRCIKFNAKEGANLQIATGGDNGFIHIWALKKTSSRSKEKVDITPDRRYEHKYYSNHLQPEKIKIPSTSDDEEDDEDVDKEVVREGPFEVVVEYVDKEVVRVAQKPKFYQIREDAEAILEIINGGYDLPKEQIKLLCDQIISADDE

SEQ ID NO: 91740 - protein, 192 aa, Setaria italica
  Transcript Sequence Number=SeqID_25766
  Gene Ontology: Mol. function=transcription regulator activity; Cellular component=nucleus; Biological process=regulation of transcription
MEYEYFNGFTLTDMAHGYQENTCGDGSTVLNYGVVIPNSSTHSEFHRDFMEMCREEHELFMWHSRLKHTSSAPLQMNGNNADFYVELETNNYAELLLDTVIDQIGHASNNASSHSTNSPFTRETQIENDHALRLDESSVPDIPGGQELSPIPMNENEGFIICATTDASPTETNKTITEEYIVRNTLGQIQLK

SEQ ID NO: 91741 - protein, 110 aa, Setaria italica
  Transcript Sequence Number=SeqID_25767
  Gene Ontology: Mol. function=ATP-dependent DNA helicase activity; Cellular component=DNA-dependent protein kinase complex; Biological process=double-strand break repair via nonhomologous end joining
  Homolog annotation: Hit_ID=B9S6B3; Match level="QueryCoverage=100%, HitCoverage=17%, E-value=5e-30, Identity=61%"; Hit description=Ku P70 DNA helicase, putative
  Pfam annotation: Domain name=SAP; Domain location=74-108; Score=49.8; E_value=1e-11; Accession=PF02037.19; Description=SAP domain
LPDEEGLARPGVVKAIDEFKASVYGENYDQEEAEAAAAKASRGDASKKRKAITDAASLKSAAYDWAELADNGKLKDMTVVELKSYLTAHDLPISGKKEALISRILTHLGK

SEQ ID NO: 91742 - protein, 291 aa, Setaria italica
  Transcript Sequence Number=SeqID_25768
  Gene Ontology: Mol. function=nucleic acid binding; Cellular component= cytoplasm; Biological process=fungal-type cell wall biogenesis
  Homolog annotation: Hit_ID=B6TDW6; Match level="QueryCoverage=94%, HitCoverage=85%, E-value=1e-118, Identity=77%"; Hit description=Cell wall integrity protein scw1
  Pfam annotation: Domain name=RRM_1; Domain location=194-265; Score =20.6; E_value=0.0024; Accession=PF00076.14; Description=RNA recognition motif. (a.k.a. RRM, RBD, o
  Pfam annotation: Domain name=RRM_1; Domain location=21-87; Score =10.3; E_value=0.022; Accession=PF00076.14; Description=RNA recognition motif. (a.k.a. RRM, RBD, o
  Pfam module annotation: Pfam domain module=RRM_1::RRM_1; Domain location=194-265::21-87
RPPPPVAGAPGTAAADEVRTIFITGLPVDVKERELHNLLRWLPGFEASQINFKGDQPMGFALFATAHQAVAAKAALQDLVFDAETKSALHTEMAKKNLFVKRGVGTDANAVDQSKRLRTGGDYTHSPYAPPPFHPPPPAVSMWGTAGYIAAPPPYNPYAYPVPPVAMTSPSPVPGPTAYAPVQNTKDNPPCNTLFIGNLGETVVEEELRSLFSVQPGYKQMKVLRQDRNTVCFIEFEDVNAATAVHHTLQGAVIPSSGRGGMRIQFSKNPFGRRKDSVGGVAGILNGASAN

SEQ ID NO: 91743 - protein, 54 aa, Setaria italica
  Transcript Sequence Number=SeqID_25769
ATAEAANDDKAAPSVAAPAAGCRNNAGCSEGAAEEGNPPQGLFGLRTFFSKKVY

SEQ ID NO: 91744 - protein, 166 aa, Setaria italica
  Transcript Sequence Number=SeqID_25770
  Homolog annotation: Hit_ID=B9SGR5; Match level="QueryCoverage=98%, HitCoverage=23%, E-value=5e-37, Identity=48%"; Hit description =Pentatricopeptide repeat-containing protein, putative
  Pfam annotation: Domain name=PPR; Domain location=13-47; Score=24.8; E_value=0.00036; Accession=PF01535.12; Description=PPR repeat
  Pfam annotation: Domain name=PPR; Domain location=132-166; Score =19.4; E_value=0.015; Accession=PF01535.12; Description=PPR repeat
  Pfam annotation: Domain name=PPR; Domain location=48-82; Score=1.2; E_ value=6.4; Accession=PF01535.12; Description=PPR repeat
  Pfam module annotation: Pfam domain module=PPR::PPR::PPR; Domain location=13-47::132-166::48-82
DAMSEWSAAADALTYNVVIKMCARAGRKGLVASVLERMLSSGIAPCATTFHSLVAAFVGFGDIPTAERIVQAMRGQRKDICLLLRAVAMECDDVPDAEQGAALLDDIVAGAKPEHGTDEVPLLPKAYPPNARVYTTLMKGYMNAGRVEDVVTMLRAMRREAETAPA

SEQ ID NO: 91745 - protein, 81 aa, Setaria italica
  Transcript Sequence Number=SeqID_25771
MLRVSEDGDRRRTAHAAGYGDLGRTLLDLQAAADQIFDAITKRTAEEREKLSGISTRIKAAKAKIKALSQSEEPLTIVSPA

SEQ ID NO: 91746 - protein, 321 aa, Setaria italica
  misc_feature (85)..(85): Xaa can be any naturally occurring amino acid
  Transcript Sequence Number=SeqID_25772
  Gene Ontology: Mol. function=nuclease activity
  Homolog annotation: Hit_ID=B6TZ94; Match level="QueryCoverage=100%, HitCoverage=81%, E-value=1e-146, Identity=79%"; Hit description =Exonuclease
  Pfam annotation: Domain name=YqaJ; Domain location=82-226; Score =133.5; E_value=6.5e-37; Accession=PF09588.2; Description=YqaJ viral recombinase family
  Subcellular localization annotation: CTP_CleavageSite=63; ConfidenceScore=5.64e-01
AVPRLFRTFLQIPTASSTPRVCLTLSTFLPSRRNFEGYIPRSCSRSSLKIYSQPSLLTLQPSSALMVSSQLTSSDVAQRSEEWFXALRKDKLTTSTFSTALGFWAGNRRAELWNEKVFGQTEIKLADAARSAMDWGTNHESVAIEQYTSITGKLVGTLGFAVHTEANSRWLGASPDGILGCELDGGILEVKCPFNKGKPELALPWRAMPYYYMPQVQGLMEIMGRDWVELYCWTPNGSSLFRVPRDRAYWELIHEVLRDFWWGNVMPARELVILGKDADARSFEPQPKHRLTNLVLFRSRKLASEAKLLCMDVGGHVEFFK

SEQ ID NO: 91747 - protein, 98 aa, Setaria italica
  misc_feature (8)..(8): Xaa can be any naturally occurring amino acid
  Transcript Sequence Number=SeqID_25773
  Subcellular localization annotation: CTP_CleavageSite=59; ConfidenceScore=5.22e-01
MWPAGGEXPMAMVHGPTAASPSSGTRLPAPHSPWQSPVPYLFGGLAAMLGLIALSLLALACTYWKLSGNLLAAGEPEDAERQGGTGSRRGDGGGKAAA

SEQ ID NO: 91748 - protein, 118 aa, Setaria italica
  Transcript Sequence Number=SeqID_25774
RRLPWVTVAILLGLAVNLALCVRRVGGDDRRAVAFVGFSHLNLLLLFGAIRHFEVSPHGSPARGRARLAVWLLTTTLTAAFTWKIGAMVPLGFAVAAWIMAAATVLGGFYMMFLHGEK

SEQ ID NO: 91749 - protein, 64 aa, Setaria italica
  Transcript Sequence Number=SeqID_25775
IQQAPSVLFSSPLATHSRRMSGLNSLTGLLRIDLVVDRFIRHPYNSAIHSITFFDELRSGCKII

SEQ ID NO: 91750 - protein, 87 aa, Setaria italica
  Transcript Sequence Number=SeqID_25776
  Gene Ontology: Mol. function=protein tyrosine kinase activity; Cellular component=plasma membrane; Biological process=protein amino acid phosphorylation
  Homolog annotation: Hit_ID=B9SN51; Match level="QueryCoverage=98%, HitCoverage=11%, E-value=3e-39, Identity=89%"; Hit description=ATP binding protein, putative
RPEYAQSGQITEKADVYSFGVVLVELVTGRKAVDINRPKGQQFLTEWARPLLEEYAIDELIDPRLGGRFCENEVYCMLHAANLCIRR

SEQ ID NO: 91751 - protein, 64 aa, Setaria italica
  Transcript Sequence Number=SeqID_25777
  Gene Ontology: Mol. function=oxidoreductase activity, acting on the CH-OH group of donors, NAD or NADP as acceptor; Cellular component =mitochondrion; Biological process=tricarboxylic acid cycle
  Homolog annotation: Hit_ID=P93032; Match level="QueryCoverage=100%, HitCoverage=17%, E-value=7e-25, Identity=85%"; Hit description =Isocitrate dehydrogenase [NAD] regulatory subunit 2, mitochondrial
EEANPVALLLSSAMMLRHLQFPSFADRLETAVKRVVAEGTYKTKDLGGTSTTQEVTDAVIANLD

SEQ ID NO: 91752 - protein, 242 aa, Setaria italica
  Transcript Sequence Number=SeqID_25778
  Gene Ontology: Mol. function=oxidoreductase activity, acting on the CH-OH group of donors, NAD or NADP as acceptor; Cellular component =mitochondrion; Biological process=tricarboxylic acid cycle
  Homolog annotation: Hit_ID=Q8LFC0; Match level="QueryCoverage=87%, HitCoverage=57%, E-value=1e-109, Identity=89%"; Hit description =Isocitrate dehydrogenase [NAD] regulatory subunit 1, mitochondrial
  Pfam annotation: Domain name=Iso_dh; Domain location=47-242; Score= -5.2; E_value=3.1e-14; Accession=PF00180.12; Description =Isocitrateisopropylmalate dehydrogenase
  Subcellular localization annotation: CTP_CleavageSite=65; ConfidenceScore=5.39e-01
MARRSTPLLRRLLAPSPSPTPSTPLAGAASRRSVTYMPRPGDGAPRGVTLIPGDGIGPLVTGAVRQVMEAMHAPVYFETYEVHGDMPTVPPAVIESIRRNKVCIKGGLATPVGGGVSSLNMQLRKELDLYASLVHCFNLPGLPTRHDNVDIVVIRENTEGEYSGLEHEVVPGVVESLKVITKFCSERIAKYAFEYAYLNNRKKVTAVHKANIMKLADGLFLESCREVAKKYPGIQYNEMIVD

SEQ ID NO: 91753 - protein, 197 aa, Setaria italica
  Transcript Sequence Number=SeqID_25779
  Gene Ontology: Mol. function=oxidoreductase activity, acting on the CH-OH group of donors, NAD or NADP as acceptor; Cellular component =mitochondrion; Biological process=tricarboxylic acid cycle
  Homolog annotation: Hit_ID=Q8LFC0; Match level="QueryCoverage=100%, HitCoverage=53%, E-value=1e-91, Identity=84%"; Hit description =Isocitrate dehydrogenase [NAD] regulatory subunit 1, mitochondrial
  Pfam annotation: Domain name=Iso_dh; Domain location=1-192; Score= -4.1; E_value=2.7e-14; Accession=PF00180.12; Description =Isocitrateisopropylmalate dehydrogenase
VITKFCSERIAKYAFEYAYLNNRKKVTAVHKANIMKLADGLFLESCREVASKYPGIQYNEMIVDNCSMQLVSKPEQFDVMVTPNLYGNLVANVAAGIAGGTGVMPGGNVGQDHAVFEQGASAGNVGNENIVEKKRANPVALLLSSAMMLRHLQFPSFADRLETAVKRVIAEGNYRTKDLGGTSTTQEVTDAVIAKLD

SEQ ID NO: 91754 - protein, 224 aa, Setaria italica
  misc_feature (8)..(8): Xaa can be any naturally occurring amino acid
  Transcript Sequence Number=SeqID_25780
  Gene Ontology: Mol. function=protein binding; Cellular component =nucleus; Biological process=regulation of transcription, DNA -dependent
  Homolog annotation: Hit_ID=B9SXM8; Match level="QueryCoverage=93%, HitCoverage=75%, E-value=7e-89, Identity=74%"; Hit description=YEATS domain-containing protein, putative
  Pfam annotation: Domain name=YEATS; Domain location=14-97; Score =138.8; E_value=1.7e-38; Accession=PF03366.8; Description=YEATS family
ISFWLGKXASEYNSHKWTVYVRSANNEDLSVIVKRVVFQLHPSFQNPTRVVEQPPFELSESGWGEFEIAITLYFHSDVCEKRLDLFHQLKLYPEEEAGPQSTKKPVIVETYDEIVFPEPTEAFFQRVQNHPAANVPRLPPGITLPPSGSMEIVPYEKKRGDTKDHALSQWFSNFSEADELLKLAAARQQVQAHIAKLRRQLTMMEGMPQQSKVLSGPGQQFGHI

SEQ ID NO: 91755 - protein, 97 aa, Setaria italica
  Transcript Sequence Number=SeqID_25781
  Gene Ontology: Mol. function=acid phosphatase activity
  Homolog annotation: Hit_ID=Q8VXF4; Match level="QueryCoverage=100%, HitCoverage=14%, E-value=2e-31, Identity=69%"; Hit description =Putative metallophosphatase
RFQLINQRYDFAFALFTGGLENPKLIAVSEPISFKNPKAPVYPRLAQGKTHDEMAVTWTSGYDISEAYPFVEWGAVASGAGGAQPARTPAGTLTFNR

SEQ ID NO: 91756 - protein, 246 aa, Setaria italica
  misc_feature (66)..(66): Xaa can be any naturally occurring amino acid
  misc_feature (105)..(105): Xaa can be any naturally occurring amino acid
  Transcript Sequence Number=SeqID_25782
RNVNSRQLRTTNLGVDVLPRKPVGTPKASVPKAAEDGSKVLQLPDSIVVEDVLLLVRGLGKDPQHXIFPEAAEGFLRLFRSSAFVEGDDYASYNTHECPGVRTLXNASMNIAPGRVSDSHPVLEQDKRVPKRGRKKDVDGSGGSSIKRKKRENTSPALGSGIPITPAVPIRQVKAEDIRTLMKAGNSARGIVQDEKNKLSLFKCPVSATVPGAAKPGHEQVKENDKSFLFLGSAPSNMLHEETTKE

SEQ ID NO: 91757 - protein, 66 aa, Setaria italica
  misc_feature (35)..(35): Xaa can be any naturally occurring amino acid
  misc_feature (43)..(43): Xaa can be any naturally occurring amino acid
  Transcript Sequence Number=SeqID_25783
  Gene Ontology: Mol. function=methyltransferase activity; Cellular component=chloroplast; Biological process=metabolic process
  Homolog annotation: Hit_ID=B6SRT6; Match level="QueryCoverage=92%, HitCoverage=17%, E-value=3e-23, Identity=83%"; Hit description=S -adenosylmethionine-dependent methyltransferase
METFTETEDQQNSISETEVFACPVCYEALIRKGPXGINLPAIXRSGFKCSKCNKSFTSKDIFLDLT

SEQ ID NO: 91758 - protein, 75 aa, Setaria italica
  Transcript Sequence Number=SeqID_25784
  Subcellular localization annotation: CTP_CleavageSite=45; ConfidenceScore=5.52e-01
LLWTSLRICSANAMNSLSKMILSSKRKISVLVLNLFVLPFVLRFPNNTKRNGLHTSNRKIYVGSWMQNKRGLELN

SEQ ID NO: 91759 - protein, 354 aa, Setaria italica
  Transcript Sequence Number=SeqID_25785
  Gene Ontology: Mol. function=methyltransferase activity; Cellular component=chloroplast; Biological process=metabolic process
  Homolog annotation: Hit_ID=B6SRT6; Match level="QueryCoverage=83%, HitCoverage=86%, E-value=1e-166, Identity=94%"; Hit description=S -adenosylmethionine-dependent methyltransferase
  Pfam annotation: Domain name=Methyltransf_11; Domain location=185 -286; Score=102.4; E_value=1.6e-27; Accession=PF08241.4; Description =Methyltransferase domain
  Pfam annotation: Domain name=Methyltransf_12; Domain location=185 -284; Score=61.6; E_value=2.9e-15; Accession=PF08242.4; Description =Methyltransferase domain
  Pfam annotation: Domain name=Ubie_methyltran; Domain location=129 -340; Score=-108.9; E_value=0.00022; Accession=PF01209.10; Description=ubiECOQ5 methyltransferase family
  Pfam module annotation: Pfam domain module=Methyltransf _11::Methyltransf_12::Ubie_methyltran; Domain location=185-286::185 -284::129-340
  Subcellular localization annotation: CTP_CleavageSite=48; ConfidenceScore=5.58e-01
MELLVRAGAAAAAASSSPHPSLQLPRSTCVVPGPCRPRPRRPRYPSLRAAAAAAAVAVEPETEDQQNSISETEVFACPVCYEALIRKGPPGINLPAIYRSGFKCSKCNKSFTSKDIFLDLTVTSGTKEYTEQKPARTELFRSPLVSFLYERGWRQNFNRSGFPGLDEEFQMAQDYFQPVAGGILLDVSCGSGLFTRKFAKSGTYSAVIALDFSENMLRQCYEFIKQDDTLLKANLALVRADISRLPFASCSVDAIHAGAAIHCWPSPSNAVAEISRVLRPGGVFVGTTFLSSPRNNPFSVEALRPLRQIVGPVNTSYNYFTEGELEDLCKSCGLVNYSSKVQRSFIMFSGQKPY

SEQ ID NO: 91760 - protein, 97 aa, Setaria italica
  Transcript Sequence Number=SeqID_25786
PRPHGDCNSRFKLEVSGVAELRFSSRFISQLKQGRQVTTQQLPSRAKGSPEIGTARAGLVAALPHGPRRRRGRGRTAGGGISWRLVPANRTPTAARQ

SEQ ID NO: 91761 - protein, 245 aa, Setaria italica
  misc_feature (50)..(50): Xaa can be any naturally occurring amino acid
  Transcript Sequence Number=SeqID_25787
  Gene Ontology: Mol. function=metal ion binding
MQSPLRHDGHESNGMKDEKDMESGSEVSHPAKKAKLEVHEQDTNVIGNSXFSSTCGHTTNSAKDTVDDMSEFLPQHESIPDIMSIVEGEAYIRDPGRALAKPVGRRAGDKPGLRVKKIFRKEEGKQSTAMVQKLQKEIREVVRDTGTNILEKDGSFDEQLLTAFRAAIGKSVDGTAKSTNQLIRTRRSLLQKGKKRENLTKKLYGTSTGRRRSDWHRDWEVEFWKYRCSPGTNPEKIETLQSVLQ

SEQ ID NO: 91762 - protein, 171 aa, Setaria italica
  Transcript Sequence Number=SeqID_25788
  Gene Ontology: Mol. function=metal ion binding
  Homolog annotation: Hit_ID=UPI0000162A17; Match level="QueryCoverage =33%, HitCoverage=30%, E-value=3e-15, Identity=68%"; Hit description =PHD finger family protein
  Pfam annotation: Domain name=PHD; Domain location=11-65; Score=34.3; E_value=5e-07; Accession=PF00628.21; Description=PHD-finger
AEAVVCLDDGDCKIRSGLVTAEDDSTLDTSIACDSCDKWYHAICVGFNPEMTSENTWLCPRCVSTEVKHAADVILKQNLGGECVIDSDRTSADASFSGRVSVSVADEGETALVVSMVGVQSETRSDLSEASLDLKTAHEAFNYNPYPSHSKDAFKHDSIADASTLRSTDSF

SEQ ID NO: 91763 - protein, 134 aa, Setaria italica
  Transcript Sequence Number=SeqID_25789
  Gene Ontology: Mol. function=transferase activity, transferring groups other than amino-acyl groups
  Homolog annotation: Hit_ID=Q33BH9; Match level="QueryCoverage=97%, HitCoverage=25%, E-value=2e-28, Identity=48%"; Hit description =Transferase family protein
YLIVCMKVTRFQCGGFAIGLRINHCIADGFGMIQFLRAVADVARGEAAPAVLPVWERHLLMARAPPSTGYVHRKLMLLLKDPPAAGAGATPPAASVVCRHFLFGPAEISALRGRVAGYDDLGASCTRFELLTAA

SEQ ID NO: 91764 - protein, 65 aa, Setaria italica
  Transcript Sequence Number=SeqID_25790
RRYYTLIHRCSFVAIGSYLHCSQLPAPHGSLVTLPCKMHLVAGAGALIVWMPLVLHANAFPFCFR

SEQ ID NO: 91765 - protein, 129 aa, Setaria italica
  Transcript Sequence Number=SeqID_25791
KSGKRRSKQRLLFDAVNEALAELTSMAELAAYPWGRSCSLEHRDCKNGSSNSVDEEIWRVIRNWSILEKYPPGEAIERNLLLEMILKREVAEAASADTARLEIFKLGAAVCSMVLEDLVEETLLDLTNN

SEQ ID NO: 91766 - protein, 157 aa, Setaria italica
  Transcript Sequence Number=SeqID_25792
ISNLVLGRIDMQEMDKEKHGKYNDRRRQQQQQVATTDGDTMRFLGRVHHPLFADPFPRQKPRHHQLSCPSRYVPIRPSILLPQVTARRWPMGRRSHAANVPDPSPHMQWGLWGVPPLLAAPGVGCVRCIPYSRLVSSHLFHHATVAARLASASAASN

SEQ ID NO: 91767 - protein, 68 aa, Setaria italica
  Transcript Sequence Number=SeqID_25793
MRKPTRRSSLVKKGSGGRTTAVLLAKQELVLGHGGGVDAFDRLPDDLVLAVLAGVAACAAGPADLAAA

SEQ ID NO: 91768 - protein, 104 aa, Setaria italica
  Transcript Sequence Number=SeqID_25794
MVFVSASSAALLSGEILGRRLLHPLPSRAHWLLFPLPCAIKLVRAPRRRRVLNRTVPRRGVREGGEDTIQPYNGGCRPAAPEGALVALRYLLMPKCCSLPFLQF

SEQ ID NO: 91769 - protein, 85 aa, Setaria italica
  misc_feature (60)..(60): Xaa can be any naturally occurring amino acid
  Transcript Sequence Number=SeqID_25795
  Gene Ontology: Mol. function=DNA binding; Cellular component=nucleus; Biological process=regulation of transcription
  Homolog annotation: Hit_ID=A8CCM9; Match level="QueryCoverage=81%, HitCoverage=22%, E-value=3e-34, Identity=91%"; Hit description=MYB -related transcription factor
  Pfam annotation: Domain name=Myb_DNA-binding; Domain location=30-78; Score=43.1; E_value=1.1e-09; Accession=PF00249.23; Description=Myb -like DNA-binding domain
PAAPRRSIYINLGFSGMGRQPCCDKLGVKRGPWTAEEDRKLINFILSNGHCCWRAVPKLXAGLLRCGKSCRLRWTNYLRPDLKRG

SEQ ID NO: 91770 - protein, 87 aa, Setaria italica
  Transcript Sequence Number=SeqID_25796
  Subcellular localization annotation: CTP_CleavageSite=42; ConfidenceScore=5.30e-01
PCPFVPNKLALGAVVGKLVAGVRTHTGSRSHACTSCCTLITRNQEVASVVSACDCNTGSPHQLTTTTDGLQQEVLSQITGNTQHPGN

SEQ ID NO: 91771 - protein, 105 aa, Setaria italica
  misc_feature (79)..(79): Xaa can be any naturally occurring amino acid
  Transcript Sequence Number=SeqID_25797
  Gene Ontology: Mol. function=acetolactate synthase activity; Biological process=branched chain family amino acid biosynthetic process
  Homolog annotation: Hit_ID=B6TXK4; Match level="QueryCoverage=93%, HitCoverage=19%, E-value=6e-43, Identity=89%"; Hit description =Acetolactate synthase/ amino acid binding protein
AASYPDLIEALPKNPLTSVNRTVNGSLDQPSNAGGDVYPVEPYESLSMNQVLDAHWGVLDDDDDSTGLRSHTLSILVNXDCTGVLNIVTGVFARRGYNNNKKTLD

SEQ ID NO: 91772 - protein, 279 aa, Setaria italica
  Transcript Sequence Number=SeqID_25798
  Gene Ontology: Mol. function=acetolactate synthase activity; Cellular component=chloroplast; Biological process=branched chain family amino acid biosynthetic process
  Homolog annotation: Hit_ID=B6TXK4; Match level="QueryCoverage=100%, HitCoverage=84%, E-value=1e-148, Identity=75%"; Hit description =Acetolactate synthase/ amino acid binding protein
  Pfam annotation: Domain name=ACT; Domain location=110-176; Score =45.6; E_value=1.9e-10; Accession=PF01842.17; Description=ACT domain
  Pfam annotation: Domain name=ALS_ss_C; Domain location=190-264; Score= 139.8; E_value=8.7e-39; Accession=PF10369.1; Description=Small subunit of acetolactate synthase
  Pfam module annotation: Pfam domain module=ACT::ALS_ss_C; Domain location=110-176::190-264
IAAVQRNLRKFGIKEICRTGKIALRREKIGATARFWRFSAASYPDLIEALPKNPLTSVNRTVNGSLDQPSNAGGDVYPVEPYESLSMNQVLDAHWGVLDDDDDSTGLRSHTLSILVNDCPGVLNIVTGVFARRGYNIQSLAVGPAEKEGISRITTVVPGTNESIEKLVQQLYKLIDVHEVHDITHLPFSERELMLIKVSVNTAARREILDIAEIFRAKPVDVSDHTVTLQLSGDLNKMVALQRLLEHYGICEVARTGRVALVRESGVDSKYLRGFSLPL

SEQ ID NO: 91773 - protein, 266 aa, Setaria italica
  misc_feature (221)..(221): Xaa can be any naturally occurring amino acid
  Transcript Sequence Number=SeqID_25799
  Gene Ontology: Mol. function=acetolactate synthase activity; Cellular component=chloroplast; Biological process=branched chain family amino acid biosynthetic process
  Homolog annotation: Hit_ID=B6TXK4; Match level="QueryCoverage=84%, HitCoverage=81%, E-value=1e-114, Identity=73%"; Hit description =Acetolactate synthase/ amino acid binding protein
  Pfam annotation: Domain name=ACT; Domain location=17-81; Score=48.9; E_value=2e-11; Accession=PF01842.17; Description=ACT domain
  Pfam annotation: Domain name=ALS_ss_C; Domain location=95-169; Score =140.2; E_value=6.5e-39; Accession=PF10369.1; Description=Small subunit of acetolactate synthase
  Pfam module annotation: Pfam domain module=ACT::ALS_ss_C; Domain location=17-81::95-169
TAVAPAAAAARDKVRRHTISVFVGDESGMINRIAGVFARRGYNIESLAVGLNKDKALFTIVVSGTDKVLNQVIEQLNKLVNVLSVEDLSKEPQVERELMLIKLNVKPDQRPEVMVLVDIFRAKVVDISDTTLTLEVAGDPGKIAAVQRNLRKFGIKEICRTGKIALRREKIGATARFWRFSAASYPDLIEALPKNPLTSVNRTVNGSLDQPSNAGGVIVSXEPYESLSMHQVLDFSLSSSMMMVNVLSVEDLSKEPQVERELTFSL

SEQ ID NO: 91774 - protein, 159 aa, Setaria italica
  Transcript Sequence Number=SeqID_25800
  Gene Ontology: Mol. function=protein binding; Cellular component =integral to membrane; Biological process=auxin mediated signaling pathway
  Homolog annotation: Hit_ID=Q651V6; Match level="QueryCoverage=99%, HitCoverage=25%, E-value=5e-62, Identity=77%"; Hit description =Probable auxin efflux carrier component 2
FLFEYRGAKALISEQFPPDVGASIASFRVDSDVVSLNGREALQADAEVGSDGRVHVVIRRSASASTTGHGAARSGVGGYRPYGASSAMTPRASNLTGVEIYSLQTSREPTPRGSSFNQSDFYAMFNGSKMASPLAQPGSGARAPGLDEQVANKFASGKQ

SEQ ID NO: 91775 - protein, 31 aa, Setaria italica
  Transcript Sequence Number=SeqID_25801
EEAMCQAHLIPLHKLKLCVHQFGHNFSLCLE

SEQ ID NO: 91776 - protein, 123 aa, Setaria italica
  misc_feature (22)..(22): Xaa can be any naturally occurring amino acid
  Transcript Sequence Number=SeqID_25802
  Gene Ontology: Mol. function=DNA binding
  Homolog annotation: Hit_ID=Q9SAC1; Match level="QueryCoverage=57%, HitCoverage=25%, E-value=2e-10, Identity=45%"; Hit description =T16B5.4
MMMASAFMPRNTRHNNGFLSGXVDSQIDCEMLNILEENARLLNQIEINILTSQAQNNIDLFHHTRRNINGLLQSMSQIPGIMSKMPPLPVSVDERLASCILPRSPMVNFCFDHDQQDCNPRMH

SEQ ID NO: 91777 - protein, 72 aa, Setaria italica
  Transcript Sequence Number=SeqID_25803
  Subcellular localization annotation: CTP_CleavageSite=66; ConfidenceScore=5.58e-01
EYLVRTILDNRPKRKFTTTPNFTLTNVSSSFRTTLVSSQPPLNLSPKMRKLLKQILQFHCDTAQISSTTRAP

SEQ ID NO: 91778 - protein, 37 aa, Setaria italica
  Transcript Sequence Number=SeqID_25804
PPLPVSVDERLASCILPRSPMAQVLGSSHLKEEPRVW

SEQ ID NO: 91779 - protein, 49 aa, Setaria italica
  misc_feature (17)..(17): Xaa can be any naturally occurring amino acid
  Transcript Sequence Number=SeqID_25805
VSIQLDNTFQAQNNIDXFHHTRRNINGLLQSMSQIPGIMSKMPPLPVSV

SEQ ID NO: 91780 - protein, 79 aa, Setaria italica
  Transcript Sequence Number=SeqID_25806
RARLHMNYTRYTQKVDYLVVTDKKAKLFLLIIHIRFSFYATPLLTSITRTKPKKESICATKVRKTAYYRKLALSQILNH

SEQ ID NO: 91781 - protein, 296 aa, Setaria italica
  Transcript Sequence Number=SeqID_25807
  Gene Ontology: Mol. function=DNA binding
  Homolog annotation: Hit_ID=O22705; Match level="QueryCoverage=81%, HitCoverage=92%, E-value=3e-35, Identity=38%"; Hit description =F8A5.19 protein
  Subcellular localization annotation: CTP_CleavageSite=71; ConfidenceScore=5.78e-01
MQMSTDPNHFGVFPHSFCNQHVVSFQTSSITSGSGAMPVCLDTSSGMNGNMAMLNTTSSTIVSTGSPNMTSDSSGQSLKYSTPMAVEWSYPELQMLNDGLIKYANEPGIMKYIKIAAMLPDKTVRDVAMRCQWMAARKEATRRRKPEEHYLGKKIKDRKDKMAEPSSWVTNPPVQTDMRASAFMPRNTRHNNGFLSGDSQIDCEMLNILEENARLLNQIEINILTSQAQNNIDLFHHTRRNINGLLQSMSQIPGIMSKMPPLPVSVDERLASCILPRSPMAQVLGSSHLKEEPRVW

SEQ ID NO: 91782 - protein, 135 aa, Setaria italica
  Transcript Sequence Number=SeqID_25808
AECFWKNTCKDNEIKEDLTLYGFILMAILTFVLLLVYNCSGLFITIQVKISSRARKKAAKKENKSAAARERWKLAKELVLRHEVEMPGSINTPEKSARAMKINNDKLTFSGVVSLATEDRPQRPMLEVAFRGLTL

SEQ ID NO: 91783 - protein, 100 aa, Setaria italica
  Transcript Sequence Number=SeqID_25809
  Gene Ontology: Mol. function=oxidoreductase activity; Biological process=oxidation reduction
  Homolog annotation: Hit_ID=Q7XC87; Match level="QueryCoverage=100%, HitCoverage=23%, E-value=4e-40, Identity=76%"; Hit description =Oxidoreductase, 2OG-Fe oxygenase family protein
LETKKAYSQLPNSLEGYGQVFVMSEKQKLDWADMFYLVARPNEARDMRFWPAHPSSFRTSIDRYSSETAEVARCLLEFMAKDMGADSASLLQMFQGQPQG

SEQ ID NO: 91784 - protein, 218 aa, Setaria italica
  misc_feature (10)..(10): Xaa can be any naturally occurring amino acid
  misc_feature (26)..(26): Xaa can be any naturally occurring amino acid
  misc_feature (209)..(209): Xaa can be any naturally occurring amino acid
  Transcript Sequence Number=SeqID_25810
RGFIHAVYMXFFLVFLVNHSIDKRLXQILVLFCEVHFSILYILQLELVSSALERSGSLTMEVLSQLGLSNNATTKDFVGIGSIVCFCAVHSHGFKMLFSLSAVLRHTPSPPVGFTILKAGLNKSVLLSVYSSQNSRNDEDRRNSHEKKIASYLSKIGQKFLSVYRSYGTYVAFLTILLTLYLVTPNYISFGYLFFLLFWIIGRQLVEKXKRRLWFPLK

SEQ ID NO: 91785 - protein, 44 aa, Setaria italica
  Transcript Sequence Number=SeqID_25811
SVWIILLHQPINNSTPMNNKNQTDTRDILSILHTELTDRSCLFM

SEQ ID NO: 91786 - protein, 167 aa, Setaria italica
  Transcript Sequence Number=SeqID_25812
  Gene Ontology: Mol. function=aldehyde dehydrogenase [NAD(P)+] activity; Cellular component=chloroplast; Biological process =cellular aldehyde metabolic process
  Homolog annotation: Hit_ID=Q53P72; Match level="QueryCoverage=98%, HitCoverage=33%, E-value=5e-77, Identity=81%"; Hit description =Aldehyde dehydrogenase, putative
VGIAVGKWGCNSGQACIAPDYIITTKSFAPELVDSLKRVLERFYGKDPLESGDLSRIVNSKHFQRLTELVEEKKVADKIVYGGQTDEKKLKIAPTILLDVPQDTALMTGEIFGPYLPIVTVEKIEESIDYVNSKTKPLAAYLFTKNKKLQQDFVENVPAGGMLVNDV

SEQ ID NO: 91787 - protein, 140 aa, Setaria italica
  misc_feature (97)..(97): Xaa can be any naturally occurring amino acid
  Transcript Sequence Number=SeqID_25813
  Gene Ontology: Mol. function=aldehyde dehydrogenase [NAD(P)+] activity; Cellular component=chloroplast; Biological process =cellular aldehyde metabolic process
  Homolog annotation: Hit_ID=B6SXW4; Match level="QueryCoverage=86%, HitCoverage=24%, E-value=2e-55, Identity=84%"; Hit description =Aldehyde dehydrogenase, dimeric NADP-preferring
GPLTLPIVTVEKIEESIDYVNSKTKPLAAYLFTKNKKLQQDFVENVPAGGMLVNDVALHLTNPYLPFGGVGDSGTGCYHGKFSFDCFSHKKAVLIRXGFGGEAAARYPPYTPEKQKILRGLNQTDKTYNTTLQYLGASLG

SEQ ID NO: 91788 - protein, 557 aa, Setaria italica
  misc_feature (229)..(229): Xaa can be any naturally occurring amino acid
  Transcript Sequence Number=SeqID_25814
  Gene Ontology: Mol. function=aldehyde dehydrogenase [NAD(P)+] activity; Cellular component=chloroplast; Biological process =cellular aldehyde metabolic process
  Homolog annotation: Hit_ID=B6SXW4; Match level="QueryCoverage=85%, HitCoverage=98%, E-value=0.0, Identity=82%"; Hit description =Aldehyde dehydrogenase, dimeric NADP-preferring
  Pfam annotation: Domain name=Aldedh; Domain location=2-456; Score =200.5; E_value=4.5e-57; Accession=PF00171.14; Description=Aldehyde dehydrogenase family
ALLSPLPGREGGEERTRGRGTKGGMAAETVRDLRASFAAGRTRPAQWRAAQLKGIVKMIDEKEADITAALHDDLAKPHMESYLHEISLAKSSCKFALNGIKSWMKPEKVPASITTFPSSAQIVPEPLGVVLIISAWNYPFLLSIDPVIGAIAAGNAVVLKPSEIAPATSAMFAKLLPEYVDSTCIKVVEGGVTETTALLEQRWDKIFYTGSGTVGRIVLAAAAKHLTPXVALELGGKCPVIVDSDVDLHVAVKRIAVGKWGCNSGQACIAPDYIITTKSFAPELVDSLKRVLERFYGKDPLESGDLSRIVNSKHFQRLTELVEEKKVADKIVYGGQTDEKKLKIAPTILLDVPQDTALMTGEIFGPYLPIVTVEKIEESIDYVNSKTKPLAAYLFTKNKKLQQDFVENVPAGGMLVNDVALHLTNPYLPFGGVGDSGTGCYHGKFSFDCFSHKKAVLIRSFGGEAAARYPPYTPEKQKILRGLINGSFIALILALLGFPRGEALDDDRPSRFSTGSCSCSSGAEYTTTTLSNTQLYNAVYCRIRMCVIELYLKELHE

SEQ ID NO: 91789 - protein, 65 aa, Setaria italica
  Transcript Sequence Number=SeqID_25815
  Gene Ontology: Mol. function=protein kinase activity; Cellular component=integral to membrane; Biological process=protein amino acid phosphorylation
  Homolog annotation: Hit_ID=Q84MU6; Match level="QueryCoverage=100%, HitCoverage=8%, E-value=1e-26, Identity=87%"; Hit description =Leucine-rich repeat transmembrane protein kinase 1, putative, expressed
IAKLNHPNLSELDGYCSEHGQCLLAYEFYKNGSLHDILHLSDGNSRSLSWNSRVKIALGSARALE

SEQ ID NO: 91790 - protein, 230 aa, Setaria italica
  misc_feature (214)..(214): Xaa can be any naturally occurring amino acid
  Transcript Sequence Number=SeqID_25816
  Gene Ontology: Mol. function=protein kinase activity; Cellular component=integral to membrane; Biological process=protein amino acid phosphorylation
  Homolog annotation: Hit_ID=Q84MU6; Match level="QueryCoverage=98%, HitCoverage=30%, E-value=1e-113, Identity=86%"; Hit description =Leucine-rich repeat transmembrane protein kinase 1, putative, expressed
  Pfam annotation: Domain name=Pkinase; Domain location=1-199; Score= -42.4; E_value=5.7e-06; Accession=PF00069.17; Description=Protein kinase domain
  Pfam annotation: Domain name=Pkinase_Tyr; Domain location=1-199; Score=-73.8; E_value=8e-09; Accession=PF07714.9; Description=Protein tyrosine kinase
  Pfam module annotation: Pfam domain module=Pkinase::Pkinase_Tyr; Domain location=1-199::1-199
MGKLYLKDGSLHDILHLSDGNSRSLSWNSRVKIALGSARALEYLHETCSPSIIHKNFKSSNILLDDELNPHISDCGFADLIPNQELQESDDNSGYRAPEVTMSGQYSQKSDVYSFGVVMLELLTGRKAFDSSQPRSQQSLVRWATLQLHDIDSLDQMVDPALEGLYPAKSLSRFADAIALCVQPEPEFRPPMSEVVQSLVRLVQRSSMGAGLAXSERNSCRFDDSGDHTF

SEQ ID NO: 91791 - protein, 368 aa, Setaria italica
  Transcript Sequence Number=SeqID_25817
  Gene Ontology: Mol. function=protein kinase activity; Cellular component=integral to membrane; Biological process=protein amino acid phosphorylation
  Homolog annotation: Hit_ID=Q84MU6; Match level="QueryCoverage=81%, HitCoverage=40%, E-value=1e-131, Identity=77%"; Hit description =Leucine-rich repeat transmembrane protein kinase 1, putative, expressed
  Pfam annotation: Domain name=Pkinase; Domain location=129-359; Score=- 12.1; E_value=9.1e-08; Accession=PF00069.17; Description=Protein kinase domain
  Pfam annotation: Domain name=Pkinase_Tyr; Domain location=129-364; Score=-62.8; E_value=1.5e-09; Accession=PF07714.9; Description =Protein tyrosine kinase
  Pfam module annotation: Pfam domain module=Pkinase::Pkinase_Tyr; Domain location=129-359::129-364
KLQSTSAAVAGIVISLVVVGALVGFFLIKRKSMRHQQGGDPEKNEHLSPLASGKIKQLRPIRSILLSPTGKELKKNVSMNLKPPSKIELHKSFNENDPTNKPVAKKVNLSSIRATAYTVTDLQVATESFSAYNLVGEGSFGRVYRAQLSDQKVLAVKKINFSAIPDHPSDFFIKLVANIAKLNHPNLSELDGYCSEHGQCLLAYEFYKNGSLHDILHLSDGNSRSLSWNSRVKIALGSARALEYLHETCSPSIIHKNFKSSNILLDDELNPHISDCGFADLIPNQELQESDDNSGYRAPEVTMSGQLLLKVVVLFLLSSFWSERSQPMHLQPPVISQSLQLQHWLLGALPPLPPLPVSFLVDGLTCLL

SEQ ID NO: 91792 - protein, 72 aa, Setaria italica
  misc_feature (60)..(60): Xaa can be any naturally occurring amino acid
  Transcript Sequence Number=SeqID_25818
  Homolog annotation: Hit_ID=B6TXR4; Match level="QueryCoverage=98%, HitCoverage=18%, E-value=1e-16, Identity=67%"; Hit description=BHLH transcription factor
MQPSGREMQGGGGGQDDFFDQMLSTLPTAWSELGSGKSPWELPAGASEDPAAFDESALLXASRLRHHQIGGD

SEQ ID NO: 91793 - protein, 44 aa, Setaria italica
  Transcript Sequence Number=SeqID_25819
HCYELVCPHTCPRWLPNIVFNRTKWLFLLDETLNLLHQWVSIWQ

SEQ ID NO: 91794 - protein, 620 aa, Setaria italica
  misc_feature (14)..(14): Xaa can be any naturally occurring amino acid
  Transcript Sequence Number=SeqID_25820
  Gene Ontology: Mol. function=binding; Cellular component=membrane; Biological process=regulation of synapse organization and biogenesis
  Homolog annotation: Hit_ID=Q10D20; Match level="QueryCoverage=97%, HitCoverage=16%, E-value=0.0, Identity=91%"; Hit description=WD-40 repeat family protein, putative, expressed
  Pfam annotation: Domain name=Beach; Domain location=468-619; Score =207.0; E_value=5.1e-59; Accession=PF02138.10; Description=BeigeBEACH domain
GMEVRRRKEMGRKXRESVKLDVRHWEQINERRYNLDLVRDVMSTELRAIRQDKYGWILHGESEWQSQLQELVHERGIFPMRQSSTEPAWLLCAVEGPYRMRKKLEHSKFKIDTIQNVLTSNLGFDDAKMTSKEDGDLLMTSGSDTMSGLNLLDYGTEQKDLDAAEFASFKDDDDIFKGGSTISAPIGWTDDKSSINEQSLHSATEFGAKSSSLSFHMTESHHGKSELSSPRRAPSVKGTDAKTSEDKSEKELLDNGEYLIRPYLEPYEKIRHKYNCERVAGLDKRDGIFLIGELCLYIIENFYIDDSNCICEKSSEDELSVIDQALGVNKDIMGSSESQLKSPSTWGATAKVGLGGRAWAYNGGAWGKEKLCSSSNLPHPWHMWKLDSVHELLKRDYQLRPVAIEIFSMDGCNELLVFHKKEREEVFRNLIAMNLPRNSMLDTTISASSKQDSGEGSRLFKVMAKSFSKRWQSGEITNFQYLMHLNTLAGRGYSDLTQYPVFPWVLADYESDTLDLRNPQTFRKLDKPMGCQTEEGEDEFRKRYDSWDDPDVPKFHYGSHYSSAGIVLFYLLRLPPFSTENQKLQGGQFDHADRLFNSVKDTWVSAAGKSNTSDVKELIL

SEQ ID NO: 91795 - protein, 537 aa, Setaria italica
  Transcript Sequence Number=SeqID_25821
  Gene Ontology: Mol. function=binding; Cellular component=cytoplasm; Biological process=regulation of synapse organization and biogenesis
  Homolog annotation: Hit_ID=Q10D20; Match level="QueryCoverage=99%, HitCoverage=14%, E-value=0.0, Identity=93%"; Hit description=WD-40 repeat family protein, putative, expressed
  Pfam annotation: Domain name=Beach; Domain location=1-203; Score =376.0; E_value=6.9e-110; Accession=PF02138.10; Description =BeigeBEACH domain
  Pfam annotation: Domain name=WD40; Domain location=280-317; Score =15.8; E_value=0.18; Accession=PF00400.24; Description=WD domain, G -beta repeat
  Pfam annotation: Domain name=WD40; Domain location=327-365; Score =38.0; E_value=3.8e-08; Accession=PF00400.24; Description=WD domain, G-beta repeat
  Pfam annotation: Domain name=WD40; Domain location=412-455; Score =2.6; E_value=19; Accession=PF00400.24; Description=WD domain, G-beta repeat
  Pfam annotation: Domain name=WD40; Domain location=490-528; Score =20.8; E_value=0.0058; Accession=PF00400.24; Description=WD domain, G- beta repeat
  Pfam module annotation: Pfam domain module=Beach::WD40::WD40::WD40::WD 40; Domain location=1-203::280-317::327-365::412-455::490-528
DWDDPDVPKFHYGSHYSSAGIVLFYLLRLPPFSTENQKLQGGQFDHADRLFNSVKDTWVSAAGKSNTSDVKELIPEFYYLPEFLENRFNLDLGEKQSGEKVGDVVLPPWAKGSTREFIRKHREALESDYVSENLHHWIDLIFGYKQRGKAAEDAVNVFYHYTYEGNVDIDAVSDPTMKASILAQINHFGQTPKQLFQKPHPQRRTDRKVPPHPLRYSAYLTQQEIRKTASSVSQIVSYNDKILIAAANSLLKPIAYSEYISWGFPDRSLRILTYDQDRLLSTHENLHGGSQIQCTGVSHDGNILTTGGDDGVVAVWRFVKDGIRRLLRMEKALCAHTGKITCVYVSQPYSLIVSGSDDCSVILWDLTSLVFVKQLPRFPASVSALHVNNLTGEILTGAGVLFAVWSINGDCLAVVNTSQLPSDLILSVASTTHSDWQDTNWYVTGHQSGAVKVWKMVHCSSDEAVNSKSKSPAIPSGGLSLNGQTPEYRLLLQKVLKSHKHPVTALCIPPDLKQLLSGDASGHLLSWSLKDDSFKGS

SEQ ID NO: 91796 - protein, 119 aa, Setaria italica
  Transcript Sequence Number=SeqID_25822
  Homolog annotation: Hit_ID=B6SXQ6; Match level="QueryCoverage=76%, HitCoverage=12%, E-value=1e-12, Identity=52%"; Hit description =ATPase, coupled to transmembrane movement of substances
MVVCRDISWVQAHGCVTRSSNRAGINLQMEDDGSGELYLLSRFAPSSSSPAQLRGVERTMDPHKDLSSELDPALLMSASTSSSSPPDSASPSFSFSHPSPPHYTLAVNDLSCPAPRRRA

SEQ ID NO: 91797 - protein, 81 aa, Setaria italica
  misc_feature (48)..(49): Xaa can be any naturally occurring amino acid
  misc_feature (68)..(68): Xaa can be any naturally occurring amino acid
  Transcript Sequence Number=SeqID_25823
  Subcellular localization annotation: CTP_CleavageSite=50; ConfidenceScore=5.04e-01
MVGGCAGGDGAAEGTLARWRRAAAKRIGLSCASFFSYATAPSPPSSKXXSCSALNAPADSSDGEQQKXEQPTSTRVADKIM

SEQ ID NO: 91798 - protein, 52 aa, Setaria italica
  Transcript Sequence Number=SeqID_25824
EHELPPFPEVHLPPFPEVDLPPKPELPEVKLPPKPETPGVPEFHFPEPDAKP

SEQ ID NO: 91799 - protein, 153 aa, Setaria italica
  Transcript Sequence Number=SeqID_25825
  Gene Ontology: Mol. function=cytokinin dehydrogenase activity; Cellular component=extracellular region; Biological process =cytokinin metabolic process
  Homolog annotation: Hit_ID=B6V8F7; Match level="QueryCoverage=86%, HitCoverage=25%, E-value=5e-55, Identity=84%"; Hit description =Cytokinin dehydrogenase 10
  Pfam annotation: Domain name=FAD_binding_4; Domain location=1-140; Score=66.4; E_value=1e-16; Accession=PF01565.15; Description=FAD binding domain
DVASAIRAAARTAGLTVAARGNGHSVAGQAMAEGGLVLDMRALALSRRPQMQLVGCPGGGNNGPCYADVPGGALWEEVLHWGVKNHGLAPASWTDYLRLTVGGTLSNGGVSGQSFRYGPQVSNVAELEVVTGDGDCRVCSPSSHPDLFFAVLG

SEQ ID NO: 91800 - protein, 52 aa, Setaria italica
  Transcript Sequence Number=SeqID_25826
ENSELLQFADLESVILVPHAVSQETEVNMVSGSQCTNARLLLGRLNYKDKLF

SEQ ID NO: 91801 - protein, 73 aa, Setaria italica
  Transcript Sequence Number=SeqID_25827
TNKILYNIHKDQVNITVTCNASMLQQDPGQNIIGTCGATKATKTVCPYNLIGQVAIWHWCTESPKPCLLLSPD

SEQ ID NO: 91802 - protein, 156 aa, Setaria italica
  misc_feature (9)..(9): Xaa can be any naturally occurring amino acid
  Transcript Sequence Number=SeqID_25828
  Gene Ontology: Mol. function=electron carrier activity; Cellular component=endoplasmic reticulum membrane; Biological process =oxidation reduction
  Homolog annotation: Hit_ID=O48958; Match level="QueryCoverage=99%, HitCoverage=29%, E-value=6e-47, Identity=55%"; Hit description=4 -hydroxyphenylacetaldehyde oxime monooxygenase
MVDEEDVKXLRYLKMVVKENFRLHPPGTLLIPRETMQRCVIGGYDVLPGTRVFVNVWAMGRDPSIWDDPEEFRPERFEGSHVDFRGSDFELLPFGSGRRSCPAVAMGVANVELALANLLYCFDWELPQGMREEDIDMEETGQLVFRKMVPLCSSPS

SEQ ID NO: 91803 - protein, 115 aa, Setaria italica
  Transcript Sequence Number=SeqID_25829
  Subcellular localization annotation: CTP_CleavageSite=30; ConfidenceScore=5.52e-01
PKLNLVPPNLRGFAFCSGSFGGSWKTSTFSSSVGSDNSVCCYDLGQLCDTSSLRQRMGRIAETEGLDGVSLDCANLLNNGIDLFLKQLIGSCIELVRSRSQHDRINQMALKQRLS

SEQ ID NO: 91804 - protein, 81 aa, Setaria italica
  Transcript Sequence Number=SeqID_25830
LLWHLATDFCFHLHGTTSSCEAARRSREMSNYMAYLLFVNPEMLMPGARRSLFRAAYGKLADMLEENPRHTPRNEAGLAHK

SEQ ID NO: 91805 - protein, 58 aa, Setaria italica
  Transcript Sequence Number=SeqID_25831
PCVSLAVSLVSFFVHETATCATTEQRFTIKHTLKHQNIQGYTVTFVNKSISLQQGKEN

SEQ ID NO: 91806 - protein, 253 aa, Setaria italica
  Transcript Sequence Number=SeqID_25832
  Gene Ontology: Mol. function=peptidyl-prolyl cis-trans isomerase activity; Cellular component=chloroplast; Biological process=protein folding
  Homolog annotation: Hit_ID=B6TCE9; Match level="QueryCoverage=81%, HitCoverage=83%, E-value=1e-102, Identity=87%"; Hit description =Peptidyl-prolyl cis-trans isomerase
  Pfam annotation: Domain name=Pro_isomerase; Domain location=87-250; Score=388.8; E_value=9.7e-114; Accession=PF00160.13; Description =Cyclophilin type peptidyl-prolyl cis-tr
  Subcellular localization annotation: CTP_CleavageSite=70; ConfidenceScore=5.81e-01
MAAAATSFASLAIARPATAAAASGQRALLASKASSPPLSLRAARLPSQAVSFSGGLAPSPSHSRARFVTSASAEPKEADIQSKVTNKVYFDISIGNPVGKNVGRIVIGLFGDDVPQTAENFRALCTGEKGFGYKGSSFHRVIKDFMIQGGDFDKGNGTGGKSIYGRTFKDENFKLVHTGPGVVSMANAGPNTNGSQFFICTVKTPWLDGRHVVFGQVLEGMDIVRLIESSETDRGDRPKKKVVISECGELPVV

SEQ ID NO: 91807 - protein, 199 aa, Setaria italica
  Transcript Sequence Number=SeqID_25833
  Gene Ontology: Mol. function=tRNA binding; Cellular component =chloroplast; Biological process=tRNA aminoacylation for protein translation
  Homolog annotation: Hit_ID=B6TMN2; Match level="QueryCoverage=90%, HitCoverage=67%, E-value=1e-92, Identity=90%"; Hit description =Multisynthetase complex auxiliary component p43
  Pfam annotation: Domain name=tRNA_bind; Domain location=37-132; Score= 173.9; E_value=4.7e-49; Accession=PF01588.12; Description=Putative tRNA binding domain
VAPPPTQTAAEEAKPAAPGGDEKAEPTVEELAGLLDIRVGRVVKAWRHPEADTLYVEEVDVGEAEPRTICSGLVNFLPIEELQDSSVIVLANLKPRNMRGIKSNGMLMAASDASHENVELLTPPEGSVPGERVWFGSEEEKDRQSEPASPNQIQKKKIWESVQPHLKTTDNCVAVLGEHPMRTSAGSVFCKSLQGARVS

SEQ ID NO: 91808 - protein, 176 aa, Setaria italica
  Transcript Sequence Number=SeqID_25834
  Gene Ontology: Mol. function=electron carrier activity; Biological process=oxidation reduction
  Homolog annotation: Hit_ID=B6SY23; Match level="QueryCoverage=99%, HitCoverage=32%, E-value=7e-32, Identity=50%"; Hit description =Cytochrome P450 CYP78A54
MVATPDDCGSWLLYLSLAAKCGGDQPYRLAGFLAVCAAACVVTCLLHWCFPGGPAWGRWRWTRRAGGAAGIPGPRGLPVIGSMWLMTGLTHRKLAAAADRLRARRLMAFSLGETRMVVAAHPEVAREILNSPAFADRPVKESAYGLLFHRAIGFAPHGTYWRALRRVASTHLFLPV

SEQ ID NO: 91809 - protein, 170 aa, Setaria italica
  misc_feature (31)..(31): Xaa can be any naturally occurring amino acid
  misc_feature (136)..(136): Xaa can be any naturally occurring amino acid
  Transcript Sequence Number=SeqID_25835
  Gene Ontology: Mol. function=DNA binding; Cellular component=nucleus
  Homolog annotation: Hit_ID=B2BXT1; Match level="QueryCoverage=61%, HitCoverage=25%, E-value=2e-19, Identity=41%"; Hit description=Myb -transcription factor
  Pfam annotation: Domain name=Myb_DNA-binding; Domain location=88-133; Score=40.2; E_value=7.9e-09; Accession=PF00249.23; Description=Myb -like DNA-binding domain
LETPREEIDPMKLSAAHLRLLQEAREHVNAXKELPSVPSSNTRFQLEDMDDLDCIHEEARNFDNDKTENHIQNVTKLNYNSYMNIQTRAKWSKSDTDLFYQGLQQFGSDFAMIQQLLPAKTRHQVRAKFKNEEKKXPLQVHDAIIHRSGDYLYFKKVIEQLNIEDELPEI

SEQ ID NO: 91810 - protein, 220 aa, Setaria italica
  misc_feature (12)..(12): Xaa can be any naturally occurring amino acid
  Transcript Sequence Number=SeqID_25836
  Gene Ontology: Mol. function=DNA binding
MKLRCREKLQKXGTPKHTGVDCFDEACVEHSLVEEDNDSGENNIAGVKKKFTKKPRAGVEEPQQQEVQKDKSQVSSGGWNTTLKDALVQKPEKKLTHRIHQKRMKEVKTLLETPREEIDPMKLSAAHLRLLQEAREHVNAKELPSVPSSNTRFQLEDMDDLDCIHEEARNFDNDKTENHIQNVTKLNYNSYMNIQTRAKWSKSDTDLFYQGLQQFGSDLQ

SEQ ID NO: 91811 - protein, 133 aa, Setaria italica
  Transcript Sequence Number=SeqID_25837
RCARLLYCRRLVNRISLLTVIKWFYQITTPLLCYLKGHLPLHYLVVLVYYSDEQLLIIVYESSIISWHTHPCEWRVEVEETNRKVREDAAHQSYPPLSLLPFHLFLCLLWFTSKQQALHSPKNINTCLCNWIT

SEQ ID NO: 91812 - protein, 37 aa, Setaria italica
  Transcript Sequence Number=SeqID_25838
  Homolog annotation: Hit_ID=B6TR61; Match level="QueryCoverage=100%, HitCoverage=14%, E-value=1e-09, Identity=81%"; Hit description =MTA/SAH nucleosidase
KQTAEEFLQNLISVTAALDVAVTKMIDFISGKRITDL

SEQ ID NO: 91813 - protein, 138 aa, Setaria italica
  misc_feature (78)..(78): Xaa can be any naturally occurring amino acid
  Transcript Sequence Number=SeqID_25839
  Gene Ontology: Mol. function=catalytic activity; Cellular component =plasma membrane; Biological process=nucleoside metabolic process
  Homolog annotation: Hit_ID=A6MZS5; Match level="QueryCoverage=76%, HitCoverage=41%, E-value=6e-40, Identity=74%"; Hit description =Mta/sah nucleosidase (Fragment)
LVIRTILLVAYASIQALKPDLIINAGTAGGFKTKGASVGDVFLASDVAFHDRRIPIPVFDMYGVGARKTFAAPNILKXLNFKLGKLSTGDSLDMSPQDEEMILKNDATVKDMEVCILLKQSAYERIQAYSQKIVVMQT

SEQ ID NO: 91814 - protein, 263 aa, Setaria italica
  Transcript Sequence Number=SeqID_25840
  Gene Ontology: Mol. function=catalytic activity; Cellular component =plasma membrane; Biological process=nucleoside metabolic process
  Homolog annotation: Hit_ID=B6TR61; Match level="QueryCoverage=93%, HitCoverage=98%, E-value=1e-110, Identity=78%"; Hit description =MTA/SAH nucleosidase
  Pfam annotation: Domain name=PNP_UDP_1; Domain location=22-253; Score= 93.9; E_value=5.6e-25; Accession=PF01048.12; Description =Phosphorylase family
MAPPPPSEQPDAPAAGAGAISKVLIVMAMETEATPLVNKFRLVEAPAHESIFPKGATWTRFYGNYKDLHLDLVMPGKDVVFGVDSVGTVSASLVAYASIQALKPDLIINAGTAGGFKTKGASVGDVFLASDVAFHDRRIPIPVFDMYGVGARKTFAAPNILKELNFKLGKLSTGDSLDMSPQDEEMILKNDATVKDMEGAAVAYVADIFSTPAIFVKAVTDIVDGEKPTAEEFLQNLISVTAALDVAVTKMIDFISGKRITDL

SEQ ID NO: 91815 - protein, 392 aa, Setaria italica
  Transcript Sequence Number=SeqID_25841
  Gene Ontology: Mol. function=nucleotide binding; Cellular component =nucleus; Biological process=DNA replication initiation
  Homolog annotation: Hit_ID=P43299; Match level="QueryCoverage=99%, HitCoverage=54%, E-value=0.0, Identity=80%"; Hit description=Protein PROLIFERA
  Pfam annotation: Domain name=AAA_3; Domain location=45-186; Score= -4.2; E_value=0.0011; Accession=PF07726.3; Description=ATPase family associated with various
  Pfam annotation: Domain name=AAA_5; Domain location=45-192; Score= -7.9; E_value=0.0043; Accession=PF07728.6; Description=ATPase family associated with various
  Pfam annotation: Domain name=MCM; Domain location=1-312; Score=627.3; E_value=1.5e-185; Accession=PF00493.15; Description=MCM235 family
  Pfam annotation: Domain name=Mg_chelatase; Domain location=11-196; Score=-131.0; E_value=0.0011; Accession=PF01078.13; Description =Magnesium chelatase, subunit ChlI
  Pfam module annotation: Pfam domain module=AAA_3::AAA_5::MCM::Mg _chelatase; Domain location=45-186::45-192::1-312::11-196
YSKLARSLAPEIFGHEDVKKALLLLLVGAPHRKLADGMKIRGDLHICLMGDPGVAKSQLLKHIINVAPRGVYTTGRGSSGVGLTAAVQKDPITSEFVLEGGALVLADMGICAIDEFDKMEESDRTAIHEVMEQQTVSIAKAGITTSLNARTAILAAANPAWGRYDMRRTPAENINLPPALLSRFDLLWLILDRADMESDLEMARHVVHVHQNLESPALGFTPLEPSVLRAYISAARRVIPSVPRELEEYIATAYSSIRQEEAKSNAPTSYTTIRTLLSILRISIALARLRFSDTVAQSDVDEALRLMQMSKYSLYSDDRQRSGLDAISDIYSILRDEAARTSSMDVRYAHALNLISRKGYSEAQLKECLEEYASLNVWQIHPNTFDIHFIDA

SEQ ID NO: 91816 - protein, 137 aa, Setaria italica
  Transcript Sequence Number=SeqID_25842
  Subcellular localization annotation: CTP_CleavageSite=37; ConfidenceScore=5.70e-01
PESRRGSPVPTSSPRGKAGVARRRTASGRRRHSPIFSAASSTSPRRPGTADHLRAGSEILGISRHGAGTTGLGSPASPCRLRAAAATADGKPWASEQREEGAKPIFWMRVFLQIFGSRLLIAIQIRGFYEKIKYIFT

SEQ ID NO: 91817 - protein, 151 aa, Setaria italica
  Transcript Sequence Number=SeqID_25843
  Gene Ontology: Mol. function=transferase activity, transferring glycosyl groups; Cellular component=integral to membrane; Biological process=cell wall organization and biogenesis
  Homolog annotation: Hit_ID=B6SWB6; Match level="QueryCoverage=100%, HitCoverage=17%, E-value=3e-85, Identity=91%"; Hit description=CSLF3- cellulose synthase-like family F; beta1,3;1,4 glucan synthase
QLIINFDCDHYINNSQALRSAVCFMLDQRDGDNTAFVQFPQRFDNVDPTDRYGNHNRVFFDGTMLALNGLQGPSYLGTGCMFRRLALYGIDPPHCRAENVTAEASRFGDSALFLDSVSEALKQERSATPPPLDDTFLTELERVVTCSFDKG

SEQ ID NO: 91818 - protein, 79 aa, Setaria italica
  Transcript Sequence Number=SeqID_25844
  Gene Ontology: Mol. function=molecular_function; Cellular component =extracellular region; Biological process=defense response
  Homolog annotation: Hit_ID=Q53MB8; Match level="QueryCoverage=100%, HitCoverage=31%, E-value=3e-23, Identity=72%"; Hit description =Thaumatin-like protein
  Pfam annotation: Domain name=Thaumatin; Domain location=1-79; Score= -69.7; E_value=0.0077; Accession=PF00314.9; Description=Thaumatin family
GRGSCATGDCGGVLRCDGRPGATPATVVEMTLGTPRSALHFYDVSLVDGFNAPVSMSPVGGGAGCGVAGCQADMNVCCP

SEQ ID NO: 91819 - protein, 168 aa, Setaria italica
  Transcript Sequence Number=SeqID_25845
ELRQRAMFSVGEEGAGEEGAPVGEAAAVNPPPRSSAAAALPAPFRVYVAIAAAAPRTLPQLRRCCLPFSYHADDAEPFHTCATAAFRFCVAATASNSRAAAAATYFSSCYMLLARAADVGLAFEVGDLGEEEKACSRRFCCHPRENPARAQGIRGAGDDSQRAVQRAA

SEQ ID NO: 91820 - protein, 108 aa, Setaria italica
  Transcript Sequence Number=SeqID_25846
  Gene Ontology: Cellular component=integral to membrane; Biological process=electron transport chain
  Homolog annotation: Hit_ID=Q8H112; Match level="QueryCoverage=100%, HitCoverage=33%, E-value=1e-34, Identity=64%"; Hit description=PGR5 -like protein 1A, chloroplastic
LFFFIDELTGFEINVFQLPEPFGFIFTWFAALPLILFLAQLLTKAIVQDFLILKGPCPNCGTENLSFFGTILSVSSGGTTNNVKCANCSTELVYDSKSRVITFPEPSN

SEQ ID NO: 91821 - protein, 308 aa, Setaria italica
  Transcript Sequence Number=SeqID_25847
  Gene Ontology: Cellular component=integral to membrane; Biological process=electron transport chain
  Homolog annotation: Hit_ID=Q8H112; Match level="QueryCoverage=80%, HitCoverage=76%, E-value=1e-103, Identity=72%"; Hit description=PGR5- like protein 1A, chloroplastic
  Subcellular localization annotation: CTP_CleavageSite=43; ConfidenceScore=5.50e-01
MASKVWLSPAASRLPSLATAPPRFRPVRALPVVLRRRRWRLLRATEQQQGQQVQEQDEVVDSNVLPYCSIDRKQKKTMGEMEQEFLQALQSFYYDQKAIMSNEEFDNLKEELMWEGSSVVMLSPDEQKLLEASMAYASGNPIMSDAEFDELKLKLKKDGSVIVTEGPRCSLRSRKVYSDLSVDYLKMFLLNVPATTVALGLFFFIDELTGFEINVFQLPEPFGFIFTWFAALPLILFLAQLLTKAIVQDFLILKGPCPNCGTENLSFFGTILSVSSGGTTNNVKCANCSTELVYDSKSRVITFPEPSN

SEQ ID NO: 91822 - protein, 92 aa, Setaria italica
  Transcript Sequence Number=SeqID_25848
EGGDANGGGILNTMASKIGMAMSGANGDEDHGGSGVNAKTGSSDAVDGSKDEEKRDEANGGGILIAVASKIGTDCVGLQWQWQPQHRGRCQD

SEQ ID NO: 91823 - protein, 146 aa, Setaria italica
  Transcript Sequence Number=SeqID_25849
ENTDVLDPSKEYLDLKSMSKTVEPSSSSNGGDSAVEKYHAEKTECLLGTESITPALDNVQGSSPLAEPSSSSNGGGEPAVEKNSTERTECLSGMETVTPALDNDQGSSTSTAKDCLVSDVDNSDEANRSGKHFLCTIENERGQLEV

SEQ ID NO: 91824 - protein, 42 aa, Setaria italica
  Transcript Sequence Number=SeqID_25850
GYYRINVSLPVLTMGWHQYSFLTKNELKLLHMIVTKHHWQLK

SEQ ID NO: 91825 - protein, 373 aa, Setaria italica
  Transcript Sequence Number=SeqID_25851
  Gene Ontology: Mol. function=protein serine/threonine phosphatase activity; Cellular component=protein serine/threonine phosphatase complex; Biological process=protein amino acid dephosphorylation
  Homolog annotation: Hit_ID=B4G0F7; Match level="QueryCoverage=100%, HitCoverage=99%, E-value=0.0, Identity=86%"; Hit description =Catalytic/ protein phosphatase type 2C
  Pfam annotation: Domain name=PP2C; Domain location=40-322; Score =117.5; E_value=4.3e-32; Accession=PF00481.13; Description=Protein phosphatase 2C
LGPLLRLLSGCGGVWPTSPAPGSASSGEDSEGRDGLLWWRDLARCHAGEVSVAVAQANQVLEDQCRLESAPPLGTVVGVFDGHGGYDAARFACDHLFPNLREASSGPGGVTANAIREAFLATEEGFLALVSRLWEAQPDIATAGTCCLVGVVHNRTLFVANLGDSRAVLGKKVGRTGQIAAEQLCSEHNANQEAVRQELVAQHPDDPQIVALKHGVWRVRGIIQVSRSIGDVYLKHAKYNTERIKPKFRLSEPFTKPLLSADPSIISRTLQPSDSFIIFASDGLWEHLSNQDAVEIVHSHQRAGSARRLIKAALQEAARKREMRYSDLTKIDKKVRRHFHDDITAIVLFINYDLLTKGAAQGQPLSIRCALDY

SEQ ID NO: 91826 - protein, 263 aa, Setaria italica
  Transcript Sequence Number=SeqID_25852
MASLLSSQIKLSNAFVRRKVHENGQASLPRSLRWKPLQSGHFENLVLRCAKNLCWESSLPYASVEDDASIIKGPNAIEPIDTEEAPEIPIFQSNEDVVEVKNEPSMQLTVFKLPMWLIGPSILLVTGIVPTLWLPLSSVFLGPNIAGLLSLVGLDFIFNMGAMLFFLMADACGRPENTIFDLKRQIPVSYRFWNLAASIAGFVAPFALFFASHRGTLQPQLSFIPFAVLLGPYLLLLSVQMLTEMLTWHWKIAGMVVAPVVMR

SEQ ID NO: 91827 - protein, 126 aa, Setaria italica
  Transcript Sequence Number=SeqID_25853
  Subcellular localization annotation: CTP_CleavageSite=94; ConfidenceScore=5.05e-01
SCSTLRYTEVQNEPCRPAGPAVGTNPGRFSLLAVRPPLLSSPPLFCSPPRSHGASVPKTLALSSPPPPPHLPATACSRFPHCGGGAQVHGAPPQARPARAPPHHRRAAPRVAFRRPALHVPQAAAS

SEQ ID NO: 91828 - protein, 119 aa, Setaria italica
  Transcript Sequence Number=SeqID_25854
  Gene Ontology: Mol. function=metal ion binding; Cellular component =plasma membrane
  Homolog annotation: Hit_ID=B6SVM4; Match level="QueryCoverage=100%, HitCoverage=16%, E-value=1e-27, Identity=56%"; Hit description =Protein binding protein
  Pfam annotation: Domain name=PHD; Domain location=64-115; Score=5.1; E_value=0.0073; Accession=PF00628.21; Description=PHD-finger
  Pfam annotation: Domain name=zf-C3HC4; Domain location=65-112; Score =30.2; E_value=8.4e-06; Accession=PF00097.17; Description=Zinc finger, C3HC4 type (RING finger)
  Pfam module annotation: Pfam domain module=PHD::zf-C3HC4; Domain location=64-115::65-112
  Subcellular localization annotation: CTP_CleavageSite=55; ConfidenceScore=5.53e-01
PTLRCRTKPLQQPAEAAPVTPPSAPAPARKHRMPLLQALSAPASPRSPSRFALLKASLLPSKARCGVCSRGVKSGGSSAVFTAECSHAFHFPCIAAHARSSSANGVLSCPVCAEPWRQA

SEQ ID NO: 91829 - protein, 434 aa, Setaria italica
  misc_feature (233)..(233): Xaa can be any naturally occurring amino acid
  misc_feature (408)..(408): Xaa can be any naturally occurring amino acid
  Transcript Sequence Number=SeqID_25855
  Gene Ontology: Mol. function=protein binding; Cellular component =membrane coat; Biological process=intracellular protein transport
  Homolog annotation: Hit_ID=Q9M2T1; Match level="QueryCoverage=99%, HitCoverage=39%, E-value=1e-114, Identity=53%"; Hit description =Adaptor protein/ adaptin-like (Fragment)
  Pfam annotation: Domain name=Adaptin_N; Domain location=1-431; Score=- 57.6; E_value=1.8e-06; Accession=PF01602.12; Description=Adaptin N terminal region
  Pfam annotation: Domain name=HEAT; Domain location=100-135; Score =6.7; E_value=7.5; Accession=PF02985.14; Description=HEAT repeat
  Pfam annotation: Domain name=HEAT; Domain location=356-389; Score =2.9; E_value=22; Accession=PF02985.14; Description=HEAT repeat
  Pfam annotation: Domain name=HEAT; Domain location=62-98; Score=24.1; E_value=0.00059; Accession=PF02985.14; Description=HEAT repeat
  Pfam module annotation: Pfam domain module=Adaptin_N::HEAT::HEAT::HEAT ; Domain location=1-431::100-135::356-389::62-98
VKNVASQSLEVKKLVYLYLLHYADKRQNEALLSINIFQKDLSDINPLVRAWALRTMAGIRLHVVAPLVLVAVKKCARDPSAYVRKCAAYALSKLCDLLPDQATTLQEIVDILFDDNSPGVVGAAAVAFKSVCPTCLPLLSKHFRRLCQTLPDIEEWTQIILIDILLRYVIARHGLVEDSLLSASNLSTEVQGITESGPVATMPTQPDSIGNGVCGTISNIMLFRHYIEEYSGXLDRQGNNSSFSSVTTNINDDVALLLKCTSPLLWSRNSGVILAAASVHWIMAPVGDLKRIIGPILFTLRSSPDAAYAMLGNILVFAKTMPSLFAPFYEDFFINASDPYQTRALKLEILTTIATEPSIPAIFEEFQDYIKDPDRKFVADTVAAIALCAQKLPSIATACLEGLLALVXFYESSICNSVHFDGEDAVLVQGNLVN

SEQ ID NO: 91830 - protein, 120 aa, Setaria italica
  Transcript Sequence Number=SeqID_25856
  Gene Ontology: Mol. function=protein dimerization activity; Cellular component=nucleus; Biological process=regulation of transcription, DNA-dependent
  Homolog annotation: Hit_ID=A3B9A0; Match level="QueryCoverage=98%, HitCoverage=11%, E-value=4e-48, Identity=79%"; Hit description=Auxin response factor 16
MKDPGSGGVTPSPAEGDKKPINSELWHACAGPLVSLPPVGSLVVYFPQGHSEQVAASMHKELDTIPSYPSLPSKLICKLLSLTLHADSETDEVYAQMTLQPVNKYDRDAMLASELGLETK

SEQ ID NO: 91831 - protein, 70 aa, Setaria italica
  Transcript Sequence Number=SeqID_25857
  Pfam annotation: Domain name=DUF623; Domain location=11-64; Score =83.0; E_value=1.1e-21; Accession=PF04844.5; Description=Protein of unknown function, DUF623
KNRNERKLTDGESMVQMVVEKEIYAWDDLNDLLHQFLSLNSPRHHPLILHAFADLWTRNGLFCPPSPCQF

SEQ ID NO: 91832 - protein, 94 aa, Setaria italica
  misc_feature (67)..(67): Xaa can be any naturally occurring amino acid
  Transcript Sequence Number=SeqID_25858
  Gene Ontology: Mol. function=drug transporter activity; Cellular component=membrane; Biological process=multidrug transport
  Homolog annotation: Hit_ID=B9T6V3; Match level="QueryCoverage=100%, HitCoverage=19%, E-value=4e-21, Identity=51%"; Hit description =Multidrug resistance pump, putative
  Subcellular localization annotation: CTP_CleavageSite=38; ConfidenceScore=5.19e-01
LAHLAGKMSVWLIPQHFAMAMQVPLTRFLQSQLKNWVTAATAGVTLVIHVVATYLLVQRFQLGIVGXVVAADLSWWLVALGQFLYVVGGGCPLS

SEQ ID NO: 91833 - protein, 138 aa, Setaria italica
  Transcript Sequence Number=SeqID_25859
  Gene Ontology: Mol. function=isomerase activity; Biological process =flavonoid biosynthetic process
  Homolog annotation: Hit_ID=B6U5H8; Match level="QueryCoverage=100%, HitCoverage=48%, E-value=7e-32, Identity=67%"; Hit description =Chalcone isomerase 3
LACRYTRGGARRLPVALAAGGSSVGDVFVTEGSTNVKFPQELIVPGYTGSLVILGTGYRDKFFVKVYAAAFYVDYSLGIDTAQWKEKIGIESFDSNSVFNSIFKAPVVKSLSIILVRDVYGKTFVNALNDVIARQTKN

SEQ ID NO: 91834 - protein, 179 aa, Setaria italica
  misc_feature (30)..(30): Xaa can be any naturally occurring amino acid
  Transcript Sequence Number=SeqID_25860
  Gene Ontology: Mol. function=isomerase activity; Biological process =flavonoid biosynthetic process
  Homolog annotation: Hit_ID=B6U5H8; Match level="QueryCoverage=92%, HitCoverage=69%, E-value=6e-67, Identity=79%"; Hit description =Chalcone isomerase 3
VGDVFVTEGSTNVKFPQELIVPGYTGSLVXLAQWKEKIGIESFDSNSVFNSIFKAPVVKSLSIILVRDVYGKTFVNALNDVIARQIKNPNAEEASSLSTFQNTFLGRNLKQGTSIYLTWLEPSRMLISISENQDLSQVDAEIKSATVNYALYDGFFGNSPVSPSLRSSTAQLLEALLTK

SEQ ID NO: 91835 - protein, 76 aa, Setaria italica
  Transcript Sequence Number=SeqID_25861
  Gene Ontology: Mol. function=binding
  Homolog annotation: Hit_ID=Q2R9P0; Match level="QueryCoverage=63%, HitCoverage=2%, E-value=1e-11, Identity=75%"; Hit description =Armadillo/beta-catenin-like repeat family protein, expressed
MANFNSSEHQDSQEPMSPSPSTSSSISREKGDLAEVDDPESAMSTVARLLEDLHASTVSPSEKETTTRRLLELAKA

SEQ ID NO: 91836 - protein, 95 aa, Setaria italica
  Transcript Sequence Number=SeqID_25862
  Gene Ontology: Mol. function=catalytic activity; Cellular component =membrane; Biological process=plant-type hypersensitive response
  Homolog annotation: Hit_ID=B4FH50; Match level="QueryCoverage=89%, HitCoverage=27%, E-value=5e-23, Identity=63%"; Hit description=Lipid phosphate phosphatase 3
TYNLYGSPLLWKDVFVGGLIGSIMAVLCYLHFFPPPYHDQGWGPYAYFQMLEELQAAHSSNAQNQQSAATGGQHIALSRQEHDRKSINDLESGSV

SEQ ID NO: 91837 - protein, 59 aa, Setaria italica
  Transcript Sequence Number=SeqID_25863
LDASVTVVGWRVQIRTANYIQKNHMSICSLCLCHFLFIVLLSLGMLLMQHAITVHENKL

SEQ ID NO: 91838 - protein, 95 aa, Setaria italica
  Transcript Sequence Number=SeqID_25864
CRGLNNETPSSSKQTRAEDFQGAHMNVFPLPFHGGLVDPPSACRISDRERQPSGTSHFCFVPAAIPSFVLDTSSFRTNSHHQQPEVGTANNANVH

SEQ ID NO: 91839 - protein, 55 aa, Setaria italica
  Transcript Sequence Number=SeqID_25865
EETRSTHTSTTTSQLVRTIQPADDVASLQPVPAPEALNTAMKFELAWHKTSCVAL

SEQ ID NO: 91840 - protein, 75 aa, Setaria italica
  Transcript Sequence Number=SeqID_25866
  Gene Ontology: Mol. function=catalytic activity
  Homolog annotation: Hit_ID=Q7XAP3; Match level="QueryCoverage=100%, HitCoverage=10%, E-value=4e-11, Identity=62%"; Hit description =Plastid (P)ppGpp synthase
  Subcellular localization annotation: CTP_CleavageSite=59; ConfidenceScore=5.46e-01
MSLPAISLYTSPPAAVYSEFDTSSRGSSPCTTAAPPPPAASHRLPAGGGGLSCLFSSPAAAAAPPRAPAHDELGA

SEQ ID NO: 91841 - protein, 73 aa, Setaria italica
  Transcript Sequence Number=SeqID_25867
  Gene Ontology: Mol. function=zinc ion binding
  Homolog annotation: Hit_ID=Q9LZR1; Match level="QueryCoverage=83%, HitCoverage=14%, E-value=1e-09, Identity=49%"; Hit description=MYB transcription factor
SNPVAPSGRRTKLCWTEEEEAVLKEAMAKFTPQDDTPIPWVQILEYGRDVFHRTRLPSDLRVKWRNMKKRAGC

SEQ ID NO: 91842 - protein, 128 aa, Setaria italica
  Transcript Sequence Number=SeqID_25868
  Pfam annotation: Domain name=DUF1719; Domain location=3-128; Score= -89.8; E_value=0.041; Accession=PF08224.3; Description=Domain of unknown function (DUF1719)
LARAPLPSRVAHAVLCFVSALLVLARGGGGGGEASRARATVQRFERLADGAAEFLRYVELNSAPRKRRLFGPAVGKLGEGVEYGVLQGARQCFLGAGSESPAEVWMESNKPCHAYGKRRASGKKLLLV

SEQ ID NO: 91843 - protein, 362 aa, Setaria italica
  Transcript Sequence Number=SeqID_25869
VMVMEVAWFQVDLDYEFDAPRWFDLAQEEPPMEAAAAQGWFASAPSYPPSPLIAKMFAEDLGLQTVRSIAVTDAVQCSTTSYGCSSGAGQKTHRVQGRKPCNGASENERRPGCRTTMKSTSLKGSTLMKPTASQLARQNRQVEPRNVMQSKKSVGVTSERSTISSNDCTYQSAKRQRLENGHLNKAAATTNQHEFIHKNHEKNVMNRNMDHPTGLPKLKITIPREPELATKLRAERSRVLRSVPTNPKQLNPRAAPSASTAQVASTRKVVQPLRATGHGHQHASRQRDHVGSNVPACTSNHARHVNNVDKKPEDCRGDLFKFKARPVDRKILASKGDVGVFRCAKKNTTVPKEFNLSSSRKG

SEQ ID NO: 91844 - protein, 52 aa, Setaria italica
  Transcript Sequence Number=SeqID_25870
  Pfam annotation: Domain name=zf-CCHC; Domain location=33-50; Score =38.5; E_value=2.7e-08; Accession=PF00098.15; Description=Zinc knuckle
HLARDCTQGGGGGGYGGGGGGYGGGGGGGGGGRGCYNCGGEGHISRECPNRH

SEQ ID NO: 91845 - protein, 205 aa, Setaria italica
  misc_feature (179)..(179): Xaa can be any naturally occurring amino acid
  Transcript Sequence Number=SeqID_25871
  Homolog annotation: Hit_ID=B9SJZ3; Match level="QueryCoverage=100%, HitCoverage=64%, E-value=7e-57, Identity=37%"; Hit description =Pentatricopeptide repeat-containing protein, putative
  Pfam annotation: Domain name=PPR; Domain location=125-159; Score =13.7; E_value=0.21; Accession=PF01535.12; Description=PPR repeat
  Pfam annotation: Domain name=PPR; Domain location=160-194; Score =44.9; E_value=3.2e-10; Accession=PF01535.12; Description=PPR repeat
  Pfam annotation: Domain name=PPR; Domain location=20-54; Score=43.7; E_value=7.4e-10; Accession=PF01535.12; Description=PPR repeat
  Pfam annotation: Domain name=PPR; Domain location=55-89; Score=46.5; E_value=1e-10; Accession=PF01535.12; Description=PPR repeat
  Pfam annotation: Domain name=PPR; Domain location=90-124; Score=43.5; E_value=8.2e-10; Accession=PF01535.12; Description=PPR repeat
  Pfam module annotation: Pfam domain module=PPR::PPR::PPR::PPR::PPR; Domain location=125-159::160-194::20-54::55-89::90-124
EAAQVKFVEMRAMGLLPDLITYSLLIKGYCKAGNLKEAFWLLGDLRRAGLGPTVLKYNILMDGYCRLGDLEEARRLKEEMVEQGCLPDVCTYTTLMNGSCKVRNPAMAREFFDEMLSKGLQPDCFAYNTRIRAELALGDASNAFQLREAMMLEGISSNTVTYNILIDGLCKTGNLKDAXICRMKMVRDGLKPDCITYTCLIHAHC

SEQ ID NO: 91846 - protein, 41 aa, Setaria italica
  misc_feature (6)..(6): Xaa can be any naturally occurring amino acid
  Transcript Sequence Number=SeqID_25872
  Gene Ontology: Mol. function=N-acetyltransferase activity; Biological process=metabolic process
RGTTQXGGGGYKVILNCTTELKGFYAKCGFEEKNVQMGLYF

SEQ ID NO: 91847 - protein, 131 aa, Setaria italica
  misc_feature (98)..(98): Xaa can be any naturally occurring amino acid
  Transcript Sequence Number=SeqID_25873
  Gene Ontology: Mol. function=protein serine/threonine kinase activity; Cellular component=integral to membrane; Biological process=protein amino acid phosphorylation
  Homolog annotation: Hit_ID=B6U2B7; Match level="QueryCoverage=67%, HitCoverage=10%, E-value=1e-23, Identity=60%"; Hit description =Serine/threonine-protein kinase receptor
  Pfam annotation: Domain name=SKG6; Domain location=10-48; Score=8.8; E_value=0.072; Accession=PF08693.2; Description=Transmembrane alpha -helix domain
  Subcellular localization annotation: CTP_CleavageSite=64; ConfidenceScore=5.04e-01
YFRLAAADLAPTSKSKKKVNIVIAVVVSITALTILLAVAGFFIWKAKKTKARKPGSSTWRAGPRSKEGSEGKDHGDDLELPVYDYETIAKATEDFSTXNKLGEGGFGPVYKGKLEDGQEIAVKTLSRTSTQ

SEQ ID NO: 91848 - protein, 73 aa, Setaria italica
  Transcript Sequence Number=SeqID_25874
  Subcellular localization annotation: CTP_CleavageSite=66; ConfidenceScore=5.25e-01
AQTTSLAASSNAHPHAHCLSAQLPPLLLHQQQWKRAAGGARAPSNRPHMAQMISTMPMVDAAPAVSAIMSSCR

SEQ ID NO: 91849 - protein, 82 aa, Setaria italica
  Transcript Sequence Number=SeqID_25875
SQYQNIVFLQVQHYCSMVHFKSLHIHMMYRFTNHQEPILNQANNKVPNFLQRCQPPMSMVNHCISHKMIKYDPPYVSSVPLF

SEQ ID NO: 91850 - protein, 162 aa, Setaria italica
  Transcript Sequence Number=SeqID_25876
  Gene Ontology: Cellular component=mitochondrion; Biological process =response to stress
  Homolog annotation: Hit_ID=B6T649; Match level="QueryCoverage=100%, HitCoverage=73%, E-value=1e-71, Identity=83%"; Hit description=Heat shock 22 kDa protein
MASTVASKRVVPLVRALEKLLAAPSAPFAGSALRPVAVAGGLRGYNTGAPLRRYEGAESDEDGVREYENCRGGRDYAVPSLFSDVFRDPFSAPQSLGRLLSLMDDMATASPVRAGAVRRGWNAREDEEALHLRVDMPGLGKEHVKVWAEQNSLVIKGEGEKE

SEQ ID NO: 91851 - protein, 85 aa, Setaria italica
  Transcript Sequence Number=SeqID_25877
QARIVQKRGCCLAYWERSERAFPLCRLGQASVVGESPHLITSHLPHLVCVATSPAVLDGVRSLQTPASVEDFAYLTPSRRTCASA

SEQ ID NO: 91852 - protein, 133 aa, Setaria italica
  Transcript Sequence Number=SeqID_25878
  Subcellular localization annotation: CTP_CleavageSite=64; ConfidenceScore=5.77e-01
LPDPTQPSPSHSHPPIPSQFPFPRSPSPQAALHRAARCRSAHVTCVSRAPSLLPSLPASQTAIRGGRAGSPGRAIKIRSGGDSSVLRGGDGAGGDGVQQQQGGRRWRAPDDGAPTAGRVAAPPQPLAQDPPHS

SEQ ID NO: 91853 - protein, 87 aa, Setaria italica
  Transcript Sequence Number=SeqID_25879
  Gene Ontology: Mol. function=transferase activity, transferring groups other than amino-acyl groups
  Homolog annotation: Hit_ID=Q339U5; Match level="QueryCoverage=55%, HitCoverage=32%, E-value=3e-10, Identity=66%"; Hit description =Agmatine coumaroyltransferase, putative
MPWRAPTISEHIDQLFPKADMYRADEPLLHVQLTRYRCGGLVIGTACQHLVADGQAMSFFYAAWATAVSTGLAILPSPFIDRTAAVP

SEQ ID NO: 91854 - protein, 135 aa, Setaria italica
  Transcript Sequence Number=SeqID_25880
  Gene Ontology: Mol. function=protein serine/threonine kinase activity; Cellular component=plasma membrane; Biological process =protein amino acid phosphorylation
  Homolog annotation: Hit_ID=Q84XU5; Match level="QueryCoverage=100%, HitCoverage=27%, E-value=1e-41, Identity=66%"; Hit description =Receptor-like protein kinase (Fragment)
SDVYSFGVVLLELITGRKPVGEFGDGVDIVQWVRMVTGSSKEGVMKIADPRLSTVPLYELTHVFYVAMLCVAEQSVERPTMREVVQILADMPGSTSTSIDAPLVIEPKEDASSEKPPRQQEGPHDSPPQQDLLSI

SEQ ID NO: 91855 - protein, 72 aa, Setaria italica
  Transcript Sequence Number=SeqID_25881
TYFYSWQCTSIVPRAYSKHKVLKIMTIYYTCRTMHYDSLFIIETNIKASQISSGRSTNIIVETRSKLTHQGQ

SEQ ID NO: 91856 - protein, 135 aa, Setaria italica
  misc_feature (98)..(98): Xaa can be any naturally occurring amino acid
  misc_feature (100)..(100): Xaa can be any naturally occurring amino acid
  Transcript Sequence Number=SeqID_25882
  Gene Ontology: Mol. function=nucleotide binding; Cellular component =plasma membrane; Biological process=response to cadmium ion
  Homolog annotation: Hit_ID=B6SKP8; Match level="QueryCoverage=98%, HitCoverage=22%, E-value=1e-52, Identity=75%"; Hit description =Dynamin-related protein 1C
  Pfam annotation: Domain name=Dynamin_N; Domain location=1-132; Score =65.7; E_value=1.7e-16; Accession=PF00350.15; Description=Dynamin family
AEFLHLPKKRFSDFALVRQEIADETDRLTGKTKEISPVPIQLSIYSPKVVNLTLIDLPGLTKVAVEGQPESIVQDIENMVLSYVDKPNCIILAISPAXNXDIATSDAIKLAKEVDPTGAKNLVDIGTILTSILLL

SEQ ID NO: 91857 - protein, 61 aa, Setaria italica
  Transcript Sequence Number=SeqID_25883
MASDKERIAALFSMYNDDEEEEDDADEPNPPSPAPPAAAAAPAVTSSSPLPSQAGGEDPQP

SEQ ID NO: 91858 - protein, 94 aa, Setaria italica
  Transcript Sequence Number=SeqID_25884
  Gene Ontology: Mol. function=inorganic diphosphatase activity; Cellular component=cytoplasm; Biological process=phosphate metabolic process
  Homolog annotation: Hit_ID=Q9MAM9; Match level="QueryCoverage=97%, HitCoverage=40%, E-value=3e-41, Identity=85%"; Hit description =T25K16.5
  Pfam annotation: Domain name=Pyrophosphatase; Domain location=1-93; Score=-12.0; E_value=5.8e-07; Accession=PF00719.11; Description =Inorganic pyrophosphatase
RTLCEDSDPLDVLVIMQEPVIPGCFLRAKAIGLMPMIDQGEADDKIIAVCADDPEYKHYNDIKELPPHRLAEIRRFFEDCILFLFIRSVFCSAS

SEQ ID NO: 91859 - protein, 148 aa, Setaria italica
  Transcript Sequence Number=SeqID_25885
  Gene Ontology: Mol. function=inorganic diphosphatase activity; Cellular component=cytoplasm; Biological process=phosphate metabolic process
  Homolog annotation: Hit_ID=B6SZZ9; Match level="QueryCoverage=66%, HitCoverage=47%, E-value=1e-47, Identity=90%"; Hit description =Soluble inorganic pyrophosphatase
MSYCSSAWTMLPCAVNVRLCLQCTLFLLQEDQFKSVYLDFFPCYPCQVVLMAPAVEVIKEAGSFQKVPALNERILSSMSRRAVAAHPWHDLEIGPGAPTIFNCVIEIPRGSKVKYELDKKTGLIKVDRVLYSSVVYPHNYGFIPRTLC

SEQ ID NO: 91860 - protein, 214 aa, Setaria italica
  Transcript Sequence Number=SeqID_25886
  Gene Ontology: Mol. function=inorganic diphosphatase activity; Cellular component=cytoplasm; Biological process=phosphate metabolic process
  Homolog annotation: Hit_ID=B6SZZ9; Match level="QueryCoverage=96%, HitCoverage=100%, E-value=1e-110, Identity=93%"; Hit description =Soluble inorganic pyrophosphatase
  Pfam annotation: Domain name=Pyrophosphatase; Domain location=52-206; Score=199.8; E_value=7.5e-57; Accession=PF00719.11; Description =Inorganic pyrophosphatase
MAPAVEVIKEAGSFQKVPALNERILSSMSRRAVAAHPWHDLEIGPGAPTIFNCVIEIPRGSKVKYELDKKTGLIKVDRVLYSSVVYPHNYGFIPRTLCEDSDPLDVLVIMQEPVIPGCFLRAKAIGLMPMIDQGEADDKIIAVCADDPEYKHYNDIKELPPHRLAEIRRFFEDYKKNENKEVAVNDFLPASAAYEAIQHSMDLYATYIVEGLRR

SEQ ID NO: 91861 - protein, 85 aa, Setaria italica
  Transcript Sequence Number=SeqID_25887
  Gene Ontology: Mol. function=transferase activity, transferring glycosyl groups; Biological process=metabolic process
  Homolog annotation: Hit_ID=B6TZ09; Match level="QueryCoverage=100%, HitCoverage=17%, E-value=4e-38, Identity=88%"; Hit description =Limonoid UDP-glucosyltransferase
VVRPDTRPLLPEGFLDAAAGGRGMVVPWSPQDRVLEHPAVACFLTHCGWNSTLETVAAGVPVVAFPQWGDQCTDAKFLVDELRMG

SEQ ID NO: 91862 - protein, 156 aa, Setaria italica
  Transcript Sequence Number=SeqID_25888
  Homolog annotation: Hit_ID=B3CK95; Match level="QueryCoverage=60%, HitCoverage=59%, E-value=2e-19, Identity=51%"; Hit description=ROP interacting CRIB motif protein
  Pfam annotation: Domain name=PBD; Domain location=24-65; Score=32.9; E_value=1.3e-06; Accession=PF00786.20; Description=P21-Rho-binding domain
MHILYLQWRSVISRMAAAKEHEMEIGYPTDVKHVAHIGWDSAAGNASPSWMNNIMAAPDISSLGNFAASTGTSWASQDFDPQPLGTPAFGAVAESTGRQDTATCPDVPKPPRKARGKKPEDGSPAAPPTSTDELAPPPPAAAEAEAAVGVAADGTQ

SEQ ID NO: 91863 - protein, 85 aa, Setaria italica
  Transcript Sequence Number=SeqID_25889
  Gene Ontology: Mol. function=triacylglycerol lipase activity; Biological process=lipid metabolic process
  Homolog annotation: Hit_ID=B4FGY5; Match level="QueryCoverage=95%, HitCoverage=22%, E-value=3e-37, Identity=90%"; Hit description=Lipase
  Pfam annotation: Domain name=Lipase_3; Domain location=1-84; Score= -1.1; E_value=0.00073; Accession=PF01764.17; Description=Lipase (class 3)
LNYPNMPNAKVHIGFYSSYNNTLLRPAITNAVRKARKLHGDCDIIVTGHSMGGAIASFCALDLAISFGSDNVHLMSFGQPRFWQN

SEQ ID NO: 91864 - protein, 49 aa, Setaria italica
  Transcript Sequence Number=SeqID_25890
AAGNEQRSTRLSRKQYSFVSDSEEDKEKDKLVESVLGSLQKAQGSKLRN

SEQ ID NO: 91865 - protein, 163 aa, Setaria italica
  misc_feature (66)..(66): Xaa can be any naturally occurring amino acid
  Transcript Sequence Number=SeqID_25891
  Homolog annotation: Hit_ID=Q646W9; Match level="QueryCoverage=35%, HitCoverage=43%, E-value=2e-11, Identity=63%"; Hit description=Rwp34 (Fragment)
KSTLSLLQRTQEALENEIEKIMAIGKEATDDFDVHDDEWSGSDHLEEPIEEVNERIKRLEFRLGEXSALIKEKASRIHELEATSIENTNLLLLQSELDQLYQEKMDAEIRCTIQTRAYQASVTLPEDQMALYEAQKSLSEDYKQLALKLRHTENRATVLEGSN

SEQ ID NO: 91866 - protein, 38 aa, Setaria italica
  Transcript Sequence Number=SeqID_25892
ECRAIFIFGAEERSLHNIRDLLDAARHTLGILNRGRLP

SEQ ID NO: 91867 - protein, 96 aa, Setaria italica
  Transcript Sequence Number=SeqID_25893
GSYKTRLPSATGCNPFKPRSSQRQSEQQRREEEEDEVVSLKLLLRLTQNVLEPEQYYEWTTSYVDESRIYGWDKEANELAEALVAPDDGESLFRAA

SEQ ID NO: 91868 - protein, 45 aa, Setaria italica
  Transcript Sequence Number=SeqID_25894
SILSKRKELLFNLQAISNRRINFYCAVLVSYAMIASATPGTLAAN

SEQ ID NO: 91869 - protein, 156 aa, Setaria italica
  Transcript Sequence Number=SeqID_25895
  Gene Ontology: Mol. function=nucleotide binding; Cellular component =intrinsic to membrane; Biological process=defense response
  Homolog annotation: Hit_ID=Q84KC6; Match level="QueryCoverage=100%, HitCoverage=56%, E-value=2e-23, Identity=38%"; Hit description=NBS -LRR disease resistance protein homologue
  Pfam annotation: Domain name=LRR_1; Domain location=12-34; Score =11.1; E_value=2.3; Accession=PF00560.25; Description=Leucine Rich Repeat
  Pfam annotation: Domain name=LRR_1; Domain location=132-154; Score =17.1; E_value=0.074; Accession=PF00560.25; Description=Leucine Rich Repeat
  Pfam annotation: Domain name=LRR_1; Domain location=36-58; Score =13.0; E_value=1; Accession=PF00560.25; Description=Leucine Rich Repeat
  Pfam annotation: Domain name=LRR_1; Domain location=60-82; Score=9.9; E_value=3.8; Accession=PF00560.25; Description=Leucine Rich Repeat
  Pfam annotation: Domain name=LRR_1; Domain location=84-106; Score =11.1; E_value=2.3; Accession=PF00560.25; Description=Leucine Rich Repeat
  Pfam module annotation: Pfam domain module=LRR_1::LRR_1::LRR_1::LRR _1::LRR_1; Domain location=12-34::132-154::36-58::60-82::84-106
ETLPNSIGELQSLQTLNFKGCGKLESLPDAICNLQKLQYLILSQCGILQSLPKNIGNLSNLLHLNLSQCNDLKSIPDSICRITRLHTLNMSHCSSLPEIPASIGSLKELQFLILSHHSSSLSLPISTCHLPNLQTLDLSWNIGLEELPESIGNLHN

SEQ ID NO: 91870 - protein, 253 aa, Setaria italica
  Transcript Sequence Number=SeqID_25896
  Gene Ontology: Mol. function=hydrolase activity, acting on acid anhydrides, catalyzing transmembrane movement of substances; Cellular component=integral to membrane; Biological process=copper ion transport
  Homolog annotation: Hit_ID=Q6JAG3; Match level="QueryCoverage=98%, HitCoverage=27%, E-value=1e-126, Identity=90%"; Hit description =Putative copper-exporting ATPase
  Pfam annotation: Domain name=Hydrolase; Domain location=3-192; Score =80.2; E_value=7.3e-21; Accession=PF00702.18; Description=haloacid dehalogenase-like hydrolase
VQQSEHPLAKAIVEHAKKLHPEENHIWPEVRDFISVTGHGVKAEVSDKSVIVGNKSFMLSSDIDIPLEASEILMEEEEKARTGIIVAMDQEVVGIISVSDPIKPNAHEVISYLKSMNVESIMVTGDNWGTANAIGKEVGIEKIIAEAKPEQKAEKVKELQLSGKTVAMVGDGINDSPALVSADVGLAIGAGTDVAIEAADIVLMKSNLEDVVTAIDLSRKTFFRIRMNYVWALGYNIIGIPIAAGVLFPSSRF

SEQ ID NO: 91871 - protein, 112 aa, Setaria italica
  Transcript Sequence Number=SeqID_25897
  Subcellular localization annotation: CTP_CleavageSite=29; ConfidenceScore=5.17e-01
APSFFLLAASAAAIPFPPPHQLPSPHSVSGRAGGGGGGGGDEELVVVKPKGVCFPSLPCKWPPGNNQPIRSWGAPSNSNSSSARPANRIGRGTGKQIGLDSLRNQSNGCQRR

SEQ ID NO: 91872 - protein, 81 aa, Setaria italica
  Transcript Sequence Number=SeqID_25898
  Gene Ontology: Cellular component=extracellular region; Biological process=response to biotic stimulus
  Homolog annotation: Hit_ID=B6UG61; Match level="QueryCoverage=100%, HitCoverage=46%, E-value=1e-38, Identity=92%"; Hit description =Pathogenesis-related protein PR-1
FWGSGTGWAPAQAVGAWLSERPRYDYWSNSCYGGMCGHYTQIMWRSTRRVGCAMVTCYNGRGTFITCNYDPPGNYVGVRPY

SEQ ID NO: 91873 - protein, 72 aa, Setaria italica
  Transcript Sequence Number=SeqID_25899
YDAFVAAARAFPAFGATGGAAARKWEVAAFLAHTSHETSGTHGTRIKRSFFIRWSIAACKLMFYSLLRMCDV

SEQ ID NO: 91874 - protein, 218 aa, Setaria italica
  Transcript Sequence Number=SeqID_25900
  Gene Ontology: Mol. function=ligase activity; Cellular component =chloroplast; Biological process=response to auxin stimulus
  Homolog annotation: Hit_ID=Q5NAZ7; Match level="QueryCoverage=92%, HitCoverage=43%, E-value=6e-84, Identity=77%"; Hit description =Probable indole-3-acetic acid-amido synthetase GH3.3
  Pfam annotation: Domain name=GH3; Domain location=1-218; Score= -172.2; E_value=4.3e-09; Accession=PF03321.5; Description=GH3 auxin -responsive promoter
AASFRACVPLATHADVEPYIARIADGDTSPVLTARPITSISLSSGTTQGKRKYLPFNQELVKSTMQIYRTSYAFRNRAFPVEDGKALQFIYGIRQFTTKGGLTATTATTNVYRSEEFIPTMRAIQSQACSPDAVIFGPDFAQSLYCHLLCGLLFADEVRIVSATFAHSVVLAFQTFERVWEELCADIRAGALSATRVTSPAVRRAVSALLPAPNPALA

SEQ ID NO: 91875 - protein, 124 aa, Setaria italica
  Transcript Sequence Number=SeqID_25901
  Gene Ontology: Cellular component=extracellular region; Biological process=plant-type cell wall organization and biogenesis
  Homolog annotation: Hit_ID=Q9XHX0; Match level="QueryCoverage=99%, HitCoverage=49%, E-value=5e-45, Identity=69%"; Hit description =Expansin-A8
  Pfam annotation: Domain name=DPBB_1; Domain location=3-88; Score =139.6; E_value=9.6e-39; Accession=PF03330.10; Description=Rare lipoprotein A (RlpA)-like double
RQTTALSTALYGDGASCGACFIVACDASRTQYCKPGSPSVTVTATNFCPPNYGDPSGWCNSPRQHFDMSQPAWETIGVYQAGIVPVNYRRVPCSRSGGIRFGISGHDYFELVLITNVGGAGAVA

SEQ ID NO: 91876 - protein, 101 aa, Setaria italica
  Transcript Sequence Number=SeqID_25902
  Gene Ontology: Mol. function=microtubule motor activity; Cellular component=microtubule associated complex; Biological process =microtubule-based movement
  Homolog annotation: Hit_ID=Q93XF4; Match level="QueryCoverage=99%, HitCoverage=11%, E-value=2e-21, Identity=57%"; Hit description =Kinesin heavy chain (Fragment)
YLPHIEVDSEEEMDVDEEDVQELRDQISKLHSSSETFDDFMDAESGDDNTPYAKGNLETSEEDDMPVLDDFGGPLQEEHKEVANNTNADEDLVSDRKSSLS

SEQ ID NO: 91877 - protein, 65 aa, Setaria italica
  Transcript Sequence Number=SeqID_25903
  Gene Ontology: Mol. function=protein serine/threonine kinase activity; Biological process=protein amino acid phosphorylation
  Homolog annotation: Hit_ID=C0LGQ5; Match level="QueryCoverage=100%, HitCoverage=5%, E-value=2e-09, Identity=52%"; Hit description =Leucine-rich repeat receptor-like protein kinase (Fragment)
  Pfam annotation: Domain name=LRR_1; Domain location=1-23; Score=12.0; E_value=1.5; Accession=PF00560.25; Description=Leucine Rich Repeat
  Pfam annotation: Domain name=LRR_1; Domain location=25-47; Score =13.1; E_value=0.96; Accession=PF00560.25; Description=Leucine Rich Repeat
  Pfam module annotation: Pfam domain module=LRR_1::LRR_1; Domain location=1-23::25-47
SLQRVRLGSNMLSGPIPPSLGGIAALTLLDVSNNALTGSIPATLAQCKQLSLIVLSHTGWSGASP

SEQ ID NO: 91878 - protein, 86 aa, Setaria italica
  misc_feature (63)..(63): Xaa can be any naturally occurring amino acid
  Transcript Sequence Number=SeqID_25904
  Gene Ontology: Mol. function=lyase activity
  Homolog annotation: Hit_ID=Q6ETM5; Match level="QueryCoverage=70%, HitCoverage=12%, E-value=5e-10, Identity=66%"; Hit description =Putative ribosomal RNA apurinic site specific lyase
  Pfam annotation: Domain name=F-box; Domain location=24-71; Score =32.5; E_value=1.7e-06; Accession=PF00646.25; Description=F-box domain
  Subcellular localization annotation: CTP_CleavageSite=68; ConfidenceScore=5.18e-01
PSPPVSATASLSADSSAPGGGSEDSLSALPDQIHRNVVSRLPAKDVARTAILSSRWRPLWRSXLVLVDAQLLQSAGAEDSPLRAGG

SEQ ID NO: 91879 - protein, 103 aa, Setaria italica
  Transcript Sequence Number=SeqID_25905
TPKILRRGSSKRSHNEKDDHEGRQVKLATVREQRKAGDPMLFRWIIAGTAAPVAYWCVLLEPKVALQPKAREIRELFCWSLAAAAAACLCVPLQPKAGEIRKL

SEQ ID NO: 91880 - protein, 52 aa, Setaria italica
  Transcript Sequence Number=SeqID_25906
MAQPQPRRGEDEGLQQQGQGKAPAVAQQEPIKYGDAFAVKGELAAQPIAPRD

SEQ ID NO: 91881 - protein, 78 aa, Setaria italica
  Transcript Sequence Number=SeqID_25907
  Subcellular localization annotation: CTP_CleavageSite=54; ConfidenceScore=5.59e-01
PRGRPPTQTQPRPPRRHPRAAPNPLRTYFLLTKPATNTPASRFPRKQHPPSPPRAPARLPRPRPAWPRKEGGRWGRAP

SEQ ID NO: 91882 - protein, 181 aa, Setaria italica
  Transcript Sequence Number=SeqID_25908
  Homolog annotation: Hit_ID=B9RN68; Match level="QueryCoverage=78%, HitCoverage=12%, E-value=8e-32, Identity=44%"; Hit description =Nucleotide binding protein, putative
GARLPPGLRHNGQVCLNGLDVDSKQSSKNLESGDLAMSFQWLTTHMPPKLTRNRLKAGHIKQSGEEGSSSAVQPNLGVMDHMENDWRYLSVTAFLLKHPVLRLTVCFVVVACSDATVVLRALLLPSRLWFDVALLVPQASPVLVLRHIIINASHYKDGSITFWNLTETVHGFMQLISETHP

SEQ ID NO: 91883 - protein, 199 aa, Setaria italica
  misc_feature (130)..(130): Xaa can be any naturally occurring amino acid
  Transcript Sequence Number=SeqID_25909
  Gene Ontology: Mol. function=6-phosphofructokinase activity; Cellular component=6-phosphofructokinase complex; Biological process=glycolysis
  Homolog annotation: Hit_ID=B6SKL0; Match level="QueryCoverage=100%, HitCoverage=37%, E-value=1e-108, Identity=95%"; Hit description =Pyrophosphate--fructose 6-phosphate 1-phosphotransferase
EDFDKCFSLPHLRDVIDVEPRPTTFSLKSRIPLENVNGSMQESWNGYVNDDDRALLKVIKFASPTSAGADCIDPDCSWVEQWVHRAGPRKQIYFEPQYVKAGIVTCGGLCPGLNDVIRQIVLTLEKYGVXNIVGIQHGFRGFFEDHLSEVPLSRHVVQNINLAGGSFLGVSRGGANISDIVDSIQARRLDMLFVLGGNG

SEQ ID NO: 91884 - protein, 135 aa, Setaria italica
  Transcript Sequence Number=SeqID_25910
  Gene Ontology: Mol. function=protein tyrosine/serine/threonine phosphatase activity; Cellular component=intracellular; Biological process=protein amino acid dephosphorylation
  Homolog annotation: Hit_ID=Q2RAU9; Match level="QueryCoverage=97%, HitCoverage=37%, E-value=8e-51, Identity=76%"; Hit description=Dual specificity phosphatase, catalytic domain containing protein, expressed
VILLKEISELACPNDGFLDQLKLFEEMGFKVDTSSPLYKRFRLKLLGQSYKFGEKIGSYMFEDDPGLSPLPGSCQDPSKTGQHKTAYRCRKCRRIIAVEDNVISHLPGEGESCFDWNRRKSGHSYSNKEQDCSSL

SEQ ID NO: 91885 - protein, 181 aa, Setaria italica
  misc_feature (31)..(31): Xaa can be any naturally occurring amino acid
  Transcript Sequence Number=SeqID_25911
  Gene Ontology: Mol. function=protein tyrosine/serine/threonine phosphatase activity; Cellular component=extracellular space; Biological process=protein amino acid dephosphorylation
  Homolog annotation: Hit_ID=Q2RAU9; Match level="QueryCoverage=99%, HitCoverage=58%, E-value=4e-74, Identity=68%"; Hit description=Dual specificity phosphatase, catalytic domain containing protein, expressed
MRSEQKPLEEALESLKEISELACPNDGFLDXGQSYKFGEKIGSYMFEDDPGLSPLPGSCQDPSKTGQHKTAYRCRKCRRIIAVEDNVISHLPGEGESCFDWNRRKSGHSYSNKEQDCSSLFIEPLKWMTPVEEGALEGKLSCIHCGARLGYFNWSGIQCNCGSWVTPAFQIVKSKVDISTI

SEQ ID NO: 91886 - protein, 103 aa, Setaria italica
  misc_feature (89)..(89): Xaa can be any naturally occurring amino acid
  Transcript Sequence Number=SeqID_25912
  Gene Ontology: Mol. function=DNA binding; Cellular component =chromosome; Biological process=regulation of transcription, DNA -dependent
  Homolog annotation: Hit_ID=Q9FER8; Match level="QueryCoverage=74%, HitCoverage=40%, E-value=3e-34, Identity=89%"; Hit description =HMGI/Y protein
  Pfam annotation: Domain name=Linker_histone; Domain location=11-80; Score=55.1; E_value=2.6e-13; Accession=PF00538.11; Description =linker histone H1 and H5 family
MATEEAAKPSPLPPYPEMILAAIEGLGDKNGSNKSAISRYIEGKYGELPPAHASLLTAHLARMKESGELIFLKNNYFRADAPDAPPKRXRRPPRCGPNAPPPP

SEQ ID NO: 91887 - protein, 108 aa, Setaria italica
  Transcript Sequence Number=SeqID_25913
  Gene Ontology: Mol. function=protein serine/threonine kinase activity; Cellular component=integral to membrane; Biological process=protein amino acid phosphorylation
  Homolog annotation: Hit_ID=B6VCN4; Match level="QueryCoverage=93%, HitCoverage=17%, E-value=1e-27, Identity=61%"; Hit description =Putative systemin receptor SR160 (Fragment)
GNNSFTGPIPPELGDCRSLLWLDLSGNQLKGQIPSDLAKQSGMMAPLTSTRQFSYLRNDELRSNYQCHGKGSLVDLTGIRHSDLIRMPSKEACNFTSVYLGTFHMISN

SEQ ID NO: 91888 - protein, 80 aa, Setaria italica
  Transcript Sequence Number=SeqID_25914
  Subcellular localization annotation: CTP_CleavageSite=54; ConfidenceScore=5.27e-01
RRVRSHSPGPAAQHGAIAADPGRPPTPDDRPPSSSRRCREVSMTGEGSRGEAGRVAAGRSTEPSAFAAAGSVAGQQPAPV

SEQ ID NO: 91889 - protein, 54 aa, Setaria italica
  Transcript Sequence Number=SeqID_25915
  Gene Ontology: Mol. function=DNA binding; Cellular component=nucleus; Biological process=regulation of transcription
  Homolog annotation: Hit_ID=Q84PP4; Match level="QueryCoverage=100%, HitCoverage=16%, E-value=2e-22, Identity=85%"; Hit description =Transcription factor MYB102
  Pfam annotation: Domain name=Myb_DNA-binding; Domain location=14-54; Score=22.8; E_value=0.0014; Accession=PF00249.23; Description=Myb -like DNA-binding domain
MGRSPCCDESGLKKGPWTPEEDEKLLQYIQKNGHGSWRTLPRLAGLNRCGKSCR

SEQ ID NO: 91890 - protein, 95 aa, Setaria italica
  misc_feature (4)..(4): Xaa can be any naturally occurring amino acid
  misc_feature (19)..(19): Xaa can be any naturally occurring amino acid
  Transcript Sequence Number=SeqID_25916
  Gene Ontology: Mol. function=ligase activity; Biological process =response to auxin stimulus
  Homolog annotation: Hit_ID=Q2R3B4; Match level="QueryCoverage=82%, HitCoverage=16%, E-value=1e-35, Identity=92%"; Hit description =Probable indole-3-acetic acid-amido synthetase GH3.13
LRGXVRRLWPRTKYIDVIXTGSMAQYIPLLEFYGGGLPLVSTMYASSECYFGINLRPLDRPEDVAYTLLPNMCYYEFIKVEKDGEDVRDGEVVDL

SEQ ID NO: 91891 - protein, 240 aa, Setaria italica
  Transcript Sequence Number=SeqID_25917
  Gene Ontology: Mol. function=ligase activity; Biological process =response to auxin stimulus
  Homolog annotation: Hit_ID=Q8LQM5; Match level="QueryCoverage=100%, HitCoverage=38%, E-value=1e-116, Identity=84%"; Hit description =Probable indole-3-acetic acid-amido synthetase GH3.1
  Pfam annotation: Domain name=GH3; Domain location=1-240; Score=50.8; E_value=1.8e-18; Accession=PF03321.5; Description=GH3 auxin -responsive promoter
ARPSWKGIIRRVWPNTKYIDVIVTGAMAQYIPTLEFYGGGLPLTCTMYASSECYFGINLNPMCKPSDVAYTLIPTMGYFEFLPVPSSGGSPAAEPQPCDLVNLVDVKLGHEYELVLTTYSGLYRYRVGDVLRVAGFKNQAPMFNFVRRNNVVLSIDSDKTDEAELHAAVAGAVQHLAPFGASLVEYTSYADAATIPGHYVLFWELRGGGATPVPASVFEDCCLAVEEALNSVYRQGRAAD

SEQ ID NO: 91892 - protein, 121 aa, Setaria italica
  misc_feature (8)..(8): Xaa can be any naturally occurring amino acid
  Transcript Sequence Number=SeqID_25918
  Gene Ontology: Cellular component=membrane
  Homolog annotation: Hit_ID=B6SKY9; Match level="QueryCoverage=80%, HitCoverage=21%, E-value=2e-27, Identity=60%"; Hit description =Integral membrane protein DUF6 containing protein
IAAIPFVXLLLKSLRDMQIFVRGLELGIWVSLAYLAQAIGLVTADAGRTSFISALTVIIVPFLDGLVGAEVPPYTWFGALLSLLGVAMLELSGSPPCVSWIIYMGGLTCLFGPSVCLSYGI

SEQ ID NO: 91893 - protein, 63 aa, Setaria italica
  Transcript Sequence Number=SeqID_25919
  Gene Ontology: Mol. function=electron carrier activity; Biological process=oxidation reduction
MASFILEGLGWLVVGLFSLYIFQLIRDSRRRLPPGPWPSKPIIGDLLDLGEPGQQHRTFQKLP

SEQ ID NO: 91894 - protein, 123 aa, Setaria italica
  Transcript Sequence Number=SeqID_25920
  Gene Ontology: Mol. function=Ran GTPase binding; Cellular component =intracellular; Biological process=protein transport
  Homolog annotation: Hit_ID=B4FC92; Match level="QueryCoverage=100%, HitCoverage=98%, E-value=7e-50, Identity=75%"; Hit description =Nuclear transport factor 2
  Pfam annotation: Domain name=NTF2; Domain location=6-120; Score =167.0; E_value=5.6e-47; Accession=PF02136.12; Description=Nuclear transport factor 2 (NTF2) domain
MDPDSVAKAFVDHYYTTFDTNRAALVGLYQEGSMLTFEGTKFMGAAAITGKLTSLPFTACKHQVTTVDCQPSGPGGGMLVFVSGALQVAEGEHPLKFSQMFHLMPVGPGNFYVQNDMFRLNYG

SEQ ID NO: 91895 - protein, 174 aa, Setaria italica
  Transcript Sequence Number=SeqID_25921
  Gene Ontology: Mol. function=cysteine-type peptidase activity; Biological process=proteolysis
  Homolog annotation: Hit_ID=Q7F2I6; Match level="QueryCoverage=54%, HitCoverage=5%, E-value=3e-14, Identity=47%"; Hit description =P0432B10.2 protein
SESDLSDSSSDASITDIIPMLDELNLPVNLGTDHPSSTFRDNLNSSSDDDEDDSKEDGDLSSDEDRTEEEKADGNFWKDFMDPSSSDTEKNGNLESLMDRRKAKNILKFELDRRLMDMQAADAIQKMEEASRFRVQVPSISTPRRNPFDPSSGSEEIAELPKIPDSAPSVLLPW

SEQ ID NO: 91896 - protein, 46 aa, Setaria italica
  Transcript Sequence Number=SeqID_25922
ARCSISPFLHLTTIPVQCTFVAFDIKVLQQCSNPHKHIKHKGFCVE

SEQ ID NO: 91897 - protein, 91 aa, Setaria italica
  Transcript Sequence Number=SeqID_25923
LRSLLDGAGESASAPTLQEQDVSSLEVILDTTSSEVLITAHSGTASQHTSTLIFSTTCCEELVEAAAEFASGQALQDPDVASSKEESITAG

SEQ ID NO: 91898 - protein, 136 aa, Setaria italica
  Transcript Sequence Number=SeqID_25924
  Gene Ontology: Mol. function=ATPase activity, coupled to transmembrane movement of substances; Cellular component=integral to membrane; Biological process=transport
  Homolog annotation: Hit_ID=Q8GU65; Match level="QueryCoverage=100%, HitCoverage=8%, E-value=2e-64, Identity=88%"; Hit description=MRP -like ABC transporter
IAVIPLLLFNIWYMNRYLKTSRELTRLEGVTNAPVIDHFSETVLGATTIRCFKKEEEFFQKNLVGINSSLSMSFHNYAANEWLGFRLELIGTLVLSITAFLMISLPSNFIKKEFVGMSLSHGLSLNSLVYFAISTS

SEQ ID NO: 91899 - protein, 104 aa, Setaria italica
  Transcript Sequence Number=SeqID_25925
ATHDATTREAEKPYNRLFLPLAAASAPALCSCAAAAAAVLRRRAFRDLCIPSLPLPASPHIRARPRVRAEGIRPAPSSNGRKSEPRRPSRGGAGWGTGVRGRGR

SEQ ID NO: 91900 - protein, 126 aa, Setaria italica
  Transcript Sequence Number=SeqID_25926
  Gene Ontology: Mol. function=transporter activity; Cellular component= mitochondrial inner membrane; Biological process=transport
  Homolog annotation: Hit_ID=Q53HZ4; Match level="QueryCoverage=96%, HitCoverage=33%, E-value=4e-58, Identity=89%"; Hit description =Putative mitochondrial carrier protein (Fragment)
  Pfam annotation: Domain name=Mito_carr; Domain location=64-126; Score= -2.2; E_value=0.0052; Accession=PF00153.19; Description=Mitochondrial carrier protein
VDYYNTRQSISSPEKLRGYHLLWTGLGAQLARDVPFSAICWTVLEPTRRHLTGLVGDESNAAVILGANFSAGFIAGVISAGATCPLDVAKTRRQIEKDPERVLNMNTRRILVEVWRKEGINGLFRG

SEQ ID NO: 91901 - protein, 195 aa, Setaria italica
  misc_feature (83)..(83): Xaa can be any naturally occurring amino acid
  misc_feature (165)..(165): Xaa can be any naturally occurring amino acid
  Transcript Sequence Number=SeqID_25927
  Gene Ontology: Mol. function=peptidase activity; Cellular component =membrane
  Homolog annotation: Hit_ID=B6T405; Match level="QueryCoverage=100%, HitCoverage=54%, E-value=2e-66, Identity=68%"; Hit description=CAAX amino terminal protease family protein
  Subcellular localization annotation: CTP_CleavageSite=45; ConfidenceScore=5.61e-01
MFPMASSSSSSPPLSLLLIRALPSKPLLLSRHRKPFPYPKSGRIAVARAQQRLLRLPETGRWGRSWRRGGGFPCFSYNANNEXPPPSDKSSDNWRILQRWDVPWEWQTVVLSMVGCGVSFVLTGLVEQSALQYVGFKALEATIDEKAEILFLGQLSVTVVVLGVXIFGITNTFRPFPDDVFRYDIKEPFKLKNGW

SEQ ID NO: 91902 - protein, 174 aa, Setaria italica
  Transcript Sequence Number=SeqID_25928
  Gene Ontology: Mol. function=peptidase activity; Cellular component =membrane
  Homolog annotation: Hit_ID=B6T405; Match level="QueryCoverage=98%, HitCoverage=49%, E-value=2e-86, Identity=94%"; Hit description=CAAX amino terminal protease family protein
  Pfam annotation: Domain name=Abi; Domain location=68-157; Score=75.3; E_value=2.2e-19; Accession=PF02517.8; Description=CAAX amino terminal protease family
LSDIKEPFKLKNGWLLWAGVGLFGAIISIGLTGAAMTYLNGEPPERETDSLVLLLPLIGSSTTSTAFLVGITGVLAPLLEETLFRGFLMVSLTKWFPTPVCVLVSAAVFALAHLTPGQFPQLFILGVALGFSYAQTRNLLTPITIHAFWNSGVILLLTFLQLQGYDIKELLGAS

SEQ ID NO: 91903 - protein, 134 aa, Setaria italica
  Transcript Sequence Number=SeqID_25929
MSYYGDRRPESSIVEAFTLSPLPYPVILILLMVTLLLGVSWFFTYEDFIEEAAEQFSWALLAVPIALVLLIRWISSVESFDGYFFGFYPSERRWRPGYDSGPAEGSSPWGVAMLVVLLLVLASFHETIRDMWRP

SEQ ID NO: 91904 - protein, 121 aa, Setaria italica
  Transcript Sequence Number=SeqID_25930
  Gene Ontology: Mol. function=pyridoxal phosphate binding; Cellular component=chromoplast; Biological process=cysteine biosynthetic process from serine
  Homolog annotation: Hit_ID=B6TEX7; Match level="QueryCoverage=95%, HitCoverage=33%, E-value=7e-42, Identity=71%"; Hit description =Cysteine synthase
  Pfam annotation: Domain name=PALP; Domain location=1-120; Score= -101.4; E_value=0.092; Accession=PF00291.17; Description=Pyridoxal -phosphate dependent enzyme
IRWTGPEIWKDTAGKVDIFVAGSGSGGTVTGVGKYLKMQNPAIKIICVEPAESPVVSGGEPGKHKIQGIGPGFIPEVLDTSVIDESVTVTTEEAMVTARRLAKEEGLLVGISSGANNRTRQ

SEQ ID NO: 91905 - protein, 94 aa, Setaria italica
  Transcript Sequence Number=SeqID_25931
  Subcellular localization annotation: CTP_CleavageSite=83; ConfidenceScore=5.51e-01
ASSRARRSRRSADPPLPPAHRPSLGLRPQKLSAGPNSGPPPLSPLLAVHSLPPRRLHPIATSSTLPLPAPPPWPSPLSSESVRCDRVIEPALPG

SEQ ID NO: 91906 - protein, 89 aa, Setaria italica
  Transcript Sequence Number=SeqID_25932
  Subcellular localization annotation: CTP_CleavageSite=47; ConfidenceScore=5.70e-01
PAGASVASARPPPWPPPASLPSVGPRPSPTGPPPPCRPCSDPGRPCPCSVQGGARPAFWSLEGHGLLLQVTPSLRACLCPCPPQKQGCS

SEQ ID NO: 91907 - protein, 132 aa, Setaria italica
  Transcript Sequence Number=SeqID_25933
  Gene Ontology: Mol. function=transcription regulator activity; Cellular component=nucleus; Biological process=regulation of transcription
  Homolog annotation: Hit_ID=B6SY64; Match level="QueryCoverage=75%, HitCoverage=30%, E-value=1e-40, Identity=78%"; Hit description =Symbiotic ammonium transporter
MATQWFSNMVMDEPSFFHQWQSDALLEQYTEQQIAVAFGQGEVDQAVAAALTMPLQQPAPAAEHRPRKAAKVNTSWDSCITEQGSPADSSSPTILSFGGHAAAAAFAKAEAHQVPSAPYYGAPAKAPKQEVV

SEQ ID NO: 91908 - protein, 65 aa, Setaria italica
  Transcript Sequence Number=SeqID_25934
MGRSSVALAIVAVAAAILTTAAAAGAQGEVKCGGCSPCGGADCPVLYPSPPPPALPPPPPYYYYS

SEQ ID NO: 91909 - protein, 96 aa, Setaria italica
  Transcript Sequence Number=SeqID_25935
NHKFWGHPVNTCLRLGSTYAITSDWIIIVILKKDILYAFLNLFVRCVLILSNITDETIPNYKQRGKMAHSYSEKTCLFFFSSCPILYRTFFSSILI

SEQ ID NO: 91910 - protein, 65 aa, Setaria italica
  Transcript Sequence Number=SeqID_25936
  Gene Ontology: Mol. function=binding
  Homolog annotation: Hit_ID=B9RT56; Match level="QueryCoverage=98%, HitCoverage=7%, E-value=6e-21, Identity=71%"; Hit description =Pentatricopeptide repeat-containing protein, putative
MSHANRAIEAYQVFEETRLRGCRINVKACISLLDALNKAECLEQAAVVGAVLREIAKSQHASRSL

SEQ ID NO: 91911 - protein, 64 aa, Setaria italica
  Transcript Sequence Number=SeqID_25937
  Gene Ontology: Mol. function=metal ion binding; Cellular component =integral to membrane; Biological process=multicellular organismal development
  Homolog annotation: Hit_ID=B6TJT8; Match level="QueryCoverage=100%, HitCoverage=14%, E-value=5e-20, Identity=71%"; Hit description =Palmitoyltransferase ZDHHC9
MARPQRVYEAWKGNNKFLFGGRLIFGPDAKSLILSVSLIVVPVLVFCAFVARHLRHHFSAYNAG

SEQ ID NO: 91912 - protein, 77 aa, Setaria italica
  Transcript Sequence Number=SeqID_25938
  Gene Ontology: Mol. function=tetrahydrofolylpolyglutamate synthase activity; Cellular component=mitochondrion; Biological process=folic acid and derivative biosynthetic process
  Homolog annotation: Hit_ID=B6SW32; Match level="QueryCoverage=100%, HitCoverage=14%, E-value=7e-36, Identity=93%"; Hit description =Folylpolyglutamate synthase
LGRLSSLITQKVRAHSGNRGNQWDLMAHYLKILELEEPIARMKVIHVAGTKGKGSTCTFTESILRSCGFHTGLFTSP

SEQ ID NO: 91913 - protein, 85 aa, Setaria italica
  Transcript Sequence Number=SeqID_25939
  Subcellular localization annotation: CTP_CleavageSite=54; ConfidenceScore=5.43e-01
ATSTGASVLNTSTPLTPTYGSPPGGYGSSPPAGYGNSPPLYGSMSPPDYGGEISAAAVTVPGSKKTTAILSLTTCVLVVTLTLAG

SEQ ID NO: 91914 - protein, 63 aa, Setaria italica
  Transcript Sequence Number=SeqID_25940
MGEEDEDPDWLTAFQAPSTAPVMLSSGSDASPEASPTRTTSSREQGNGEKQASSDHAGDREDP

SEQ ID NO: 91915 - protein, 55 aa, Setaria italica
  Transcript Sequence Number=SeqID_25941
  Gene Ontology: Mol. function=sequence-specific DNA binding; Cellular component=nucleus; Biological process=regulation of transcription, DNA-dependent
  Homolog annotation: Hit_ID=Q9LEI5; Match level="QueryCoverage=100%, HitCoverage=24%, E-value=6e-23, Identity=96%"; Hit description=MADS box protein 1
  Pfam annotation: Domain name=SRF-TF; Domain location=11-55; Score =71.5; E_value=3.2e-18; Accession=PF00319.10; Description=SRF-type transcription factor (DNA-binding and dimerisation domain)
MAGKRERIAIRRIDNLAARQVTFSKRRRGLFKKAEELSILCDAEVGLVVFSATGK

SEQ ID NO: 91916 - protein, 145 aa, Setaria italica
  Transcript Sequence Number=SeqID_25942
  Gene Ontology: Mol. function=transcription factor activity; Cellular component=nucleus; Biological process=regulation of transcription, DNA-dependent
  Homolog annotation: Hit_ID=B6TCJ4; Match level="QueryCoverage=80%, HitCoverage=51%, E-value=4e-45, Identity=81%"; Hit description=MADS -box transcription factor 47
  Pfam annotation: Domain name=K-box; Domain location=12-94; Score =14.4; E_value=3.1e-05; Accession=PF01486.9; Description=K-box region
SLFFGYKTFLKYTLTLLPKLWFSTLISYYRQMRGEELQRLSVQQLQELEKTLESGLGSVLKIKSPKILDEINGLERKRMQLIEENSRLKEQVARMEMQLGADSEVVYEEGQSSESVTNTSYPPADTDDGGSDTSLRLGLPLFSSK

SEQ ID NO: 91917 - protein, 159 aa, Setaria italica
  Transcript Sequence Number=SeqID_25943
  Gene Ontology: Mol. function=transferase activity, transferring glycosyl groups; Biological process=metabolic process
  Homolog annotation: Hit_ID=B6T427; Match level="QueryCoverage=91%, HitCoverage=43%, E-value=1e-30, Identity=45%"; Hit description =Anthocyanidin 3-O-glucosyltransferase
LRPPSGGGGTGTGEQPLLPEGFEERTRGRGAACMGWVPQVRVLAHAAVGAFLTHCGWGSVAESLRFGHPLVMLPFVVDQGLIARMMSERGVGVEVARRDDDGGFSRDDVAAAVTRVMVEEEGKELALNARRLRELVVGDDGGRQERYVDELVECLQRHS

SEQ ID NO: 91918 - protein, 193 aa, Setaria italica
  Transcript Sequence Number=SeqID_25944
  Gene Ontology: Mol. function=serine-type endopeptidase activity; Biological process=negative regulation of catalytic activity
  Homolog annotation: Hit_ID=O49607; Match level="QueryCoverage=98%, HitCoverage=24%, E-value=5e-42, Identity=48%"; Hit description =Putative subtilisin serine protease
VVNDNRGGPVGDEAEPGRAATPFDYGAGHITLGKALDPGLVYDAGEEDYVAFMCSIGYEPNAIEVVTHKPVSCPPSTGNAASGSDLNYPSISVVLRGGNQSRTVTRTATNVGAQASATYTARVQMAAGSGVSVSAKPEKLVFSPGVKKQSFTVTVTAPSAPGTAAPVYGYLVWSDGGGHDVRSPIVVTWLQPM

SEQ ID NO: 91919 - protein, 68 aa, Setaria italica
  misc_feature (9)..(9): Xaa can be any naturally occurring amino acid
  Transcript Sequence Number=SeqID_25945
GRDVVDNEXAPRPTRHPGAAASSSAATSTCRAAAAAAEPDERMMPANREALYRGMLRDRSSHRVTCSY

SEQ ID NO: 91920 - protein, 129 aa, Setaria italica
  Transcript Sequence Number=SeqID_25946
RGVGMGGRGENLGGHTTSTGADLPASSMGSTARVDLSCKFGGMRRDCDAMTRGGWMGLLGPSLGVAGCSFKLAAPATAGGGRQEQEQELLVRHPVRVGGDLGQPQPGEQRIELPLHGARPLTGPPPRPG

SEQ ID NO: 91921 - protein, 319 aa, Setaria italica
  Transcript Sequence Number=SeqID_25947
  Gene Ontology: Mol. function=calcium-dependent phospholipid binding; Cellular component=cytoplasm; Biological process=response to stress
  Homolog annotation: Hit_ID=B6U6E7; Match level="QueryCoverage=77%, HitCoverage=96%, E-value=4e-76, Identity=63%"; Hit description =Annexin-like protein RJ4
  Pfam annotation: Domain name=Annexin; Domain location=171-236; Score =39.1; E_value=1.7e-08; Accession=PF00191.12; Description=Annexin
  Pfam annotation: Domain name=Annexin; Domain location=248-312; Score =47.3; E_value=6e-11; Accession=PF00191.12; Description=Annexin
  Pfam annotation: Domain name=Annexin; Domain location=88-153; Score =10.9; E_value=0.0014; Accession=PF00191.12; Description=Annexin
  Pfam module annotation: Pfam domain module=Annexin::Annexin::Annexin; Domain location=171-236::248-312::88-153
MEDEVQQLTRAFSGLGGLGVDEPTMVSALARWRRQPEKRSGFRKGFPGFFKSHGEIDRCEEEYMLHLAAEFARFKNLMVLWAMHPWERDARLAHHVLHQHHPSAIVVEVACTRSADELLGARRAYQALFHHSLEEDVAYRARDKPYCNLLVGLVSAYRYEGPRVNEEVARAEAKALGAAVKSAGGKLAENDEVVRILTTRSKPHLVETFKYYKEMHGRRIEEDLAHGNEETLLETVLCLAAPAKYFSQVMEGALRDGADHHGKEALTRVAVTRSDHDMDEIRAAYQEQFGAKLEDAIAAKAHGHYRDALLSLVGAHHQQ

SEQ ID NO: 91922 - protein, 56 aa, Setaria italica
  Transcript Sequence Number=SeqID_25948
  Gene Ontology: Mol. function=diacylglycerol kinase activity; Cellular component=plasma membrane; Biological process=activation of protein kinase C activity
  Homolog annotation: Hit_ID=Q6YW20; Match level="QueryCoverage=92%, HitCoverage=9%, E-value=6e-22, Identity=94%"; Hit description =Putative diacylglycerol kinase variant A
SAVAGGDGTVGWVLGCLGELYVQNREPVPPVAVIPLGTGNDLSRSFGWGASFSFSL

SEQ ID NO: 91923 - protein, 41 aa, Setaria italica
  Transcript Sequence Number=SeqID_25949
MYPPLRPYAATTVTANCTDTPLDCIRPCPGGVEDCSQYALP

SEQ ID NO: 91924 - protein, 82 aa, Setaria italica
  Transcript Sequence Number=SeqID_25950
  Subcellular localization annotation: CTP_CleavageSite=57; ConfidenceScore=5.10e-01
EQPLIVIDGIARGFSPAMEAVPRNEASSAPVLVTAHRTGDRKVAVTVSNSSVTVAPRAAAGAGADHHRRARGGRVPALLPRG

SEQ ID NO: 91925 - protein, 124 aa, Setaria italica
  misc_feature (53)..(53): Xaa can be any naturally occurring amino acid
  misc_feature (60)..(60): Xaa can be any naturally occurring amino acid
  Transcript Sequence Number=SeqID_25951
  Subcellular localization annotation: CTP_CleavageSite=55; ConfidenceScore=5.30e-01
MGAERSMMTRMTMSSTYAATPVFALPHGHSSSMPPPPPAQPQPPPPPRMREAXLAASRKXRDGGARLRGVAWTRHPKNPNRPRGEENRRGRGGRGCCGGGVASGVGGGWKERRREERLSCRTCS

SEQ ID NO: 91926 - protein, 96 aa, Setaria italica
  Transcript Sequence Number=SeqID_25952
  Gene Ontology: Mol. function=nucleoside-triphosphatase activity; Cellular component=integral to membrane; Biological process=transport
  Homolog annotation: Hit_ID=Q6ZIV9; Match level="QueryCoverage=87%, HitCoverage=9%, E-value=2e-34, Identity=79%"; Hit description =Putative ABC transporter
CLVNKQVINVILPAHSMEEAEVLCDRLGIFVDGDFQCLGNPKELKARYGGTYILTVTTSLDQEQEVELLVHQLSPSANKIYHLSGTQKFELPEARR

SEQ ID NO: 91927 - protein, 348 aa, Setaria italica
  Transcript Sequence Number=SeqID_25953
  Gene Ontology: Mol. function=nucleoside-triphosphatase activity; Cellular component=integral to membrane; Biological process=transport
  Homolog annotation: Hit_ID=Q6ZIV9; Match level="QueryCoverage=88%, HitCoverage=33%, E-value=1e-156, Identity=86%"; Hit description =Putative ABC transporter
  Pfam annotation: Domain name=ABC_tran; Domain location=31-213; Score =163.0; E_value=9.1e-46; Accession=PF00005.19; Description=ABC transporter
LVSDDSLVYPGRDGNPDKQAVRGLSIALQKGQCFGMLGPNGAGKTSFINMMIGLIRPTSGTAYVHGMDINTDMGNIYTNMGVCPQHNLLWETLTGKEHLFFYGRLKNLKGATLVKAVEHSLKSVNLSHGNIGDKQVKKYSGGMKRRLSVAISLIGDPKVVFMDEPSTGLDPASRNNLWNVVKEAKRNRAIILTTHSMEEAEVLCDRLGIFVDGDFQCLGNPKELKARYGGTYILTVTTSLDQEQEVELLVHQLSPSANKIYHLSGTQKFELPKQEVKIAHVFAAVENAKRRLTIHAWGLVDTTLEDVFIKVARGAQAFKRVCIDNTLNTVFMAGNGPQLLDGTSLHAA

SEQ ID NO: 91928 - protein, 57 aa, Setaria italica
  Transcript Sequence Number=SeqID_25954
PPNYTTLATHIIHRLLVCDDMGFRMDHGLLEPFSATCTDGAALLNRNPFIMGFTFSA

SEQ ID NO: 91929 - protein, 91 aa, Setaria italica
  Transcript Sequence Number=SeqID_25955
  Gene Ontology: Mol. function=endonuclease activity; Cellular component=intracellular
  Homolog annotation: Hit_ID=B4F826; Match level="QueryCoverage=95%, HitCoverage=22%, E-value=1e-37, Identity=82%"; Hit description =Endonuclease/Exonuclease/phosphatase family protein
KPGENGWTYDTKANIMLSGNRKLQKRLDRFVCKLSDFKVDSIEMIGKEAIPGITYIKEKKVRQEIRNLELPVFPSDHFGLVLTISSQSQKF

SEQ ID NO: 91930 - protein, 346 aa, Setaria italica
  Transcript Sequence Number=SeqID_25956
  Homolog annotation: Hit_ID=B6TTZ3; Match level="QueryCoverage=66%, HitCoverage=73%, E-value=1e-119, Identity=90%"; Hit description =Decarboxylase family protein
  Pfam annotation: Domain name=Lysine_decarbox; Domain location=169 -320; Score=112.6; E_value=1.4e-30; Accession=PF03641.6; Description =Lysine decarboxylase family
TEQGSADCGVTEDARQPWKRRRRARLGPGFGPQLRPALGFRHSQRRAPSCPCLRPLRPAARLLCGGGGARPRGTIAAASAGQRRQLGQLEAEAEAGSALSPPRSSTHEVREEMTRCFDLVRRLGRGAVYLGSSRVPPTHPHFLQTTELAREIARLLDCTTWTGAGPGLMDAAIQGAIEADKPIGGLKIAKEAGEWTSSGFHPYLPSETYLTCRFFSARKHGLVDAAVRSSPSDRTAVIALPGGIGTLDELFEIMALIQLERIGSELPVPFLLLNYDSYYSKLLDFLNDCQDWGTVAPGEVAALWKVCDGNYEALEYLAEFYNVPAAERNYQISPQLKQHRTSYAMS

SEQ ID NO: 91931 - protein, 179 aa, Setaria italica
  misc_feature (101)..(101): Xaa can be any naturally occurring amino acid
  Transcript Sequence Number=SeqID_25957
  Gene Ontology: Mol. function=nucleotide binding; Biological process =defense response
  Homolog annotation: Hit_ID=Q60E25; Match level="QueryCoverage=97%, HitCoverage=15%, E-value=5e-53, Identity=57%"; Hit description =Putative NBS-LRR-like protein
  Pfam annotation: Domain name=NB-ARC; Domain location=15-179; Score= -68.7; E_value=4.4e-05; Accession=PF00931.14; Description=NB-ARC domain
DVVGEKIEEDTKKIVDLLIRNVDSRVGLNSNNVIVDLAITGMGGIGKTTLARMVFGDSRVEENFEDRIWLSVNQEVNEISVLQSLLASFGAKHEGFVGNRXLLERALKDTVRQKKSLLVMDDVWSEKVWNDLLRVPLSHGASGSRVMVTTRNDGVAYGMKAQHLHRVDKLQTEDAWYFN

SEQ ID NO: 91932 - protein, 117 aa, Setaria italica
  Transcript Sequence Number=SeqID_25958
  Gene Ontology: Mol. function=protein binding; Cellular component =extracellular region
  Homolog annotation: Hit_ID=A0AAQ3; Match level="QueryCoverage=100%, HitCoverage=33%, E-value=9e-37, Identity=67%"; Hit description =Polygalacturonase inhibiting protein 4
  Subcellular localization annotation: CTP_CleavageSite=67; ConfidenceScore=5.26e-01
RLTGAIPPLLLVNSGAEAFLTLSHNNLSGSVPAEFASVSFVQVDLSRNALAGDASVLFGRGKPLLVSVNLSRNAFSFDMSRLELPERLASLDVSHNGIHGGVPAAAGNLSQLMFFNV

SEQ ID NO: 91933 - protein, 99 aa, Setaria italica
  misc_feature (8)..(8): Xaa can be any naturally occurring amino acid
  Transcript Sequence Number=SeqID_25959
  Gene Ontology: Mol. function=electron carrier activity; Biological process=response to oxidative stress
  Homolog annotation: Hit_ID=Q9LGU0; Match level="QueryCoverage=98%, HitCoverage=28%, E-value=4e-36, Identity=82%"; Hit description=Class III peroxidase 6
  Pfam annotation: Domain name=peroxidase; Domain location=1-99; Score=- 40.7; E_value=9.2e-07; Accession=PF00141.15; Description=Peroxidase
  Subcellular localization annotation: CTP_CleavageSite=55; ConfidenceScore=5.30e-01
DASVLLDXAPGSNATSVEKASQANNPSLRGFGVIDRAKRVLERRCRRTVSCADIVAFAARDACRIMGGIGFAVPAGRRDGRVSNASEVLGNLPGPFANV

SEQ ID NO: 91934 - protein, 50 aa, Setaria italica
  Transcript Sequence Number=SeqID_25960
IRRRSASATMRFSSNSDIAYYFPGLLSLSFKRCGLDPTMCHTLRARTIYQ

SEQ ID NO: 91935 - protein, 152 aa, Setaria italica
  Transcript Sequence Number=SeqID_25961
  Gene Ontology: Mol. function=voltage-gated potassium channel activity; Cellular component=integral to membrane; Biological process=potassium ion transport
  Homolog annotation: Hit_ID=Q5EEQ2; Match level="QueryCoverage=100%, HitCoverage=19%, E-value=1e-71, Identity=87%"; Hit description =Potassium outward rectifying channel (Fragment)
  Pfam annotation: Domain name=Ank; Domain location=17-49; Score=0.4; E_ value=32; Accession=PF00023.22; Description=Ankyrin repeat
  Pfam annotation: Domain name=Ank; Domain location=50-82; Score=37.6; E_value=5.1e-08; Accession=PF00023.22; Description=Ankyrin repeat
  Pfam module annotation: Pfam domain module=Ank::Ank; Domain location =17-49::50-82
RVAALLYAKGAKLSLKNAGSHLCTAVAKGDSDFIRRSLACGADPNCRDYDHRTPLHIAAAEGLYLIAKMLVEAGASVFATDRWGTTPLDEARKCGGRMLLALLEQARADELSKFPERGEEVRDKMHPRRCSVFPYHPWRAAGAGAEQRRKEG

SEQ ID NO: 91936 - protein, 78 aa, Setaria italica
  Transcript Sequence Number=SeqID_25962
  Gene Ontology: Mol. function=serine-type endopeptidase activity; Cellular component=plasma membrane; Biological process=protein modification process
  Homolog annotation: Hit_ID=Q0WRN6; Match level="QueryCoverage=100%, HitCoverage=91%, E-value=1e-37, Identity=100%"; Hit description =Polyubiquitin 4 UBQ4
  Pfam annotation: Domain name=ubiquitin; Domain location=1-45; Score =52.8; E_value=1.3e-12; Accession=PF00240.15; Description=Ubiquitin family
IQDKEGIPPDQQRLIFAGKQLEDGRTLADYNIQKESTLHLVLRLRGGMQIFVKTLTGKTITLEVESSDTIDNVKAKIQ

SEQ ID NO: 91937 - protein, 147 aa, Setaria italica
  Transcript Sequence Number=SeqID_25963
WHLPDYPLDPVLCNKVSELQEKSSYRRLLFDCVNIALIEIGENALLSAFPWRKRHSRTWRNTSSPDLGVEVWSILKDWIYGARMFVVSRRDNAGIMLDRIVKQEVEGRGWVNSMMLQVVGITEHLEGGVMEELVEEAVLDFAVCFRR

SEQ ID NO: 91938 - protein, 61 aa, Setaria italica
  Transcript Sequence Number=SeqID_25964
MVLSLYPCVLSMAMCPRSSRRACWWLAKTWQAGRERRRDCRYLALWSGHWRRGLIIGTRHY

SEQ ID NO: 91939 - protein, 82 aa, Setaria italica
  Transcript Sequence Number=SeqID_25965
ERRRREHRLAPLLHLRSPPVASAPALYTNSPTPPPPARPFRGGVHSHDREREKEAPSASISSIPPPSLYRIEIGRRNGARVA

SEQ ID NO: 91940 - protein, 192 aa, Setaria italica
  misc_feature (43)..(43): Xaa can be any naturally occurring amino acid
  misc_feature (71)..(71): Xaa can be any naturally occurring amino acid
  Transcript Sequence Number=SeqID_25966
  Gene Ontology: Mol. function=transcription regulator activity; Cellular component=nucleus; Biological process=transcription
  Homolog annotation: Hit_ID=Q9SG88; Match level="QueryCoverage=44%, HitCoverage=20%, E-value=5e-16, Identity=52%"; Hit description =T7M13.10 protein
  Pfam annotation: Domain name=TFIIS; Domain location=114-192; Score =92.4; E_value=1.6e-24; Accession=PF08711.3; Description =Transcription factor S-II (TFIIS)
GSAAASATPATPIEEDKGSVRRVAEKESKVDSSSNGAHGGGTXGHGEEDDDSDSDDERLRRAAASNYGHNXDDDDDDDQEEEDEQQHAADDAEEEEENHEAEELEALTNEIDEESQIVGEVLRIKDLLLHKEDHSDATLFESLRRLQLMQLSVSTLKATEIGRAVNRLRKHNSQQIRHLVRTLIEGWKVLVD

SEQ ID NO: 91941 - protein, 132 aa, Setaria italica
  Transcript Sequence Number=SeqID_25967
  Subcellular localization annotation: CTP_CleavageSite=65; ConfidenceScore=5.25e-01
DQIELHVHSTIIQTWLDSPNAGASLSPCSFKGKPFIGGVLFKKVCSSPGSWFQLLWMSINTFRVRTRQAWQQFISEEKITEELAPPVRPIPKVIPGLHHRLSVLMLGLWYVTQLHYLYRALPFGCTDESLNS

SEQ ID NO: 91942 - protein, 64 aa, Setaria italica
  Transcript Sequence Number=SeqID_25968
MGWLHSLFSPLRRMWVRAHSERRNRRGMHLLYKDVQSCQDEDVQVLWSILIDSHRHPALLKLKL

SEQ ID NO: 91943 - protein, 106 aa, Setaria italica
  Transcript Sequence Number=SeqID_25969
  Gene Ontology: Mol. function=citrate transmembrane transporter activity; Cellular component=integral to membrane; Biological process=citrate transport
  Homolog annotation: Hit_ID=B9RIV7; Match level="QueryCoverage=89%, HitCoverage=16%, E-value=2e-29, Identity=69%"; Hit description =Arsenite transport protein, putative
IIILLLSNLASNVPTVLLMGGEVASAAALISPAAVIRSWLLLAWVSTVAGNLSLLGSAANLIVCEQARRAPRNAYDLTFWNHIVFGVPSTLIVTAVGIPLIGKINV

SEQ ID NO: 91944 - protein, 103 aa, Setaria italica
  Transcript Sequence Number=SeqID_25970
  Subcellular localization annotation: CTP_CleavageSite=64; ConfidenceScore=5.28e-01
HNTSSWNSPATLQVYNQKIHEHVLPMARKAGSSHFSKNKQMSKQFPYTHRVGQLVTPRLGSLVRHQPGNQPMQVELASPLTNEGPDLSYEIGILNFWREKSIR

SEQ ID NO: 91945 - protein, 58 aa, Setaria italica
  Transcript Sequence Number=SeqID_25971
  Subcellular localization annotation: CTP_CleavageSite=40; ConfidenceScore=5.02e-01
MNVPFFTPMVHRRVALVSTLTTRVLSVSHKQLFVTYVGTLVQHVFSHAILAWRFFICY

SEQ ID NO: 91946 - protein, 107 aa, Setaria italica
  Transcript Sequence Number=SeqID_25972
  Gene Ontology: Cellular component=chloroplast envelope
  Homolog annotation: Hit_ID=B9R7D1; Match level="QueryCoverage=98%, HitCoverage=36%, E-value=4e-15, Identity=39%"; Hit description =Protein translocase, putative
WHFRFLPDSSQVANAIKLMQDEGLYAREGFPGVPVFQSRSLVLMSDNKRYRPVFFRKEDLDNSLYRTSRDQQKPNPAVRLGDTQVSSLEDIIKSMKDNSSSKWDDVV

SEQ ID NO: 91947 - protein, 89 aa, Setaria italica
  Transcript Sequence Number=SeqID_25973
  Homolog annotation: Hit_ID=B9R7D1; Match level="QueryCoverage=84%, HitCoverage=26%, E-value=5e-09, Identity=39%"; Hit description =Protein translocase, putative
SRSLVLMSDNKRYRPVFFRKEDLDNSLYRTSRDQQKPNPAVRLGDTQVSSLEDIIKSMKDNSSSKWDDVVFIPPGFDLATGSKPSHLNK

SEQ ID NO: 91948 - protein, 61 aa, Setaria italica
  Transcript Sequence Number=SeqID_25974
EACKFKIYPCSSTFSSYQKSSFTTEYTSILTSILIDSYAKRTTCTNCFGNYKCPRTKINRF

SEQ ID NO: 91949 - protein, 34 aa, Setaria italica
  Transcript Sequence Number=SeqID_25975
GIGAAFALICAVLAVVLLPKTKGLSNATLMAGGH

SEQ ID NO: 91950 - protein, 211 aa, Setaria italica
  Transcript Sequence Number=SeqID_25976
  Gene Ontology: Mol. function=sucrose transmembrane transporter activity; Cellular component=integral to plasma membrane; Biological process=sucrose transport
  Homolog annotation: Hit_ID=B6T7Q1; Match level="QueryCoverage=83%, HitCoverage=33%, E-value=9e-72, Identity=76%"; Hit description =Sucrose transporter BoSUT1
  Subcellular localization annotation: CTP_CleavageSite=62; ConfidenceScore=5.10e-01
DRTDLLFCSIALGVTSFLIPKLCRKLTSRVVWSISNLMVFAIMTVMVVLGMISMKGYNPSLTASLIGPDKTYRGIALAVFALIGIPQAVLFSVPWAVASEVASEEGGGQGLTIGVLNIAIVLPQLVIALTAGPIDGAFNKGNTPAFGIGAAFALICAVLAVVLLPKTKGLSNATLMAGGQISFFTIDLSSSIIASFEHNTKLLIPCCSSFS

SEQ ID NO: 91951 - protein, 325 aa, Setaria italica
  Transcript Sequence Number=SeqID_25977
  Gene Ontology: Mol. function=sucrose transmembrane transporter activity; Cellular component=integral to plasma membrane; Biological process=sucrose transport
  Homolog annotation: Hit_ID=B6T7Q1; Match level="QueryCoverage=96%, HitCoverage=59%, E-value=1e-160, Identity=86%"; Hit description =Sucrose transporter BoSUT1
LTWICGPIAGFVVQPIVGYYSDRCTAKIGRRRPFVLAGCIIICLSVLMIGFSADIGRHLGDTKEHCSTFKGSRWSAAAVYIVGFWFLDFANNTVQGPARAMMADLSAGQHGPNVGQAIFSLWMALGSVLGYLSGANAKWHEWLPWLKTAACCDACANLKGAFLTAVILIIISMSVTLALAGEEQLAKDDVDVSSGGACSAFADLFKSLKNLPPAMFKVLAVTAVTWLSWFPFFQYNTDWMGREIYHGEPQGAGGKADAFDAGVREGAVGLLFCSIALGVTSFLIPKLCRKLTSRVVWSISNLMVFAIMTVMVVLGNNRILPIERD

SEQ ID NO: 91952 - protein, 79 aa, Setaria italica
  Transcript Sequence Number=SeqID_25978
  Subcellular localization annotation: CTP_CleavageSite=52; ConfidenceScore=5.28e-01
SSAEQSPSRKRADALARLRAAFLAAITHRRRRRQLGSCVTGTIFGRRRGRVHVALQTDPRSAPVLLVEMAAYSTGALVR

SEQ ID NO: 91953 - protein, 74 aa, Setaria italica
  Transcript Sequence Number=SeqID_25979
QLVLTPSTNAQFSSSDSMIPRDQGRDSFSYGSNIPIQINLGLSAYMITTTYNIISRLNRFNTENRREEGGCWLH

SEQ ID NO: 91954 - protein, 89 aa, Setaria italica
  Transcript Sequence Number=SeqID_25980
LSYVVGLFLYGLCDCGFQSLMYLPFQLCCRYPPREHVSEDPPPQTAGIALRRVRRTPAAELSGRRGVSPGSPQRQPRVTAAAAFRCLAA

SEQ ID NO: 91955 - protein, 115 aa, Setaria italica
  Transcript Sequence Number=SeqID_25981
  Subcellular localization annotation: CTP_CleavageSite=43; ConfidenceScore=5.76e-01
SFAAAPPRTTPLYPTPRTWPPPHRLTITHRRTSPRASPLYACASSHVASSTPRNPSLAPSRLPLLSPPQLLSRGEGSSTSMPPARPCARRPCRASMASLTRLAQTTTAATPRRHR

SEQ ID NO: 91956 - protein, 123 aa, Setaria italica
  misc_feature (20)..(20): Xaa can be any naturally occurring amino acid
  Transcript Sequence Number=SeqID_25982
  Gene Ontology: Mol. function=nucleotide binding; Biological process =apoptosis
  Homolog annotation: Hit_ID=Q2QRB9; Match level="QueryCoverage=75%, HitCoverage=9%, E-value=8e-11, Identity=46%"; Hit description=NB-ARC domain containing protein, expressed
MDYGSFVMPKSMFLDLSSIXHVFLLRYLKVRGFRLKLPKKFGELKHLLTVDVSFVWLYPSNQSSDFTSLSALRHLILPSTQESLVRRNGISRLCNLRTLFHFDIRTNSLECIRDLCELANLRE

SEQ ID NO: 91957 - protein, 56 aa, Setaria italica
  Transcript Sequence Number=SeqID_25983
  Gene Ontology: Mol. function=DNA-directed RNA polymerase activity
KDLQELTRRSKPNDVLKDALQDLMVMCQYIRGTFDTSVADFRGNKPEVMDIDLNKK

SEQ ID NO: 91958 - protein, 82 aa, Setaria italica
  misc_feature (33)..(33): Xaa can be any naturally occurring amino acid
  Transcript Sequence Number=SeqID_25984
  Homolog annotation: Hit_ID=B6SI61; Match level="QueryCoverage=36%, HitCoverage=14%, E-value=2e-09, Identity=93%"; Hit description=RING -H2 finger protein ATL2A
  Pfam annotation: Domain name=zf-C3HC4; Domain location=3-28; Score =1.4; E_value=0.07; Accession=PF00097.17; Description=Zinc finger, C3HC4 type (RING finger)
RVLPPCGHAFHAACVDTWLLCTSTCPSCRSDPXYVAPAPALVAASSDPLQCCASAQASTEPEYSVTVAVAVVERGPCRASVS

SEQ ID NO: 91959 - protein, 95 aa, Setaria italica
  Transcript Sequence Number=SeqID_25985
ELSNIVTFINKLSHVVRCLKNALYFTASHTMATEMDWMIFVQCVDFMRFCISNHGGNINLYNNRSSGYACGYGKIFVFGLMAAAFANYCCVLCLC

SEQ ID NO: 91960 - protein, 65 aa, Setaria italica
  Transcript Sequence Number=SeqID_25986
  Gene Ontology: Mol. function=citrate transmembrane transporter activity; Cellular component=integral to membrane; Biological process=citrate transport
  Homolog annotation: Hit_ID=B9RVB9; Match level="QueryCoverage=93%, HitCoverage=12%, E-value=4e-15, Identity=59%"; Hit description =Arsenite transport protein, putative
  Subcellular localization annotation: CTP_CleavageSite=33; ConfidenceScore=5.14e-01
VGSSATPIGNPQNLVIAFNSRITFLQFFFGILPAMLAGMAVNTVMLLCMYWKDLEGASPDEVAAV

SEQ ID NO: 91961 - protein, 208 aa, Setaria italica
  Transcript Sequence Number=SeqID_25987
  Gene Ontology: Mol. function=metal ion binding; Cellular component =intracellular; Biological process=response to stress
  Homolog annotation: Hit_ID=A8QZ75; Match level="QueryCoverage=84%, HitCoverage=83%, E-value=1e-52, Identity=61%"; Hit description=AN17
  Pfam annotation: Domain name=zf-AN1; Domain location=127-169; Score =3.6; E_value=0.031; Accession=PF01428.8; Description=AN1-like Zinc finger
  Pfam annotation: Domain name=zf-AN1; Domain location=41-83; Score =18.7; E_value=0.00039; Accession=PF01428.8; Description=AN1-like Zinc finger
  Pfam module annotation: Pfam domain module=zf-AN1::zf-AN1; Domain location=127-169::41-83
DRQRRKKPKDSLQKKKREARERTAAMARRGTEAFPYLGAHCDEPDCNQLDFLPFDCDGCGKVFCAAHRTYREHGCAKAADQGRTVVVCPDCGDAIERTAPGQDEKAVLEAHARSRRCDPARKRKPRCPARRCKEPLTFSNTSECKACGLKVCLRHRFPADHDCAGKSVGASKAAAAAAARRAGGECAKDAKKGSGGWTLPAAVRNLKI

SEQ ID NO: 91962 - protein, 148 aa, Setaria italica
  Transcript Sequence Number=SeqID_25988
  Gene Ontology: Mol. function=protein dimerization activity; Cellular component=nucleus; Biological process=regulation of transcription, DNA-dependent
  Homolog annotation: Hit_ID=Q5W670; Match level="QueryCoverage=91%, HitCoverage=40%, E-value=3e-34, Identity=61%"; Hit description=Auxin- responsive protein IAA18
MEEGSRGRAPSTPQLLDLIRGEGERKVIGEAGEQGRSARTTSYEAEEDTKLELKLGLPGVHDEERAAGPREKMEQQQESCTALSLGCFPSHSRLATNTATTTGAKRGFFATVGAKPEGCNQRHQDREGCGNELTLGGENMAGERKKGC

SEQ ID NO: 91963 - protein, 85 aa, Setaria italica
  Transcript Sequence Number=SeqID_25989
MACGGGRAAHKAFLLCNYTLLGAASACIFLTLSLRLAPSPCGLLLLFLHALTAVFAAAGCSGSFTDGGAGAGRAHTAHTAGAVLT

SEQ ID NO: 91964 - protein, 179 aa, Setaria italica
  Transcript Sequence Number=SeqID_25990
  Gene Ontology: Mol. function=transferase activity, transferring glycosyl groups; Biological process=metabolic process
  Homolog annotation: Hit_ID=Q6Z381; Match level="QueryCoverage=99%, HitCoverage=36%, E-value=3e-34, Identity=45%"; Hit description =Putative UDP-glucosyltransferase
GLPEGAESTADVPPEKNELIKKALDGLAAPFAAFLADAVAGGRRPDWIVIDFCHSWVPAIADEHGVPCAAFQIVPGAMIAFFGTRSANAAHPRTTPEDFTAPPEWCASFPPGTAYRRHEARWVADAFKVNASGVSDMDRVCEITERTRFTIYRSDNEVEPAGAGVFSLLTDLWQKPATP

SEQ ID NO: 91965 - protein, 211 aa, Setaria italica
  misc_feature (150)..(150): Xaa can be any naturally occurring amino acid
  Transcript Sequence Number=SeqID_25991
  Gene Ontology: Cellular component=integral to membrane
  Homolog annotation: Hit_ID=B6TI82; Match level="QueryCoverage=95%, HitCoverage=75%, E-value=2e-74, Identity=66%"; Hit description =Transmembrane protein 56
  Pfam annotation: Domain name=TRAM_LAG1_CLN8; Domain location=28-210; Score=103.9; E_value=5.5e-28; Accession=PF03798.8; Description=TLC domain
KLSYDITHMISAIYFKGYASLTNIRKIEWNNRGMSNVHAIFITIMSVYLVFLSGLFSDRLDGPVTFRSSHLSNFTLGVSVGYFIADLAMIFWFYPSLGGMEYVFHHILSLVCAVYAMLSGEGQLYTYMVLISETTTPGINLRWFLDVAGXKNSKAYLVNGIAMFVTWLVARIILFLYLFYHIFMNYDQVKQMDTVACLLISVAPYCTITKN

SEQ ID NO: 91966 - protein, 156 aa, Setaria italica
  Transcript Sequence Number=SeqID_25992
SPSPEQEVNYCCVCQTPHKQSNGYLCSEQEAPTGPLHGAHRGSCGCRRDADLPGAKQCDGLCRADQGFQGEEPGEAVLAGLLQAAHGAVWLRLRPPQRAQKCQPARHPGALLRQGHRLRLEPSLLRFIYILRGCFIDRMRAAHSLRWQFYLSCLCA

SEQ ID NO: 91967 - protein, 75 aa, Setaria italica
  Transcript Sequence Number=SeqID_25993
  Gene Ontology: Mol. function=protein serine/threonine kinase activity; Biological process=protein amino acid phosphorylation
  Homolog annotation: Hit_ID=Q53QB9; Match level="QueryCoverage=54%, HitCoverage=5%, E-value=4e-10, Identity=56%"; Hit description =Protein kinase domain containing protein
MAPLRILLWHLLVPALVTSHLVAAASNPSTPGPDCPSKCGNIDIPHPFGIGKGCGRPGFSPYNLTCDYSYSPPRL

SEQ ID NO: 91968 - protein, 102 aa, Setaria italica
  Transcript Sequence Number=SeqID_25994
  Gene Ontology: Mol. function=sugar binding
  Homolog annotation: Hit_ID=B6SI79; Match level="QueryCoverage=96%, HitCoverage=50%, E-value=2e-21, Identity=59%"; Hit description=ATPP2- B1
AICLQHMQGEEEVAVHRRKQQYMRLRKGYGRKMVTREADPDIRCPRRRGDGWVEVELGEFAVATGDGEDGGVVEVRLEEVDSRRWKRGLIVQGIEIRPKHAC

SEQ ID NO: 91969 - protein, 86 aa, Setaria italica
  Transcript Sequence Number=SeqID_25995
YALCMIEQILIRKSSLLVYMHIHEPILGDHLGRSFLLLPPPLALRGIPIRVALSTAARGRRHPPRRLGLPVYSCQRPELGPLPLLP

SEQ ID NO: 91970 - protein, 721 aa, Setaria italica
  misc_feature (29)..(29): Xaa can be any naturally occurring amino acid
  misc_feature (38)..(38): Xaa can be any naturally occurring amino acid
  Transcript Sequence Number=SeqID_25996
  Gene Ontology: Mol. function=ATP-dependent helicase activity; Cellular component=intracellular
  Homolog annotation: Hit_ID=B9EZ83; Match level="QueryCoverage=98%, HitCoverage=41%, E-value=0.0, Identity=87%"; Hit description =Fructose-bisphosphate aldolase
  Pfam annotation: Domain name=DUF1605; Domain location=406-517; Score =88.0; E_value=3.4e-23; Accession=PF07717.8; Description=Domain of unknown function (DUF1605)
  Pfam annotation: Domain name=HA2; Domain location=278-369; Score =115.6; E_value=1.6e-31; Accession=PF04408.15; Description=Helicase associated domain (HA2)
  Pfam annotation: Domain name=Helicase_C; Domain location=122-216; Score=57.1; E_value=6.6e-14; Accession=PF00271.23; Description =Helicase conserved C-terminal domain
  Pfam annotation: Domain name=dsrm; Domain location=622-684; Score =50.5; E_value=6.6e-12; Accession=PF00035.17; Description=Double -stranded RNA binding motif
  Pfam module annotation: Pfam domain module=DUF1605::HA2::Helicase _C::dsrm; Domain location=406-517::278-369::122-216::622-684
VRNHFLEDILEFTGHRLTPYNQIDDYGQXKSWKMQKQXLRKRKSQIASAVEDAVETADLRNYSPRTRDSLSCWNPDSIGFNLIENVLCHICQKERSGAVLVFMTGWDDINALKEQLQANPLLGDPSKVLLLACHGSMASSEQKLIFDKPEPGVRKIVLATNLAETSITINDVVFVVDCGKAKETSYDALNNTPCLLPTWISKASARQRRGRAGRVQPGECYHLYPRCVYDAFADYQLPELLRTPLQSLCLQIKSLRLGSISEFLSRALQSPESLSVQNAIEYLKVIGAFDQNEDLTVLGKHLSMLPVEPKLGKMLIFGAIFNCLDPILTIVSGLSVRDPFLTPFDKKDLAESAKLQFSCRDYSDHLALVRAYEGWREAERDRAGYDYCWKNFLSVQTLKAIDSLRRQFLFLLKDTGLVDENMTVCNKWSRDENLVRAVICAGLYPGVSSVVNKEKSISLKTMEDGQVMLYSSSVNGKEAKIPFPWLVFNEKVKVNSVFLRDSTAVSDSILLLFGGNIKQGGLDGHLKMLGGYLEFFMNRDLASTYLSLKNELENLIHCKLQNPRMDIQTSEELLSAIRLLVSEDPCSGRFVYGRQEQRSKKAKTMLSSSSMNGGGGNGGENAKNQLQTLLTRAGHSNPSYKTKQIKNSLFRSTVEFNGMQFVGQPCANKKLAEKDAAAEALNWLTGDGGGAAADTRDSRNADPMSVLMKPPRRRRHSHRRS

SEQ ID NO: 91971 - protein, 97 aa, Setaria italica
  Transcript Sequence Number=SeqID_25997
  Pfam annotation: Domain name=DUF2039; Domain location=1-51; Score =31.3; E_value=1.2e-08; Accession=PF10217.1; Description =Uncharacterized conserved protein (DUF2039)
WKRRYGKYKQIVEPAKCQKCGKRAVRQAYHNVCRDCSKNLGICAKCCTRVNDLVGRDAIEEDSERKALEEAIRGARERERRTLLRIMNKSKGEDSGP

SEQ ID NO: 91972 - protein, 191 aa, Setaria italica
  Transcript Sequence Number=SeqID_25998
  Gene Ontology: Biological process=cell adhesion
  Homolog annotation: Hit_ID=Q9VX62; Match level="QueryCoverage=54%, HitCoverage=41%, E-value=5e-13, Identity=39%"; Hit description=CG8675
  Pfam annotation: Domain name=DUF2039; Domain location=7-102; Score =195.2; E_value=1.8e-55; Accession=PF10217.1; Description =Uncharacterized conserved protein (DUF2039)
MSKRQGPPKHQNSYAWKPHLGQKINETEPGGRFRPLSEITGVCQRCRDQIDWKRRYGKYKQIVEPAKCQKCGKRAVRQAYHNVCRDCSKNLGICAKCCTRVNDLVGRDAIEEDSERKALEEAIRGARERERRTLLRIMNKSKGEDSGPSVPKIADRSREGDIFPAASLDEYAEQSREQDDSDEEAGDFVED

SEQ ID NO: 91973 - protein, 102 aa, Setaria italica
  Transcript Sequence Number=SeqID_25999
  Homolog annotation: Hit_ID=B6TZZ7; Match level="QueryCoverage=73%, HitCoverage=37%, E-value=3e-26, Identity=74%"; Hit description=Ku70 -binding protein
  Pfam annotation: Domain name=Peptidase_M76; Domain location=32-102; Score=-70.7; E_value=0.011; Accession=PF09768.1; Description =Peptidase M76 family
MAEGQGGAGGAAGVRAEAESSSERRTQPAMSREDCVAGIRSALKHPTVRFLREQMEKAGCKVFPSLILATNCSSAGGYGSGEGIKVCCNHMTLQDEINQVII

SEQ ID NO: 91974 - protein, 79 aa, Setaria italica
  Transcript Sequence Number=SeqID_26000
  Subcellular localization annotation: CTP_CleavageSite=66; ConfidenceScore=5.10e-01
ANFSLLNPDKLTRITAFARAKKRRKLVLWHQSKLKFRHVNWLQRRQPKWMLCSSSCYISSSMDTMSCRQKWSLQSNVFF

SEQ ID NO: 91975 - protein, 175 aa, Setaria italica
  Transcript Sequence Number=SeqID_26001
  Gene Ontology: Mol. function=DNA binding; Cellular component=nucleus; Biological process=regulation of transcription, DNA-dependent
  Homolog annotation: Hit_ID=Q6ZBH6; Match level="QueryCoverage=100%, HitCoverage=48%, E-value=8e-65, Identity=73%"; Hit description =Transcription factor PCF2
  Pfam annotation: Domain name=TCP; Domain location=60-174; Score =143.2; E_value=8.3e-40; Accession=PF03634.5; Description=TCP family transcription factor
MEAQAQDRAEEGEAARQQHVVGAATAAAAAGMAMGAIPMHGFMVPKPEPVEYFGGMAVVRGKPPPRNRDRHTKVEGRGRRIRMPAACAARIFQLTRELGHKSDGETIRWLLQQSEPAIIAATGTGTVPAIATTVDGVLRIPTQSSSSSSPSSLAMVDGEESSANKRRRKLQPTRA

SEQ ID NO: 91976 - protein, 91 aa, Setaria italica
  Transcript Sequence Number=SeqID_26002
RGRLGRFLGFRLQCVDTFLLYLVGDGWITANSSPIQLTCSGERNIRSSSSDQPPRPDSRPTLTSTPAQKTKSFPPEEPKMLRIFARHASVE

SEQ ID NO: 91977 - protein, 264 aa, Setaria italica
  Transcript Sequence Number=SeqID_26003
  Gene Ontology: Mol. function=enzyme inhibitor activity
  Homolog annotation: Hit_ID=B6SV90; Match level="QueryCoverage=80%, HitCoverage=38%, E-value=2e-68, Identity=64%"; Hit description=PAPA -1-like conserved region family protein
  Pfam annotation: Domain name=PAPA-1; Domain location=78-163; Score =97.5; E_value=4.5e-26; Accession=PF04795.4; Description=PAPA-1-like conserved region
  Pfam annotation: Domain name=zf-HIT; Domain location=176-207; Score =53.9; E_value=6.3e-13; Accession=PF04438.8; Description=HIT zinc finger
  Pfam module annotation: Pfam domain module=PAPA-1::zf-HIT; Domain location=78-163::176-207
QLWDGNESIEEEESEMDEKNGLKEVDSPSDAKIETPGLTTRQRALQGRGGHGESLIEFPDGLPTASSRKQKEKLSEVEIQAKKAEAAQRRKMQVEKAEKEQQAEAMRKILGIDSEKKKEEKKLKEREEKEKQARLEEYRKNCIQTVMGPTGTVITFPESMGLPSIFNSKPVSYPPPREKCAGPNCTNPYKYRDSKTRVPLCSLACYKAVQGRPVQGSEAAQGSAAAQGSAAAQGSVATQGSDAAQGSAATQGSDAAHGSAGKQA

SEQ ID NO: 91978 - protein, 91 aa, Setaria italica
  Transcript Sequence Number=SeqID_26004
  Gene Ontology: Mol. function=GTPase activity; Cellular component =chloroplast; Biological process=immune response
  Homolog annotation: Hit_ID=UPI0001505854; Match level="QueryCoverage =98%, HitCoverage=8%, E-value=1e-41, Identity=87%"; Hit description =GTP binding / GTPase
LLLDTEGIDAYDQTGTYSIQIFSLAVLLSSMFIYNQMGGIDESALDRLSLVTEMTKHIRVRASGGRSTASELGQFSPVFVWLLRDFYLDLT

SEQ ID NO: 91979 - protein, 102 aa, Setaria italica
  Transcript Sequence Number=SeqID_26005
  Gene Ontology: Mol. function=beta-N-acetylhexosaminidase activity; Cellular component=cell wall; Biological process=carbohydrate metabolic process
  Homolog annotation: Hit_ID=B9RM00; Match level="QueryCoverage=100%, HitCoverage=19%, E-value=1e-39, Identity=72%"; Hit description=Beta -hexosaminidase, putative
LDRNTVVHNWLGGTVAEKAVAAGLRCILSKQESWYLDHLDAPWEGFYMNEPLANIYKPEQQRLILGGEVCMWGEQVDASDIQQTIWPRAAAAAERLWTPIEK

SEQ ID NO: 91980 - protein, 47 aa, Setaria italica
  Transcript Sequence Number=SeqID_26006
RDSAISSKILISLSSTSLCNKYHYLIRGLPNFLCWLRNVLWKTGNTY

SEQ ID NO: 91981 - protein, 107 aa, Setaria italica
  Transcript Sequence Number=SeqID_26007
  Subcellular localization annotation: CTP_CleavageSite=17; ConfidenceScore=5.44e-01
ITPSCSARRRPSRAPPSSLHDRSSSIPRLVRHRPAAPSLPPPPIPAPSVLLLPWPCTRSTPPTPSPTTPAPSPGQRWTPRQPRRRSSASTAAAATSSPPWCGGRCPR

SEQ ID NO: 91982 - protein, 79 aa, Setaria italica
  Transcript Sequence Number=SeqID_26008
HALSHLTATDPGWTLECGDEGWRWSFGRTRRRALTLVRGLADHQREQRGQDSQGRVAAGVVNADSLSKEGSGLEAELRS

SEQ ID NO: 91983 - protein, 90 aa, Setaria italica
  Transcript Sequence Number=SeqID_26009
  Subcellular localization annotation: CTP_CleavageSite=78; ConfidenceScore=5.22e-01
SPRGGATRPGVTLVWHRFQVGLFIPPLPTLNFFYLVGARRTHTMVSYGWNARLLFFPGNAPTASSLASFVVTNCLHVEQAHKDERPVSSI

SEQ ID NO: 91984 - protein, 78 aa, Setaria italica
  Transcript Sequence Number=SeqID_26010
SSSGLQFHAISQSKHSIARRRKHVTAANEGAPRHPAAALIEPFSSLPAAGDLQTPARHRRIRREASSSYLETQFTEPR

SEQ ID NO: 91985 - protein, 242 aa, Setaria italica
  misc_feature (12)..(12): Xaa can be any naturally occurring amino acid
  Transcript Sequence Number=SeqID_26011
  Gene Ontology: Mol. function=binding
  Homolog annotation: Hit_ID=UPI0001A7B1EE; Match level="QueryCoverage =98%, HitCoverage=10%, E-value=1e-82, Identity=64%"; Hit description =SWEETIE (SWEETIE); binding
IVPFVKANGANXKKLRIGLALSWRFFLQMMHMKYGTPDSELQNYAIQAMEILQGNYSPDPHALACVLYVLRVGVADQMTEPAQREFLVFLGRKLESSNYTAPMRVATLRILSYLLRSLGEVPVEFKDVLDNTVVAALSHSSAHVRVEAALTLRALAEVDPTCVGGLVSYGVTTLHALRETVSFDKGKNLNVELDSLHGQATVLAALVAISPKLLLGYPARLPKSVLELSKKMLNGFSRIQWL

SEQ ID NO: 91986 - protein, 320 aa, Setaria italica
  Transcript Sequence Number=SeqID_26012
  Homolog annotation: Hit_ID=Q9XGZ7; Match level="QueryCoverage=92%, HitCoverage=67%, E-value=1e-126, Identity=70%"; Hit description =T1N24.19 protein
  Pfam annotation: Domain name=DUF266; Domain location=23-310; Score =708.5; E_value=5.6e-210; Accession=PF03267.6; Description =Arabidopsis protein of unknown function, DUF266
GASAAEEEPEGLERWTRPPARVEHSMTDEELLWRASFAPRLRGYPFRRVPKVAFMFLTRGPLPLAPLWERFFRGHEGRYSIYVHALPSYHANFTSESVFYRRQIPSKVAEWGQMTMCDAERRLLANALLDISNEWFVLVSESCIPIFDFNTTYKYFQNSSQSFLMAFDDPGPYGRGRYNWNMTPEVELDQWRKGSQWFEVDRELAVAIVKDTVYYPKFKEFCRPHCYVDEHYFPTMLTIEAPHSLANRSVTWVDWSRGGAHPATFGRGDISEEFLRRVREGRTCLYNNQNSTMCFLFARKFSPSALEPLLELAPTVLGFG

SEQ ID NO: 91987 - protein, 86 aa, Setaria italica
  Transcript Sequence Number=SeqID_26013
  Subcellular localization annotation: CTP_CleavageSite=74; ConfidenceScore=5.67e-01
SAPNGSGDGRLVARAANAPPVPALRSLFAAGRRPFPRRLSRDAAHLSGGRTSQAAACPWRRRFSRRGAAVGWPEAGGRGGNRSCAR

SEQ ID NO: 91988 - protein, 87 aa, Setaria italica
  Transcript Sequence Number=SeqID_26014
NRSGEGRPNPTDTTPPTPIAHRALQNTNDHEQIDLLAETLEAAEVEPDLRRHRRLPPLPWDGAHLGWREAPRHRLHRARCPPCRPSP

SEQ ID NO: 91989 - protein, 159 aa, Setaria italica
  Transcript Sequence Number=SeqID_26015
  Gene Ontology: Mol. function=metal ion binding; Cellular component =cell wall; Biological process=metal ion transport
  Homolog annotation: Hit_ID=B6T3X5; Match level="QueryCoverage=40%, HitCoverage=18%, E-value=2e-28, Identity=93%"; Hit description=Pro -resilin
  Pfam annotation: Domain name=HMA; Domain location=8-68; Score=48.3; E_ value=3e-11; Accession=PF00403.18; Description=Heavy-metal-associated domain
PLRYQTLALKVSIHCEGCKKKVKKVLHSIEGVYKTDIDMQQHKVVVIGNVSADALVKKLLKTGKHAEPWPEPAPPAAAAADAPGGSPGSGGKKKKKKSKGKNPANNNTNKPADPAPADGGSGPCPPEKQDKAEGGGGGSCDEASDGEHDKPEGGGGNGP

SEQ ID NO: 91990 - protein, 320 aa, Setaria italica
  Transcript Sequence Number=SeqID_26016
  Gene Ontology: Mol. function=protein serine/threonine kinase activity; Biological process=protein amino acid phosphorylation
  Homolog annotation: Hit_ID=P0C5D6; Match level="QueryCoverage=91%, HitCoverage=87%, E-value=1e-163, Identity=92%"; Hit description =Serine/threonine-protein kinase SAPK3
  Pfam annotation: Domain name=Pkinase; Domain location=1-248; Score =278.2; E_value=1.8e-80; Accession=PF00069.17; Description=Protein kinase domain
  Pfam annotation: Domain name=Pkinase_Tyr; Domain location=1-246; Score=-32.2; E_value=1.4e-11; Accession=PF07714.9; Description =Protein tyrosine kinase
  Pfam module annotation: Pfam domain module=Pkinase::Pkinase_Tyr; Domain location=1-248::1-246
GNFGVARLVRDKQTKELVAVKYIERGKKIDENVQREIINHQSLRHPNIVRFKEVCLTPTHLAIVMEYAAGGELFEKICTAGRFSEDESRYFFQQLISGVSYCHSMEICHRDLKLENTLLDGSPTPRVKICDFGYSKSALLHSKPKSTVGTPAYIAPEVLSRKEYDGKVADVWSCGVTLYVMLVGSYPFEDPEDPKNFRKTISRILGVQYSIPDYVRVSSDCRRLLSQIFVSDPSKRITIPEIKQHPWFLKNLPREISEREKANYKDKEAAEPAQAVDEIMRIVQEAKTPGDMSKVVDPALLAEMAELESEEEEADPEDTY

SEQ ID NO: 91991 - protein, 84 aa, Setaria italica
  Transcript Sequence Number=SeqID_26017
ACYRVQLDEDLFVCTWLIFLKQKESCVCTTRTQICIPFKFKCVHCSWVFSPTTTEYSLVKKNEGSILQLSWVFSNTTTRQNLCS

SEQ ID NO: 91992 - protein, 167 aa, Setaria italica
  misc_feature (111)..(111): Xaa can be any naturally occurring amino acid
  Transcript Sequence Number=SeqID_26018
  Gene Ontology: Cellular component=vacuole
  Homolog annotation: Hit_ID=UPI0001A7B2D3; Match level="QueryCoverage =100%, HitCoverage=11%, E-value=6e-55, Identity=61%"; Hit description= glycine-rich protein
AKISACGGNGLAGGGGGRVSIDVFSRHDDAQIFVHGGKSSGCLDNAGAAGTLYEEVPKSITVSNDNLSTQTDTVFLDPPYEPLWTNVLIKNHAKVSLPLRWSRIQAQGQIXLAGATLTFGLTHYPYSEFELLAEELLMSDSTIKVFGALRMSVKMLLMWNSRMTIDG

SEQ ID NO: 91993 - protein, 71 aa, Setaria italica
  Transcript Sequence Number=SeqID_26019
PHVLCRRDSKEGSRETRGRGFESHGPRTRRVTCALRRYVSLLGGTNTNPKGPVAKPVQNIEVEHQVLKDPL

SEQ ID NO: 91994 - protein, 117 aa, Setaria italica
  Transcript Sequence Number=SeqID_26020
  Gene Ontology: Mol. function=transporter activity; Cellular component= integral to membrane; Biological process=RNA metabolic process
  Homolog annotation: Hit_ID=B6TYM8; Match level="QueryCoverage=99%, HitCoverage=44%, E-value=3e-27, Identity=54%"; Hit description =Tetracycline transporter protein
LLTGSLTLSGAATITFFYSLGEHGLQTALLYYLKAQFGYSKDEFANLLLIVGAAGMLSQLTVMPILAPILGEEILLIVGLLGGCTHVFLYGIAWSYWVPYLSAAFVILSAFVHPSIN

SEQ ID NO: 91995 - protein, 93 aa, Setaria italica
  Transcript Sequence Number=SeqID_26021
  Gene Ontology: Mol. function=catalytic activity; Cellular component =plasma membrane; Biological process=cellular metabolic process
  Homolog annotation: Hit_ID=B6TR31; Match level="QueryCoverage=84%, HitCoverage=23%, E-value=2e-20, Identity=58%"; Hit description =Dihydroflavonol-4-reductase
PEDKLIDESCWSDIEFCKENENWYALAKTKSEEIALEYGKKNGMHVVTVLPGLVFGPLLQSVVLNTSSKVLVYMIKGGPLRHAKGDRQGTQGI

SEQ ID NO: 91996 - protein, 166 aa, Setaria italica
  misc_feature (153)..(153): Xaa can be any naturally occurring amino acid
  Transcript Sequence Number=SeqID_26022
  Gene Ontology: Mol. function=oxidoreductase activity; Cellular component=extracellular region; Biological process=oxidation reduction
  Homolog annotation: Hit_ID=B9S8L8; Match level="QueryCoverage=89%, HitCoverage=27%, E-value=4e-49, Identity=65%"; Hit description =Multicopper oxidase, putative
  Pfam annotation: Domain name=Cu-oxidase_3; Domain location=30-146; Score=206.8; E_value=5.7e-59; Accession=PF07732.7; Description =Multicopper oxidase
MAPALALLVLLAVAVSLAGADDPYRYYTWTVTYGPITPLGTTQQGILINGQFPGPRIDCVTNDNLIVNVVNNLDEPFLLTWNGIKQRKNSWQDGVVGTNCAIPPGANYTYKFQAKDQIGTFFYFPSLALHRAAGGFGALSVYQRPAIPVPYPXPPAGDFTLLVGDW

SEQ ID NO: 91997 - protein, 177 aa, Setaria italica
  Transcript Sequence Number=SeqID_26023
  Homolog annotation: Hit_ID=O22454; Match level="QueryCoverage=41%, HitCoverage=12%, E-value=1e-13, Identity=60%"; Hit description=Low -affinity cation transporter
  Pfam annotation: Domain name=DUF599; Domain location=30-174; Score= -132.8; E_value=0.1; Accession=PF04654.4; Description=Protein of unknown function, DUF599
LAACAVLSVLTLLGLLALLPGRVVYRYIGLAVVVVLLLPAAGAYWYLRLRADGGGEAAAREEHREELDAAWKITSCVANSAFGGLIGVLSSASKIPGAVTTAAYVSILLMFATAIPGMLVMMLSKKVPEITSLQLRRLLVAAIKLANVVLLCLLASAAFAAAFVVLRYRVFAAFAPL

SEQ ID NO: 91998 - protein, 121 aa, Setaria italica
  Transcript Sequence Number=SeqID_26024
  Subcellular localization annotation: CTP_CleavageSite=75; ConfidenceScore=5.86e-01
ADHGFSVRAPPNLRMSLSDRPVSRSRGGSPSSFSGLDMNWRGRRQSMSPTPSRRASSSHSNDRDRSSSYSKTSVTSSAEDDLESMQSIPISPAVRKNLSVMKSKTIASPKKPSKSFSPSSA

SEQ ID NO: 91999 - protein, 76 aa, Setaria italica
  Transcript Sequence Number=SeqID_26025
  Gene Ontology: Mol. function=hydrolase activity; Biological process =lipid catabolic process
  Homolog annotation: Hit_ID=Q9XE77; Match level="QueryCoverage=96%, HitCoverage=17%, E-value=2e-22, Identity=69%"; Hit description =Patatin-like protein
MTSTSSAGGAPQINPEKVKLVTVLSIDGGGVRGIIPAVVLAFLEEKLQELDGPDARIADYFDVIAGTSTGGLLTTM

SEQ ID NO: 92000 - protein, 103 aa, Setaria italica
  misc_feature (82)..(82): Xaa can be any naturally occurring amino acid
  misc_feature (94)..(94): Xaa can be any naturally occurring amino acid
  Transcript Sequence Number=SeqID_26026
  Gene Ontology: Mol. function=nucleoside-triphosphatase activity; Cellular component=membrane; Biological process=transport
  Homolog annotation: Hit_ID=Q8GU83; Match level="QueryCoverage=100%, HitCoverage=7%, E-value=1e-46, Identity=82%"; Hit description=PDR -like ABC transporter
MRRGISGGEKKRLTTGEMMIGPSKAFFMDEISTGLDSSTTFQVLSCLQQLAQVSQYTVLVSLLQPAPETYELFDDVILMAEXKIVYHGPRSCIXNFFESCGFK

SEQ ID NO: 92001 - protein, 143 aa, Setaria italica
  Transcript Sequence Number=SeqID_26027
  Gene Ontology: Mol. function=nucleoside-triphosphatase activity; Cellular component=membrane; Biological process=transport
  Homolog annotation: Hit_ID=Q8GU83; Match level="QueryCoverage=100%, HitCoverage=9%, E-value=1e-53, Identity=67%"; Hit description=PDR -like ABC transporter
DDVILMAERKIVYHGPRSCILNFFESCGFKCPRRKGAADFLQEVLSKKDQEQFWSFGDETYNFVTVDQFCERFKACHVGQNLAVELLNPFAKANKAKAKAHNNALSFSIYSLSKWELLMVCFARELLLMKKNAFIYKSKSLQV

SEQ ID NO: 92002 - protein, 100 aa, Setaria italica
  Transcript Sequence Number=SeqID_26028
  Homolog annotation: Hit_ID=Q9FE57; Match level="QueryCoverage=70%, HitCoverage=39%, E-value=3e-11, Identity=50%"; Hit description =Acidic PR-1 type pathogenesis-related protein PR-1a
MARTRTVAVAAFVLVFSTAISSMAQTTAQEQEFVALHNAARREVGVEDVVWNETVAAFARAYAARRAGDCKLEHSDQDERNKLGYGENIYMGPPGKDWTV

SEQ ID NO: 92003 - protein, 1071 aa, Setaria italica
  Transcript Sequence Number=SeqID_26029
  Gene Ontology: Mol. function=metal ion binding; Cellular component =cytoplasm; Biological process=chromatin silencing
  Homolog annotation: Hit_ID=UPI0000ECD4C3; Match level="QueryCoverage =19%, HitCoverage=11%, E-value=2e-48, Identity=42%"; Hit description =Zinc finger protein 294 (RING finger protein 160).
  Pfam annotation: Domain name=zf-C3HC4; Domain location=1021-1067; Score=30.9; E_value=5.2e-06; Accession=PF00097.17; Description=Zinc finger, C3HC4 type (RING finger)
SFFSLWRLEEDSAFPSILAALFVIEWECSMSLAIDDENDLEGHIEDMDVGSSMHISSKDYLDEKMHLKANLAESIHAFCQSLSPSFWNNLPSCTLNRLANILAQSVRYSVFQTRDLHVEKTAVLCSEWVVEMLKLICLDDINLQSFFDLLLSEGEHWPLWLKPCLQNGHASVKVQLEPAITDEIELKHERFVAFVDRLILNLGFGEVILGIPGNLRRATSQSIDITSPISSLSRAWVAGEILCTWTWKGGSALKTFLPSLVQYMKEESRLEVGIVPLLLDTLLGGALMHESGPWVLFNAWHLSDNEIGKIQDRFLRALVALLFTTNIKDCLWRESDALVFFEQLLSNLFMGSIVNRKCLKVLPFVMSTIIKPLSQKLNEDSSYADLVRKSILSWLEVAISCLPSSPREVPVQDIEDWMQVALSCFPLSITGGAQRLEVTVEREISDAEISLMLTLFQKYQIFYKGLASPLSTSETVISRIVELLGVKLTAVMVGYCWTKLQENDWHFVFRMVFKCIESSALLVEEMTDGVNDAVINQVSSEDALEKLKLVVSTTDKLTLSLAESALVTLCHLNHLGNLQAAENSQSLQLIRSGDYVESTNKMVETILRLFLATGVSEAIAKSFGEEASSIIGSSRHAYLHFWELVASIIKNASPQIRKSALESMELWGLTKGSVSGLYSILFSSQPVFHLQFAAFSLLLSEPFCQLSLLKDSSLRENCSSAQRSDISQSAELMPDSEKTLCLRDELSALVEFPTSELLKTDLTTRDRVDVFIAWALLLSHLQSLPSSSIIRENVLQYIQEKVSPCILDCIFQHIPVKTAAPSGKKKDAELVPEVEAAAKASKNAIVTCSLLPYVESLSPVGTLQMASLAGSLYGMMIRLLPSFVRTWFTTLRDRSLSYSIESFTRQWCSPPLLLDEFSQVKDSVYADENFSVSVNRSAYEIVATYKKEETGIDLVIRLPNCYPLRHVDVECTRSLGISEVKCRKWLLSLTSFVRNQNGAIAEAIRTWKSNFDKEFEGVEECPICYSILHTSNHSLPRLACKTCRHKFHGACLYKWFSTSNKSTCPLCQTPF

SEQ ID NO: 92004 - protein, 77 aa, Setaria italica
  Transcript Sequence Number=SeqID_26030
  Gene Ontology: Mol. function=IMP dehydrogenase activity; Cellular component=cytosol; Biological process=purine nucleotide biosynthetic process
  Homolog annotation: Hit_ID=B8AKM3; Match level="QueryCoverage=90%, HitCoverage=12%, E-value=2e-23, Identity=80%"; Hit description =Inosine-5'-monophosphate dehydrogenase
MAASSADLADDGFSATRLFSQGVSYTYDDVIFLPGYIGFPADAVDLSTRLSRRLPLSIPCVASPMDTVSEAPMAAAI

SEQ ID NO: 92005 - protein, 197 aa, Setaria italica
  Transcript Sequence Number=SeqID_26031
  Gene Ontology: Mol. function=hydrolase activity
  Homolog annotation: Hit_ID=B9SFV2; Match level="QueryCoverage=94%, HitCoverage=46%, E-value=2e-59, Identity=61%"; Hit description =Hydrolase, putative
KRRCGEHLDPQPRNPFLGVPKSFPGVKPEFWDGMRSRLAALRPDGPIARRFLADLPTVLVVGDSVFVHGGLLEANVEYGLERINAEVSEWIRGEGGDNARAPEYVRGRDAVVWLRRFSDGFDCDCQRLEGVLGMIPGAKRMVMGHTIQTVGINAVCGAQAVRVDVGLSRGCGNGLPEVLEINGGGADVRVITTPPFG

SEQ ID NO: 92006 - protein, 103 aa, Setaria italica
  Transcript Sequence Number=SeqID_26032
  Gene Ontology: Mol. function=phosphoric diester hydrolase activity; Biological process=intracellular signaling cascade
  Homolog annotation: Hit_ID=B4FNL7; Match level="QueryCoverage=98%, HitCoverage=23%, E-value=4e-20, Identity=60%"; Hit description=MAP3K- like protein kinase
YPLCALPFPCCVSQGPASAAQVGDTCSSDGGCGAGLHCSACGGGGDKLCTRAVPINPATHGTGLPFNNYSWLTTHNSFALTGAASATGASIISPTNQEDTVTA

SEQ ID NO: 92007 - protein, 84 aa, Setaria italica
  Transcript Sequence Number=SeqID_26033
LNVPVQEPWPKTDPFVSVKVPADHGKHDQKLQQQDANNMEASNSKFLNHRNVDSSKPPVVELLGEFTFANSARGRAIKSLNQYA

SEQ ID NO: 92008 - protein, 124 aa, Setaria italica
  Transcript Sequence Number=SeqID_26034
  Gene Ontology: Mol. function=structural constituent of ribosome; Cellular component=intracellular; Biological process=translation
  Homolog annotation: Hit_ID=UPI00001624ED; Match level="QueryCoverage =77%, HitCoverage=8%, E-value=1e-29, Identity=63%"; Hit description =pentatricopeptide (PPR) repeat-containing protein
RLPRRRCRNPRCRGLRKALEFDVQLQTEEAVRAGAGSTVGGADAAMWREIEALPWKGGQGGNNPDYECLRAELRRMAPPNGRAVLLFRNRCGCPVAKLEGWGVPKSKRRNKKGTQGPFHDRGVR

SEQ ID NO: 92009 - protein, 115 aa, Setaria italica
  Transcript Sequence Number=SeqID_26035
  Gene Ontology: Cellular component=nucleus
  Homolog annotation: Hit_ID=B6TTS3; Match level="QueryCoverage=92%, HitCoverage=72%, E-value=2e-40, Identity=72%"; Hit description =Protein yippee-like
  Pfam annotation: Domain name=Yippee; Domain location=5-114; Score =209.3; E_value=9.9e-60; Accession=PF03226.6; Description=Yippee putative zinc-binding protein
MECGRGTPILELDDANGNVYRCKHCRTHLALTDDIISKDFYCKNGKAYLFDKVVNVTVGEKEDRMLMTGMHTISDIFCVRCGVTLGWKYDAAAERTQKYKEGKFILDRDQLLGPE

SEQ ID NO: 92010 - protein, 111 aa, Setaria italica
  Transcript Sequence Number=SeqID_26036
  Gene Ontology: Mol. function=protein serine/threonine kinase activity; Biological process=protein amino acid phosphorylation
  Homolog annotation: Hit_ID=Q65X93; Match level="QueryCoverage=100%, HitCoverage=12%, E-value=1e-21, Identity=49%"; Hit description =Putative receptor like protein kinase
  Pfam annotation: Domain name=SKG6; Domain location=9-48; Score=10.5; E_value=0.046; Accession=PF08693.2; Description=Transmembrane alpha -helix domain
NPNLCSNGDSCQLTRKKINAVYIAVPIVILVVIAALVLLLWLLRRKKENSVKPQNEATDARSRSQSGNGHGLPQLENRRFTYKELEMITNNFQRVLGRGGFGSVYDGFLDD

SEQ ID NO: 92011 - protein, 203 aa, Setaria italica
  Transcript Sequence Number=SeqID_26037
  Gene Ontology: Mol. function=citrate transmembrane transporter activity; Cellular component=integral to membrane; Biological process=citrate transport
  Homolog annotation: Hit_ID=B9RVB9; Match level="QueryCoverage=62%, HitCoverage=25%, E-value=1e-36, Identity=57%"; Hit description =Arsenite transport protein, putative
  Pfam annotation: Domain name=CitMHS; Domain location=1-201; Score= -103.3; E_value=0.0032; Accession=PF03600.8; Description=Citrate transporter
AAVKEAEAAEEGRSPAASVLSLNKCSTSPGGGAALRLRQNGHANGNNGHDAESVMSENISTKHRWFMQCSEQRRKLFLKSFAYVVTVGMLVAYMLGLNMSWTAITTAIALVVVDFRDAEPCLDKVSYSLLVFFSGMFVTVSGFNKTGLPGAIWNFMAPYAKINHVSGVTVLSLIILLLSNLASNVPTVLLMGDEVAASAATIS

SEQ ID NO: 92012 - protein, 246 aa, Setaria italica
  misc_feature (7)..(7): Xaa can be any naturally occurring amino acid
  Transcript Sequence Number=SeqID_26038
  Gene Ontology: Mol. function=zinc ion binding; Cellular component =nucleus; Biological process=transcription initiation
  Homolog annotation: Hit_ID=Q7XCX5; Match level="QueryCoverage=50%, HitCoverage=7%, E-value=2e-39, Identity=62%"; Hit description=Plus-3 domain containing protein, expressed
  Pfam annotation: Domain name=SWIB; Domain location=135-210; Score =86.7; E_value=8.1e-23; Accession=PF02201.10; Description=SWIBMDM2 domain
AKNRWNXPITPARKEKDESSDDLYDVNNDDDAGSDCSSRKRRRANSSRKKVRKRRKVDSDCSIAAKQVVLPIGYAGSLPTEVPNERAPLPVATKVPNEQVPLPVDSKVPNEQVQLPVDMEVEKEQAPLPLDTKWASPELLEFVGHMRDGDQSFISQFDVQTLLLEYIKKNNLRDPKRKSQIVCDTRLHRLFRKSRVAHFEMLKLLEMHFLINETPKVSDKSEVTINLNSAQVDTNGYSDMAAKLSP

SEQ ID NO: 92013 - protein, 78 aa, Setaria italica
  Transcript Sequence Number=SeqID_26039
  Gene Ontology: Mol. function=protein serine/threonine kinase activity; Biological process=protein amino acid phosphorylation
  Homolog annotation: Hit_ID=B9V0F9; Match level="QueryCoverage=93%, HitCoverage=12%, E-value=9e-12, Identity=49%"; Hit description =Protein kinase domain containing protein-2
PKKGYIFSLGVVMMEIMTGPIGYIGISDMAHPRFIDQVQENWRQRMQQTCSGSEVEFCCQQVKRCIMIALRCVDNDEH

SEQ ID NO: 92014 - protein, 120 aa, Setaria italica
  Transcript Sequence Number=SeqID_26040
  Gene Ontology: Mol. function=isomerase activity; Cellular component =endoplasmic reticulum; Biological process=cell redox homeostasis
  Homolog annotation: Hit_ID=Q7XRB5; Match level="QueryCoverage=100%, HitCoverage=23%, E-value=5e-37, Identity=61%"; Hit description =OSJNBa0006B20.4 protein
  Pfam annotation: Domain name=Thioredoxin; Domain location=1-87; Score= 76.6; E_value=8.7e-20; Accession=PF00085.12; Description=Thioredoxin
KNVLLEIYAPWCCHCQKLAPILDEVAISLQNDEDVIIAKMDATTNDIPPDFAVEGYPTMYFYSSAGNLLSYERGRTAEEIIDFIKKNKGSKPGEAAVEDDAAENDAMKEQEPSSESVKDE

SEQ ID NO: 92015 - protein, 145 aa, Setaria italica
  misc_feature (88)..(88): Xaa can be any naturally occurring amino acid
  Transcript Sequence Number=SeqID_26041
  Gene Ontology: Mol. function=isomerase activity; Cellular component =endoplasmic reticulum; Biological process=cell redox homeostasis
  Homolog annotation: Hit_ID=Q7XRB5; Match level="QueryCoverage=86%, HitCoverage=24%, E-value=7e-39, Identity=58%"; Hit description =OSJNBa0006B20.4 protein
  Pfam annotation: Domain name=Thioredoxin; Domain location=70-143; Score=13.4; E_value=1.8e-05; Accession=PF00085.12; Description =Thioredoxin
GDVTDAQGAFQYFGLKESEVPLFFIQESTAKFIKPTVEPDQILPWLKDYTDGTLLPHVKSDPIPVVNDQPVKVVVADNLNDVVFNSGXVLLEIYAPWCGHCQKLAPILDEVAISLQNDEDVIIAKMVMYNRILIESFFFIASLPI

SEQ ID NO: 92016 - protein, 148 aa, Setaria italica
  Transcript Sequence Number=SeqID_26042
QLKAIHSRKAKPAESSQRSAGLLLGLEKQKKKGKEIRHRLLHSSSQKNLPQITGRDRRGRHSLSHAVRRRYQSGSGLRPKTPHVPPGRCAPWPRPPGSATASPSADKSSFRLPRATVFARSRCCREEERLGGGGEASGSGNGGELGGE

SEQ ID NO: 92017 - protein, 81 aa, Setaria italica
  misc_feature (15)..(15): Xaa can be any naturally occurring amino acid
  Transcript Sequence Number=SeqID_26043
  Gene Ontology: Mol. function=protein binding; Cellular component =eukaryotic translation initiation factor 3 complex
  Homolog annotation: Hit_ID=B6TRV3; Match level="QueryCoverage=97%, HitCoverage=18%, E-value=1e-33, Identity=86%"; Hit description =Eukaryotic translation initiation factor 3 subunit 6
LSTNSERSVRALWGXLASEILNRNWDAALEELNRLKEIIDSKNFSSPLNQLQNRIWLMHWSLFIFFNHANGRNGITDLFLP

SEQ ID NO: 92018 - protein, 181 aa, Setaria italica
  Transcript Sequence Number=SeqID_26044
  Gene Ontology: Mol. function=hydrolase activity
  Homolog annotation: Hit_ID=Q9SR79; Match level="QueryCoverage=95%, HitCoverage=46%, E-value=2e-50, Identity=59%"; Hit description =Probable inactive purple acid phosphatase 16
DAGSDRVMAAVLHAENPDFVVYLGDLVTANNLPIPNASLYWDRAVSAARGRGIPWAAVFGNHDDMPFEWPPEWFSPDGVPPLRCPLTPSMASSGCSCRGTPRIDLMTTEIGNNRLSYSSNGPKDLWPGVSNYVLQVLSHTHGDPALLMYFLDSGGGSYTEVISSAHDKLSWFLVVPSFFLS

SEQ ID NO: 92019 - protein, 345 aa, Setaria italica
  Transcript Sequence Number=SeqID_26045
  Gene Ontology: Mol. function=hydrolase activity
  Homolog annotation: Hit_ID=Q9SR79; Match level="QueryCoverage=91%, HitCoverage=82%, E-value=1e-109, Identity=61%"; Hit description =Probable inactive purple acid phosphatase 16
  Pfam annotation: Domain name=Metallophos; Domain location=28-285; Score=18.0; E_value=0.026; Accession=PF00149.20; Description =Calcineurin-like phosphoesterase
  Subcellular localization annotation: CTP_CleavageSite=29; ConfidenceScore=5.11e-01
MAAVLHAENPGLAASVLPFFNLFSRCTCKIAAFFSSETPLLSVGECFSDFVVYLGDLVTANNLPIPNASLYWDRAVSAARGRGIPWAAVFGNHDDMPFEWPPEWFSPDGVPPLRCPLTPSMASSGEDQGCSCRGTPRIDLMTTEIGNNRLSYSSNGPKDLWPGVSNYVLQVLSHTHGDPALLMYFLDSGGGSYTEVISSAQVKWFQSQSQFLNPNGRIPELIFWHIPSTAYVKVAPEAKTEIRKPCVGSINKEDVAPQAAEWGMMDALAKRPSVKAIFVGHNHGLDWCCPYEKMWLCFARHTGYGGYGNWPKGARIIQITENPFSTVSWIRMENGTKHSDVTLSS

SEQ ID NO: 92020 - protein, 319 aa, Setaria italica
  Transcript Sequence Number=SeqID_26046
  Gene Ontology: Mol. function=protein serine/threonine kinase activity; Cellular component=membrane; Biological process=protein amino acid phosphorylation
  Homolog annotation: Hit_ID=Q6H5H4; Match level="QueryCoverage=96%, HitCoverage=42%, E-value=1e-156, Identity=84%"; Hit description =Putative AAK1 protein
  Pfam annotation: Domain name=APH; Domain location=8-191; Score=-18.9; E_value=0.054; Accession=PF01636.15; Description=Phosphotransferase enzyme family
  Pfam annotation: Domain name=Pkinase; Domain location=6-270; Score =132.8; E_value=1.1e-36; Accession=PF00069.17; Description=Protein kinase domain
  Pfam annotation: Domain name=Pkinase_Tyr; Domain location=6-275; Score=-43.5; E_value=7.7e-11; Accession=PF07714.9; Description =Protein tyrosine kinase
  Pfam module annotation: Pfam domain module=APH::Pkinase::Pkinase_Tyr; Domain location=8-191::6-270::6-275
VGNVKVHVREAIAEGGFSCVYAARDMVNPARQYALKHVIIQDEESLELVRKEITVMRSLKGHPNVVTLIAHTILDMGRTREALLVMEFCEKSLVSVLEGRGAGYFDEENVALIFRDVCNAVFAMHCQTPPLAHRDLKAENVLLDPDGAWKLCDFGSVSTNHKRFDKPEEMGIEEDNIRKHTTPAYRAPEMWDLYRREVISEKVDIWALGCLLYRICYFKSAFDGESKLQILNGNYRIPELPKYSSSITTLIKDMLNSSPDARPDITQVWFRVNELLPLELQKDLPDGSPSGSAFESHPSIDEATRRSPEGVLLYHQEKT

SEQ ID NO: 92021 - protein, 134 aa, Setaria italica
  misc_feature (110)..(110): Xaa can be any naturally occurring amino acid
  Transcript Sequence Number=SeqID_26047
  Gene Ontology: Mol. function=protein serine/threonine kinase activity; Biological process=protein amino acid phosphorylation
  Homolog annotation: Hit_ID=Q6H5H4; Match level="QueryCoverage=97%, HitCoverage=20%, E-value=4e-50, Identity=73%"; Hit description =Putative AAK1 protein
TNAGNVNILSKLKECQLEAEVTLLKEQLKIANLEKEEISLKFDKLSAICSSQRREIQELKQALATASVTPPAKQFRENSKPREKIEGTPPELRQGLFTSRPGTPSPDPKXPWSAFPDDPKPQAAVKSAHPRSSP

SEQ ID NO: 92022 - protein, 410 aa, Setaria italica
  Transcript Sequence Number=SeqID_26048
  Gene Ontology: Mol. function=protein serine/threonine kinase activity; Biological process=protein amino acid phosphorylation
  Homolog annotation: Hit_ID=Q6H5H4; Match level="QueryCoverage=100%, HitCoverage=59%, E-value=1e-162, Identity=70%"; Hit description =Putative AAK1 protein
VWFRVNELLPLELQKDLPDGSPSGSAFESHPSIDEATRRSPERSAALSSREDIKSTSPNDFSNLVPQGPPKAMENRGPMGAFWSTQHAQELAFADEKGPAFDQEPISQVTSKQSQAKNQNTPVHNSSRKSLSASVDSSPGDFEIRFSANGSESGLEKTKAGKTENKGSIQATAFNSFVADFDNIKMNSQNNAGNVNILSKLKECQLEAEVTLLKEQLKIANLEKEEISLKFDKLSAICSSQRREIQELKQALATASVTPPAKQFRENSKVELSPPSTSLDTPPREKIEGTPPELRQGLFTSRPGTPSPDPKPWSAFPDDPKPQAAVKSAHPRSVRTLRASNSNKASSLGQPNASSSADPFAFGQDSFKAAPSGTVPPKLSNMGNTTQLLNNQNAEEKKDGSYQPAGWTGF

SEQ ID NO: 92023 - protein, 97 aa, Setaria italica
  Transcript Sequence Number=SeqID_26049
  Subcellular localization annotation: CTP_CleavageSite=74; ConfidenceScore=5.71e-01
PSRSSAPSGLIPSPACCACPLAVRPPVRPRGGVASGSRREQSPPRRRVARRLVHVYNYSSSSAPLHPSLAPALSCSLPSSPHDLLPCRLPGPRPPHL

SEQ ID NO: 92024 - protein, 42 aa, Setaria italica
  Transcript Sequence Number=SeqID_26050
MGVAFGCFGLGGGCVPRDGDHGQQVHDPKPLMTPSSSFDFRE

SEQ ID NO: 92025 - protein, 126 aa, Setaria italica
  Transcript Sequence Number=SeqID_26051
EWTVSYRSILGDDAVSKLVEARLGRRFAVDAVRRLSSPEHHPDAVVDGMISGKLALGGLIVLVCESARMNPLHDSFARGWSTGDGFKKELMNDYVWGYYGQTSRKLLKWKSKDYVEWEPIPHLQAV

SEQ ID NO: 92026 - protein, 77 aa, Setaria italica
  Transcript Sequence Number=SeqID_26052
EAAHDTIYSQTKQGQHMMGREQGVAKDRLAGWDGNNDHASDRRGYQISGHRQVILGCISCSLPLLASAPQAVICYLF

SEQ ID NO: 92027 - protein, 102 aa, Setaria italica
  Transcript Sequence Number=SeqID_26053
  Homolog annotation: Hit_ID=Q5JM90; Match level="QueryCoverage=62%, HitCoverage=15%, E-value=9e-23, Identity=75%"; Hit description =Carboxyl-terminal peptidase-like
MAVTRACLIALVVALAVVAAAGGAAGTSEQRRRQVRSLLKRLNKDPLASIESADGDIIDCVPISKQPAFDHPLLKNHTIQMRPSYHPEGLSDDSNIAPHSIT

SEQ ID NO: 92028 - protein, 89 aa, Setaria italica
  Transcript Sequence Number=SeqID_26054
  Homolog annotation: Hit_ID=B6TVE6; Match level="QueryCoverage=85%, HitCoverage=21%, E-value=1e-35, Identity=97%"; Hit description =Dirigent-like protein
  Pfam annotation: Domain name=Dirigent; Domain location=1-89; Score= -13.2; E_value=5.8e-05; Accession=PF03018.6; Description=Dirigent -like protein
INNNNNNNGGNGVPIFAGGSLPQGTTLQKLLFGTMTVVDDELTEAPELGSAAVGRAQGFYIASSEEGVSQTVAVTAMFKEGGFDDTISF

SEQ ID NO: 92029 - protein, 84 aa, Setaria italica
  Transcript Sequence Number=SeqID_26055
  Gene Ontology: Mol. function=DNA binding; Cellular component=nucleus; Biological process=regulation of transcription
  Homolog annotation: Hit_ID=Q6H7C6; Match level="QueryCoverage=100%, HitCoverage=26%, E-value=2e-39, Identity=90%"; Hit description =ATMYB4-like protein
  Pfam annotation: Domain name=Myb_DNA-binding; Domain location=1-47; Score=39.0; E_value=1.9e-08; Accession=PF00249.23; Description=Myb -like DNA-binding domain
GLWSPEEDEKLRDFILRYGHGCWSALPAKAGLQRNGKSCRLRWINYLRPGLKHGMFSREEEETVMSLHAKLGNKWSQIARHLPG

SEQ ID NO: 92030 - protein, 126 aa, Setaria italica
  Transcript Sequence Number=SeqID_26056
  Gene Ontology: Mol. function=galactosylgalactosylxylosylprotein 3 -beta-glucuronosyltransferase activity; Cellular component=membrane
  Homolog annotation: Hit_ID=B6SY11; Match level="QueryCoverage=100%, HitCoverage=27%, E-value=2e-49, Identity=76%"; Hit description =Glycosyltransferase
ELFDEGQKVSTMGAVPVGILGEDDGASESFLQAPSCDAAGKLVGYHVSEETVLPVNRSDMLLSSRLEWTGFVVSARVLWEDAKERPQWVRDLAAIDDADARAASPLALVTDAGRVEPLSCCAQAAL

SEQ ID NO: 92031 - protein, 347 aa, Setaria italica
  Transcript Sequence Number=SeqID_26057
  Gene Ontology: Mol. function=galactosylgalactosylxylosylprotein 3 -beta-glucuronosyltransferase activity; Cellular component=membrane
  Homolog annotation: Hit_ID=B6SY11; Match level="QueryCoverage=95%, HitCoverage=73%, E-value=1e-146, Identity=79%"; Hit description =Glycosyltransferase
  Pfam annotation: Domain name=Glyco_transf_43; Domain location=163 -346; Score=24.6; E_value=3.1e-11; Accession=PF03360.8; Description =Glycosyltransferase family 43
  Subcellular localization annotation: CTP_CleavageSite=80; ConfidenceScore=5.31e-01
PAAWLLLHALFCATSMAVGFRFSRLIVYLLFLPTPPINPAAHLVSLVSPPVMLAGAGNATTATITTTTTTTTTVTTTTTVAAEIGAAHPHHHHGPVFVGRHPIRVRSWPHPDPNELLKAHRILAAVQNAQRSSKRRGAGPPRPVIAVTPTTTSALQVPSLTSLAHTLRLVDAQLMWIVVEPGHRTDAVAAVLSRSNLDFLHITGPGDSTASLRMHALREIRAKRMDGIVVFADENSILRTELFDEGQKVSTMGAVPVGILGEDDGASESFLQAPSCDAAGKLVGYHVSEETVLPVNRSDMLLSSRLEWTGFVVSARVLWEDAKERPQWVRDLFFVRPYFVYVYVFRF

SEQ ID NO: 92032 - protein, 106 aa, Setaria italica
  Transcript Sequence Number=SeqID_26058
  Gene Ontology: Mol. function=protein dimerization activity
  Homolog annotation: Hit_ID=A8QW53; Match level="QueryCoverage=94%, HitCoverage=28%, E-value=2e-36, Identity=73%"; Hit description=O -methyltransferase 3
  Pfam annotation: Domain name=Dimerisation; Domain location=28-76; Score=49.6; E_value=1.2e-11; Accession=PF08100.3; Description =Dimerisation domain
MALSEDSNDLLQAQVELWNQTFSFMKSVALAVALDLGIADAIRHHGGAATLSQILSEIGINPCKLPGLRRLMRVLAVAGTFTIQEPETSSDGHEPVYKLTAASRLV

SEQ ID NO: 92033 - protein, 132 aa, Setaria italica
  Transcript Sequence Number=SeqID_26059
  Gene Ontology: Mol. function=transferase activity; Cellular component= cytoplasm; Biological process=response to stress
  Homolog annotation: Hit_ID=Q6ZJH9; Match level="QueryCoverage=83%, HitCoverage=34%, E-value=7e-39, Identity=71%"; Hit description =Putative glutathione S-transferase GST 16
  Pfam annotation: Domain name=GST_C; Domain location=6-98; Score=68.9; E_value=1.9e-17; Accession=PF00043.17; Description=Glutathione S -transferase, C-terminal domain
AFDPPSRALFCHIAFPLHDEDDENNEDINREKRKLEEVLEVYEQRLGESDYLAGNKFTLADLVHLPGTHHVITSERFAYLYDSRKNVQNWWNRISARDSWQQVLRDMKTVEEEHIKEEYERQQQQRWQTEPQ

SEQ ID NO: 92034 - protein, 84 aa, Setaria italica
  Transcript Sequence Number=SeqID_26060
  Subcellular localization annotation: CTP_CleavageSite=52; ConfidenceScore=5.14e-01
YTPRKICLNSNIIQRCTPWSTTTVLPSPSAPDKLASTGSQSHATPLNRTTPPKKTEKELQDNVLSFFFRRRHHQQPCFPRHLGQ

SEQ ID NO: 92035 - protein, 91 aa, Setaria italica
  Transcript Sequence Number=SeqID_26061
RTWAWEGQRLVAPDVSMHAKTDHRNVRQYTLTSRWSNGSLSSWAIDTPSTRPFDDAGMCRSPLEIKTHQEHIQATKSAEVIILKLSTSLGE

SEQ ID NO: 92036 - protein, 76 aa, Setaria italica
  Transcript Sequence Number=SeqID_26062
KKKGKTHMTQPHAEHMINCEQAVTQNHIIPCRASAQESIFTQTLASEQVIYLPIGTVNWLKSTIETYNHFQKKSNI

SEQ ID NO: 92037 - protein, 224 aa, Setaria italica
  misc_feature (16)..(16): Xaa can be any naturally occurring amino acid
  Transcript Sequence Number=SeqID_26063
  Gene Ontology: Mol. function=electron carrier activity; Biological process=oxidation reduction
  Homolog annotation: Hit_ID=Q8H3L0; Match level="QueryCoverage=91%, HitCoverage=38%, E-value=1e-105, Identity=88%"; Hit description =Putative cytochrome P450 monooxygenase
WSKIYGRMFVYWYGSXPRVCVTDAGMVRELLSSRHAHVTGKSWLQREGAKHFIGRGLIMANGATWSHQRHVVAPAFMADRLRGRVGHMVECAGKTVRALREAVARGGNEVEVGAHMARLAGDIVARTEFDTSYDTGKRVFHLIEELQRLTARSSRYLWVPGSQYFPSKYRREIKRLNGELEQLLKESIQRSREIADEGRTPSSACGMGLLGMLLAEMEKKEKKT

SEQ ID NO: 92038 - protein, 83 aa, Setaria italica
  Transcript Sequence Number=SeqID_26064
SQRRDHFPGVLQALMARRVQYSVAAPQFLTQAGGSAATAAGPMDGDDDRRRRSVRKTATTAIILLSVEAPEEAIDDWLVSREY

SEQ ID NO: 92039 - protein, 232 aa, Setaria italica
  Transcript Sequence Number=SeqID_26065
  Gene Ontology: Mol. function=RNA binding; Cellular component=nucleus; Biological process=mRNA processing
  Homolog annotation: Hit_ID=UPI000186D23E; Match level="QueryCoverage =96%, HitCoverage=70%, E-value=2e-62, Identity=53%"; Hit description =THO complex subunit, putative
  Pfam annotation: Domain name=WD40; Domain location=140-178; Score =8.5; E_value=3.9; Accession=PF00400.24; Description=WD domain, G -beta repeat
  Pfam annotation: Domain name=WD40; Domain location=57-94; Score=1.0; E_value=30; Accession=PF00400.24; Description=WD domain, G-beta repeat
  Pfam annotation: Domain name=WD40; Domain location=98-136; Score =32.7; E_value=1.5e-06; Accession=PF00400.24; Description=WD domain, G-beta repeat
  Pfam module annotation: Pfam domain module=WD40::WD40::WD40; Domain location=140-178::57-94::98-136
CYCSCCKAIRLWDARSGKCQVIELSGENINITYKHDGTQIAVGNKEDELTILDVRSLKVVKKHKANYEVNEIAWNKSGDLFFITTGLGHIEVVKDLEFLKPCKLNAHTAGCYCIAMDPLDRYFAVGSADSLVSLWNVKELLCIRTFTKLEWPVRTVSFNHTGEFIAYASEDPFIDIANVETGRSVHQIPCKAAMNSVEWNPKYNLLAYAGDDKNKYQADEGVFRIFGFETHN

SEQ ID NO: 92040 - protein, 281 aa, Setaria italica
  Transcript Sequence Number=SeqID_26066
  Gene Ontology: Mol. function=metal ion binding
  Homolog annotation: Hit_ID=Q94E82; Match level="QueryCoverage=100%, HitCoverage=89%, E-value=1e-101, Identity=67%"; Hit description =Mahogunin, ring finger 1-like protein
MGNFRSRGGAPPPPPPPPALQAHLHGVRPPYYHRYPGWPPGTAPVPPPLGVPASVERHRTVAVHAGVNIKGDSLRLEPDDDGRGLLLAFSFDADAPGSITVYFFAQEDEELILKATKENLLKPVTTAFDKGHDQEFKQPSGTGIDISQFEESELTKVGEGGIFPVAFKVDVAVSNNQELEGVHEDEASKCLVKFAILAKKDNAEYGVRIVQQMLWVNGTRYVLQEIYGIGNTADENNHEDESGKECVICLSEPRDTTVLPCRHMCLCWECAQLLRLQSNKC

SEQ ID NO: 92041 - protein, 102 aa, Setaria italica
  Transcript Sequence Number=SeqID_26067
  Gene Ontology: Mol. function=hydrolase activity, acting on carbon -nitrogen (but not peptide) bonds, in linear amidines
  Homolog annotation: Hit_ID=Q2QMN7; Match level="QueryCoverage=54%, HitCoverage=12%, E-value=1e-14, Identity=75%"; Hit description =Amidase, hydantoinase/carbamoylase family protein, expressed
NLSSPVQPSRAQGYRSMPPNASRLHVLLALLLVSAAAAGGHDDAAARRIMEEFAGFPASDDGDGPSTAFRVDSEGLQRQIDELASFSDSPAPSVTRVLYSDK

SEQ ID NO: 92042 - protein, 84 aa, Setaria italica
  Transcript Sequence Number=SeqID_26068
FMSRKQQYGSVLLYISKYFLLHGRALDPLIHSLLHAWMFSYPACLFEHAMQNSALSLQSSLQDNRIDTFFPCKSVSGWLAASLV

SEQ ID NO: 92043 - protein, 65 aa, Setaria italica
  Transcript Sequence Number=SeqID_26069
CSGSVLDLQLRSQIIIHPLSLSRSRHECRSITLVSLFGFDPSCVPVSEMQRHVISSSNCHFMSKQ

SEQ ID NO: 92044 - protein, 189 aa, Setaria italica
  Transcript Sequence Number=SeqID_26070
  Gene Ontology: Mol. function=nucleic acid binding
  Homolog annotation: Hit_ID=B6SSJ9; Match level="QueryCoverage=100%, HitCoverage=33%, E-value=1e-33, Identity=43%"; Hit description=SAG20
  Pfam annotation: Domain name=PLAC8; Domain location=130-189; Score= -2.2; E_value=0.02; Accession=PF04749.9; Description=PLAC8 family
EEARKVYCKDGAARPHDRAHMLVVVLLLHVTCFAQYYCCALFWSYARKERPDWALNIGYGLGTGCPVVAGLYTAYSPLGRKKADEPDTESSSSSEAAREQGDRTENDGVGGQDVEIKVYNRRVVVSSPQWSGGLFDCCDDGTVCALSATCTFCVFGWNMERLGFGNMYVHAFTFILLFVAPFLIFSVTA

SEQ ID NO: 92045 - protein, 204 aa, Setaria italica
  Transcript Sequence Number=SeqID_26071
  Gene Ontology: Mol. function=metal ion binding; Biological process =metal ion transport
  Homolog annotation: Hit_ID=B6TF33; Match level="QueryCoverage=34%, HitCoverage=29%, E-value=8e-11, Identity=48%"; Hit description =Circumsporozoite protein
  Pfam annotation: Domain name=HMA; Domain location=9-80; Score=14.2; E_ value=0.06; Accession=PF00403.18; Description=Heavy-metal-associated domain
MTTKDSTLIIEVDLQCEKCYKKIQKILCKLQSKEDIRKIDFDNTKNTVTISGRFDPARLSKKLRCKACDVIKDIKIKPQEEKKPEDKKKPAEEKKKPEEKKPEEKKPGEEKKKPEEKKPADEKKPEEKKGDDEKAKAPSSSTTTVNLQFTNICGICYPWPCSDPAHWGIHHPQQMIPQWPPCGGMAPVPAPLPAPAPLPAPVHH

SEQ ID NO: 92046 - protein, 59 aa, Setaria italica
  misc_feature (29)..(29): Xaa can be any naturally occurring amino acid
  Transcript Sequence Number=SeqID_26072
  Subcellular localization annotation: CTP_CleavageSite=17; ConfidenceScore=5.32e-01
MARAFRAASPLPLPSSRGAAAAVTSGGGXGNFPWLTKKSSSNKPAPQRGGPSDGQESKG

SEQ ID NO: 92047 - protein, 115 aa, Setaria italica
  Transcript Sequence Number=SeqID_26073
  Gene Ontology: Mol. function=protein serine/threonine kinase activity; Biological process=protein amino acid phosphorylation
  Homolog annotation: Hit_ID=Q53MD2; Match level="QueryCoverage=99%, HitCoverage=11%, E-value=5e-33, Identity=67%"; Hit description =Leucine Rich Repeat family protein, expressed
AGDQAFSGNPGLCVAGGRSELGACNVDGDRRDGLANKSAVLVPVLVSAALLLVAGILFVSYRSFKLEELRKRGDVECGGGGQWKLESFHPLELDADEICGVGEESLIGSGGTGRV

SEQ ID NO: 92048 - protein, 51 aa, Setaria italica
  Transcript Sequence Number=SeqID_26074
TQHMYSILRWHLNHQVRSSRCRFHKCRAKKPFVLLPNTNSTPNLQMCAGPR

SEQ ID NO: 92049 - protein, 86 aa, Setaria italica
  Transcript Sequence Number=SeqID_26075
  Gene Ontology: Mol. function=methyltransferase activity; Cellular component=nucleus; Biological process=nucleobase, nucleoside, nucleotide and nucleic acid metabolic process
  Homolog annotation: Hit_ID=Q94AI4; Match level="QueryCoverage=63%, HitCoverage=7%, E-value=6e-26, Identity=89%"; Hit description =Methyltransferase-like protein 1
  Pfam annotation: Domain name=MT-A70; Domain location=1-82; Score= -43.8; E_value=0.027; Accession=PF05063.6; Description=MT-A70
WNAEEIMNLKIEAIADTPSFVFLWVGDGVGLEQGRQCLKKWGFRRCEDVCWVKTNILTPTKPPIPPRHRRHGRRRQAPPHRRRRRG

SEQ ID NO: 92050 - protein, 748 aa, Setaria italica
  Transcript Sequence Number=SeqID_26076
  Gene Ontology: Mol. function=methyltransferase activity; Cellular component=nucleus; Biological process=nucleobase, nucleoside, nucleotide and nucleic acid metabolic process
  Homolog annotation: Hit_ID=Q94AI4; Match level="QueryCoverage=43%, HitCoverage=41%, E-value=1e-113, Identity=64%"; Hit description =Methyltransferase-like protein 1
  Pfam annotation: Domain name=MT-A70; Domain location=513-691; Score =239.7; E_value=7.1e-69; Accession=PF05063.6; Description=MT-A70
MITPSNDRNESMRNSDRSSGLARSADEDIYNVRKDSRSPKLPRRSPDDSKDRDYDRRRGREDKNEWEPSRRFSPDASARSSERREGSREKQQRDQEEKASVRRTDEVYADESGGSLRVDTREAQRDDKSDRGRDRSWNEKARDLEGSKDYGRNSQLRDPKEANDAEWRNAQERLDGGNFHGRGGYRRDSRGRSESVRGPSTYGNRYDNSDSIEIRPNSNLNFGREGSASGRRFEVGAHRDSVPGGTDDKSTDYPESDPSGGTSMVSSFPQQGPKGDRPFRGGRGRPNGRDSQRIGVPMPIMPPPFGPLGLPPGPMQHMGPNIPHSPGPPLLPGVFMPPFPGPLVWPGARGVDVNMLSVPPNLPMPPPVAAEHRFTPNVGAGSGHNIHLNQIDTGLGAPTDVSGLGYNHMGPQSRDMLHDKPGWTPHRNSGPNRKAPSRGEQNDYSQNFVDTGMRPQNFIRELDLTSVAEDYPKLRELIQRKDEIVAKSASPPMYYKCDLREHVLSPEFFGTKFDVILVDPPWEEYAHRAPGITDHIEYWNAEEIMNLKIEAIADTPSFVFLWVGDGVGLEQGRQCLKKWGFRRCEDVCWVPTNKKNATPSLRHDSHTLLQHSKEHCLMGIKGTVRRSTDGHVIHANIDTDIIIAEEPTDGSTKKPEDMYRIIEHFALGRRRLELFGEDHNIRPGWLTLGKNLSYSNFNKETYIRNFADKDGKVWQGGGGRNPPPEAPHLVVTTPEIESLRPKSPPAKN

SEQ ID NO: 92051 - protein, 64 aa, Setaria italica
  Transcript Sequence Number=SeqID_26077
TLTSIPYGSFLPIETARAIYRKVKDWQILSFGYSNCLGELTYVHHEMELLPPIKTGMPMKMLFL

SEQ ID NO: 92052 - protein, 93 aa, Setaria italica
  Transcript Sequence Number=SeqID_26078
  Gene Ontology: Mol. function=nucleoside-triphosphatase activity; Cellular component=membrane; Biological process=defense response
  Homolog annotation: Hit_ID=Q8GU88; Match level="QueryCoverage=100%, HitCoverage=6%, E-value=1e-47, Identity=92%"; Hit description =Putative pleiotropic drug resistance protein 7
GIQGVRKIKDGYNPATWMLEVTTLAQEDILGINFAEVYRNSDLYRRNKALISELSTPPPGSKDLYFPTQYSQSFLTQCMACLWKQHKSYWRNP

SEQ ID NO: 92053 - protein, 92 aa, Setaria italica
  Transcript Sequence Number=SeqID_26079
MAREAEAALRPFVQAAGGDGEVISGGPAATAFLATDRTDRPVDPVIWGDEKRMKRELVAWAKAVASMSAGKNTSCSSTPSSTPSPSMRRGRV

SEQ ID NO: 92054 - protein, 89 aa, Setaria italica
  Transcript Sequence Number=SeqID_26080
  Homolog annotation: Hit_ID=B6SKD0; Match level="QueryCoverage=96%, HitCoverage=16%, E-value=4e-21, Identity=74%"; Hit description=Zinc finger, C3HC4 type family protein
  Subcellular localization annotation: CTP_CleavageSite=29; ConfidenceScore=5.14e-01
AADAPSSSSRANEVQSRQSGRAVNALNFQASLAAKDLQISGESNPRLHSSSSTISHHLRFNHLNCHENKEDGLGAENAETSGLESSSRK

SEQ ID NO: 92055 - protein, 64 aa, Setaria italica
  Transcript Sequence Number=SeqID_26081
  Gene Ontology: Mol. function=metal ion binding; Cellular component =cellular_component; Biological process=ubiquitin-dependent protein catabolic process
  Homolog annotation: Hit_ID=B6SKD0; Match level="QueryCoverage=75%, HitCoverage=9%, E-value=1e-24, Identity=93%"; Hit description=Zinc finger, C3HC4 type family protein
  Pfam annotation: Domain name=zf-C3HC4; Domain location=14-55; Score =47.1; E_value=7e-11; Accession=PF00097.17; Description=Zinc finger, C3HC4 type (RING finger)
SLNLTYCCVCLIRCHICLTEYEDGEQIRTLPCKHEFHLQCVDKWLKEIHRVCPLCRGDVCEAAS

SEQ ID NO: 92056 - protein, 450 aa, Setaria italica
  Transcript Sequence Number=SeqID_26082
  Gene Ontology: Mol. function=metal ion binding; Cellular component =cytoplasm
  Homolog annotation: Hit_ID=B6SKD0; Match level="QueryCoverage=97%, HitCoverage=85%, E-value=0.0, Identity=74%"; Hit description=Zinc finger, C3HC4 type family protein
  Pfam annotation: Domain name=zf-C3HC4; Domain location=400-441; Score= 47.1; E_value=7e-11; Accession=PF00097.17; Description=Zinc finger, C3HC4 type (RING finger)
MACAILSLAAKDLQISGESNPRLHSSSSTISHHLRFNHLNCHENKEDGLGAENAETSGLESSSRKAIMVRGSFSNEAVDVDITSREGINSVGSELGNVANTIPINELGGSISESDLHPSLITSGRIVSDLEGEIAPQVSSSTTVMTSERSDISQSSLTSMSPNSSTASSVTGEPTPDSIPTRADVPIFSGPHGQTGGSILHDDMMSIFSNDGLGRSRDSSGSEIRRSHRRVLWDTFSRRGSRGYPESDVDDLGFYSTWLDIGDDLFGELEESRHFHRRRHGSIRVSQYSRSRIREHRRAVFDSGNEQSTAACPLGIHPIGRCTCDSFLIAEESSARASISRIVMLTEALFEVLDEIHRQPASLSLSMVSVQAPESVVNSLPCKSYKKLETPQCSDDMEQCHICLTEYEDGEQIRTLPCKHEFHLQCVDKWLKEIHRVCPLCRGDVCEAAS

SEQ ID NO: 92057 - protein, 112 aa, Setaria italica
  Transcript Sequence Number=SeqID_26083
  Gene Ontology: Mol. function=nutrient reservoir activity; Cellular component=extracellular region; Biological process=auxin mediated signaling pathway
  Homolog annotation: Hit_ID=Q7XVW6; Match level="QueryCoverage=99%, HitCoverage=25%, E-value=2e-49, Identity=77%"; Hit description =OSJNBa0065J03.5 protein
  Pfam annotation: Domain name=Cupin_1; Domain location=33-112; Score= -22.4; E_value=0.061; Accession=PF00190.14; Description=Cupin
QDFCVADLPRGDTPAGYPCKPQTAVTADDFYYRGLGTTGPTINPFNIGLSSAFVTRFPGVNGLGISAARADFAPGGVVPLHSHPGGTELLYVIEGAMAAGFITSLTNQVYTK

SEQ ID NO: 92058 - protein, 77 aa, Setaria italica
  Transcript Sequence Number=SeqID_26084
NIRRMSQEKKTLETKLTMHIWHGEGANLLKCKNFAEKQVLTRISIRSSGVCRRFQNVIISATFFWRDHNCLEPGGLY

SEQ ID NO: 92059 - protein, 39 aa, Setaria italica
  Transcript Sequence Number=SeqID_26085
KHAFNPYLLKYDNHAAALNTYRMKSQLHSQRPSSLGGHI

SEQ ID NO: 92060 - protein, 194 aa, Setaria italica
  Transcript Sequence Number=SeqID_26086
  Gene Ontology: Cellular component=chloroplast
  Homolog annotation: Hit_ID=B9SU41; Match level="QueryCoverage=98%, HitCoverage=59%, E-value=2e-43, Identity=29%"; Hit description =Pentatricopeptide repeat-containing protein, putative
  Pfam annotation: Domain name=PPR; Domain location=102-136; Score =36.5; E_value=1e-07; Accession=PF01535.12; Description=PPR repeat
  Pfam annotation: Domain name=PPR; Domain location=137-171; Score =13.5; E_value=0.23; Accession=PF01535.12; Description=PPR repeat
  Pfam annotation: Domain name=PPR; Domain location=32-66; Score=25.1; E_value=0.00028; Accession=PF01535.12; Description=PPR repeat
  Pfam annotation: Domain name=PPR; Domain location=67-101; Score=50.2; E_value=7.8e-12; Accession=PF01535.12; Description=PPR repeat
  Pfam module annotation: Pfam domain module=PPR::PPR::PPR::PPR; Domain location=102-136::137-171::32-66::67-101
LVFAHASAGRHHEAVEAFSRMEDEFGCRPTTFVYNAVLRVLVNSGVVPAALALYNRMLATGLPPNRATYNVLMDGLCKRGTAADALKLFDEMISRGIVPDVKTHTVLLSSMCNAGHLKEAENLLHSMKDQGCPPDEVTYNAFLSGLCKAGRVDEAIQQLEPLRGTGEFVLGLKGYSCLIDYVFQAGRYDEGFQC

SEQ ID NO: 92061 - protein, 82 aa, Setaria italica
  Transcript Sequence Number=SeqID_26087
  Gene Ontology: Mol. function=catalytic activity; Biological process =metabolic process
  Homolog annotation: Hit_ID=B6SQF2; Match level="QueryCoverage=91%, HitCoverage=28%, E-value=2e-33, Identity=84%"; Hit description =Catalytic/ hydrolase
GYDFDYDDFHACVHGRLPYEKLKPDPVLRQLLLSLPQRKIIFTNSDKNHASTVLKKLGLEGCFDAIICFETLNPPTEQDDIN

SEQ ID NO: 92062 - protein, 280 aa, Setaria italica
  misc_feature (9)..(9): Xaa can be any naturally occurring amino acid
  Transcript Sequence Number=SeqID_26088
  Gene Ontology: Mol. function=protein binding; Cellular component =vacuolar membrane; Biological process=piecemeal microautophagy of nucleus
  Homolog annotation: Hit_ID=B9RTY8; Match level="QueryCoverage=100%, HitCoverage=49%, E-value=1e-119, Identity=56%"; Hit description =Protein binding protein, putative
  Pfam annotation: Domain name=Arm; Domain location=143-183; Score =44.8; E_value=3.4e-10; Accession=PF00514.15; Description =Armadillobeta-catenin-like repeat
  Pfam annotation: Domain name=Arm; Domain location=185-225; Score =43.3; E_value=9.3e-10; Accession=PF00514.15; Description =Armadillobeta-catenin-like repeat
  Pfam annotation: Domain name=Arm; Domain location=227-267; Score =27.2; E_value=6.6e-05; Accession=PF00514.15; Description =Armadillobeta-catenin-like repeat
  Pfam annotation: Domain name=Arm; Domain location=37-66; Score=0.1; E_ value=12; Accession=PF00514.15; Description=Armadillobeta-catenin -like repeat
  Pfam annotation: Domain name=Arm; Domain location=93-141; Score=30.4; E_value=7.1e-06; Accession=PF00514.15; Description=Armadillobeta -catenin-like repeat
  Pfam annotation: Domain name=HEAT; Domain location=149-185; Score =15.6; E_value=0.21; Accession=PF02985.14; Description=HEAT repeat
  Pfam annotation: Domain name=HEAT; Domain location=190-227; Score =8.7; E_value=4.2; Accession=PF02985.14; Description=HEAT repeat
  Pfam annotation: Domain name=HEAT; Domain location=233-269; Score =4.6; E_value=14; Accession=PF02985.14; Description=HEAT repeat
  Pfam module annotation: Pfam domain module=Arm::Arm::Arm::Arm::Arm::HE AT::HEAT::HEAT; Domain location=143-183::185-225::227-267::37-66::93 -141::149-185::190-227::233-269
EVRTQVDVXLRCASSWRHADRVAAKRATHVLAELAKNEEVANVIVEGGAVPALVGHLEEPAAAAAAQEDQQLRPFEHEVEKGAAFALGLLAVKPEHQQLIVDAGALPPLVNLLRRQKNTTNSRVVNSVIKRAADAITNLAHENSNIKTSVRMEGGIPPLVELLESQDLKVQRAAAGALRTLAFKNDENKALIVQCNALPTLILMLRSEDAAIHYEAVGVIGNLVHSSPNIKKEVLNAGALQPVIGLLSSSCTESQREAALLLGQFASADSDCKVHIVQRG

SEQ ID NO: 92063 - protein, 577 aa, Setaria italica
  misc_feature (30)..(30): Xaa can be any naturally occurring amino acid
  misc_feature (53)..(53): Xaa can be any naturally occurring amino acid
  misc_feature (96)..(96): Xaa can be any naturally occurring amino acid
  Transcript Sequence Number=SeqID_26089
  Gene Ontology: Mol. function=protein binding
  Homolog annotation: Hit_ID=B9RTY8; Match level="QueryCoverage=98%, HitCoverage=78%, E-value=0.0, Identity=75%"; Hit description=Protein binding protein, putative
  Pfam annotation: Domain name=Arm; Domain location=138-178; Score =27.2; E_value=6.6e-05; Accession=PF00514.15; Description =Armadillobeta-catenin-like repeat
  Pfam annotation: Domain name=Arm; Domain location=180-220; Score =30.6; E_value=6.3e-06; Accession=PF00514.15; Description =Armadillobeta-catenin-like repeat
  Pfam annotation: Domain name=Arm; Domain location=221-261; Score=8.5; E_value=1; Accession=PF00514.15; Description=Armadillobeta-catenin -like repeat
  Pfam annotation: Domain name=Arm; Domain location=295-335; Score=1.6; E_value=7.6; Accession=PF00514.15; Description=Armadillobeta-catenin -like repeat
  Pfam annotation: Domain name=Arm; Domain location=336-376; Score =15.4; E_value=0.13; Accession=PF00514.15; Description=Armadillobeta -catenin-like repeat
  Pfam annotation: Domain name=Arm; Domain location=4-52; Score=21.7; E_ value=0.003; Accession=PF00514.15; Description=Armadillobeta-catenin -like repeat
  Pfam annotation: Domain name=Arm; Domain location=54-90; Score=11.8; E_value=0.39; Accession=PF00514.15; Description=Armadillobeta -catenin-like repeat
  Pfam annotation: Domain name=Arm; Domain location=96-136; Score=29.0; E_value=1.9e-05; Accession=PF00514.15; Description=Armadillobeta -catenin-like repeat
  Pfam annotation: Domain name=BTB; Domain location=397-505; Score =100.3; E_value=6.5e-27; Accession=PF00651.23; Description=BTBPOZ domain
  Pfam annotation: Domain name=HEAT; Domain location=101-138; Score =6.5; E_value=7.9; Accession=PF02985.14; Description=HEAT repeat
  Pfam annotation: Domain name=HEAT; Domain location=144-180; Score =4.6; E_value=14; Accession=PF02985.14; Description=HEAT repeat
  Pfam annotation: Domain name=HEAT; Domain location=186-222; Score =16.4; E_value=0.12; Accession=PF02985.14; Description=HEAT repeat
  Pfam annotation: Domain name=HEAT; Domain location=232-263; Score =4.1; E_value=16; Accession=PF02985.14; Description=HEAT repeat
  Pfam annotation: Domain name=HEAT; Domain location=301-337; Score =1.4; E_value=33; Accession=PF02985.14; Description=HEAT repeat
  Pfam annotation: Domain name=HEAT_PBS; Domain location=165-202; Score= 7.2; E_value=9.8; Accession=PF03130.8; Description=PBS lyase HEAT -like repeat
  Pfam annotation: Domain name=HEAT_PBS; Domain location=207-243; Score= 6.1; E_value=14; Accession=PF03130.8; Description=PBS lyase HEAT-like repeat
  Pfam annotation: Domain name=HEAT_PBS; Domain location=322-358; Score= 5.9; E_value=15; Accession=PF03130.8; Description=PBS lyase HEAT-like repeat
  Pfam annotation: Domain name=HEAT_PBS; Domain location=39-76; Score =4.2; E_value=28; Accession=PF03130.8; Description=PBS lyase HEAT -like repeat
  Pfam module annotation: Pfam domain module=Arm::Arm::Arm::Arm::Arm::Ar m::Arm::Arm::BTB::HEAT::HEAT::HEAT::HEAT::HEAT::HEAT_PBS::HEAT _PBS::HEAT_PBS::HEAT_PBS; Domain location=138-178::180-220::221 -261::295-335::336-376::...
  Pfam module annotation: Domain location=4-52::54-90::96-136::397 -505::101-138::144-180::186-222::232-263::301-337::165-202::207 -243::322-358::39-76
KDLETIQTNLIVDAGALPPLVNLLRRQKKXQNSRVVNSVIKRAADAITNLAHXNSNIKTSVRMEGGIPPLVELLESQDLKVAESSCKMMRTKPCMXSFPVMQIVQCNALPTLILMLRSEDAAIHYEAVGVIGNLVHSSPNIKKEVLNAGALQPVIGLLSSSCTESQREAALLLGQFASADSDCKVHIVQRGAVRPLIEMLQSADVQLREMSAFALGRLAQDTHNQAGIAYNGGLLPLLKLLDSKNGSLQHNAAFALYGVADNEDYVSDFIKVGGVQKLQDGEFIVQATKDCVAKTLKRLEEKINGRVLKHLLYMMRVGEKTVQRRVALALAHLCAPEDQSTIFIDNNGLDLLLDLLTSMSSKHQQDGSAALYKLANKAAALSPMDAAPPSPTPQVYLGEQYVNSSTLSDVNFLVEGKRFYAHRIALLASSDAFRAMFDGGYREKDARDIEIPNIRWDVFELMMRFIYTGSVQVTSEIAQDVLRAADQYLLEGLKRLCEYTIAKDVNLDNVSDMYDLSEAFHAVSLRHTCILYILEHFNKICTRAGSAQLIQRVIPELRNFLTKALSSRSPSDKNMQT

SEQ ID NO: 92064 - protein, 199 aa, Setaria italica
  misc_feature (29)..(29): Xaa can be any naturally occurring amino acid
  misc_feature (73)..(74): Xaa can be any naturally occurring amino acid
  Transcript Sequence Number=SeqID_26090
  Gene Ontology: Mol. function=N-acetyltransferase activity; Biological process=metabolic process
THLDGDFFTAHAAATDILDVHAQGTPQDXGPGTCNAAALAGSSSTSAVEDPMPSYMEALAEISEFQSAATLLXXPFLHHWLQDHHQYPTNLCFTYDQGQVDDTTYPLCTTIKDISHTGGVEQHPFYSQQPPQQSQFWFSPALEAVCQNGTPDANISSLDETDARGCSGSVHSASAAAVSKKAFGRDIPDQLEAHTHRLF

SEQ ID NO: 92065 - protein, 113 aa, Setaria italica
  Transcript Sequence Number=SeqID_26091
MRLLSFVPCGCRAGPIDDAPPAADHAGDAAAAARRRRRRRRAAAAAAHQWRPSLGDIYEEHSTDAAKAAAGGPARTRKAASWDVARVLPRSDESRHLESSSSMPAFAPTAYLF

SEQ ID NO: 92066 - protein, 97 aa, Setaria italica
  Transcript Sequence Number=SeqID_26092
APPPSACPEPRRPEDGGAHHRSPPRRRIGTATDHRERRRPSAPVASAGSSGILSNWLLSHCRLTLIPCSSRSTAVRGFSTLHAVAAGCRLLLLQDRP

SEQ ID NO: 92067 - protein, 92 aa, Setaria italica
  misc_feature (61)..(61): Xaa can be any naturally occurring amino acid
  Transcript Sequence Number=SeqID_26093
TAQNEVLLKEKLSNLQIGYDMLIKKEEVLANKVRCIDDINGTLTHQEALLKERLSELEETXNKTLVEQVKVLEEASNNTFEENQILVKKSDE

SEQ ID NO: 92068 - protein, 137 aa, Setaria italica
  Transcript Sequence Number=SeqID_26094
  Gene Ontology: Mol. function=nucleic acid binding; Cellular component= intracellular
MPSRKAVTDPGVTVTMLRTGSLSTEGADGPEVTGAASIMHETTKLESAGEDYIASKPAAEPEDSSRASSNVDATAALDKSQLHSCNPNIGNVQLGNAGETVASAVQPSGCDAAKVGSSVNSTSNGPVGAKGPTVEGG

SEQ ID NO: 92069 - protein, 213 aa, Setaria italica
  Transcript Sequence Number=SeqID_26095
  Homolog annotation: Hit_ID=B6U6A3; Match level="QueryCoverage=79%, HitCoverage=39%, E-value=3e-37, Identity=48%"; Hit description=F-box domain containing protein
  Pfam annotation: Domain name=F-box; Domain location=42-89; Score =26.8; E_value=8.8e-05; Accession=PF00646.25; Description=F-box domain
MEPLLPPQQAEPAALGQSMEPAEATRKRAGPGGDGGGGGDQDRLSTLPDCLLHVIMSSLKARQAVQTCVLSRRWRDLWLSVPCLDVDLDEFRTETAAPAFETTIAPECQDFEDFTVNLMHRCNIAQLDSFRLHIGSGRAPQFAHKQVAGWLRRAMKYCTPDPASQHKGLGPSHWHIKRLYLCFVHLDNRFAKHVTSVCRNLEDLELHNCSCQI

SEQ ID NO: 92070 - protein, 114 aa, Setaria italica
  Transcript Sequence Number=SeqID_26096
  Homolog annotation: Hit_ID=Q69T67; Match level="QueryCoverage=92%, HitCoverage=14%, E-value=4e-14, Identity=36%"; Hit description =Lustrin A-like
  Pfam annotation: Domain name=DUF231; Domain location=1-104; Score =57.5; E_value=5e-14; Accession=PF03005.7; Description=Arabidopsis proteins of unknown function
RTHVFFRTYEPSHWGDTSQKVCEVTEQPSSEAKGNDKSEFGAILADVVANMKVPITVLNVTLMGAFRSDAHVGTWSYPPTVLDCSHWCLPGVPDAWNELIFSYILTNGWRNMAG

SEQ ID NO: 92071 - protein, 38 aa, Setaria italica
  Transcript Sequence Number=SeqID_26097
GRRLGAHCRRAARRAAPSPCPTTLADESCSLKVLVDSN

SEQ ID NO: 92072 - protein, 175 aa, Setaria italica
  misc_feature (145)..(145): Xaa can be any naturally occurring amino acid
  Transcript Sequence Number=SeqID_26098
  Gene Ontology: Mol. function=serine-type peptidase activity; Cellular component=integral to membrane; Biological process=proteolysis
  Homolog annotation: Hit_ID=Q2R135; Match level="QueryCoverage=90%, HitCoverage=82%, E-value=1e-61, Identity=74%"; Hit description =Signal peptidase I family protein, expressed
  Pfam annotation: Domain name=Peptidase_S24; Domain location=46-125; Score=33.1; E_value=1.1e-06; Accession=PF00717.15; Description =Peptidase family S24
  Pfam annotation: Domain name=Peptidase_S26; Domain location=71-162; Score=-42.7; E_value=0.1; Accession=PF10502.1; Description=Signal peptidase I
  Pfam module annotation: Pfam domain module=Peptidase_S24::Peptidase _S26; Domain location=46-125::71-162
MSAFVRRLGAIPWRNIAGEAFSRALLVAQAFCAVHVVDHHLCSLAIVRGPSMLPAMNLAGDVVAVDKVSVRRGRVGPGDVVLMISPEDPRKAVAKRVVGMGGDSVTYLVDPGNSDAAKTVVVPQGHVWVQGDNVYASRDSRHFGXAVPYGLITGKIFCRVWPLEGFGSIDSNQSP

SEQ ID NO: 92073 - protein, 49 aa, Setaria italica
  Transcript Sequence Number=SeqID_26099
AFGMISEIGQRKSFSNFNVNSFRTGFELECLLLIFELECSLLIFCSASA

SEQ ID NO: 92074 - protein, 227 aa, Setaria italica
  Transcript Sequence Number=SeqID_26100
  Homolog annotation: Hit_ID=B6TFM2; Match level="QueryCoverage=85%, HitCoverage=85%, E-value=3e-73, Identity=73%"; Hit description =Multiple myeloma tumor-associated protein 2
  Pfam annotation: Domain name=MMtag; Domain location=8-83; Score =178.4; E_value=2.1e-50; Accession=PF10159.1; Description=Kinase phosphorylation protein
MYHPTRGGVRGGRDQFKWDDVKVDKHRENYLGHSVKAPVGRWQKGKDLIWYTRDKKSDTEDALKEEIRRVKEEEEQAMREALGLAPKRSNRPQGNRLDKHEYAELIKRGSTAEDLGAGHAEAAQVQGLGLYKAPHDEGESSSFNLDPPEMAPEQADPPPALEEDSQDDRKRKRRHEERRGDKEQKREKHGDGKQRRRDKHERRRDSEDGSKRHRKDKQKRRHDSDSN

SEQ ID NO: 92075 - protein, 77 aa, Setaria italica
  Transcript Sequence Number=SeqID_26101
AKYMFHQKINCVFVSSNPVLFCLLGKQPPLQFFFFTTLATIYHTWFCTLVKLYSIHKQLGDILMLSDNLKLTIGNFD

SEQ ID NO: 92076 - protein, 87 aa, Setaria italica
  misc_feature (48)..(48): Xaa can be any naturally occurring amino acid
  misc_feature (67)..(67): Xaa can be any naturally occurring amino acid
  Transcript Sequence Number=SeqID_26102
  Gene Ontology: Mol. function=heme transporter activity; Cellular component=mitochondrion; Biological process=respiratory chain complex IV assembly
  Homolog annotation: Hit_ID=Q09EL2; Match level="QueryCoverage=64%, HitCoverage=8%, E-value=2e-20, Identity=91%"; Hit description =Cytochrome c biogenesis FN
MHFLFLAAETETYLKDLLLKRRLGSSCGYRMMGITKQKFGNEHEMSIXNEFSHYLLFLGLFVAFTYXNKKQPPAFGAALAFWCILLS

SEQ ID NO: 92077 - protein, 87 aa, Setaria italica
  Transcript Sequence Number=SeqID_26103
MGLCASMLPWKAKREQPEPRRGTPKALFVIRNDGRLSKPEALVFHPHSYGRSGLQKPGGADSRKHEKCRYDCKDVLTMRLSCALSPP

SEQ ID NO: 92078 - protein, 130 aa, Setaria italica
  Transcript Sequence Number=SeqID_26104
  Gene Ontology: Mol. function=transferase activity, transferring glycosyl groups; Cellular component=membrane; Biological process =cell wall biogenesis
  Homolog annotation: Hit_ID=B9HI99; Match level="QueryCoverage=100%, HitCoverage=18%, E-value=5e-33, Identity=51%"; Hit description =Glycosyltransferase family-37
NYLLLTIHAGMGNRMLEITSVFLYALLTNRILLVDRYKEIGDLFCEPFPGTSWLVPSDFPLNYGEFTQSSPESYGNMLQNKVFGDNTERSLAGTRPRYVFLYLDGNCGFHDKLFYCEDDQQFLQGVPWLI

SEQ ID NO: 92079 - protein, 57 aa, Setaria italica
  Transcript Sequence Number=SeqID_26105
ASGTCEGWPFGLCRRPAVLPLPPPPSTPADSWKWRKSVSSLAASPARAYHAHKLTSK

SEQ ID NO: 92080 - protein, 70 aa, Setaria italica
  Transcript Sequence Number=SeqID_26106
  Gene Ontology: Mol. function=structural constituent of ribosome; Cellular component=ribonucleoprotein complex; Biological process =translation
  Homolog annotation: Hit_ID=Q6L588; Match level="QueryCoverage=81%, HitCoverage=23%, E-value=1e-24, Identity=94%"; Hit description =Putative 40S ribosomal protein S4
GVIKSREKHKGSFETIHVEDSLGHQFATRMGNVFTIGKDKKPWVSLPKGKGIKLSIIEEARKRNAEAAEA

SEQ ID NO: 92081 - protein, 81 aa, Setaria italica
  Transcript Sequence Number=SeqID_26107
LQGVYPEIAVSKHEHWSSLAPLPLEVVLSAGQKAKEEPRKQGDDAQGRNKLAREMSDVMGEGNIESMLSVEMGLRELSSLK

SEQ ID NO: 92082 - protein, 92 aa, Setaria italica
  misc_feature (18)..(18): Xaa can be any naturally occurring amino acid
  Transcript Sequence Number=SeqID_26108
  Gene Ontology: Mol. function=structural constituent of ribosome; Cellular component=ribonucleoprotein complex; Biological process =translation
  Homolog annotation: Hit_ID=P49204; Match level="QueryCoverage=95%, HitCoverage=33%, E-value=2e-40, Identity=88%"; Hit description=40S ribosomal protein S4-2
  Pfam annotation: Domain name=Ribosomal_S4e; Domain location=20-90; Score=127.5; E_value=4.2e-35; Accession=PF00900.12; Description =Ribosomal family S4e
KVRTDKTYPAGFMDVISXPKTNENYRLLYDTKGRFRLHPIRDEDAKTKLCKVRSVQFGQKGIPYLNTYDGRTIRYPDPLIKANDTILLVSRS

SEQ ID NO: 92083 - protein, 146 aa, Setaria italica
  misc_feature (39)..(39): Xaa can be any naturally occurring amino acid
  Transcript Sequence Number=SeqID_26109
  Gene Ontology: Mol. function=structural constituent of ribosome; Cellular component=ribonucleoprotein complex; Biological process =translation
  Homolog annotation: Hit_ID=P49398; Match level="QueryCoverage=96%, HitCoverage=52%, E-value=6e-59, Identity=80%"; Hit description=40S ribosomal protein S4
  Pfam annotation: Domain name=RS4NT; Domain location=1-22; Score=18.1; E_value=0.012; Accession=PF08071.4; Description=RS4NT (NUC023) domain
  Pfam annotation: Domain name=Ribosomal_S4e; Domain location=78-146; Score=111.3; E_value=3.2e-30; Accession=PF00900.12; Description =Ribosomal family S4e
  Pfam module annotation: Pfam domain module=RS4NT::Ribosomal_S4e; Domain location=1-22::78-146
MLDKLGGAFAPKPSSGPHKSRECLPLILIIRNRLKLLSXLNYREVISILMQRHVLVDGKVRTDKTYPAGFMDVISIPKTNENYRLLYDTKGRFRLHPIRDEDAKTKLCKVRSVQFGQKGIPYLNTYDGRTIRYPDPLIQVDLDGVV

SEQ ID NO: 92084 - protein, 146 aa, Setaria italica
  Transcript Sequence Number=SeqID_26110
  Gene Ontology: Mol. function=structural constituent of ribosome; Cellular component=ribonucleoprotein complex; Biological process =translation
  Homolog annotation: Hit_ID=P49398; Match level="QueryCoverage=92%, HitCoverage=50%, E-value=4e-60, Identity=85%"; Hit description=40S ribosomal protein S4
  Pfam annotation: Domain name=KOW; Domain location=62-96; Score=39.6; E_value=1.3e-08; Accession=PF00467.21; Description=KOW motif
  Pfam annotation: Domain name=Ribosomal_S4e; Domain location=1-55; Score=62.6; E_value=1.5e-15; Accession=PF00900.12; Description =Ribosomal family S4e
  Pfam module annotation: Pfam domain module=KOW::Ribosomal_S4e; Domain location=62-96::1-55
LFCVQTKLCKVRSVQFGQKGIPYLNTYDGRTIRYPDPLIKANDTIKIDLETNKIVDFIKFDVGNVVMVTGGRNTGRVGVIKNREKHKGSFETIHVEDALGHQFATRLGNVFTIGKGNKPWVSLPKGKGIKLSIIEEQRKRDCLLVP

SEQ ID NO: 92085 - protein, 480 aa, Setaria italica
  Transcript Sequence Number=SeqID_26111
  Subcellular localization annotation: CTP_CleavageSite=96; ConfidenceScore=5.18e-01
TGDDDEDDDYAADHPPPAPMRFGGGRTAHGSNGVSLLGRTARSPSPALGRNIVEPPPTVRSSSAGRPSVASRPTTTVVPPIKTNTTLRTPSPIPPVAVEPPADRTRQKRFDAGLHSSRESGLKREASTLQDELDMLQEENESVLEKLRLAEEKCEEAEARAKELEKQVAALGEGVSLEARLLSRKEAALKQREAALKAARESKDGREEVTTLRQELESAKEEVASAFDQLKEAESETKALRSMTQRMVLTQEEMEEVVLKRCWLARYWGLAVQYGVYPEIAVSKHEHWSSLAPLPLEVVLSAGQKAKEEPRKQGDDAQGRNKLAREMSDVMGEGNIESMLSVEMGLRELSSLKVEDAVVVALGQHRRPSIVRQFTSDFKSPGEPKYLEAFDLSPEEAEDVSFKQAWLIYFWRRAKTHGVEEDIADDRLQFWIGRNAQAPNSHDAIDVERGLTELRKLGIEQQLWEGSRADIDQASLAMEN

SEQ ID NO: 92086 - protein, 262 aa, Setaria italica
  Transcript Sequence Number=SeqID_26112
  Gene Ontology: Mol. function=structural constituent of ribosome; Cellular component=ribonucleoprotein complex; Biological process =translation
  Homolog annotation: Hit_ID=P49398; Match level="QueryCoverage=95%, HitCoverage=93%, E-value=1e-122, Identity=84%"; Hit description=40S ribosomal protein S4
  Pfam annotation: Domain name=KOW; Domain location=177-211; Score =39.8; E_value=1.1e-08; Accession=PF00467.21; Description=KOW motif
  Pfam annotation: Domain name=RS4NT; Domain location=3-40; Score=84.7; E_value=3.4e-22; Accession=PF08071.4; Description=RS4NT (NUC023) domain
  Pfam annotation: Domain name=Ribosomal_S4e; Domain location=94-170; Score=150.6; E_value=4.9e-42; Accession=PF00900.12; Description =Ribosomal family S4e
  Pfam annotation: Domain name=S4; Domain location=42-90; Score=16.4; E_ value=0.022; Accession=PF01479.17; Description=S4 domain
  Pfam module annotation: Pfam domain module=KOW::RS4NT::Ribosomal _S4e::S4; Domain location=177-211::3-40::94-170::42-90
MARGLKKHLKRLNAPKHWMLDKLGGAFAPKPSSGPHKARECLPLILILRNRLKYALTYREVISILMQRQVMVDGKVRTDKTYPSGFMDVVSIPKTGENFRLLYDTKGRFRLHSIRDDEAKFKLCKVRSVQFGQKGIPFLNTYDGRTIRYPDPLIKANDTIKIDLDTNKIVDFIKFDVGNVVMVTGGRNTGRVGVIKSREKHKGSFETIHVEDSLGHQFATRMGNVFTIGKDKKPWVSLPKGKGIKLSIIEEARKRNAEAAEA

SEQ ID NO: 92087 - protein, 286 aa, Setaria italica
  misc_feature (43)..(43): Xaa can be any naturally occurring amino acid
  misc_feature (215)..(215): Xaa can be any naturally occurring amino acid
  misc_feature (239)..(239): Xaa can be any naturally occurring amino acid
  Transcript Sequence Number=SeqID_26113
  Gene Ontology: Mol. function=structural constituent of ribosome; Cellular component=ribonucleoprotein complex; Biological process =translation
  Homolog annotation: Hit_ID=P49398; Match level="QueryCoverage=90%, HitCoverage=96%, E-value=1e-122, Identity=86%"; Hit description=40S ribosomal protein S4
  Pfam annotation: Domain name=KOW; Domain location=178-212; Score =39.6; E_value=1.3e-08; Accession=PF00467.21; Description=KOW motif
  Pfam annotation: Domain name=RS4NT; Domain location=3-40; Score=84.2; E_value=4.8e-22; Accession=PF08071.4; Description=RS4NT (NUC023) domain
  Pfam annotation: Domain name=Ribosomal_S4e; Domain location=95-171; Score=157.8; E_value=3.2e-44; Accession=PF00900.12; Description =Ribosomal family S4e
  Pfam annotation: Domain name=S4; Domain location=43-91; Score=18.9; E_ value=0.012; Accession=PF01479.17; Description=S4 domain
  Pfam module annotation: Pfam domain module=KOW::RS4NT::Ribosomal _S4e::S4; Domain location=178-212::3-40::95-171::43-91
MARGLKKHLKRLNAPKHWMLDKLGGAFAPKPSSGPHKSRECLXPLILIIRNRLKYALNYREVISILMQRHVLVDGKVRTDKTYPAGFMDVISIPKTNENYRLLYDTKGRFRLHPIRDEDAKTKLCKVRSVQFGQKGIPYLNTYDGRTIRYPDPLIKANDTIKIDLETNKIVDFIKFDVGNVVMVTGGRNTGRVGVIKNREKHKGSFETIHVEDAXGHQFATRLGNVFTIGKGNKPWVSXLPKGKGIKLSIIEEQRKRDGCCPGCCQRINSSECALSFAIASLSARI

SEQ ID NO: 92088 - protein, 82 aa, Setaria italica
  Transcript Sequence Number=SeqID_26114
TQLWHPRESTDTETGGGCRLISRSRCSMAQLATCEFAQLHRKFSSAGVGSIQEMPQLLTSLGEWEAASAGLGFTPNPNFSTM

SEQ ID NO: 92089 - protein, 93 aa, Setaria italica
  Transcript Sequence Number=SeqID_26115
  Gene Ontology: Mol. function=ARF guanyl-nucleotide exchange factor activity; Cellular component=intracellular; Biological process =regulation of ARF protein signal transduction
  Homolog annotation: Hit_ID=Q7F8R6; Match level="QueryCoverage=100%, HitCoverage=5%, E-value=5e-28, Identity=67%"; Hit description =Putative guanine nucleotide-exchange protein GEP2
VAKLLYHRLLFGDLGCAGGGDDASSPTSRLLNAVLACGALSDDAMELATLRVVVAAARCPTVAIRGEGLGQVLKTCYNIYLSSSSGANQLCAK

SEQ ID NO: 92090 - protein, 66 aa, Setaria italica
  Transcript Sequence Number=SeqID_26116
SLYAFYHPSVKVHVSYKLYLRAASKDDVHGVPARVAPAVGFPLYRFMLLVDIIPFPCISFSIYEQL

SEQ ID NO: 92091 - protein, 108 aa, Setaria italica
  misc_feature (85)..(85): Xaa can be any naturally occurring amino acid
  Transcript Sequence Number=SeqID_26117
VAGADVAMTEADGVVAAPAAEVKAEGKAAAATDVGLEGGDAALSDPLYATESAGMVGVEGPGDEPVTGVEGVNGGEEGRLEAGAXGQQNETERKPVPAGDVAAAAAGQ

SEQ ID NO: 92092 - protein, 703 aa, Setaria italica
  Transcript Sequence Number=SeqID_26118
  Gene Ontology: Mol. function=protein serine/threonine kinase activity; Cellular component=plasma membrane; Biological process =protein amino acid phosphorylation
  Homolog annotation: Hit_ID=B9RW31; Match level="QueryCoverage=99%, HitCoverage=83%, E-value=0.0, Identity=57%"; Hit description =BRASSINOSTEROID INSENSITIVE 1-associated receptor kinase 1, putative
  Pfam annotation: Domain name=B_lectin; Domain location=31-139; Score =70.4; E_value=6.7e-18; Accession=PF01453.16; Description=D-mannose binding lectin
  Pfam annotation: Domain name=Furin-like; Domain location=219-349; Score=-85.1; E_value=0.089; Accession=PF00757.12; Description=Furin -like cysteine rich region
  Pfam annotation: Domain name=PAN_2; Domain location=287-353; Score =12.8; E_value=7.2e-05; Accession=PF08276.3; Description=PAN-like domain
  Pfam annotation: Domain name=Pkinase; Domain location=456-702; Score =137.8; E_value=3.3e-38; Accession=PF00069.17; Description=Protein kinase domain
  Pfam annotation: Domain name=Pkinase_Tyr; Domain location=456-702; Score=78.4; E_value=2.6e-20; Accession=PF07714.9; Description =Protein tyrosine kinase
  Pfam annotation: Domain name=S_locus_glycop; Domain location=154-277; Score=-40.2; E_value=0.038; Accession=PF00954.12; Description=S-locus glycoprotein family
  Pfam module annotation: Pfam domain module=B_lectin::Furin-like::PAN _2::Pkinase::Pkinase_Tyr::S_locus_glycop; Domain location=31-139::219- 349::287-353::456-702::456-702::154-277
  Subcellular localization annotation: CTP_CleavageSite=79; ConfidenceScore=5.67e-01
PWTSPNNTFSLSFTASPTSPSLFVAAITYAGGVPVWSAGAGAAVDSGGSLRLSSNGDLQLVNGSGAVLWSSNTGGRGVAAAAVQESGNLVLKNSTATLWQSFDHPTDTVVMSQNFTSGMNLTSGPYVFSVDKSSGNLTLKWTSGANTVTYFNKGYNTTFTGNKTLSSPTLTMQTNGIVSLTDGQLTAPVVVAYSSNYGESGDMMRFVRLDADGNFRAYSAARGSNAAAEQWSAVADQCQVFGYCGNMGVCSYNGTSPVCGCPSLNFQFSNPSNPRDGCKRKVDLQNCPGNSTMLQLDNTQFLTYPPEITTEQFFVGITACRLNCLSGGSCVASTALSDGSGLCFLKVSNFVSAYQSAALPSTSFVKVCFPGLPNPAPDAATSSSRGGSGVRAWVVAVVVLGAVSALVLCEWALWWWFCRHSPKYGPASAQYALLEYASGAPVQFSYRELQRSTKGFKEKLGAGGFGAVYRGVLANRTVVAVKQLEGIEQGEKQFRMEVATISSTHHLNLVRLIGFCSEGRHRLLVYEFMKNGSLDAFLFGAAPGGKMPWPTRFAAAVGTARGITYLHEECRDCIVHCDIKPENILLDEHFNAKVSDFGLAKLVNPKDHRHRTLTSVRGTRGYLAPEWLANLPITAKSDVYSYGMVLLEIVSGHRNFDVSEETGRKKFSVWAYEEYEKGKIFDIIDKKLPGEDIDMAQVERALQ

SEQ ID NO: 92093 - protein, 69 aa, Setaria italica
  Transcript Sequence Number=SeqID_26119
LTNRSLLHMPEHRGATGTCFCVSSTAPYNQKQNIQSKGWFYTMRSSTPFTPHGRSIYHTILKSSFKFRN

SEQ ID NO: 92094 - protein, 61 aa, Setaria italica
  Transcript Sequence Number=SeqID_26120
YPCHMLLNFMNLNKIGGVWVPNSSLDRDLSCMSAGQPYLFDLTIRQKLAQLQDDSDLLVLG

SEQ ID NO: 92095 - protein, 75 aa, Setaria italica
  Transcript Sequence Number=SeqID_26121
  Gene Ontology: Mol. function=actin binding; Cellular component =integral to membrane; Biological process=actin cytoskeleton organization and biogenesis
  Homolog annotation: Hit_ID=Q10Q99; Match level="QueryCoverage=77%, HitCoverage=6%, E-value=5e-23, Identity=93%"; Hit description=Formin- like protein 8
PIPCVQGLSLRIFMVVRDFLSTLDHVCKEVGRMQQDRTVIGSARSFRISATTSLPVLSLYGQRRENNSDDDSSSS

SEQ ID NO: 92096 - protein, 221 aa, Setaria italica
  Transcript Sequence Number=SeqID_26122
  Gene Ontology: Mol. function=unfolded protein binding; Cellular component=prefoldin complex; Biological process=protein folding
NARIMARLDELEMEEMEAGSTSEEEEDDDEDDGGAVTSEDGEENEESGNALSDGNEHHSSSFGASFSGNGGNDRSHGNIQLKSALKKPGGEELLRGISHAPSAHTSHSVFPGQSSITNSEVRVRKAVSFEDDKHVVGSSKSPSLPPDPSHPAPGFKGSSDPAPSRERKIISSGRQAFTGSIIERDDNLLPIQPPVGSSSAKPGTSASSRPMSRFKMQKGER

SEQ ID NO: 92097 - protein, 71 aa, Setaria italica
  Transcript Sequence Number=SeqID_26123
  Subcellular localization annotation: CTP_CleavageSite=19; ConfidenceScore=5.10e-01
FIMLLVPMLATKALETSPVHGSVSQVSGLFPNQTRRELAGLGGADFVRVASWWKVSPVRAGLAGLNGFTLV

SEQ ID NO: 92098 - protein, 120 aa, Setaria italica
  Transcript Sequence Number=SeqID_26124
  Gene Ontology: Mol. function=nucleotide binding
HLPYLQSLQLRHITGVGSMGSEVPVEINRSALYQSLKELHFEDMPNLEIWPTSSSMDHKDSQSESLFMFPVLKTVTVKECPKLRPTPCLPDAIADLSVSSSSEMVSSGRISRPSSSVSAS

SEQ ID NO: 92099 - protein, 52 aa, Setaria italica
  Transcript Sequence Number=SeqID_26125
CGGCTLVLASMPSKFRLRKVDRKSHESAKATQITLDSDYISQPKQHNHTLCE

SEQ ID NO: 92100 - protein, 149 aa, Setaria italica
  Transcript Sequence Number=SeqID_26126
RKWCTDQLTHQFKRYIRMNCIMVSLLRIIKQFEGGMKRKAQPRMNYDCGNDSASITVRNRRLTDRSHVTSPLFYVSCFPFLILPFAFSSNIIFVSLDMHVNLSTQMKLRSRYPDASVEEKEVGERERWGRQKLGLDFVAITLPFVCFLE

SEQ ID NO: 92101 - protein, 87 aa, Setaria italica
  Transcript Sequence Number=SeqID_26127
  Homolog annotation: Hit_ID=Q7XUR6; Match level="QueryCoverage=72%, HitCoverage=26%, E-value=2e-15, Identity=60%"; Hit description =OSJNBa0084K11.15 protein
  Pfam annotation: Domain name=DUF1014; Domain location=1-64; Score =35.5; E_value=1.1e-09; Accession=PF06244.4; Description=Protein of unknown function (DUF1014)
TIAAEPALPPDRHPERRLKVSYKAFEEAEVAKLEEEKPGLTLHQYKDIIWKLWKKSPDNPLNQVQALTQFFLPRSLSTEGHHHFITI

SEQ ID NO: 92102 - protein, 93 aa, Setaria italica
  Transcript Sequence Number=SeqID_26128
APARASCVRASSMSGGAASSRAWRVENGRVEWRLTDRGGGAAPTAGCVSHQRRGEPLASPAGGGGGGGVRPRRRPPMEGRRCRCCSCQLGLPP

SEQ ID NO: 92103 - protein, 73 aa, Setaria italica
  Transcript Sequence Number=SeqID_26129
  Gene Ontology: Mol. function=hydrolase activity, hydrolyzing O -glycosyl compounds; Biological process=carbohydrate metabolic process
  Homolog annotation: Hit_ID=B6TNN5; Match level="QueryCoverage=100%, HitCoverage=17%, E-value=2e-28, Identity=79%"; Hit description=Alpha- galactosidase
CRFPRMSRALKDSGRPIFFSLCEWGYMEVAKWGATSGNSWRTTGDINDTWTGMLDNIDRNDAFAQYAKPRGWN

SEQ ID NO: 92104 - protein, 239 aa, Setaria italica
  Transcript Sequence Number=SeqID_26130
  Gene Ontology: Mol. function=hydrolase activity, hydrolyzing O -glycosyl compounds; Biological process=carbohydrate metabolic process
  Homolog annotation: Hit_ID=B6TNN5; Match level="QueryCoverage=99%, HitCoverage=55%, E-value=1e-117, Identity=84%"; Hit description =Alpha-galactosidase
  Pfam annotation: Domain name=Melibiase; Domain location=1-222; Score=- 241.8; E_value=0.048; Accession=PF02065.10; Description=Melibiase
GLKLGLYSSAGTRTCSDRMPGSLGHEDTDAKTFASWDVDYLKYDNCYRDGTPETERFPRMSRALKDSGRPIFFSLCEWGYMEVAKWGATSGNSWRTTGDINDTWTGMLDNIDRNDAFAQYAKPRGWNDPDMLEVGNGGMTYDEYVVHFSLWAVAKAPLIIGCDVTSISKETLGILSNAEVIAINQDRLGIQGKKVRDYGNDLEVWAGRLSRHRQAVLLLNRGAARSASITAAWPDVGIP

SEQ ID NO: 92105 - protein, 454 aa, Setaria italica
  misc_feature (153)..(153): Xaa can be any naturally occurring amino acid
  misc_feature (159)..(159): Xaa can be any naturally occurring amino acid
  misc_feature (268)..(268): Xaa can be any naturally occurring amino acid
  Transcript Sequence Number=SeqID_26131
  Gene Ontology: Mol. function=zinc ion binding
  Homolog annotation: Hit_ID=Q67IW8; Match level="QueryCoverage=88%, HitCoverage=47%, E-value=1e-77, Identity=37%"; Hit description=Far -red impaired response protein-like
  Pfam annotation: Domain name=MULE; Domain location=6-102; Score=73.5; E_value=8e-19; Accession=PF10551.1; Description=MULE transposase domain
  Pfam annotation: Domain name=SWIM; Domain location=290-326; Score =26.8; E_value=9.1e-05; Accession=PF04434.9; Description=SWIM zinc finger
  Pfam module annotation: Pfam domain module=MULE::SWIM; Domain location=6-102::290-326
THFGDVITFDTTYRSKLYDMPFGLFVGVNNHYQSVILVGVLMQHETVETVKWVFREFITLNGGKAPSTILTGQCHAIEVAIQEVLPDTTHKWCKVQVLSKENEFLGPIFSKKTGFKDDFQKITDSMLTVREFKSAWQRLLDKYTLHGNVFPFXIYDLDXKWAKPYFKEKFCAKQTSMQINECADYIFKGYVPLNRSINMFVRHYYKLQSDLDSKESFEENRSRKRSRVMSKGVPVEEHAAKIYTRVMFEKFDEIIFQSGSHLVDEKVXGKAYLARHIRSDCRESWSQVEFEVTIQAEDGAVVCECGLGDHMGMPCCHAVKVMIHLGMLEIPAGNIVKRWTMDARDILPAQMIELESDKLAENSHSYGQSDLFILAFEFAKSCSRSDQTFEAGLAGLVQLEQDLLELKQVRDGSVLSEKCSRSAAQGSDVQGMSAAATYDPKCKIVQHTQAKGLQ

SEQ ID NO: 92106 - protein, 70 aa, Setaria italica
  Transcript Sequence Number=SeqID_26132
  Gene Ontology: Mol. function=catalytic activity; Biological process =cellular metabolic process
  Homolog annotation: Hit_ID=Q7XN58; Match level="QueryCoverage=94%, HitCoverage=36%, E-value=5e-23, Identity=80%"; Hit description =OSJNBa0089N06.26 protein
MSADDKMKTACVTGGSGYIASALIKMLLEKGYAVKTTVRNPDDMANNSHLKNLQALGPLEVLRSELVDKN

SEQ ID NO: 92107 - protein, 78 aa, Setaria italica
  Transcript Sequence Number=SeqID_26133
HVHSSSDLYINVHALYALLVLSCFLVFFISFLFELIIASLLACSCAGQFDPCPGVPLPVSCFVRNLEVHGTRHARHNI

SEQ ID NO: 92108 - protein, 281 aa, Setaria italica
  Transcript Sequence Number=SeqID_26134
  Gene Ontology: Mol. function=FMN adenylyltransferase activity; Biological process=riboflavin biosynthetic process
  Homolog annotation: Hit_ID=B6TXJ0; Match level="QueryCoverage=100%, HitCoverage=75%, E-value=1e-152, Identity=93%"; Hit description =Riboflavin kinase family protein
  Pfam annotation: Domain name=FAD_syn; Domain location=7-156; Score =6.6; E_value=2.3e-08; Accession=PF06574.4; Description=FAD synthetase
LIDCGEDQDCVLGGIVALGKFDALHVGHRELAMHASKAGTPFLLSFVGMAEVLGWTYRPPIVAQCDRKRVLSSWAPYCRNVVPLEYQVEFSKVRSLSPRQFVERLSKDLRIKGVVAGENYRFGYKASGDAAELVKLCEEFGLSAFIVRSVMDTAKRAHNGVAAAINSSDKGQVSSSRVRHALAMGDMEYVSELLGRKHRLVLMVNQKCFHERKKIVFPNSCMLNMPPAEGLYENCELVNGGYLGPCRVIINSDTIVIEMKDENSLSPNPIQEVRQLGIEFG

SEQ ID NO: 92109 - protein, 336 aa, Setaria italica
  Transcript Sequence Number=SeqID_26135
  Gene Ontology: Mol. function=3'-5' exonuclease activity; Cellular component=intracellular; Biological process=nucleobase, nucleoside, nucleotide and nucleic acid metabolic process
  Homolog annotation: Hit_ID=Q2V9B5; Match level="QueryCoverage=91%, HitCoverage=90%, E-value=1e-136, Identity=73%"; Hit description=3' -5' exonuclease domain-containing protein-like
  Pfam annotation: Domain name=3_5_exonuc; Domain location=30-219; Score=90.0; E_value=8.5e-24; Accession=PF01612.12; Description=3'-5' exonuclease
  Pfam annotation: Domain name=KH_1; Domain location=269-329; Score =51.0; E_value=4.7e-12; Accession=PF00013.21; Description=KH domain
  Pfam module annotation: Pfam domain module=3_5_exonuc::KH_1; Domain location=30-219::269-329
MASHHSEPLDPAPAADVPADNSPELPSPSYHIVTKPGQLPVEFLEPSAAQKLVIGFDCEGVDLCRNGALCIMQLAFPDAVYLVDAIEGGKELIQACKPALESDHITKVIHDCKRDSEALYFQFGIKLHNVMDTQIAYSLIGEQEGKKRTSDDYISFVSLLADPRYCGIPYPEKEEVRTLLRQDPNFWKIRPLSDMMVRAATDDVRFLLNIHEKMMEKLSKVSLWRLAVRSELYCRCFCLNDNQFADWPLLPPVPDDIEADVYVPEVDILSVLDVPPGKMGRVIGRKGSTIMSVKESCNVEIHIGGAKGPPDRVFIIGPVKEVRKAEAILRGRMLEF

SEQ ID NO: 92110 - protein, 90 aa, Setaria italica
  Transcript Sequence Number=SeqID_26136
QIVSSDKCAAWPTYILTGVEGRVEEAATAAWSRAEAVPPERPRARHAAGESRGQGRRQGVTRTCSASVWGTSATVVAATTATSGAAAWRE

SEQ ID NO: 92111 - protein, 100 aa, Setaria italica
  Transcript Sequence Number=SeqID_26137
  Gene Ontology: Mol. function=2 iron, 2 sulfur cluster binding; Biological process=abscisic acid biosynthetic process
  Homolog annotation: Hit_ID=Q69R21; Match level="QueryCoverage=51%, HitCoverage=5%, E-value=2e-11, Identity=70%"; Hit description =Probable aldehyde oxidase 4
MASSMSSVVGKATAVERLVFALNGRRYEVAAADVDPSTRLLEFIRTRTPFKGTKLGCGEGTFITCGVHALCLCWCASVFQSRTDTKSHRSKEKNSNTTIT

SEQ ID NO: 92112 - protein, 76 aa, Setaria italica
  Transcript Sequence Number=SeqID_26138
  Gene Ontology: Mol. function=signal transducer activity; Cellular component=plasma membrane; Biological process=response to light stimulus
  Homolog annotation: Hit_ID=B9T6J7; Match level="QueryCoverage=98%, HitCoverage=12%, E-value=6e-24, Identity=67%"; Hit description =Protein binding protein, putative
CEAFEVIALFCYGDAVALDPFNVAAVRCAAEFLGVGGLGARCDLYINQVVLQSWDDALIVLQRCQPLLPVAEELLI

SEQ ID NO: 92113 - protein, 97 aa, Setaria italica
  Transcript Sequence Number=SeqID_26139
  Subcellular localization annotation: CTP_CleavageSite=69; ConfidenceScore=5.31e-01
QNAREQSHRIRAGWPPPALHHHTPTNSHSTHRPNQSARPYPRPRRGTADRSCCVRGVGSRSGARRTRPLAMGAGAVPALVLALLLLAVAPPPPAHAA

SEQ ID NO: 92114 - protein, 49 aa, Setaria italica
  Transcript Sequence Number=SeqID_26140
MAGTCAHVEFLRAQPAWALALAAVGLLVALRAAIRLALWVYAAFLRPGK

SEQ ID NO: 92115 - protein, 91 aa, Setaria italica
  Transcript Sequence Number=SeqID_26141
  Gene Ontology: Mol. function=hydrolase activity, hydrolyzing O -glycosyl compounds; Cellular component=cytoplasm; Biological process= carbohydrate metabolic process
  Homolog annotation: Hit_ID=B6T289; Match level="QueryCoverage=100%, HitCoverage=19%, E-value=3e-45, Identity=93%"; Hit description =Glucan endo-1,3-beta-glucosidase 7
  Pfam annotation: Domain name=X8; Domain location=1-86; Score=163.8; E_ value=4.9e-46; Accession=PF07983.5; Description=X8 domain
GWCVARDGATDADLQADLDYACAQVGVDCGAIQPGGACFEPNTVRAHAAYAMNQLYQAAGRHPWNCDFRASATLTSDNPSYGACVYTGGGQ

SEQ ID NO: 92116 - protein, 50 aa, Setaria italica
  misc_feature (14)..(14): Xaa can be any naturally occurring amino acid
  Transcript Sequence Number=SeqID_26142
MKLGPFISNYCVFXCLCIPNKMLPGVCVTFVCLVNVERYIRMIAELILLS

SEQ ID NO: 92117 - protein, 419 aa, Setaria italica
  Transcript Sequence Number=SeqID_26143
  Gene Ontology: Mol. function=small conjugating protein ligase activity; Biological process=regulation of protein metabolic process
  Homolog annotation: Hit_ID=B9RZ97; Match level="QueryCoverage=92%, HitCoverage=42%, E-value=5e-86, Identity=44%"; Hit description =Ubiquitin conjugating enzyme, putative
EGLAIMDLFAIDSDSESYSGTSDSEDQEECEFTYSDHAQNILSSLDESIGKIDNFLTFERGFLHGDIVCPVSDPSGQLGRVVGVAMFVDLETSSGDIITDVNSKKLSRVRSFVSGDCVVMGPWIGRVIRAFDLVTLLFSDGAKCEMLVRDSEALKPIPPILFEDAPYFYYPGQRVRIVQPSIFESATWLCGSWRANRDDGVVSHVDVGLVHVNWITSVTNVWGDKSSSPGNIQDPKNLTLLSCFPYANWQLGDWCALTSDDHGCLWMDSGKSCILSKAWKCDSHGHMRLENYSSGYSQTYIVSKTKSTVDVLWQNGSISLGLEPQTLVPVSTLGDYDFWPGQFVLEKLAVEDSARCQRTGIVRDVDALERTVNVKWISPAGSDAVSYGRSGPTVETVSAYELVEHPDFSFCTGEVVIIF

SEQ ID NO: 92118 - protein, 540 aa, Setaria italica
  Transcript Sequence Number=SeqID_26144
  Gene Ontology: Mol. function=small conjugating protein ligase activity; Biological process=regulation of protein metabolic process
  Homolog annotation: Hit_ID=B2L1Z0; Match level="QueryCoverage=99%, HitCoverage=63%, E-value=1e-120, Identity=43%"; Hit description=PHO2
  Pfam annotation: Domain name=UEV; Domain location=309-422; Score= -44.5; E_value=0.076; Accession=PF05743.5; Description=UEV domain
  Pfam annotation: Domain name=UQ_con; Domain location=301-450; Score =131.0; E_value=3.8e-36; Accession=PF00179.18; Description=Ubiquitin -conjugating enzyme
  Pfam module annotation: Pfam domain module=UEV::UQ_con; Domain location=309-422::301-450
VVEFVLEKLAVEDSARCQRTGIVRDVDALERTVNVKWISPAGSDAVSYGRSGPTVETVSAYELVEHPDFSFCTGEVVIRSAVNIDKSEADLTNGSLASRESLDTHSDFLSCIGNVLGYKDDGIEVQWANGVISKVQHFEIIGLDKLLDSSLESMHEEHATGDSVDVAEQEEMHHENANIALESTDCTGSLCKATAFLFPKTAFDFLTNVATSLFGTHGSPSPSSVVVDPQYQIIMTAEMQTSADELPEEKLTVELVAKIEKPNLSSEDNISKRFDVVTDCSDHHFVKESGHENVTRGWVKKVQQEWTILQNDLPDGIHARVFEERMDLLRACIVGAAGTPYHDNLFFFDIFFPPDYPHEPPSVHYHSGGLRLNPNLYESGKVCLSLLKTWTGTGNEVWNPENSTVLQLLLSLQALVLNEKPYFNEAGYDKFLGKADGEKNSITYNENAFLLSCKSMMYVLHKPPKHFEKLVKEHFTCRAPCILDACEAYLGGDLVGHAHDKAYISEDGSKSCSTGFKIMLGKLLPKLAAAFSEAGITSGQ

SEQ ID NO: 92119 - protein, 603 aa, Setaria italica
  Transcript Sequence Number=SeqID_26145
  Homolog annotation: Hit_ID=Q9C824; Match level="QueryCoverage=74%, HitCoverage=56%, E-value=1e-140, Identity=54%"; Hit description=BZIP protein, putative; 48652-45869
  Pfam annotation: Domain name=DUF632; Domain location=165-473; Score =511.7; E_value=9.6e-151; Accession=PF04782.4; Description=Protein of unknown function (DUF632)
LRHGAHLEPPRRPGRPVTPVTPQPPPPPPPPPPPSSEMKSGVDTWDYFFSMDEGMASIAPDDDEIMAGPEEEKYVPASPPRPPPSPPPPAAVPLSEEFEEEPRTPEMVAPPPSLPPKPPKNSSKKKKGKGKLKAAHHQHTESAPPVTLVGGGKAGKIVPEMPRVDLLRVLAEIDERFLKASESAGEVSKVLEANRMHYHSNFADNRGHIDHSARVMKIITWNRSFKGMQNGDEGKDDFENDEWETLATVVDKILAWEKKLYDEVKAGEIMKLEYQRKVALLNRQKKHNAAIEVLEKTKAAVTHLHTRYIVDMQSMDSTVSEIQHLRDNQLYPRLLDLADRMAKMWEDMHMHHANQLKTVLKLKSVDISDANIETSDYHHSHTRQLRDIVDKWITNFTDLMSYQKEYINALYGWLKLNLIPIESSLKEKVASPPRMQQPPIKAFLQAWNEHLTKLPDDLAKTAIVSFRAVLETILGVQDEELKQKEICEQTRREYARKARAFEDWYHKHSQRRTFDVDPETGEGTGHKDAVTEKKFAVESLKSKLDDEIESHNKLSKQVREKSLSILKAHLPELFRALADFSNASFDMYSKLRLMSLMQDQGNN

SEQ ID NO: 92120 - protein, 66 aa, Setaria italica
  Transcript Sequence Number=SeqID_26146
ETFHIHTESLPYAIQVIQGNALLPGANALQASIDAISKYGGARVGYRTMLDALIPASEILREVGSY

SEQ ID NO: 92121 - protein, 76 aa, Setaria italica
  Transcript Sequence Number=SeqID_26147
  Gene Ontology: Mol. function=glycerone kinase activity; Biological process=glycerol metabolic process
  Homolog annotation: Hit_ID=Q9LSH1; Match level="QueryCoverage=100%, HitCoverage=13%, E-value=1e-18, Identity=52%"; Hit description =Dihydroxyacetone/glycerone kinase-like protein
DSLNEWDSKVGDGDCGTTRHLSSNNYITSCIMCQLFYCNHFIVYPMNDAAETVNEIGATVRRVMGGTTGILYHHSC

SEQ ID NO: 92122 - protein, 143 aa, Setaria italica
  Transcript Sequence Number=SeqID_26148
  Gene Ontology: Mol. function=glycerone kinase activity; Biological process=glycerol metabolic process
  Homolog annotation: Hit_ID=Q9SX75; Match level="QueryCoverage=71%, HitCoverage=50%, E-value=4e-31, Identity=62%"; Hit description =F11A17.1 protein (Fragment)
  Pfam annotation: Domain name=Dak2; Domain location=8-131; Score=65.1; E_value=2.5e-16; Accession=PF02734.9; Description=DAK2 domain
LILVLYRYDIFCKAAYASLKGIKTVDAKHWANALQASIDAISKYGGARVGYRTMLDALIPASEILRERLEAGDDPLDAFVVSSEAAMNGAESTRHMQAQAGRSSYIAADKLALAPDPGAMAAAAWYRAVALSLKSSMSCHSKP

SEQ ID NO: 92123 - protein, 301 aa, Setaria italica
  Transcript Sequence Number=SeqID_26149
  Gene Ontology: Mol. function=glycerone kinase activity; Cellular component=cytoplasm; Biological process=glycerol metabolic process
  Homolog annotation: Hit_ID=Q10DU3; Match level="QueryCoverage=91%, HitCoverage=55%, E-value=1e-109, Identity=71%"; Hit description=3,4 -dihydroxy-2-butanone kinase, putative, expressed
  Pfam annotation: Domain name=Dak2; Domain location=149-300; Score =129.4; E_value=1.2e-35; Accession=PF02734.9; Description=DAK2 domain
ITRGDRVILLTNGLGATPIMELMIATRKAVRELQLEYGIATDRIYTGSFMTSLDMQGFSLSIMKSDTTILQCLDASTKAPCWPAGADGNRQKPAKIAVPAPPSCAMKSDKMLQQSRELTKEGCILEVSIEAGAEEIIRIKDSLNEWDSKVGDGDCGTTMYRGAIAILDDMKKCYPMNDAAETVNEIGATVRRVMGGTTGILYDIFCKAAYASLKGIKTVDAKHWANALQASIDAISKYGGARVGYRTMLDALIPASDILRERLEAGDDPLDAFVVSSEAAMNGAESTSLGLPCVLWIQHHS

SEQ ID NO: 92124 - protein, 119 aa, Setaria italica
  Transcript Sequence Number=SeqID_26150
GVEIGEEQGLKCRARFQGRSRSEQAPGRETRASILPTQALTQDGRRTKQLASDGRWSLAAPPSNGCLPIDHSPSLPSVRSQECDERVVLLSCCPYKPEEKWSESARRHSLLFLSVVSFS

SEQ ID NO: 92125 - protein, 41 aa, Setaria italica
  Transcript Sequence Number=SeqID_26151
  Gene Ontology: Mol. function=cysteine-type endopeptidase activity; Cellular component=chloroplast; Biological process=proteolysis
  Homolog annotation: Hit_ID=B4FNB7; Match level="QueryCoverage=95%, HitCoverage=9%, E-value=1e-12, Identity=87%"; Hit description=Latex -abundant protein
MGGRKRALLVGINYPGTKAELKGCHNDVDRMHRCLVDRFGF

SEQ ID NO: 92126 - protein, 302 aa, Setaria italica
  Transcript Sequence Number=SeqID_26152
  Gene Ontology: Mol. function=cysteine-type endopeptidase activity; Cellular component=chloroplast; Biological process=proteolysis
  Homolog annotation: Hit_ID=B4FNB7; Match level="QueryCoverage=100%, HitCoverage=73%, E-value=1e-139, Identity=82%"; Hit description =Latex-abundant protein
  Pfam annotation: Domain name=Peptidase_C14; Domain location=128-300; Score=-23.2; E_value=0.0012; Accession=PF00656.14; Description =Caspase domain
MNLITDQDFTELVQKVPEGCLLTIVSDSCHSGGLLDKTKEQIGHSTKQNQTQRRELEERSDSGTSFRAFLKETVRDVFESQGIHLPHRGHRHSDDGDDGDEEPRYIDAADAHVKNRSLPLSTLIEMLKEKTGKDDIDVGSIRLTLFNLFGDDASPKVKKFMKVMLNKLQQGQHGGVMGFMGALAQEFLKAKLEGQQDQLEPAMNQEVHSEEEVYAGTTARVPSNGVLISGCQTDQTSADATTPKGVSYGALSNAIQTILAEHGTVTNKELVLKARKMLSKQGYTQQPGLYCSDEHASVAFIC

SEQ ID NO: 92127 - protein, 152 aa, Setaria italica
  Transcript Sequence Number=SeqID_26153
  Gene Ontology: Mol. function=cysteine-type endopeptidase activity; Cellular component=chloroplast; Biological process=proteolysis
  Homolog annotation: Hit_ID=B4FNB7; Match level="QueryCoverage=88%, HitCoverage=31%, E-value=6e-56, Identity=79%"; Hit description=Latex- abundant protein
ERYNRLETKTTKTNADKLQQGQHGGVMVFMGALAQEFLKAKLEGQQDQLEPAMNQEVHSEEEVYAGTTARVPSNGVLISGCQTDQTSADATTPKGVSYGALSNAIQTILAEHGTVTNKELVLKAREVLSKQGYTQQPGLYAAMSTCGTRQVE

SEQ ID NO: 92128 - protein, 422 aa, Setaria italica
  Transcript Sequence Number=SeqID_26154
  Gene Ontology: Mol. function=cysteine-type endopeptidase activity; Cellular component=chloroplast; Biological process=proteolysis
  Homolog annotation: Hit_ID=B4FNB7; Match level="QueryCoverage=100%, HitCoverage=100%, E-value=1e-169, Identity=72%"; Hit description =Latex-abundant protein
  Pfam annotation: Domain name=Peptidase_C14; Domain location=4-420; Score=214.1; E_value=3.6e-61; Accession=PF00656.14; Description =Caspase domain
MGEKRAVLVGINYPGTKAELKGCHNDVARMRRCLVDRFGFDESGIRVLVDDGSGGPQPTGANIRRELARLVGDARPGDLLFFHYSGHGTRLPAETGQHDDTGYDECIVPSDMNLITDQDFRELVQKVPDGCLFTIVSDSCHSGGLLDSAKEQIGNSTRQNKTQSREPEERPDSGSGSSFRSFLKETVRDAFESEGIRIPHSRHSHSHHGGDDQDEAYGQSSGDGRIKNRSLPLSTLIEMLKEQTGKEDIDVGSIRMTLFNIFGDDASPKIKKFMKVMLGKFHQGQSGEHGGGGVMGMVGALAQEFLKAKLEGNEEEAFKPALEQEVHSVDEVYAGTKAWAPNNGILISGCQTNQTSADATTAQGVSFGALSNAIQTILADKHGEVTNKDLVMKAREVLSKQGYTQQPGLYCSDEHVHVAFIC

SEQ ID NO: 92129 - protein, 67 aa, Setaria italica
  Transcript Sequence Number=SeqID_26155
GGPRGWRLWRRRPEWAPRWSGCRGGESTAVGGGGSISGSYGRRDKWGVPLRRRGGGGEWESLRSRWR

SEQ ID NO: 92130 - protein, 65 aa, Setaria italica
  Transcript Sequence Number=SeqID_26156
LINLSNMLLQVNRKSAVECMWCSIKTSSGVKHTDHKTETVQDSLKLVKVQCYRRFNLALTGLWLY

SEQ ID NO: 92131 - protein, 61 aa, Setaria italica
  Transcript Sequence Number=SeqID_26157
  Gene Ontology: Mol. function=nucleotide binding; Cellular component =protein complex; Biological process=protein polymerization
  Homolog annotation: Hit_ID=Q95DV5; Match level="QueryCoverage=50%, HitCoverage=6%, E-value=6e-10, Identity=96%"; Hit description=FtsZ -like protein
IQSPLLDIGIERATGIVWNITGGMDLTLFEVWSIYFLALLMTAWIIFWPVFICHCSVRLII

SEQ ID NO: 92132 - protein, 464 aa, Setaria italica
  Transcript Sequence Number=SeqID_26158
  Gene Ontology: Mol. function=nucleotide binding; Cellular component =protein complex; Biological process=protein polymerization
  Homolog annotation: Hit_ID=B9SRX2; Match level="QueryCoverage=92%, HitCoverage=89%, E-value=1e-169, Identity=71%"; Hit description=Cell division protein ftsZ, putative
  Pfam annotation: Domain name=Tubulin; Domain location=110-303; Score =286.1; E_value=8e-83; Accession=PF00091.17; Description=TubulinFtsZ family, GTPase domain
  Pfam annotation: Domain name=Tubulin_C; Domain location=306-426; Score=103.9; E_value=5.3e-28; Accession=PF03953.9; Description =TubulinFtsZ family, C-terminal domai
  Pfam module annotation: Pfam domain module=Tubulin::Tubulin_C; Domain location=110-303::306-426
  Subcellular localization annotation: CTP_CleavageSite=48; ConfidenceScore=5.62e-01
MATQLPCFTQLSPPSSSWGSEVPSCKDTSGRAFVRSTRTLGHCHFRCCASPRSANSFQKKDSFLDLHPEVSLLRGKKNVEVVDPLKGASDGSPLEGLGVPPDRSDYNEAKIKVVGVGGGGSNAVNRMIESSMNGVEFWIVNTDVQAIRMSPVLPHNRLQIGQELTRGLGAGGNPDIGMNAAKESSESIQEALYGADMVFVTAGMGGGTGTGGAPVIAGIAKSMGILTVGIVTTPFSFEGRRRAVQAQEGIAALRNSVDTLIVIPNDKLLSAVSPNTPVTEAFNLADDILRQGIRGISDIITVPGLVNVDFADVRAIMQNAGSSLMGIGTATGKSRARDAALNAIQSPLLDIGIERATGIVWNITGGMDLTLFEVNAAAEIIYDLVDPNANLIFGAVIDPSLSGQVSITLIATGFKRQDEPEGRTSKGGQQIQGENGRRPSSGEGSMVEIPEFLRRRGPSRFPRV

SEQ ID NO: 92133 - protein, 153 aa, Setaria italica
  misc_feature (128)..(128): Xaa can be any naturally occurring amino acid
  misc_feature (140)..(140): Xaa can be any naturally occurring amino acid
  Transcript Sequence Number=SeqID_26159
ERSKDIERHYSGSRDLVIENGGGTERFYSAGDVTTGRVRDTDRLYSRGTLEPDLVPCTQSKFLGDSSPALLAKDHPYRMHTEPVYEPSNRYIMDGLGRSSHDSLGHGSGHRHKLSGSPLEHGSAHGDXKLLLDIARQSHXKRAIRAASMEYDA

SEQ ID NO: 92134 - protein, 69 aa, Setaria italica
  Transcript Sequence Number=SeqID_26160
HSRMARPAQSPLETCATSSNGAESPVPVSPHGQPQCGCSFLCGLGGQPNQHQSEFQVFQSSIVDTRIGD

SEQ ID NO: 92135 - protein, 92 aa, Setaria italica
  Transcript Sequence Number=SeqID_26161
MAAGRKQQLVVAVVAMLLVAGAAAQDCGVGESTRDACLSYCSDDRNKNACCRPMRNANMGCLCNYWRKYNSVPFFAKCAAKIRSSCAIRMAC

SEQ ID NO: 92136 - protein, 104 aa, Setaria italica
  Transcript Sequence Number=SeqID_26162
  Gene Ontology: Mol. function=oxidoreductase activity; Cellular component=cytoplasm; Biological process=metabolic process
  Homolog annotation: Hit_ID=B5M1Y6; Match level="QueryCoverage=86%, HitCoverage=18%, E-value=5e-37, Identity=80%"; Hit description =Alcohol dehydrogenase
MAGNGKAAAGGVVVPEIKYTKLFINGEFVDAVSGKTFETRDPRTGDVLAHVAEAGKADVDLAVKAARDAFEHGKWPRMSGYERGRIMNKLADLVDQHTEELAAL

SEQ ID NO: 92137 - protein, 150 aa, Setaria italica
  Transcript Sequence Number=SeqID_26163
  Gene Ontology: Mol. function=transferase activity; Biological process= lipid A biosynthetic process
  Homolog annotation: Hit_ID=B9RXS8; Match level="QueryCoverage=90%, HitCoverage=55%, E-value=1e-57, Identity=79%"; Hit description=UDP-3- O-[3-hydroxymyristoyl] glucosamine N-acyltransferase, putative
  Pfam annotation: Domain name=Hexapep; Domain location=20-37; Score =15.2; E_value=0.27; Accession=PF00132.16; Description=Bacterial transferase hexapeptide (th
  Pfam annotation: Domain name=Hexapep; Domain location=42-59; Score =13.0; E_value=1.3; Accession=PF00132.16; Description=Bacterial transferase hexapeptide (th
  Pfam annotation: Domain name=Hexapep; Domain location=60-77; Score =14.0; E_value=0.62; Accession=PF00132.16; Description=Bacterial transferase hexapeptide (th
  Pfam annotation: Domain name=Hexapep; Domain location=84-101; Score =8.7; E_value=15; Accession=PF00132.16; Description=Bacterial transferase hexapeptide (th
  Pfam module annotation: Pfam domain module=Hexapep::Hexapep::Hexapep:: Hexapep; Domain location=20-37::42-59::60-77::84-101
WFFCWYVGIGQVKKKPQMLYARIGDHVEIGANTCVDRGSWRETMIGDHTKIDNLVQIGHNVVIGKCCMICGQVGIAGSATLRDYVTLGGRVAIRDHVSIVSKVRLAANSSVTKDIQKPGDYGGFPAVPINEWRRQTANLRLFSKKDGVKR

SEQ ID NO: 92138 - protein, 157 aa, Setaria italica
  misc_feature (84)..(84): Xaa can be any naturally occurring amino acid
  Transcript Sequence Number=SeqID_26164
  Gene Ontology: Mol. function=hydrolase activity; Cellular component =membrane; Biological process=proton transport
  Homolog annotation: Hit_ID=B9T1Y7; Match level="QueryCoverage=86%, HitCoverage=16%, E-value=5e-61, Identity=80%"; Hit description =Vacuolar proton atpase, putative
PVCFSDAHTAGLIKVRDPYPFGVDPSWRGSRSELPFLNSLKMKMSILMGVAQMNLGIVLSYFDARFHGNALDIRYQFIPQMIFXLNSLFGYLALLILIKWCTGSKADLYHVMIYMFLDPAGDLGENQLFWGQKELQILFVASGFWLVLFPIGIVFFP

SEQ ID NO: 92139 - protein, 866 aa, Setaria italica
  misc_feature (46)..(46): Xaa can be any naturally occurring amino acid
  misc_feature (288)..(288): Xaa can be any naturally occurring amino acid
  Transcript Sequence Number=SeqID_26165
  Gene Ontology: Mol. function=hydrolase activity; Cellular component =membrane; Biological process=proton transport
  Homolog annotation: Hit_ID=B9T1Y7; Match level="QueryCoverage=93%, HitCoverage=99%, E-value=0.0, Identity=74%"; Hit description =Vacuolar proton atpase, putative
  Pfam annotation: Domain name=V_ATPase_I; Domain location=82-859; Score=873.9; E_value=9.1e-260; Accession=PF01496.11; Description=V -type ATPase 116kDa subunit family
  Subcellular localization annotation: CTP_CleavageSite=42; ConfidenceScore=5.04e-01
NRVENRIRPTPSDLRRHPTTAPRRRPPRARGAFWKLREGALRSGGXSGMGVFDRLPPMDHLRSEKMCFVQLIIPAESSRVAVTYLGELGLLQFKDLNEDKSPFQRIFVNQVKRCAEMSRKLRFFSDQINKAGVRSSVRPALEPDIDLEELEARLGEHEHELLEMNTNSDKLQQTYNELLEFKLVLTKAGGILASSHNHAASAERELDENIYDREVDEGNAYLLEQGVHQGSSGNSGVRFVSGIILKSKALAFERMLFRATRGNMLFNQAPAGEPVTDPISGEEVEKTXFVVFFSGEQAKAKILKICDSFGASCYPVPEEMMKQRQIFNEVSARLSDLEVTLDAGIQHRNKALESVGSQLWRWTIMVKKEKAVYDTLNMLNFDVTKKCLVGEGWCPIFAKSQIKDCLQRATLHSNSQVGIIFHEMDTMESPPTYFRTDKFTNAFQEIVDAYGVARYQEANPAVYSVVTFPFLFAVMFGDWGHGICLLLGALVLILREKKLSSQKLGSFMEMAFGGRYVILLMAIFSIYCGLIYNEFFSVPFHIFGKSAYECREKSCSDAHTAGLIKVRDPYPFGVDPSWRGSRSELPFLNSLKMKMSILMGVAQMNLGIVLSYFDARFHGNALDIRYQFIPQMIFLNSLFGYLALLILIKWCTGSKADLYHVMIYMFLDPAGDLGENQLFWGQKELQILLLLLALVAVPWMLFPKPFILKKLHKERFQGHTYRFLGTSEMDPDSEPDSARARHDDFNFSEVFVHQMIHSIEFVLGAVSNTASYLRLWALSLAHSELSTVFYEKLLLLAWGYDSLIVKLVGLVVFAFATAFILLMMETLSAFLHALRLHWVEFMNKFYHGDGYKFKPFSFALLADDED

SEQ ID NO: 92140 - protein, 70 aa, Setaria italica
  Transcript Sequence Number=SeqID_26166
  Subcellular localization annotation: CTP_CleavageSite=14; ConfidenceScore=5.10e-01
ITTSVLRSFGHYALSNMSAHFLQKNKKGLPTEPRLSKISLLIDPNQTTARYSTTGLMVLTNTKSINITSS

SEQ ID NO: 92141 - protein, 56 aa, Setaria italica
  misc_feature (29)..(29): Xaa can be any naturally occurring amino acid
  Transcript Sequence Number=SeqID_26167
MDPASEELERRSRYLSSLIRRTKLSAAPXPPPLPEPEPEPEAPAPKPEPEPQTAVR

SEQ ID NO: 92142 - protein, 47 aa, Setaria italica
  Transcript Sequence Number=SeqID_26168
EYIRKLNRSSIVLPQIANMTTSRILILVQNLKSPTILRHFVMFFFIF

SEQ ID NO: 92143 - protein, 152 aa, Setaria italica
  Transcript Sequence Number=SeqID_26169
  Gene Ontology: Mol. function=binding; Cellular component=lysosome; Biological process=phagocytosis, engulfment
  Homolog annotation: Hit_ID=B9RRH8; Match level="QueryCoverage=93%, HitCoverage=14%, E-value=4e-58, Identity=75%"; Hit description=TPR repeat-containing protein R13F6.10, putative
MASKFGLAGGIPERRVRPIWDAVDSRQYKAALKLCTALLAKHPTSPYALALKALILERMGKPDEALSVSLNAKELLYSDNIFHFDDLTLSTLQIVFQRLDRLDLATSCYEYACTKYPSNLELMMGLFNCYVREYSYVKQQQTALKMYKTVGE

SEQ ID NO: 92144 - protein, 61 aa, Setaria italica
  Transcript Sequence Number=SeqID_26170
  Subcellular localization annotation: CTP_CleavageSite=35; ConfidenceScore=5.09e-01
CTSCSLLLFGSVCSARYVLSFISGVRLFERLMRICARVGNCCLTVGLSERRSQRYSPTRVS

SEQ ID NO: 92145 - protein, 125 aa, Setaria italica
  Transcript Sequence Number=SeqID_26171
TTHRPNLMTDGEWPVLLEFLKVDTLQGDLHVVNKSQAFKFDVQIFRADNLKLEWRRKIIDLEISNTKKLTDSSLLASLFSVKELPGRCRHASPRSLSDQLLGTCSFFSSFKNLGGAAQSAQRRKE

SEQ ID NO: 92146 - protein, 122 aa, Setaria italica
  Transcript Sequence Number=SeqID_26172
FSREEIESSRFASKYSAHGLQIASGPNFVPRNRFRRPQRDLTKQNKKKEKEEEEDLRESICLVGEYSTFPAAFFFCRTSPASVPLRRTAMRSPAAAAAGSGADFPDALPSPTSPASASSHPR

SEQ ID NO: 92147 - protein, 342 aa, Setaria italica
  Transcript Sequence Number=SeqID_26173
  Gene Ontology: Cellular component=vacuole
  Homolog annotation: Hit_ID=B9R8Y6; Match level="QueryCoverage=95%, HitCoverage=39%, E-value=1e-117, Identity=62%"; Hit description =Alpha-n-acetylglucosaminidase, putative
  Pfam annotation: Domain name=NAGLU; Domain location=1-321; Score= -197.2; E_value=3.1e-10; Accession=PF05089.4; Description=Alpha-N -acetylglucosaminidase (NAGLU)
QNPIVYDLMSEMAFHHRQVDLQVWVETYPTRRYGKPVKGLQDAWWILYQTLYNCTDGKNDKNRDVIVAFPDVEPFVIKTQGLYMSSGKQYSTIPPKNYEKGTSNDAYDHPHLWYNTSVVVHALELFLQYGDEVSDSNTFRYDLVDLTRQVLAKYANDIFIKIIKSYKSNSTNQMITLCQHFLGLVNDLDTLLGSHEGFLLGPWLQNAKGLAQDREQEIQYEWNARTQITMWFDNTETKASLLRDYANKYWSGLLRDYYGPRAAIYFKHLLLSMEKNAPFSLEEWRREWISLTNNWQSDRKVFATTATGDALNISRSLYMKYLRNADLLELEGTFSPGKSASF

SEQ ID NO: 92148 - protein, 164 aa, Setaria italica
  misc_feature (16)..(16): Xaa can be any naturally occurring amino acid
  Transcript Sequence Number=SeqID_26174
  Gene Ontology: Mol. function=hydrolase activity, acting on glycosyl bonds; Cellular component=vacuole; Biological process=glycosaminoglyc an metabolic process
  Homolog annotation: Hit_ID=B9R8Y6; Match level="QueryCoverage=97%, HitCoverage=19%, E-value=8e-69, Identity=73%"; Hit description=Alpha- n-acetylglucosaminidase, putative
  Pfam annotation: Domain name=NAGLU; Domain location=1-164; Score= -424.4; E_value=0.02; Accession=PF05089.4; Description=Alpha-N -acetylglucosaminidase (NAGLU)
VLMQGWLFTYDPFWEXPPQMKALLHSVPVGRMIVLDLYAEVKPVWINSDQFYGVPYIWCMLHNFAADFEMYGVLDALASGPIDARLSDNSTMVGVGMSMEGIEQNPIVYDLMSEMAFHHRQVDLQVWVETYPTRRYGKPVKGLQDAWRLLDRTLYNRTDGTLLN

SEQ ID NO: 92149 - protein, 84 aa, Setaria italica
  Transcript Sequence Number=SeqID_26175
LPDIHPDEQNIPRAYHSERLAVAFGLISTSPCTPLRITQSHRLCRDCHKIIKFLTKVTKREIVVRDGSRFHHFKLGTCSCGDYW

SEQ ID NO: 92150 - protein, 107 aa, Setaria italica
  misc_feature (36)..(36): Xaa can be any naturally occurring amino acid
  Transcript Sequence Number=SeqID_26176
  Gene Ontology: Cellular component=membrane
LLTWSNKLLGPAMVALYIPLQPVLSALLSMLFLGSXIYLGSIFGGFLIISGLYLVTWARHREKLTGIGPSYTKCTLEPHDSDSQAARSGNLVSESFISLSRPWNVPS

SEQ ID NO: 92151 - protein, 186 aa, Setaria italica
  misc_feature (13)..(13): Xaa can be any naturally occurring amino acid
  Transcript Sequence Number=SeqID_26177
  Gene Ontology: Mol. function=hydrolase activity; Cellular component =membrane; Biological process=auxin mediated signaling pathway
  Homolog annotation: Hit_ID=B9S1R2; Match level="QueryCoverage=95%, HitCoverage=44%, E-value=2e-59, Identity=62%"; Hit description=Auxin- induced protein 5NG4, putative
AAVLLGLSYTNPXYAAAIQPSIPAFTFILALIMGTETVSLVSNEGRAKIGGTIVCVLGAVLMVLYRGPAVYGSSELELDVHSHGVLADMSQPEPAGSLVSLFMAFGLEKWHIGVLCLIGNCLCMATYLALQAPILVKYPSSLSLTAYSYFWGAVLMVISGVFATNDKGDWSLTQSEFAACLLLLLE

SEQ ID NO: 92152 - protein, 105 aa, Setaria italica
  misc_feature (55)..(55): Xaa can be any naturally occurring amino acid
  Transcript Sequence Number=SeqID_26178
  Gene Ontology: Mol. function=hydrolase activity; Cellular component =membrane
  Homolog annotation: Hit_ID=B9S1R2; Match level="QueryCoverage=78%, HitCoverage=21%, E-value=1e-14, Identity=54%"; Hit description=Auxin- induced protein 5NG4, putative
NSIFLPLLQGVMASALNYVLLTWSNKILGPAMVALYNPLQPVVSALLSMIFLGSXFYLGSIIGGLLIISGLYLVTWARHREKMTGIGVSYVKCASESLDGASHVT

SEQ ID NO: 92153 - protein, 78 aa, Setaria italica
  Transcript Sequence Number=SeqID_26179
IQCMFRCIIISMYLEKSKQPTIWNGGSMRFCIVFANCKYSTVLLEHGCYAYKSFQKKFLDEYLAVRKWETEYLVGYCF

SEQ ID NO: 92154 - protein, 67 aa, Setaria italica
  Transcript Sequence Number=SeqID_26180
  Gene Ontology: Mol. function=protein serine/threonine kinase activity; Biological process=protein amino acid phosphorylation
  Homolog annotation: Hit_ID=B9TAC6; Match level="QueryCoverage=100%, HitCoverage=6%, E-value=5e-18, Identity=67%"; Hit description =Receptor protein kinase CLAVATA1, putative
  Pfam annotation: Domain name=LRR_1; Domain location=17-39; Score =13.8; E_value=0.7; Accession=PF00560.25; Description=Leucine Rich Repeat
  Pfam annotation: Domain name=LRR_1; Domain location=41-63; Score =10.8; E_value=2.6; Accession=PF00560.25; Description=Leucine Rich Repeat
  Pfam module annotation: Pfam domain module=LRR_1::LRR_1; Domain location=17-39::41-63
NNRLNGTVPAGLGRLPRLQRLELAGNELSGEIPDDLALSTSLSFIDLSHNQLRSALPSNILSIPTLQ

SEQ ID NO: 92155 - protein, 116 aa, Setaria italica
  Transcript Sequence Number=SeqID_26181
  Gene Ontology: Cellular component=integral to membrane
  Homolog annotation: Hit_ID=B9RCQ1; Match level="QueryCoverage=100%, HitCoverage=25%, E-value=1e-34, Identity=59%"; Hit description=Amino acid transporter, putative
  Subcellular localization annotation: CTP_CleavageSite=47; ConfidenceScore=5.15e-01
ICAGLSRDAPAKDYSLSTSRSEKTFTAFLSVSILTSVFGNSILPEIQATLAPPAGGKMTRALVLSYSVFVLAFYSPAVAGYWAFGNQVRSNVMQSLLPADTGSSLAPPWMLGLAVV

SEQ ID NO: 92156 - protein, 113 aa, Setaria italica
  Transcript Sequence Number=SeqID_26182
WRVFCKKGCNADGDTWEQCIGKCTEICYKDPVLEDRQWSAYIDRSPGQDSYSLECFNACVSGCGFRFEVPTEKVEEIKPNRPSKPSPPPEVKRTTSPPDSTVGSREDVPCTSA

SEQ ID NO: 92157 - protein, 47 aa, Setaria italica
  Transcript Sequence Number=SeqID_26183
  Gene Ontology: Mol. function=metal ion binding
LVSMYARRNKSGKKDASVCYMKAPLPYAIEENHGGCFFDDDDDLAEV

SEQ ID NO: 92158 - protein, 106 aa, Setaria italica
  Transcript Sequence Number=SeqID_26184
MHLHAAGAVHLQYFMPRHQPHQEATDLQVQDSSSAVCRRSLSSSTSPAGAAMWEYHHHQAAHAAALQAASSSASSLFPSWSSSYAGTTAALLGSAGSAFATDASSS

SEQ ID NO: 92159 - protein, 111 aa, Setaria italica
  Transcript Sequence Number=SeqID_26185
  Gene Ontology: Mol. function=acetylglucosaminyltransferase activity; Cellular component=membrane
  Homolog annotation: Hit_ID=B9RUK1; Match level="QueryCoverage=78%, HitCoverage=21%, E-value=3e-17, Identity=45%"; Hit description =Acetylglucosaminyltransferase, putative
LLRVGADWDWLVTLGAADYPLVTQDDLLYAFSSVPRDLNFIDHRADSETHHVVVLDQNLLQSTNAEISFSSGHREKPDAFELFRGNGDTVSVFQSKSAAFLTLDRHGHQHF

SEQ ID NO: 92160 - protein, 324 aa, Setaria italica
  Transcript Sequence Number=SeqID_26186
  Gene Ontology: Mol. function=ubiquitin-protein ligase activity; Cellular component=ubiquitin ligase complex; Biological process =ubiquitin-dependent protein catabolic process
  Homolog annotation: Hit_ID=B9S8E7; Match level="QueryCoverage=99%, HitCoverage=44%, E-value=1e-85, Identity=56%"; Hit description =Ubiquitin-protein ligase, putative
  Pfam annotation: Domain name=Arm; Domain location=111-151; Score =18.5; E_value=0.027; Accession=PF00514.15; Description=Armadillobeta- catenin-like repeat
  Pfam annotation: Domain name=Arm; Domain location=152-190; Score=5.7; E_value=2.3; Accession=PF00514.15; Description=Armadillobeta-catenin -like repeat
  Pfam annotation: Domain name=Arm; Domain location=191-232; Score=2.6; E_value=5.8; Accession=PF00514.15; Description=Armadillobeta-catenin -like repeat
  Pfam annotation: Domain name=Arm; Domain location=26-66; Score=37.5; E_value=5.3e-08; Accession=PF00514.15; Description=Armadillobeta -catenin-like repeat
  Pfam annotation: Domain name=Arm; Domain location=67-109; Score=11.4; E_value=0.43; Accession=PF00514.15; Description=Armadillobeta-catenin- like repeat
  Pfam module annotation: Pfam domain module=Arm::Arm::Arm::Arm::Arm; Domain location=111-151::152-190::191-232::26-66::67-109
FRMLREGSDSEKPVAAREIWLLAKTGKQNRAFIAELGAIPLLCRLLLSSDWMAQENAVTALLNLSIYEPNKMRIMEQEGCLRLIVSVLKNGWTTEAKENAAATLFSLSVVHDYKKKIMNEPGAVEELASMLTRGTPRGKKDAVMALFNLSTHPESSGRMLESSAVVALIESLRNDTVSEEAAGALALLMKQPTIVHLVGSSETVITSLVGLMRRGTPKGKENAVSALYEICRRGGSTLAQRVARIPGLNTVIQNITLTGTKRAKKKASLIVKMCQRSQMPSALGLGSTLTVVDHSLVGNSTLRRAASFGSGELSNPVSISVPVP

SEQ ID NO: 92161 - protein, 89 aa, Setaria italica
  Transcript Sequence Number=SeqID_26187
  Gene Ontology: Mol. function=ARF GTPase activator activity; Cellular component=cytoplasm; Biological process=regulation of ARF GTPase activity
  Homolog annotation: Hit_ID=Q6ZD39; Match level="QueryCoverage=79%, HitCoverage=9%, E-value=3e-23, Identity=70%"; Hit description =Putative ARF GTPase-activating domain-containing protein
HGFTLSKPKQSDPITVKEKFIHAKYAEKDFVRKHNVDEIQLAQLMWDNVSSNNKKGVYSLIVGSNADVNFSYGHNHPIRLYGHLCWQEK

SEQ ID NO: 92162 - protein, 837 aa, Setaria italica
  Transcript Sequence Number=SeqID_26188
  Gene Ontology: Mol. function=ARF GTPase activator activity; Cellular component=cytoplasm; Biological process=regulation of ARF GTPase activity
  Homolog annotation: Hit_ID=B9RFZ3; Match level="QueryCoverage=99%, HitCoverage=60%, E-value=0.0, Identity=67%"; Hit description=ATP binding protein, putative
  Pfam annotation: Domain name=Ank; Domain location=743-775; Score =35.2; E_value=2.6e-07; Accession=PF00023.22; Description=Ankyrin repeat
  Pfam annotation: Domain name=Ank; Domain location=776-808; Score =29.0; E_value=2e-05; Accession=PF00023.22; Description=Ankyrin repeat
  Pfam annotation: Domain name=ArfGap; Domain location=501-646; Score =145.8; E_value=1.4e-40; Accession=PF01412.10; Description=Putative GTPase activating protein for Arf
  Pfam annotation: Domain name=BAR; Domain location=12-218; Score= -19.2; E_value=4.2e-05; Accession=PF03114.10; Description=BAR domain
  Pfam annotation: Domain name=PH; Domain location=293-427; Score=75.3; E_value=2.2e-19; Accession=PF00169.21; Description=PH domain
  Pfam module annotation: Pfam domain module=Ank::Ank::ArfGap::BAR::PH; Domain location=743-775::776-808::501-646::12-218::293-427
MFISRLDDSPMFRKQMQSLEEGAELLRERCFKFHKGCRKYTEGLGEAYDGDIAFASSLETFGGGHNDPISVAFGGPVMTKFTIALREIGTYKEVLRSQVEHMLNDKLLQFVDIDLHEMKDARKRFDKASLLYDQAREKYLSLKKGTRTDVATAVEDELHSARSSFEQARFNLVTSLSNIEAKKRFEFLEAVSGTMDAHLRYFKQGYELLHQMEPYINQVLAYAQQSRERSNYEQAALVERMQEFKRQIDRESRWSPNGMNDSPNGDGIQAIGRSSHKMIEAVMQSASKGKVQTIRQGYLSKRSSNLRGDWKRRFFVLDSRGMLYYYRKQNSRPSSGYSNQRTSTPSEHGSGLLSRWFSSHYHGGVHDEKSVARHTVNLLTSTIKVDADQSDLRFCFRIISPTKNYTLQAESAMDQMDWIEKITGVIASLLSSQSPERRLLLSPKGSSHHRTASESSSFSSSTELEHSISEDCMLEKNSGSGYFDHSARGTQHHRTSMMKPDKPIDLLRKVAGNGNCADCGAAEPDWASLNLGILLCIECSGVHRNMGVHISKVRSLTLDVRVWELSVINLFQSLGNTFANTVWEGMLPSSSCADHGDISRADELENTLHGFTLSKPKQSDPITVKEKFIHAKYAEKDFVRKHNVDEIQLAQLMWDNVSSNNKKGVYSLIVGSNADVNFSYGHTSFNSALTLGKALLLQEQPASPSNGSSRCFDRNPLEKDSSGDSISPASTSARIDELDDYVEGLSLLHLACRVADLGMVELLLQYGANVNSTDSRGRTPLHHCIMKGRPMYARLLLSRGADSQATDRDDRTALQYAMDGGAIDDEEILVLLEDPSR

SEQ ID NO: 92163 - protein, 98 aa, Setaria italica
  Transcript Sequence Number=SeqID_26189
  Gene Ontology: Mol. function=voltage-gated chloride channel activity; Cellular component=integral to membrane; Biological process=chloride transport
  Homolog annotation: Hit_ID=Q8RXR2; Match level="QueryCoverage=98%, HitCoverage=12%, E-value=9e-30, Identity=64%"; Hit description =Chloride channel protein CLC-f
KSGQRQGINFLGAIFPTVKAVQAAVTLGTGCSLGPEGPSVDIGKSCANACSEMMENNRERRIALVAAGAAAGIASGFNAAVAGCFFAIETVLRPLKAE

SEQ ID NO: 92164 - protein, 94 aa, Setaria italica
  Transcript Sequence Number=SeqID_26190
RAGDAATAVAASLPASLAAAAVEALFQLRVMRPYTLTGKVTAGMLCEGLLVAYIHAMICVLDTVITSMVYQTCKASHSCHLLELELDGKEDLRV

SEQ ID NO: 92165 - protein, 89 aa, Setaria italica
  Transcript Sequence Number=SeqID_26191
VATAKGVVVDEAVAARVRDRYRRRQQGFKVVVDTHVGVRVGALRTGMVPVRLLCDGGAMAPRGGSGGDVVGPMSKCQVYLFRVRWFSLN

SEQ ID NO: 92166 - protein, 72 aa, Setaria italica
  Transcript Sequence Number=SeqID_26192
TMHFVVLIYILVCTDVPLQVCHYAFQNYMCVFVASVCSKFLGGKLEKHSLIIISSTLRPCLFEIIIHLDYIS

SEQ ID NO: 92167 - protein, 85 aa, Setaria italica
  Transcript Sequence Number=SeqID_26193
  Subcellular localization annotation: CTP_CleavageSite=40; ConfidenceScore=5.28e-01
PVLDEGWAGAGGGGGVFDDSSRQRCSCLPFCFWGASSSKPAGAPAKRKRRRRLRLRLSWLAWPWFFRKGGGKRKGAGGDGNESKG

SEQ ID NO: 92168 - protein, 36 aa, Setaria italica
  Transcript Sequence Number=SeqID_26194
YGHAPAVIELCMQVGARVPPKYHCMMKTHGLAPPVR

SEQ ID NO: 92169 - protein, 49 aa, Setaria italica
  Transcript Sequence Number=SeqID_26195
  Homolog annotation: Hit_ID=B6UBU0; Match level="QueryCoverage=100%, HitCoverage=18%, E-value=3e-11, Identity=70%"; Hit description=AIR12
NTYNITGYKPFGANSTAISFKTAELAADESAGEVRLYGKLQLAPGTEVV

SEQ ID NO: 92170 - protein, 194 aa, Setaria italica
  Transcript Sequence Number=SeqID_26196
  Homolog annotation: Hit_ID=Q10PA0; Match level="QueryCoverage=96%, HitCoverage=23%, E-value=4e-46, Identity=45%"; Hit description =Pentatricopeptide, putative, expressed
  Pfam annotation: Domain name=PPR; Domain location=16-50; Score=37.6; E_value=4.9e-08; Accession=PF01535.12; Description=PPR repeat
  Pfam annotation: Domain name=PPR; Domain location=51-85; Score=18.9; E_value=0.021; Accession=PF01535.12; Description=PPR repeat
  Pfam annotation: Domain name=PPR; Domain location=87-120; Score=11.1; E_value=0.44; Accession=PF01535.12; Description=PPR repeat
  Pfam module annotation: Pfam domain module=PPR::PPR::PPR; Domain location=16-50::51-85::87-120
ERATVLFESMPVRDVFSYCSLMQGHCLHGSANNAVELFSQMLLEGLSPDNAVFTVVLTACSHTGLVEEGKKFFDMMKNVYLIVPSGEHYACLVSLLGRCGRLKEAYELIMSMPGKPHPGAWGALLGGCKLHGNIELGKIAAKKLFEIEPYNAGNYVSLSNMYANIDRWGDVSVIRNEMTEKRITKIAGRTIVLQ

SEQ ID NO: 92171 - protein, 57 aa, Setaria italica
  Transcript Sequence Number=SeqID_26197
HSSFLNCKIDALPCNNYNRRIGRLQSCDRVPETMISCPHFIGFLVARTKNKSGCNTY

SEQ ID NO: 92172 - protein, 88 aa, Setaria italica
  Transcript Sequence Number=SeqID_26198
  Gene Ontology: Mol. function=nucleotide binding; Cellular component =chromatin; Biological process=defense response
  Homolog annotation: Hit_ID=Q2R8K0; Match level="QueryCoverage=100%, HitCoverage=8%, E-value=1e-16, Identity=53%"; Hit description =Nitrate-induced NOI protein, expressed
LLKNSGGLPLATICIASILVSQSDNSELWLHVNECLSSFIRKNLTSEGMLSEIVGMSYNSLSDHLKTCLLYLSMYPEGYTFLKTDLVK

SEQ ID NO: 92173 - protein, 306 aa, Setaria italica
  Transcript Sequence Number=SeqID_26199
  Gene Ontology: Mol. function=DNA binding; Cellular component=nucleus; Biological process=regulation of transcription, DNA-dependent
  Homolog annotation: Hit_ID=B6THY7; Match level="QueryCoverage=99%, HitCoverage=74%, E-value=1e-118, Identity=71%"; Hit description =Ubiquitin-protein ligase/ zinc ion binding protein
  Pfam annotation: Domain name=zf-4CXXC_R1; Domain location=83-181; Score=248.0; E_value=2.4e-71; Accession=PF10497.1; Description=Zinc -finger domain of monoamine-oxida
RRVKLTPPPPARRSLRLKSVEPVSYCEVQPKKEKDAEGGRTELLLEVGAKEEIYTEEHEKLLGTCNTPWTLFVDGYGKDGKRIYDQVRGQTCHQCRQKTLGHHTSCCKCQIVQGQFCGDCLYMRYGENVLEAKKNPNWMCPVCRGICNCSICRTKKGWFPTGCAYKKAVRLGYKSVAHYLIATQRASANSEDSSAADSSNKLLSDKSETSCISDQDATAAKESLEDGETSSKAKESKTTCLQVKRNSDDYKDDRKSESVVTSDSQDVQVNKDAGCVTPSSKPARKRKYERSPDCVASRLRSRSNQT

SEQ ID NO: 92174 - protein, 52 aa, Setaria italica
  Transcript Sequence Number=SeqID_26200
QNSFNVHSTDKITTVNTRKVYYSVFVEGLAAQSCLCITLPLLFLRRAWVTLC

SEQ ID NO: 92175 - protein, 77 aa, Setaria italica
  Transcript Sequence Number=SeqID_26201
  Subcellular localization annotation: CTP_CleavageSite=47; ConfidenceScore=5.25e-01
WNGHHCPQLTNHLFTAPHWPLPYLSPCTRELSSPSSAYKSLSLSPAVAVAAVAIAPAAAVPVCHLLSASSSFELSKR

SEQ ID NO: 92176 - protein, 160 aa, Setaria italica
  misc_feature (10)..(10): Xaa can be any naturally occurring amino acid
  Transcript Sequence Number=SeqID_26202
  Gene Ontology: Cellular component=integral to membrane
  Homolog annotation: Hit_ID=B3TLS7; Match level="QueryCoverage=95%, HitCoverage=55%, E-value=2e-54, Identity=66%"; Hit description =Senescence-associated protein
GFKEYRLGDXYSSWLRRRVEDGRTWGRIRSCLTEAGVCRSLQSNRTFDEFVNDNLSPLQSGCCKPPTECNFAYLNETYWTKPSGPSNSSNPDCDTWSNDQSELCYGCQSCKAGVLGNLKNSWKKIAIINAAFIVLLIVVYSLGCCVLRNNRRHKYTLVGK

SEQ ID NO: 92177 - protein, 289 aa, Setaria italica
  misc_feature (55)..(55): Xaa can be any naturally occurring amino acid
  Transcript Sequence Number=SeqID_26203
  Gene Ontology: Cellular component=nucleus; Biological process =interspecies interaction between organisms
  Homolog annotation: Hit_ID=Q3LXA7; Match level="QueryCoverage=100%, HitCoverage=28%, E-value=1e-131, Identity=80%"; Hit description =Retinoblastoma-related protein 3
SRFKDLVTSTNGLVSVLAVLIIHVPVRLRSFNINDSSYFVKKSDRGVNLIASLCXEKYHTSEDELSKALEKTNTVIMDILKNKPCSASECQQDNLSFIDPEGLTVFKDLLQGNLLKSSLLILEKEYENAINSKGELDERMFANDEDSLLGSGSLSGGAINLPGTKRKYDVMASPAKSITSPSPMSPPRFCLSPKGNSFGNSKMAPITPVSTAMTTAKWLRTTITPLPSKPSGELLHFFSACDKDLTEDITRRAGIILGAIFTSSSFGERICTNVRTANRMDAIWTEQRK

SEQ ID NO: 92178 - protein, 276 aa, Setaria italica
  Transcript Sequence Number=SeqID_26204
  Gene Ontology: Mol. function=nucleoside-triphosphatase activity; Cellular component=cytoskeleton; Biological process=protein transport
  Homolog annotation: Hit_ID=B9SYF3; Match level="QueryCoverage=93%, HitCoverage=48%, E-value=2e-79, Identity=46%"; Hit description =Transitional endoplasmic reticulum ATPase, putative
  Pfam annotation: Domain name=AAA; Domain location=60-251; Score =254.7; E_value=2.1e-73; Accession=PF00004.21; Description=ATPase family associated with various cellular activities (AAA)
  Pfam annotation: Domain name=AAA_5; Domain location=60-198; Score =6.8; E_value=0.00026; Accession=PF07728.6; Description=ATPase family associated with various
  Pfam module annotation: Pfam domain module=AAA::AAA_5; Domain location=60-251::60-198
MGTANEGGGGGTDGKSTSGWRAEDAIAGNRRALQALRELVTYPYLYARESRLLGLKWPRGLLLHGPPGTGKTSLVRAIVRECNAHLIMVSPYSVHKAHVGEGEKFLREAFSEAYSHASRGKPAIIFIDEIDAICPCRNNRREQEARIVGQLLTLMDGNKKSSKMLPHIAVVASTNRVNAIDPALRRGGRFESEVEVTVPTVEERLQILKLYAKNLHLDEKVDLQIVAAFCNGYVGADLEALCREAAKLAYHRMLDRGEKVLKLLMEDWESARSMVG

SEQ ID NO: 92179 - protein, 46 aa, Setaria italica
  Transcript Sequence Number=SeqID_26205
MDMVGGSAQSAVDSLLGRLSSVFVEEAQLLRGVHDDMQFIKREMES

SEQ ID NO: 92180 - protein, 80 aa, Setaria italica
  Transcript Sequence Number=SeqID_26206
RAREEQSTAAQPGKDQQRANTYRHCSAVSCRNGRAVVLPPAPLFLGSLLGLREAPVPDAQSAQSCPLCTNGVEGTMGMHG

SEQ ID NO: 92181 - protein, 113 aa, Setaria italica
  Transcript Sequence Number=SeqID_26207
  Gene Ontology: Mol. function=oxidoreductase activity; Cellular component=chloroplast envelope; Biological process=oxidation reduction
  Homolog annotation: Hit_ID=B6TD84; Match level="QueryCoverage=100%, HitCoverage=31%, E-value=2e-46, Identity=82%"; Hit description=Auxin- induced protein PCNT115
MAAAPVATVPRMKLGSQGLEVSAQGLGCMGMTAYYGPPKPETDMIALIRHAVAAGVTLLDTADSYGPHSNEILLGKALQGGLREKVDLATKFGVSFADGDREPDFRGDPAYVR

SEQ ID NO: 92182 - protein, 109 aa, Setaria italica
  misc_feature (44)..(44): Xaa can be any naturally occurring amino acid
  misc_feature (102)..(102): Xaa can be any naturally occurring amino acid
  Transcript Sequence Number=SeqID_26208
  Gene Ontology: Mol. function=transferase activity, transferring nitrogenous groups; Biological process=cellular amino acid and derivative metabolic process
  Homolog annotation: Hit_ID=A9CM06; Match level="QueryCoverage=99%, HitCoverage=19%, E-value=2e-26, Identity=50%"; Hit description =Nicotianamine aminotransferase
FGWIAICDQKCILKETKVFHSLRSFRMLTGDPATFVLFMTGYNXKNSSIHQGAIPHIMKNTNDEFFSKIIKLLKETAEICYSELKEINCITCPHKPEGSIFXMVKLDIS

SEQ ID NO: 92183 - protein, 345 aa, Setaria italica
  misc_feature (50)..(50): Xaa can be any naturally occurring amino acid
  misc_feature (67)..(67): Xaa can be any naturally occurring amino acid
  Transcript Sequence Number=SeqID_26209
  Gene Ontology: Mol. function=transferase activity, transferring nitrogenous groups; Cellular component=apoplast; Biological process =cellular amino acid and derivative metabolic process
  Homolog annotation: Hit_ID=A9CM06; Match level="QueryCoverage=96%, HitCoverage=67%, E-value=1e-126, Identity=62%"; Hit description =Nicotianamine aminotransferase
  Pfam annotation: Domain name=Aminotran_1_2; Domain location=1-333; Score=102.2; E_value=1.7e-27; Accession=PF00155.13; Description =Aminotransferase class I and II
  Pfam annotation: Domain name=Beta_elim_lyase; Domain location=2-278; Score=-122.6; E_value=0.035; Accession=PF01212.13; Description=Beta -eliminating lyase
  Pfam module annotation: Pfam domain module=Aminotran_1_2::Beta_elim _lyase; Domain location=1-333::2-278
NGLTQSRDTKFSACRAVAEYLSCGLPYKLSPDDVLLTSGCTQAIETVMSXFGQPGVNILLPRPGYPXKHEAHAVIHNMEVRHYDLVPERGWEVDLEAVEALADENTVAILIINPNNPCGSVYNYEHLSKIADTANKLGMLVISDEVYGNLVYGSTPFVPMGVFGETVPILTLGAISKRWAVPGWRFGWIAICDPKCILKETKVSHSLRSFRMLTGDPATFVLGAIPHIMKNTNDEFFSKIIKLLKETAEICYSEIKEINCITCPHKPEGSFFMMVKLDISQLSDISDDIDFCRKLAKEESVMVLPGTALGMENWLRITFASEPPKLKQGLERVKSFCQRHQSQVN

SEQ ID NO: 92184 - protein, 103 aa, Setaria italica
  Transcript Sequence Number=SeqID_26210
  Gene Ontology: Mol. function=DNA binding; Cellular component=nucleus; Biological process=regulation of transcription
  Homolog annotation: Hit_ID=Q5NKH6; Match level="QueryCoverage=89%, HitCoverage=33%, E-value=1e-10, Identity=36%"; Hit description=MYB23 protein (Fragment)
MIFFDLISPRSAFQKKLKLSQENKENLDQITDQGENEGNAKHSAGILTESSVDNQNTPKHAPNYESQRLNTSTKALSNSKDIIFSRSKPSELLVDKSAPFIDA

SEQ ID NO: 92185 - protein, 77 aa, Setaria italica
  Transcript Sequence Number=SeqID_26211
NISIYSKDLPIYSAIQMSLLIGKDRKCLRPKYSTSSLAVTFLFFSGCGLVEIAFIGFQSSCYVAAHTSFLATIVACC

SEQ ID NO: 92186 - protein, 49 aa, Setaria italica
  Transcript Sequence Number=SeqID_26212
LFLCMSRIKEGCSSRCFCFLTITFVKQSKIAALTTPQCVNTEMLRSIDY

SEQ ID NO: 92187 - protein, 72 aa, Setaria italica
  Transcript Sequence Number=SeqID_26213
  Subcellular localization annotation: CTP_CleavageSite=28; ConfidenceScore=5.13e-01
KKFITMIICTVDWAQHLRWVPSFKSIVRSCSSVTFFPSLTVLHYQIAVFFTFHSVILLTYLLYRSKYLCYLP

SEQ ID NO: 92188 - protein, 113 aa, Setaria italica
  misc_feature (19)..(19): Xaa can be any naturally occurring amino acid
  Transcript Sequence Number=SeqID_26214
  Gene Ontology: Mol. function=phosphotransferase activity, alcohol group as acceptor
  Homolog annotation: Hit_ID=Q10D72; Match level="QueryCoverage=84%, HitCoverage=2%, E-value=8e-42, Identity=85%"; Hit description =Phosphatidylinositol 3-and 4-kinase family protein, expressed
GKKGRGKSLFGHAAHAYFXYLSHSSTELQPSYHHDALKGKTRSYTMRAMLYLLHIMLNYGVELKETLESGVSTVPLLPWQEIIPQLFARLSSHPEKIVRELLESILLKLGKLS

SEQ ID NO: 92189 - protein, 80 aa, Setaria italica
  Transcript Sequence Number=SeqID_26215
LAAVHRHGEDSTDAGRARACMGGGAYAVVASPLNPSSLLLSSAPTVHIHAWSTRLPRHHYIGLLPYDDSSGMLASAGRHA

SEQ ID NO: 92190 - protein, 120 aa, Setaria italica
  Transcript Sequence Number=SeqID_26216
  Gene Ontology: Mol. function=sequence-specific DNA binding; Cellular component=nucleus; Biological process=regulation of transcription, DNA-dependent
  Homolog annotation: Hit_ID=Q1G159; Match level="QueryCoverage=99%, HitCoverage=69%, E-value=2e-25, Identity=54%"; Hit description=MADS -box transcription factor TaAGL33
VLLPPPGKLYEYSSTSIEGTYERYQRFAGTGRNVNAGDRNNNDSQDAAASDLQTRLKEIATWSEQNNANESDANELEKLEKLLTNALRDTTTKKMLTKQNNGGAGGSTSSQNSSGPRRQD

SEQ ID NO: 92191 - protein, 163 aa, Setaria italica
  Transcript Sequence Number=SeqID_26217
LPSLPLSSSSCAPPRTRVAERPRACYRHVAAVGHHVATHVHTPWPAELLRLARDSAHADTPPSHRLAADLVLPRPRVPAVRRWPSCCCRCLEPRTQPTLADTLLPACEHEVLAEPAQTRSASLCSDHIHTSSKRGTSYLTFSLLPRHVRALVIHLRASLQCAL

SEQ ID NO: 92192 - protein, 212 aa, Setaria italica
  Transcript Sequence Number=SeqID_26218
  Homolog annotation: Hit_ID=B6UQE3; Match level="QueryCoverage=99%, HitCoverage=55%, E-value=6e-86, Identity=73%"; Hit description=ALMT2 (Fragment)
  Pfam annotation: Domain name=UPF0005; Domain location=1-212; Score =128.2; E_value=2.6e-35; Accession=PF01027.12; Description =Uncharacterised protein family UPF0005
PVVVVFEYTVGGCVYKGFNRAIATASAAVIALGVHWIASKSGDKFEPFIRSGSVFLLAAMATFSRFIPTVKARFDYGVTIFILTYSLVAVSGYRVGALVALAQQRVCTISIGVSICFAICVLICPVWAGQELHRATARNMESLAGALEAIVEGYFLADAAEEEASGDKRPSSSNATEGYRCVLNSKASEDSQANLARWEPPHGSFGFRHPYG

SEQ ID NO: 92193 - protein, 268 aa, Setaria italica
  Transcript Sequence Number=SeqID_26219
  Homolog annotation: Hit_ID=B6TDX7; Match level="QueryCoverage=90%, HitCoverage=58%, E-value=1e-86, Identity=70%"; Hit description=F-box domain containing protein
RGTSSWRRFGLKLVADPWGSNRARFLFAELVNNTPFLFEYRSETDTWQQSEAVLAEGAAPAAPDGTFLCAAHVGPDCVMVYSGPGADGDRPVFFRPRFPNAAAAAGHGDRLHVYGDGSAAVVRSVAVDDPMSRTRVKVVTGVELYGFGAVGGDWELVASVPGELVEGFRKPYAVMTGLLAEREGVVRLVLISNCRGAWDLVWLSYDRSRREWRWVPVPDWGGSKGLNMAGMAVSSTFSRLWPLAAPPPPSSSSSSSHHELKLIGSMRR

SEQ ID NO: 92194 - protein, 134 aa, Setaria italica
  Transcript Sequence Number=SeqID_26220
NQLGKAPIQVIESHVNAMIKVTRHEKHHKDQINLEKSQFPKTWATARHNRDKEHMISQEEAERAQHQSCEDRKHRIPQEEAEIAQNQSCDDRKLKPNASSSRRGKKLNTTDKRAKESTKLAQSLEAPPEHMHSP

SEQ ID NO: 92195 - protein, 173 aa, Setaria italica
  misc_feature (37)..(37): Xaa can be any naturally occurring amino acid
  Transcript Sequence Number=SeqID_26221
  Gene Ontology: Mol. function=protein serine/threonine kinase activity; Cellular component=cytoplasm; Biological process=protein amino acid phosphorylation
  Homolog annotation: Hit_ID=B6SYP5; Match level="QueryCoverage=86%, HitCoverage=30%, E-value=1e-59, Identity=80%"; Hit description=MPK17- 2-putative MAPK
DVREMIYREILEYHPQMLQEYIEGGEQIHFLYPSGVXDRFQRQFAHLEENYRRGVASTPLRRQPTSLPRERVCSSEDCHNQDSDNEEGRAASYVARTTISPPRSQEEGCKQQSANHSSDSNSCAKSYLKSAANISASRFAIKRNKGPKEKGTSKDVKQVAVHGLLDKVPRVLS

SEQ ID NO: 92196 - protein, 94 aa, Setaria italica
  Transcript Sequence Number=SeqID_26222
  Gene Ontology: Mol. function=protein binding
  Homolog annotation: Hit_ID=A0AAQ3; Match level="QueryCoverage=89%, HitCoverage=24%, E-value=8e-19, Identity=60%"; Hit description =Polygalacturonase inhibiting protein 4
CDDAESSSSTPAGGRRVVSLAIMRDANIRGPVPGAAIARLTALQELLRRHVPGVSGTIPRALTRLSALMDLTISRTGVSGQVPAFLGDLRALRS

SEQ ID NO: 92197 - protein, 373 aa, Setaria italica
  Transcript Sequence Number=SeqID_26223
  Homolog annotation: Hit_ID=B9S4J1; Match level="QueryCoverage=79%, HitCoverage=47%, E-value=4e-37, Identity=34%"; Hit description =Electron transporter, putative
  Pfam annotation: Domain name=DUF2325; Domain location=115-185; Score=- 37.1; E_value=0.069; Accession=PF10087.1; Description=Uncharacterized protein conserved in
DDKQVIEDEELTFGGEGQLTGSSWKGGFTLANESLSGQIGNTDDGNRKCTIQKFRQFESFYAKLTAIAREYFLPPEIARFGLITERSLLPSLDVSNEGNPETWFVIIHYLGCTACSVIVKDGDDLGSLVQSHHNLGIKEVGADESSAEAIFPSNRPSVILFIDRLSHSSKVRDESKFINKLLRQYVQTNYPFHVSTGVLSSGTSKTRSKTVTSLRNAGISGAHSETGRLSAWASKLMALGDKMSVMVVNDGDNILYRSSSHGSGGNPLYDVLTKLLHKTRPGHRSKKTRISLVTKDVGLNMLSDDSKIQAVESLSVEGSEYKRTDNSVATADNSNDDITEVSVDENTAEETEYIDDGQAPSILEKTPATYPNE

SEQ ID NO: 92198 - protein, 133 aa, Setaria italica
  Transcript Sequence Number=SeqID_26224
  Pfam annotation: Domain name=DUF581; Domain location=38-96; Score =90.4; E_value=6.5e-24; Accession=PF04570.6; Description=Protein of unknown function (DUF581)
RTSTFALGGGGASAAAWTRLVSSGVEDELVVFASGGGGGCAGAGPSGLPQGHFLEACFLCRKPLASNRDIFMYRGDIPFCTEECRREQMEMDEEMERKENSNPKKVAARAPSHAGVESPPRPPKARAGSILAG

SEQ ID NO: 92199 - protein, 73 aa, Setaria italica
  Transcript Sequence Number=SeqID_26225
WGCTGTMCACRGMKLRLADTSLNTLPDGVMYSLKPLWISQSSTLVLPHLILLHCWSLHCPGSLLIKMGKCLFL

SEQ ID NO: 92200 - protein, 151 aa, Setaria italica
  Transcript Sequence Number=SeqID_26226
  Gene Ontology: Mol. function=nucleoside-triphosphatase activity
  Homolog annotation: Hit_ID=Q6GYA9; Match level="QueryCoverage=54%, HitCoverage=11%, E-value=3e-38, Identity=96%"; Hit description=ABCF -type protein
  Subcellular localization annotation: CTP_CleavageSite=40; ConfidenceScore=5.64e-01
TLHCRLTTSSSPSTSTTTTTTEEAKSQDLSSLLSSSSDPSAAGAAKKKRSGGSSGASSIPSGVRLEGISKSYKGVTVLKDVSWEVQRGEKVGLVGVNGAGKTTQLRIIAGLEEPDGGTVVKAKENMKIAFLSQEFEVSASRTVREEFFRRT

SEQ ID NO: 92201 - protein, 330 aa, Setaria italica
  Transcript Sequence Number=SeqID_26227
  Gene Ontology: Mol. function=ATP-dependent helicase activity; Cellular component=vacuole; Biological process=nuclear-transcribed mRNA catabolic process, nonsense-mediated decay
  Homolog annotation: Hit_ID=Q2QZE8; Match level="QueryCoverage=99%, HitCoverage=23%, E-value=1e-133, Identity=74%"; Hit description =Retrotransposon protein, putative, unclassified, expressed
  Pfam annotation: Domain name=DEAD; Domain location=236-329; Score= -12.6; E_value=0.00034; Accession=PF00270.21; Description=DEADDEAH box helicase
  Subcellular localization annotation: CTP_CleavageSite=70; ConfidenceScore=5.23e-01
PISNQQLPSSHQHPGAVNQPNVPGVGGPLYPAKHLHGGSSPAETNNMGFMNSPAQMHQGAVDTNYRQQPVSSHAVPNHVGPSPVRPPMGFEMGNSDGHFERDDPHSYGRFDGANALQQQPKLAAIPPSQNPLQGMRNGPPYPRPDNFGGYNMAPPHPVPNPHNHGPLPIGASMRPPSTMFAPPDFTGIPSADAYRQHHEVTAMGENVPAPFMTFEATGFPPEILREIHAAGFSNPTPIQAQTWPVALQNRDIVAIAKTGSGKTLGYLIPAFIHLRRCQNNPMLGPTVLVLAPTRELASQIQDEVVKFGRSSRVSCTCLLLVGCLSKGFLS

SEQ ID NO: 92202 - protein, 389 aa, Setaria italica
  Transcript Sequence Number=SeqID_26228
  Gene Ontology: Mol. function=ATP-dependent helicase activity; Cellular component=vacuole; Biological process=nuclear-transcribed mRNA catabolic process, nonsense-mediated decay
  Homolog annotation: Hit_ID=Q2QZE8; Match level="QueryCoverage=98%, HitCoverage=27%, E-value=0.0, Identity=90%"; Hit description =Retrotransposon protein, putative, unclassified, expressed
  Pfam annotation: Domain name=DEAD; Domain location=10-180; Score =252.2; E_value=1.2e-72; Accession=PF00270.21; Description=DEADDEAH box helicase
  Pfam annotation: Domain name=Helicase_C; Domain location=249-325; Score=129.0; E_value=1.5e-35; Accession=PF00271.23; Description =Helicase conserved C-terminal domain
  Pfam annotation: Domain name=ResIII; Domain location=6-175; Score= -15.2; E_value=0.001; Accession=PF04851.7; Description=Type III restriction enzyme, res subunit
  Pfam module annotation: Pfam domain module=DEAD::Helicase_C::ResIII; Domain location=10-180::249-325::6-175
IHAAGFSNPTPIQAQTWPVALQNRDIVAIAKTGSGKTLGYLIPAFIHLRRCQNNPMLGPTVLVLAPTRELASQIQDEVVKFGRSSRVSCTCLYGGASKGPQLRELERGADIVVATPGRLNDILEMKKISLHQVSLLVLDEADRMLDMGFEPQIRKIVDEIPPARQTLMYTATWPKEVTKIAGDLLRDPVQVNIGSIDELVANKSITQYVEVVPPMDKQRRLEQILRDQERGSKIIIFCSTKKMCDQLARGIGRSFNAVSIHGDKSQAERDNVLNQFRTGRAPILVATDVAARGLDIKDIRVVINYDFPTGIEDYVHRIGRTGRAGATGVSYTFISEQDWKHAGDLVKLLEGANQHVPPQLLDMAARGATGGPRNQATGMSRWGGYGGGR

SEQ ID NO: 92203 - protein, 98 aa, Setaria italica
  Transcript Sequence Number=SeqID_26229
  Gene Ontology: Mol. function=alpha,alpha-trehalose-phosphate synthase (UDP-forming) activity; Biological process=trehalose biosynthetic process
  Homolog annotation: Hit_ID=B6DT12; Match level="QueryCoverage=68%, HitCoverage=7%, E-value=5e-30, Identity=97%"; Hit description =Trehalose-6-P synthase (Fragment)
  Subcellular localization annotation: CTP_CleavageSite=46; ConfidenceScore=5.35e-01
MEDAGGAASGHAARPPLAGSRSGFRRLGLRGMKQRLLVVANRLPVSANRRGEDQWSLEISAGGLVSALLGVKDVDAKWIGWAGVNVPDEVGQRALTRA

SEQ ID NO: 92204 - protein, 71 aa, Setaria italica
  Transcript Sequence Number=SeqID_26230
MARTKFAALGFIVLLSIGLSNAARVSRYVSAGGGGGGGGGGGSGDGSGSGYGSGSGSGYGQAGGSSWGIIC

SEQ ID NO: 92205 - protein, 112 aa, Setaria italica
  Transcript Sequence Number=SeqID_26231
  Gene Ontology: Mol. function=solute:hydrogen antiporter activity; Cellular component=integral to membrane; Biological process =regulation of pH
  Homolog annotation: Hit_ID=Q10B66; Match level="QueryCoverage=97%, HitCoverage=13%, E-value=2e-38, Identity=75%"; Hit description =Cation/hydrogen exchanger, putative
  Subcellular localization annotation: CTP_CleavageSite=27; ConfidenceScore=5.03e-01
SRVATSWGFLALVITTSCAGKIGGTVVASQLMRVPPREALALGLLMNTKGLVELIVLNIGRDRRVLNEEAFAILVLMALITTFMTTPAVTAVYTPARRAAPYMHRTVERGDA

SEQ ID NO: 92206 - protein, 150 aa, Setaria italica
  misc_feature (56)..(56): Xaa can be any naturally occurring amino acid
  Transcript Sequence Number=SeqID_26232
  Gene Ontology: Mol. function=acyltransferase activity; Cellular component=chloroplast envelope; Biological process=metabolic process
  Homolog annotation: Hit_ID=B6U9U3; Match level="QueryCoverage=64%, HitCoverage=21%, E-value=3e-37, Identity=91%"; Hit description =Dihydrolipoyllysine-residue acetyltransferase component of pyruvatedehydrogenase complex
  Pfam annotation: Domain name=Biotin_lipoyl; Domain location=33-106; Score=73.8; E_value=6.4e-19; Accession=PF00364.14; Description =Biotin-requiring enzyme
  Subcellular localization annotation: CTP_CleavageSite=12; ConfidenceScore=5.15e-01
PLSLHAIPGRARLAAAGAPGRRRRMAVVRAKVREIFMPALSSTMTEGKIVSWTAAXGDRVAKGDPVVVVESDKADMDVETFHDGIVAAVLVPAGGTAPVGAPIALLAESEEEVAIAQARAQALSQGQSHEPPSLPAAAAPPPPPPAPVVA

SEQ ID NO: 92207 - protein, 88 aa, Setaria italica
  Transcript Sequence Number=SeqID_26233
  Gene Ontology: Mol. function=transferase activity, transferring glycosyl groups
MGSAVVLYTWMVRGHLHPMVQFAGRLAGHGAPVTVAIADVPSSGDSLKTVARLSDSYPSVSFHLLPPATARSSDEADPDADPFITLIA

SEQ ID NO: 92208 - protein, 263 aa, Setaria italica
  Transcript Sequence Number=SeqID_26234
  Gene Ontology: Mol. function=nucleotide binding; Biological process =defense response
  Homolog annotation: Hit_ID=Q69KF7; Match level="QueryCoverage=92%, HitCoverage=21%, E-value=3e-24, Identity=34%"; Hit description =Pollen signalling protein with adenylyl cyclase activity-like
FPKLEQLHLDDMGSLESWEGFETGDLPSLVNFHVERCPKLRSLPSCLRCSTLLTSMRVVSADSIEAIHSVSNLKNLFVQYSKRLSCISNLPSLEALTVVDCSGLQDVSGLGHVKHLRIEDGELKSLPDWLGKHGSAPETLAVVGREELLRSLVPGGKDWPAISGIGKVYGYLSDGSPFFTYSKITNELETFGNRKLDVSSVAVHGSKNWSPKIWKAMPSAAVLVAISLVPFLLPTRYMDFVPNTVYFFFLAYMAMLVAFICVL

SEQ ID NO: 92209 - protein, 97 aa, Setaria italica
  misc_feature (33)..(33): Xaa can be any naturally occurring amino acid
  Transcript Sequence Number=SeqID_26235
  Gene Ontology: Mol. function=acid-amino acid ligase activity; Cellular component=intracellular; Biological process=ubiquitin -dependent protein catabolic process
  Homolog annotation: Hit_ID=B9SMZ3; Match level="QueryCoverage=100%, HitCoverage=2%, E-value=1e-29, Identity=69%"; Hit description=E3 ubiquitin protein ligase upl2, putative
PEHRFALLTRIRYARAFNSARTCRLYSRISLLXFIVLVQSSDAHDELTSFFTNEPEYINELIRLVRSEDFVPGPIRALAMLALGAQLAAYASSHERA

SEQ ID NO: 92210 - protein, 88 aa, Setaria italica
  Transcript Sequence Number=SeqID_26236
  Pfam annotation: Domain name=COG2; Domain location=1-75; Score=-8.8; E_value=0.01; Accession=PF06148.3; Description=COG (conserved oligomeric Golgi) complex component, COG2
GLSARLKGVDAAAARMRAPLADLRDKVAGFRAGASAALAALRAGLEQRAAATAARELLELLLDTSHVVSKVEKLIKELPSAPSDSSNA

SEQ ID NO: 92211 - protein, 61 aa, Setaria italica
  Transcript Sequence Number=SeqID_26237
MVKAALSADLCFKQSQLKISSAEVASSVIGASLAFFQGFGNVGSWAAQLITEAGGKVIAIS

SEQ ID NO: 92212 - protein, 76 aa, Setaria italica
  Transcript Sequence Number=SeqID_26238
LHKPVTIFISMGGITYYSTKHRKRRINHTHEVPNVIITKRMLVLFESLKYRLQEHASSNLPQPPVNMGVYLVNSRA

SEQ ID NO: 92213 - protein, 180 aa, Setaria italica
  Transcript Sequence Number=SeqID_26239
  Gene Ontology: Mol. function=hydrolase activity, acting on acid anhydrides, catalyzing transmembrane movement of substances; Cellular component=integral to membrane; Biological process=copper ion transport
  Homolog annotation: Hit_ID=Q6JAG3; Match level="QueryCoverage=100%, HitCoverage=19%, E-value=2e-88, Identity=89%"; Hit description =Putative copper-exporting ATPase
ISYLESMNVESIMVTGDNWGTANAIGKEVGIEKIIAEAKPEQKAEMVKELQLSGRTVAMVGDGINDSPALVSADVGLAIGAGTDVAIEAADIVLMKSNLEDVITAIDLSRKTFFRIRMNYVWALGYNVIGIPIAAGVLFPSTGFRLPPWVAGAAMAASSVSVVCWSLLLRYYKSPKIVSN

SEQ ID NO: 92214 - protein, 92 aa, Setaria italica
  Transcript Sequence Number=SeqID_26240
  Gene Ontology: Mol. function=electron carrier activity; Biological process=electron transport chain
  Homolog annotation: Hit_ID=B6T2E5; Match level="QueryCoverage=96%, HitCoverage=64%, E-value=2e-20, Identity=59%"; Hit description =Chemocyanin
  Pfam annotation: Domain name=Cu_bind_like; Domain location=3-85; Score=122.8; E_value=1.2e-33; Accession=PF02298.9; Description =Plastocyanin-like domain
AGWTRNVDYGQWLAGKTFHAGDMLVFKYNSTFHDVAWVSKGGYRHCIVSPKDRAPVYRSGYDTVRLPAGTHYFICGVPDHCQAGMKLAVKVY

SEQ ID NO: 92215 - protein, 120 aa, Setaria italica
  misc_feature (88)..(88): Xaa can be any naturally occurring amino acid
  Transcript Sequence Number=SeqID_26241
  Gene Ontology: Mol. function=RNA binding
  Homolog annotation: Hit_ID=Q6Z5M7; Match level="QueryCoverage=89%, HitCoverage=31%, E-value=2e-45, Identity=84%"; Hit description =Putative KH domain protein
LLTFSTSCACNCNVGAEILRVSTLLENASLLNQSGLEHGSPLTTGGLYSNGAATDMNGWTSAFQSESSPAYSWLGGSQGSSSGLIVKXTMKVDIPVDKYPTYNFVGRILGPRGNSLKRVE

SEQ ID NO: 92216 - protein, 55 aa, Setaria italica
  misc_feature (25)..(25): Xaa can be any naturally occurring amino acid
  Transcript Sequence Number=SeqID_26242
  Gene Ontology: Mol. function=RNA binding
  Homolog annotation: Hit_ID=Q6Z5M7; Match level="QueryCoverage=94%, HitCoverage=15%, E-value=9e-13, Identity=67%"; Hit description =Putative KH domain protein
PLQSSPAYSWLGGSQGSSSGLIVRXTMKVDIPVDKYPTYNFVGRILGPRGNSFEA

SEQ ID NO: 92217 - protein, 107 aa, Setaria italica
  misc_feature (49)..(49): Xaa can be any naturally occurring amino acid
  Transcript Sequence Number=SeqID_26243
  Gene Ontology: Mol. function=RNA binding; Cellular component =cytoplasm; Biological process=embryonic development ending in birth or egg hatching
  Homolog annotation: Hit_ID=Q6Z5M7; Match level="QueryCoverage=96%, HitCoverage=30%, E-value=4e-44, Identity=84%"; Hit description =Putative KH domain protein
IKSSPAYSWLGGSQGSSSGLIVKKTMKVDIPVDKYPTYNFVGRILGPRXNSLKRVEANTDCRVLIRGRGSIKDPAREEMMRGKPGYEHLNEPLHILVEAELPVENLI

SEQ ID NO: 92218 - protein, 286 aa, Setaria italica
  Transcript Sequence Number=SeqID_26244
  Gene Ontology: Mol. function=RNA binding; Biological process =embryonic development ending in birth or egg hatching
  Homolog annotation: Hit_ID=Q6Z5M7; Match level="QueryCoverage=87%, HitCoverage=73%, E-value=1e-129, Identity=90%"; Hit description =Putative KH domain protein
MSSGRYMAYSPSPSTTPHSPRIAGLRAPSAAVAEQEKYLAELLAERHKLGPFIPVIPHSVRLLNQEILRVSTLLENASLLNQSGLEHGSPLTTGGLYSNGAATDMNGWTSAFQSESSPAYSWLGGSQGSSSGLIVKKTMKVDIPVDKYPTYNFVGRILGPRGNSLKRVEANTDCRVLIRGRGSIKDPAREEMMRGKPGYEHLNEPLHILVEAELPVEIIDARLMQAREILEDLLKPVDESHDFFKKQQLRELAMLNGTLREEGMQRSGSASPFNNSLGMKRAKTRG

SEQ ID NO: 92219 - protein, 30 aa, Setaria italica
  Transcript Sequence Number=SeqID_26245
GKVNLKEFLYSIIRWAGHETEDDASNEGSP

SEQ ID NO: 92220 - protein, 70 aa, Setaria italica
  Transcript Sequence Number=SeqID_26246
  Gene Ontology: Mol. function=ubiquitin-protein ligase activity; Cellular component=ubiquitin ligase complex
RRDFIVGGNWKLHGALCNQLYTVVHEVLDAITALETTKPRCSSRLLALSSLSIAVEKAKNLLQYCSECSK

SEQ ID NO: 92221 - protein, 196 aa, Setaria italica
  Transcript Sequence Number=SeqID_26247
  Gene Ontology: Mol. function=electron carrier activity; Cellular component=extracellular region; Biological process=response to oxidative stress
  Homolog annotation: Hit_ID=B9RA28; Match level="QueryCoverage=98%, HitCoverage=58%, E-value=1e-30, Identity=39%"; Hit description =Peroxidase 60, putative
  Pfam annotation: Domain name=peroxidase; Domain location=1-195; Score= 159.2; E_value=1.2e-44; Accession=PF00141.15; Description=Peroxidase
SVKGYDVIADIKAELERRCPGVVSCSDIQILATRDAVALAGGAAYAVRTGRRDRRRSQASDVKLPAPEYTAQQTTAYYGRLGLSAFDTVLLLGAHTVGATRCSVIKSRLYGYGGRPGATDPGMDPAYASIYKKYVCPNMPSSDNNVVFLDDQWSALKVDNHYYKNIQLRRGMLPCDQNLYNDGSTRWIVDLLANND

SEQ ID NO: 92222 - protein, 78 aa, Setaria italica
  Transcript Sequence Number=SeqID_26248
  Gene Ontology: Mol. function=transporter activity; Cellular component= membrane; Biological process=oligopeptide transport
  Homolog annotation: Hit_ID=B6TVK5; Match level="QueryCoverage=61%, HitCoverage=8%, E-value=2e-16, Identity=81%"; Hit description =Peptide transporter PTR2
MAMDEAAEGSRLLLQEEGGGGDQEPLLLPQDAGLITGDGSVDIGGRPAPKHTTGNWRACFSILGNEFCERLAYYGIAK

SEQ ID NO: 92223 - protein, 145 aa, Setaria italica
  misc_feature (111)..(111): Xaa can be any naturally occurring amino acid
  Transcript Sequence Number=SeqID_26249
  Gene Ontology: Mol. function=DNA binding; Biological process=protein modification process
  Homolog annotation: Hit_ID=Q43703; Match level="QueryCoverage=99%, HitCoverage=21%, E-value=2e-55, Identity=74%"; Hit description =Initiator-binding protein
MVFQKRSSSEMESCGGGQIAEMPRVPKSARGKRSARKKEAQSPDQMTMSAFDLLATVAGKLLDEGEGSLGNTSAGAPALNACVKQEQCDEEMEHFKHDVTDQDSCNESAIXPHIVFQLVNHARNDDPKAKFEAQDKESSMISCTN

SEQ ID NO: 92224 - protein, 435 aa, Setaria italica
  Transcript Sequence Number=SeqID_26250
  Gene Ontology: Mol. function=metal ion binding; Cellular component =cell wall; Biological process=metal ion transport
  Homolog annotation: Hit_ID=B6TLY4; Match level="QueryCoverage=100%, HitCoverage=100%, E-value=8e-38, Identity=64%"; Hit description =Heavy metal-associated domain containing protein
  Pfam annotation: Domain name=DUF2076; Domain location=30-182; Score= -108.9; E_value=0.025; Accession=PF09849.1; Description =Uncharacterized protein conserved in
  Pfam annotation: Domain name=HMA; Domain location=16-76; Score=54.5; E_value=4.1e-13; Accession=PF00403.18; Description=Heavy-metal -associated domain
  Pfam module annotation: Pfam domain module=DUF2076::HMA; Domain location=30-182::16-76
MTKDEEFKLVKIQNHVLRVNIHCDGCKHKVKKLLQKIEGVYSVAIDVDNHKVSVTGDVDAETLIRKLTRGGKHAELWTQQKGGGGNQGHKGNNQQKQQQHQQNHQQHQQQQKQGANPGKDCHNNKNNNGGQKDQGKQGGVGSLMQGLKAFKSQHNNKHQLPELDSEDDDMYDDEDDEFDDDYEEELRYLGDKMSQLGFHSNNHHQNQNKNGNNAAANNNHNTGKKGGNVTGGAGANHHQNQKNANVINMAAANAKMGAGVQNQKNANVINMAAAANAKMANGAQRNTGAMSGMLGLSHGLGAGNAAPGFQGYTGFNHPSYAAAGYGGLQQQHHLQQQQSNNLMASMQGYHHHPAATAAMMNNLRGLNSNMMMMHQPQQQPQMMYHSSPQISPYTGYYNPYNYYYHPHPGSAGYPASNGDVETMFSDENTKGCVVM

SEQ ID NO: 92225 - protein, 55 aa, Setaria italica
  misc_feature (10)..(10): Xaa can be any naturally occurring amino acid
  Transcript Sequence Number=SeqID_26251
  Gene Ontology: Mol. function=electron transporter, transferring electrons within the cyclic electron transport pathway of photosynthesis activity; Cellular component=light-harvesting complex; Biological process=...
  Gene Ontology: Biological process=photosynthetic electron transport in photosystem II
  Homolog annotation: Hit_ID=Q6URX0; Match level="QueryCoverage=98%, HitCoverage=31%, E-value=9e-13, Identity=68%"; Hit description=PsbC (Fragment)
NVSPRSWLAXSHFVLGFSFLLGHLWHAGRARAAAAGFEKGIDRDLEPVLYMTPLN

SEQ ID NO: 92226 - protein, 66 aa, Setaria italica
  Transcript Sequence Number=SeqID_26252
SAPKDDEETIVRLHVGRGPSPPAPRRREGGGQRREHRVLLCPAQVPARSSNLRSKRCARTAQPADG

SEQ ID NO: 92227 - protein, 270 aa, Setaria italica
  misc_feature (151)..(151): Xaa can be any naturally occurring amino acid
  misc_feature (171)..(171): Xaa can be any naturally occurring amino acid
  Transcript Sequence Number=SeqID_26253
  Gene Ontology: Mol. function=protein binding; Cellular component =chromosome; Biological process=chromosome organization and biogenesis
  Homolog annotation: Hit_ID=Q8L6H8; Match level="QueryCoverage=100%, HitCoverage=21%, E-value=8e-92, Identity=67%"; Hit description=SMC4 protein
  Pfam annotation: Domain name=SMC_hinge; Domain location=1-101; Score =21.9; E_value=0.00034; Accession=PF06470.5; Description=SMC proteins Flexible Hinge Domain
VAISTAATAGLNYIVVETINSAQACIELLRRRNREETVTCLILEKQTHLLHKIKEKVKTPEGVPRLFDLVKVKDEKLKLAFFHVLGNTVVANDLDQASRIAYSAPKEFRRVVTLGGELFEKSGTMSGGGNRVQRGMMGTAIRGCISEEAIXKAENELNNLVDELNRLREKXECCQKHYRSMEEAKSRLEMELAKAKKEVESMNAQYIYNEKRLDSLKAASQPKADEVRRMNELDGIISSEQVELNRLTKCSSKLKDQASELQQKIENAGG

SEQ ID NO: 92228 - protein, 91 aa, Setaria italica
  Transcript Sequence Number=SeqID_26254
  Subcellular localization annotation: CTP_CleavageSite=37; ConfidenceScore=5.44e-01
YFPPESIQFPAGISSIHLRLHTLSRRSAARRRAGPSMSMAYSCAGARLHGRGCIGVAKCRPAAALLGMRGARLRPTVRGWAAARGIRADLP

SEQ ID NO: 92229 - protein, 60 aa, Setaria italica
  Transcript Sequence Number=SeqID_26255
MLHRVCPKSFKSLAGDRRSNGNLLLTIQKSHGIYDARNIFENRENCLESEKIVTTMCFGC

SEQ ID NO: 92230 - protein, 65 aa, Setaria italica
  Transcript Sequence Number=SeqID_26256
  Subcellular localization annotation: CTP_CleavageSite=43; ConfidenceScore=5.05e-01
TAAAATELDTVAAGRRMSYGGGKASPGGRRTFLPYRQDLVGLFANARSEPRRAEPSQPWRTRSKQ

SEQ ID NO: 92231 - protein, 82 aa, Setaria italica
  Transcript Sequence Number=SeqID_26257
  Gene Ontology: Mol. function=electron carrier activity; Cellular component=extracellular region; Biological process=response to oxidative stress
  Homolog annotation: Hit_ID=B6SIA9; Match level="QueryCoverage=63%, HitCoverage=15%, E-value=5e-22, Identity=92%"; Hit description =Peroxidase 1
AVKSCVAMLIPLALLLLAGSSSVVAQLELDYYSKTCPNVEAIVREEMQKIISAAPSLAGPLLRLHFHDCFVRGCDASVLLNS

SEQ ID NO: 92232 - protein, 173 aa, Setaria italica
  misc_feature (65)..(65): Xaa can be any naturally occurring amino acid
  Transcript Sequence Number=SeqID_26258
  Gene Ontology: Mol. function=protein dimerization activity; Cellular component=nucleus; Biological process=regulation of transcription, DNA-dependent
  Homolog annotation: Hit_ID=Q6E1Y4; Match level="QueryCoverage=95%, HitCoverage=44%, E-value=2e-33, Identity=52%"; Hit description=Salt -stress inducible bZIP protein
  Pfam annotation: Domain name=bZIP_1; Domain location=121-170; Score =18.5; E_value=0.004; Accession=PF00170.13; Description=bZIP transcription factor
TTSMDNSSNKKLKEIDGTAVSSGSGNSEKTSGDYSLEGSSDRNNHKMSGTPKKRSLDDRTTSGAXETCGASAPNDKTGQPGRLATLSNVRITDTAIKPCVSTGSDFRFSGAQSTEWQAKDDKESKRERRKQSNRESARRSRLRKQVNKTAVSCMLLMLSKTISKFRKVSWHVP

SEQ ID NO: 92233 - protein, 95 aa, Setaria italica
  Transcript Sequence Number=SeqID_26259
  Subcellular localization annotation: CTP_CleavageSite=65; ConfidenceScore=5.63e-01
QIRPPPATKALRFPTPLQSILPHSPPALPPGRVLRRRPSPRLPESRVPPFPRAGRITLGGAPPICCRARGRCCGGGAWRRPSCGGAAGRSSPPPA

SEQ ID NO: 92234 - protein, 47 aa, Setaria italica
  Transcript Sequence Number=SeqID_26260
HIYRSIIWSNHGLIRLIDSSRELRFIYAIDFVINIYSILLINIKTRM

SEQ ID NO: 92235 - protein, 266 aa, Setaria italica
  misc_feature (11)..(11): Xaa can be any naturally occurring amino acid
  Transcript Sequence Number=SeqID_26261
  Homolog annotation: Hit_ID=Q53WP4; Match level="QueryCoverage=98%, HitCoverage=36%, E-value=1e-142, Identity=91%"; Hit description =Putative auxin-independent growth promoter
  Pfam annotation: Domain name=DUF246; Domain location=1-219; Score =218.4; E_value=1.9e-62; Accession=PF03138.6; Description=Plant protein family
RCRANYKALQXYRKEIEALGNTLVDRLRNGSEHYIALHLRYEKDMLAFTGCNHNLTLHEAAELTDMRLKVRHWKEKDINSEEKRLQGGCPMTPREAAVFLKAMGYPATTKIYIVAGEIYGAHSLDALKAEYPNIYTHYSLATVEELEPLELYQNRLAAVDYIVALQSDVFVYTYDGNMARAVQGHRRFEGFRKTINPDRLKFVELIDKLDEGSMTWGEFQTAVRKHHENRLGGPYDRLRGESPRQEEYFYSNPIPGCLCKKVQRSR

SEQ ID NO: 92236 - protein, 51 aa, Setaria italica
  Transcript Sequence Number=SeqID_26262
FRALIIKKEHNPKFGVSSVLLCYKHAKRLTPPFSDVCGSLPFYANHYHAST

SEQ ID NO: 92237 - protein, 105 aa, Setaria italica
  Transcript Sequence Number=SeqID_26263
  Homolog annotation: Hit_ID=B6UBA8; Match level="QueryCoverage=60%, HitCoverage=18%, E-value=2e-27, Identity=84%"; Hit description =Transposon protein
MMAARRGGMALLVVVLAAALLAGVASAAGIPPKGGRKPPPNSRFVMLAPKTFGHKRNYQVSCSDEGGPACYVGCPKECPNKCLVFCAYCLSFCMCDIFPGTSCGD

SEQ ID NO: 92238 - protein, 604 aa, Setaria italica
  Transcript Sequence Number=SeqID_26264
  Gene Ontology: Mol. function=protein kinase activity; Cellular component=integral to membrane; Biological process=protein amino acid phosphorylation
  Homolog annotation: Hit_ID=B6U7C7; Match level="QueryCoverage=100%, HitCoverage=100%, E-value=0.0, Identity=82%"; Hit description =Brassinosteroid LRR receptor kinase
  Pfam annotation: Domain name=LRRNT_2; Domain location=26-67; Score =14.8; E_value=0.028; Accession=PF08263.4; Description=Leucine rich repeat N-terminal domain
  Pfam annotation: Domain name=LRR_1; Domain location=122-144; Score =15.3; E_value=0.26; Accession=PF00560.25; Description=Leucine Rich Repeat
  Pfam annotation: Domain name=LRR_1; Domain location=146-168; Score =8.5; E_value=7.1; Accession=PF00560.25; Description=Leucine Rich Repeat
  Pfam annotation: Domain name=LRR_1; Domain location=170-192; Score =9.6; E_value=4.4; Accession=PF00560.25; Description=Leucine Rich Repeat
  Pfam annotation: Domain name=LRR_1; Domain location=73-95; Score=2.3; E_value=1.1e+02; Accession=PF00560.25; Description=Leucine Rich Repeat
  Pfam annotation: Domain name=LRR_1; Domain location=97-120; Score =13.7; E_value=0.71; Accession=PF00560.25; Description=Leucine Rich Repeat
  Pfam annotation: Domain name=Pkinase; Domain location=296-571; Score =93.0; E_value=1.1e-24; Accession=PF00069.17; Description=Protein kinase domain
  Pfam annotation: Domain name=Pkinase_Tyr; Domain location=296-571; Score=56.4; E_value=1.8e-17; Accession=PF07714.9; Description =Protein tyrosine kinase
  Pfam module annotation: Pfam domain module=LRRNT_2::LRR_1::LRR_1::LRR_ 1::LRR_1::LRR_1::Pkinase::Pkinase_Tyr; Domain location=26-67::122 -144::146-168::170-192::73-95::97-120::296-571::296-571
MAVGRFWAALLPVLLCSILCQICYGAVSDIECLKRVKASIDPSNKLDWTFNNHTEGSICGFRGVDCWNPNENKVLSLHLGSMGLKGGFPDGLENCSSMTSLDLSSNSLSGTIPADISKRLQYITSLDLSYNSFSGDIPEALANCTYLNAVNLQHNKLTGMLPGQLAALSRLNQFNVADNQLSGQIPSSLSKFPSSNFANQDLCGKPLSNDCTATSSSRTGVIVGSAVGGAVITLIIVAVILFILVRKMPANKKGKDVEENKWAKTIKGAKGVKVSMFEKSVSKMKLNDLMKATGDFTKENIIGTGRSGTMYRATLPDGSFLAIKRLQDTQHSENQFTSEMSTLGSVRQRNLVPLLGYCIAKNERLLVYKYMPKGSLYDHLHQRSSEKKALEWSLRLKIAIGTARGLAWLHHSCNPRILHRNISSKCILLDDDYEPKISDFGLARLMNPIDTHLSTFVNGEFGDLGYVAPEYTRTLVATPKGDVYSFGVILLELVTGEEPTHVSNAPENFKGSLVDWITYLSNNSILQDAVDKSLIGKDNDAELLQCMKVACSCVLSSPKERPTMFEVYQLLRAVGEKYHFSAADDELTMQPQNADPEDELIVAN

SEQ ID NO: 92239 - protein, 257 aa, Setaria italica
  Transcript Sequence Number=SeqID_26265
  Gene Ontology: Mol. function=transferase activity
  Homolog annotation: Hit_ID=Q2QV89; Match level="QueryCoverage=100%, HitCoverage=45%, E-value=1e-103, Identity=70%"; Hit description=HGA6, putative, expressed
  Pfam annotation: Domain name=DUF563; Domain location=1-122; Score= -58.2; E_value=1.6e-05; Accession=PF04577.6; Description=Protein of unknown function (DUF563)
WLAKYGALLRGLSHHAPLDLAKAAAAGEVHCFGHAVVGLRAHRELMIERERSPDGVGMPDFTRFLRRALSLPRDAPTSPGGATGCKPRLLIVSRRGTRLILNTEAVVRTAEEVGFEAVVSELDVADDDVGRVGRLINSFDAMVGVHGADLTNMVFLPTGAAMVQIVPWGGLQWIARMDFGDPAEAMGLRYIQYEIAVHESSLKDKYPRDHEIFTNPTALHKKGFKFLRNTFLKSQDIIVDVDRFRAVLLQALENLSQ

SEQ ID NO: 92240 - protein, 571 aa, Setaria italica
  Transcript Sequence Number=SeqID_26266
  Gene Ontology: Mol. function=nucleoside-triphosphatase activity; Biological process=defense response
  Homolog annotation: Hit_ID=Q2QZF1; Match level="QueryCoverage=96%, HitCoverage=55%, E-value=1e-149, Identity=49%"; Hit description=NB -ARC domain containing protein, expressed
  Pfam annotation: Domain name=LRR_1; Domain location=218-243; Score =0.6; E_value=2.3e+02; Accession=PF00560.25; Description=Leucine Rich Repeat
  Pfam annotation: Domain name=LRR_1; Domain location=245-266; Score =10.3; E_value=3.3; Accession=PF00560.25; Description=Leucine Rich Repeat
  Pfam annotation: Domain name=LRR_1; Domain location=268-289; Score =7.7; E_value=10; Accession=PF00560.25; Description=Leucine Rich Repeat
  Pfam annotation: Domain name=LRR_1; Domain location=420-442; Score =2.8; E_value=87; Accession=PF00560.25; Description=Leucine Rich Repeat
  Pfam annotation: Domain name=LRR_1; Domain location=507-527; Score =1.2; E_value=1.8e+02; Accession=PF00560.25; Description=Leucine Rich Repeat
  Pfam module annotation: Pfam domain module=LRR_1::LRR_1::LRR_1::LRR _1::LRR_1; Domain location=218-243::245-266::268-289::420-442::507-527
IWEMCGGLPLAIVTMAGLTASKPLLNQNDWLDLCNSLFPEPERCRKPEDFMRIINYCYNDMPSDIKICSLYLSIFPKGRKVSRKRLIRRWIAEGFVREKQGLSVEDVAETCFNQLIERKIMRPVEHSSNGRVKSCQVHDMVLEYIISKAAEEDFITVVGSHWSMPTRSNKVRRLSLHNSDPRRTKSVDRMNMSHVRSLTVFGSIGTKLDKFKSLKTELVQVLDLEGCTGLRESHVKVSDICQMIQLKYLSLRRTDIKELPPKVSKLRNLETLDVRETEVDQLPVTIGQLERINNILGGDKRTRKTLKVPKELKGTMKTLRILSGIEIVEGSTTASDIGYFTGLRKLAIYRIHKSDEIFRDLLSSIQYLSGYSLQTLVIDDKSSEFFETLDSMSSYPTDLRALELSGKLLKLPKWLNGLEELVKLTLSGTALRTDNLLLLRNLSLLFSLTFSISKNHDPEIAAILEKNKSGSGGEIFVPAGGFRKLKLLRIFVPLLPSLNFAKNATPQLEKLELRFKMLEGLHGLDELGMLHDVLLTVDTQANEMTKSRVEYLKKEKTPSSKYTLIVNKYHD

SEQ ID NO: 92241 - protein, 103 aa, Setaria italica
  misc_feature (29)..(29): Xaa can be any naturally occurring amino acid
  misc_feature (37)..(37): Xaa can be any naturally occurring amino acid
  misc_feature (86)..(86): Xaa can be any naturally occurring amino acid
  Transcript Sequence Number=SeqID_26267
  Subcellular localization annotation: CTP_CleavageSite=40; ConfidenceScore=5.18e-01
QPVAGRHVCAARTSPPQVNNSAKPECQIXAPRRARRXAPRDSHLPVAVRSPPDGGDGSLRALLQGPHHVGHGRPEAGILADAGRGXRCHRGGLRGVVGSAEPL

SEQ ID NO: 92242 - protein, 27 aa, Setaria italica
  Transcript Sequence Number=SeqID_26268
LYRTVSYMMRNSEFRDMERQKGSGYRL

SEQ ID NO: 92243 - protein, 81 aa, Setaria italica
  Transcript Sequence Number=SeqID_26269
  Gene Ontology: Mol. function=heat shock protein binding
  Homolog annotation: Hit_ID=Q2R250; Match level="QueryCoverage=100%, HitCoverage=12%, E-value=2e-20, Identity=60%"; Hit description=DnaJ domain containing protein, expressed
LPGAQAAFKLVSEAHTILCDHVKRSRYDIKRQCDPQEMSKETTWLADGTRARKSDVAEHMPPSDFVMVFWTICPHCWKRFV

SEQ ID NO: 92244 - protein, 122 aa, Setaria italica
  misc_feature (113)..(113): Xaa can be any naturally occurring amino acid
  Transcript Sequence Number=SeqID_26270
  Gene Ontology: Mol. function=receptor activity
  Pfam annotation: Domain name=LRR_1; Domain location=20-42; Score =10.3; E_value=3.3; Accession=PF00560.25; Description=Leucine Rich Repeat
  Pfam annotation: Domain name=LRR_1; Domain location=44-63; Score =10.4; E_value=3.1; Accession=PF00560.25; Description=Leucine Rich Repeat
  Pfam annotation: Domain name=LRR_1; Domain location=67-89; Score=4.3; E_value=45; Accession=PF00560.25; Description=Leucine Rich Repeat
  Pfam module annotation: Pfam domain module=LRR_1::LRR_1::LRR_1; Domain location=20-42::44-63::67-89
MLGDLEGKHSSFDFIANWANLSTLSLRKCGLTTQLPNTLPTLPKLKYLDLRSNNLSGAIRLLLPYKNSEYIYVGENNFSGPLPAEFVRPSVPLDVSYNPSVNGRLPNKPAGQXWLINYIGTS

SEQ ID NO: 92245 - protein, 233 aa, Setaria italica
  Transcript Sequence Number=SeqID_26271
  Gene Ontology: Mol. function=receptor activity; Biological process =protein amino acid phosphorylation
  Homolog annotation: Hit_ID=B9RP35; Match level="QueryCoverage=93%, HitCoverage=24%, E-value=4e-30, Identity=38%"; Hit description=ATP binding protein, putative
  Pfam annotation: Domain name=LRR_1; Domain location=112-134; Score =10.3; E_value=3.3; Accession=PF00560.25; Description=Leucine Rich Repeat
  Pfam annotation: Domain name=LRR_1; Domain location=136-155; Score =10.4; E_value=3.1; Accession=PF00560.25; Description=Leucine Rich Repeat
  Pfam annotation: Domain name=LRR_1; Domain location=159-181; Score =4.3; E_value=45; Accession=PF00560.25; Description=Leucine Rich Repeat
  Pfam annotation: Domain name=LRR_1; Domain location=40-62; Score =12.2; E_value=1.4; Accession=PF00560.25; Description=Leucine Rich Repeat
  Pfam annotation: Domain name=LRR_1; Domain location=64-86; Score =10.6; E_value=2.8; Accession=PF00560.25; Description=Leucine Rich Repeat
  Pfam module annotation: Pfam domain module=LRR_1::LRR_1::LRR_1::LRR _1::LRR_1; Domain location=112-134::136-155::159-181::40-62::64-86
NNLSGSIPPGVGNLSKLETWHFNNNHLNGSFPRELSLLRNLQSLWMFDNYIQGSIPEFIQNLTNLTDLRIYGMKLQGPIPNFFSNLINLEHLMLGDLEGKHSSFDFIANWANLSTLSLRKCGLTTQLPNTLPTLPKLKYLDLRSNNLSGAIRLLLPYKNSEYIYVGENNFSGPLPAEFVRPSVPLDVSYNPSVNGRLPNKPAGQNWLINYIGTSIDTSGTIDRSNNPELPSHE

SEQ ID NO: 92246 - protein, 40 aa, Setaria italica
  Transcript Sequence Number=SeqID_26272
MGGVTSTIAARFAFFPPTPPSYTVVVADAATGRLAIPEIS

SEQ ID NO: 92247 - protein, 579 aa, Setaria italica
  Transcript Sequence Number=SeqID_26273
  Gene Ontology: Mol. function=oxidoreductase activity; Cellular component=endoplasmic reticulum membrane; Biological process =oxidation reduction
  Homolog annotation: Hit_ID=Q2RAP0; Match level="QueryCoverage=92%, HitCoverage=92%, E-value=0.0, Identity=81%"; Hit description=L -galactono-1,4-lactone dehydrogenase 1, mitochondrial
  Pfam annotation: Domain name=ALO; Domain location=259-571; Score= -28.8; E_value=1.3e-08; Accession=PF04030.6; Description=D-arabinono -1,4-lactone oxidase
  Pfam annotation: Domain name=FAD_binding_4; Domain location=100-235; Score=123.7; E_value=6e-34; Accession=PF01565.15; Description=FAD binding domain
  Pfam module annotation: Pfam domain module=ALO::FAD_binding_4; Domain location=259-571::100-235
MRHLLLSRLLLRRGSSPSSHHHLPLLCALSSAPSPVSSDADLRKYAGYALLLLGCGAATYYSFPLPADALHKKAVPFKYAPLPEDLHAVSNWSATHEVHTRVLLQPDSLPALEDALATAHKERRKLRPLGSGLSPNGIGLSRAGMVSLGLMDKVLDVDVKKKTVTVQAGIRVAELVDALREHGLTLQNFASIREQQVGGFIQVGAHGTGARLPPVDEQVISMKLVTPAKGTIELSREKDPELFYLARCGLGGLGVVAEVTLQCVERHQLVEHTFVSNADEVKKNHKKWLSENKHIKYLWIPYTDTVVVVRCNPPSKWKTPKLTSKYGKDEALQHVRNLYRESLKKYRTETESNDPEIDTLSFTELRDKLLALDPLDKDHVVKVNKAEAEYWKKSEGYRMGWSDEILGFDCGGQQWVSENCFPTGTLAKPSTKDLDYIEKLLQLIEKEDIPAPAPIEQRWTARSKSPMSPASSSEEDVFSWVGIIMYLPTSDARQRKEITEEFFNYRSLAQTLWDDYSAYEHWAKIEVPKDRDELAELQARLRKRFPVDAYNKARMELDPNKVLSNAKLEKLFPVLEPVK

SEQ ID NO: 92248 - protein, 260 aa, Setaria italica
  misc_feature (18)..(18): Xaa can be any naturally occurring amino acid
  misc_feature (33)..(33): Xaa can be any naturally occurring amino acid
  misc_feature (42)..(42): Xaa can be any naturally occurring amino acid
  misc_feature (169)..(169): Xaa can be any naturally occurring amino acid
  Transcript Sequence Number=SeqID_26274
  Gene Ontology: Mol. function=nucleotide binding; Biological process =defense response
  Homolog annotation: Hit_ID=B9I533; Match level="QueryCoverage=99%, HitCoverage=30%, E-value=2e-34, Identity=34%"; Hit description=Nbs -lrr resistance protein
  Pfam annotation: Domain name=LRR_1; Domain location=103-125; Score =13.3; E_value=0.87; Accession=PF00560.25; Description=Leucine Rich Repeat
  Pfam annotation: Domain name=LRR_1; Domain location=127-149; Score =8.0; E_value=9.1; Accession=PF00560.25; Description=Leucine Rich Repeat
  Pfam annotation: Domain name=LRR_1; Domain location=151-172; Score =3.4; E_value=68; Accession=PF00560.25; Description=Leucine Rich Repeat
  Pfam annotation: Domain name=LRR_1; Domain location=202-224; Score =3.9; E_value=55; Accession=PF00560.25; Description=Leucine Rich Repeat
  Pfam annotation: Domain name=LRR_1; Domain location=226-252; Score =0.4; E_value=2.5e+02; Accession=PF00560.25; Description=Leucine Rich Repeat
  Pfam annotation: Domain name=LRR_1; Domain location=56-78; Score=9.9; E_value=3.8; Accession=PF00560.25; Description=Leucine Rich Repeat
  Pfam module annotation: Pfam domain module=LRR_1::LRR_1::LRR_1::LRR _1::LRR_1::LRR_1; Domain location=103-125::127-149::151-172::202 -224::226-252::56-78
DLFTTFEAPTCLVFSSVXFEELPSSIVNLRHLXRYLDLQWTXKLKYLPNNLCKLVNLQTVNLGRCNQLLEIPRDVHGLVNLTWFALTSKQKYLLKDGFCGWSSLTFLQLSYCPRLTSLTNGFGSLTALLELRISNCPELASLPSTTRHLSNLQKLSINNCAVLDLMEPXEALTGLRSIRWLQLAGLPKLMGFPESFKAAASSLQYLAIVNCKGMEKLPSFIQDFSSLRKIVLHSCPSLSSRCAVGTGEDYHLIRHVPSIL

SEQ ID NO: 92249 - protein, 116 aa, Setaria italica
  misc_feature (81)..(81): Xaa can be any naturally occurring amino acid
  misc_feature (112)..(112): Xaa can be any naturally occurring amino acid
  Transcript Sequence Number=SeqID_26275
  Gene Ontology: Mol. function=metal ion binding
  Homolog annotation: Hit_ID=Q7X9M1; Match level="QueryCoverage=50%, HitCoverage=47%, E-value=2e-22, Identity=88%"; Hit description=RING -H2 finger protein (Fragment)
NSEDRREGERVRVRGKGRERETEGLGFRASPTLHASNPSRIGGRGESPASRRCLGCDSLAMASETDEKAKMESLTSPAAFXEGGIQDACDDACSICLEAFCESDPSALTSCXHEFH

SEQ ID NO: 92250 - protein, 189 aa, Setaria italica
  Transcript Sequence Number=SeqID_26276
  Gene Ontology: Mol. function=carbon-nitrogen ligase activity, with glutamine as amido-N-donor
  Homolog annotation: Hit_ID=Q53JH5; Match level="QueryCoverage=100%, HitCoverage=27%, E-value=1e-71, Identity=71%"; Hit description =Amidase, putative
TFGPDSDEHYISPNVKAPRVAGQLEKLLAWVLEMPVVGWIVLSVLKRDNLVYKLVSDAEIPEPPLFTATHTWQDIPEQNVRLTKPGLPPPERVQEAVVCLTAPLPEPAAALADPSPGFRRWTVRDFHEAYSSGQTTPVMVARRFLAAVEECSGPEVNMALFISCDAADVMRQAEDSTRRYQQGAPLSAM

SEQ ID NO: 92251 - protein, 256 aa, Setaria italica
  Transcript Sequence Number=SeqID_26277
  Gene Ontology: Mol. function=protein dimerization activity; Cellular component=nucleus; Biological process=regulation of transcription, DNA-dependent
  Homolog annotation: Hit_ID=B6TPL3; Match level="QueryCoverage=96%, HitCoverage=60%, E-value=1e-137, Identity=95%"; Hit description=DNA binding protein
LVAPSFVRADQGDAGKGVPIGGIDGLSSEAAMFDVEYGRWQEEHYRLMYELRAALQQHLPEGELQMYVESCLAHHDEMVGIKESAIKGDVFHLISGVWRSPAERCFLWLGGFRPSEVIKMLLSHVEPLTEQQIVGVYGLQQSALETEEALSQGLDALYQSLSDTVVSDALSCPSNVANYMGQMAAAMNKLSTLEGFVRQAENLRQQTLHRLHQILTTRQMARSLLAVSDYFHRLRTLSSLWVTRPRATQEQQQGHS

SEQ ID NO: 92252 - protein, 217 aa, Setaria italica
  misc_feature (8)..(8): Xaa can be any naturally occurring amino acid
  Transcript Sequence Number=SeqID_26278
  Gene Ontology: Mol. function=nucleic acid binding
  Homolog annotation: Hit_ID=Q69NK8; Match level="QueryCoverage=99%, HitCoverage=34%, E-value=1e-97, Identity=79%"; Hit description=Zinc finger CCCH domain-containing protein 59
  Pfam annotation: Domain name=zf-CCCH; Domain location=165-191; Score =24.0; E_value=0.00062; Accession=PF00642.16; Description=Zinc finger C-x8-C-x5-C-x3-H type (and similar)
ALRALAEXSGIVDLFLTNEWPTGVTNGADTSSVPNQVLDPHGFDPVVAELVAEIKPRYHIAGTKCVFYSREPYVNDSAAHVTRFIGLANVGNKEKQKFIHAISPTPASTMSSADIHAKPPNATLSPYAASAKSVPIEEAPKRPADNTDAQYWRYDVKRQRQGEGDGGRLCFKFTSSGSCPRGSKCNFRHDEEAVELLPEKCLVLYFLNKGKCERGLD

SEQ ID NO: 92253 - protein, 72 aa, Setaria italica
  Transcript Sequence Number=SeqID_26279
  Gene Ontology: Mol. function=transcription regulator activity; Cellular component=nucleus; Biological process=regulation of transcription
  Homolog annotation: Hit_ID=Q2QLR0; Match level="QueryCoverage=84%, HitCoverage=18%, E-value=5e-14, Identity=59%"; Hit description=Helix- loop-helix DNA-binding domain containing protein
RGIRLPEIEARFLEKSVMVRIHCEDGKGVAARVLTEVDELHLSIIHANVTPFPASTLIITITAKVEEGFTVT

SEQ ID NO: 92254 - protein, 162 aa, Setaria italica
  Transcript Sequence Number=SeqID_26280
  Gene Ontology: Mol. function=DNA binding; Biological process =regulation of transcription
  Homolog annotation: Hit_ID=B6SW93; Match level="QueryCoverage=85%, HitCoverage=38%, E-value=3e-50, Identity=77%"; Hit description =KANADI-like transcription factor FEATHERED
LELMDVKDLTLAHVKSHLQMYRTVKNTERPAASSDQADGFENGSAGEICDDNSLDLHGYGGGGSGRPESAAAAARHGRLAACNDHGSSTGAHGALWNSSSREDWTGFPSESNTGSMHSLKEQMQSKSLEILSDMNSCVSETTSSTSELNLEFTLGRPQNRPN

SEQ ID NO: 92255 - protein, 77 aa, Setaria italica
  Transcript Sequence Number=SeqID_26281
  Gene Ontology: Mol. function=protein serine/threonine kinase activity; Cellular component=integral to membrane; Biological process=protein amino acid phosphorylation
  Homolog annotation: Hit_ID=B6U286; Match level="QueryCoverage=81%, HitCoverage=11%, E-value=6e-21, Identity=75%"; Hit description =Nodulation receptor kinase
SYFSNIYLFNHFIKQSSSDPWINQLTQLRLLSAVWHENLVPLIGYCCEKDQQILVYPFMSNGSLQDRLYGEAYQKGK

SEQ ID NO: 92256 - protein, 194 aa, Setaria italica
  Transcript Sequence Number=SeqID_26282
  Gene Ontology: Mol. function=protein serine/threonine kinase activity; Cellular component=integral to membrane; Biological process=protein amino acid phosphorylation
  Homolog annotation: Hit_ID=B6U286; Match level="QueryCoverage=100%, HitCoverage=33%, E-value=1e-105, Identity=92%"; Hit description =Nodulation receptor kinase
  Pfam annotation: Domain name=Pkinase; Domain location=50-192; Score= -69.5; E_value=0.00024; Accession=PF00069.17; Description=Protein kinase domain
  Pfam annotation: Domain name=Pkinase_Tyr; Domain location=51-193; Score=-84.2; E_value=4e-08; Accession=PF07714.9; Description=Protein tyrosine kinase
  Pfam module annotation: Pfam domain module=Pkinase::Pkinase_Tyr; Domain location=50-192::51-193
FVCFNKRERRSPEKDCSSTTNPIFQECGIHNTTNPAVQQLSLKSIQTATGNFKRLIGEGGFGAVYRGILPHGQEVAVKVRSSSSTQGTREFNNELRLLSAVWHENLVPLIGYCCEKDQQILVYPFMSNGSLQDRLYGEASKRKVLDWPTRLSVCIGAARGLVYLHNFAGRCIIHRDIKSSNILMDHSMCGKVAD

SEQ ID NO: 92257 - protein, 212 aa, Setaria italica
  misc_feature (122)..(122): Xaa can be any naturally occurring amino acid
  Transcript Sequence Number=SeqID_26283
  Homolog annotation: Hit_ID=B9SFT0; Match level="QueryCoverage=33%, HitCoverage=36%, E-value=7e-30, Identity=83%"; Hit description =Nucleic acid binding protein, putative
LLRRARRRGRPRTPSQTDGSFHSPEWHAARLASLNKTHTVTWEEFKKKQKEDELKRGELEADKDKMMREYRAQLDAERAQKLAHGRNHSKSDSKSFSSKKERKDKDAKKRSKKRRKKFFGVXSSSSSESSSSDDEDRGSRKSRSRSRSKRTKKDSSSEPSSSDNEDRGSRKSRSRSRSKRTKKEKKQRSRSKHTGGDSEAEGPVRLSKFFGK

SEQ ID NO: 92258 - protein, 53 aa, Setaria italica
  Transcript Sequence Number=SeqID_26284
AVIIVSFSECTAASLCYYALKADDECRNMLQLTPYVQPLIASTPCFCQCNNQA

SEQ ID NO: 92259 - protein, 113 aa, Setaria italica
  misc_feature (60)..(60): Xaa can be any naturally occurring amino acid
  Transcript Sequence Number=SeqID_26285
  Gene Ontology: Mol. function=structural constituent of ribosome; Cellular component=intracellular; Biological process=translation
  Homolog annotation: Hit_ID=Q3HVK3; Match level="QueryCoverage=87%, HitCoverage=73%, E-value=2e-46, Identity=89%"; Hit description=Ly200- like protein
  Pfam annotation: Domain name=Ribosomal_L32e; Domain location=9-110; Score=160.2; E_value=6.4e-45; Accession=PF01655.10; Description =Ribosomal protein L32
SYCIFCKSNFPSFIVQPSWRRPKGIDSRVRRKFKGCTLMPNIGYGSDKSTRHYLPNKFKXKFVVHNVSELELLMMHNRTYCAEIAHNVSTRKRKEIVERAAQLDIVVTNKLAR

SEQ ID NO: 92260 - protein, 216 aa, Setaria italica
  Transcript Sequence Number=SeqID_26286
  Homolog annotation: Hit_ID=P73730; Match level="QueryCoverage=66%, HitCoverage=80%, E-value=7e-18, Identity=37%"; Hit description =Sll1620 protein
  Pfam annotation: Domain name=DUF1499; Domain location=64-205; Score =248.9; E_value=1.2e-71; Accession=PF07386.3; Description=Protein of unknown function (DUF1499)
  Subcellular localization annotation: CTP_CleavageSite=49; ConfidenceScore=5.50e-01
MAAHVVSCCLLVPSSGAKAAAASSSSPPNLKATKSREHTRIGRRDFVLRSSELATLAAIFHFSGTKPSYLGVQKNPPSLALCPATNNCVSTSEEISDSNHYAPPWNYNPKDGHRGKPISKEEAMKELIEVVTKTKPDNFTPRIVDKTDDYVRVEYESPIFGFVDDVEFWFPPGNKPIVQYRSASRSGFVDFDANKKRVKELRLALEKKGWASESSF

SEQ ID NO: 92261 - protein, 98 aa, Setaria italica
  Transcript Sequence Number=SeqID_26287
  Gene Ontology: Mol. function=protein dimerization activity; Cellular component=nucleus; Biological process=regulation of transcription, DNA-dependent
  Homolog annotation: Hit_ID=B6T7L6; Match level="QueryCoverage=100%, HitCoverage=38%, E-value=6e-37, Identity=75%"; Hit description=DNA binding protein
IGAFPYQRPVKNIDLVSSVDQGSFLGGAQVTNSCDFRCNDQMYCNPGMQGATSSQVLGQGACDTTNIQCMGIAKSGSTKLPVCGGMDAAVCLPNVEKK

SEQ ID NO: 92262 - protein, 141 aa, Setaria italica
  Transcript Sequence Number=SeqID_26288
  Gene Ontology: Mol. function=structural constituent of ribosome; Cellular component=intracellular; Biological process=translation
  Homolog annotation: Hit_ID=P49211; Match level="QueryCoverage=94%, HitCoverage=100%, E-value=9e-60, Identity=81%"; Hit description=60S ribosomal protein L32-1
  Pfam annotation: Domain name=Ribosomal_L32e; Domain location=22-131; Score=204.7; E_value=2.6e-58; Accession=PF01655.10; Description =Ribosomal protein L32
VVNFRGAEMAVPLLTQKIVKKRVKQFKRPHLDRYKCLKPSWRRPKGIDSRVRRKFKGCTLMPNIGYGSDKKTRHYLPNKFKKFVVHNVSELELLMMHNRSYCAEIAHNVSTRKRKEIVERAAQLDIVVTNKLARIRSQEDE

SEQ ID NO: 92263 - protein, 166 aa, Setaria italica
  Transcript Sequence Number=SeqID_26289
  Gene Ontology: Mol. function=structural constituent of ribosome; Cellular component=intracellular; Biological process=translation
  Homolog annotation: Hit_ID=P49211; Match level="QueryCoverage=80%, HitCoverage=100%, E-value=7e-61, Identity=84%"; Hit description=60S ribosomal protein L32-1
  Pfam annotation: Domain name=Ribosomal_L32e; Domain location=47-156; Score=205.6; E_value=1.3e-58; Accession=PF01655.10; Description =Ribosomal protein L32
  Subcellular localization annotation: CTP_CleavageSite=49; ConfidenceScore=5.25e-01
MAAAATAAAARLRWPWRRRRSRSHRRISAGFAKMAVPLLTQKIVKKRVKQFKRPHLDRYKCLKPSWRRPKGIDSRVRRKFKGCTLMPNIGYGSDKKTRHYLPNKFKKFVVHNVSELELLMMHNRTYCAEIAHNVSTKKRKEIVERAAQLDIVVTNKLARLRSQEDE

SEQ ID NO: 92264 - protein, 160 aa, Setaria italica
  Transcript Sequence Number=SeqID_26290
  Gene Ontology: Mol. function=structural constituent of ribosome; Cellular component=intracellular; Biological process=translation
  Homolog annotation: Hit_ID=P49211; Match level="QueryCoverage=83%, HitCoverage=100%, E-value=1e-60, Identity=83%"; Hit description=60S ribosomal protein L32-1
  Pfam annotation: Domain name=Ribosomal_L32e; Domain location=41-150; Score=207.5; E_value=3.4e-59; Accession=PF01655.10; Description =Ribosomal protein L32
  Subcellular localization annotation: CTP_CleavageSite=9; ConfidenceScore=5.15e-01
KTLSSPLTPAARRLSRSHRRISAGFAKMAVPLLTQKIVKKRVKQFKRPHLDRYKCLKPSWRRPKGIDSRVRRKFKGCTLMPNIGYGSDKKTRHYLPNKFKKFVVHNVSELELLMMHNRTYCAEIAHNVSTRKRKEIVERAAQLDIVVTNRLARIRSQEDE

SEQ ID NO: 92265 - protein, 261 aa, Setaria italica
  Transcript Sequence Number=SeqID_26291
  Gene Ontology: Mol. function=protein dimerization activity; Cellular component=nucleus; Biological process=regulation of transcription, DNA-dependent
  Homolog annotation: Hit_ID=B6T6L8; Match level="QueryCoverage=100%, HitCoverage=100%, E-value=1e-107, Identity=72%"; Hit description=DNA binding protein
  Pfam annotation: Domain name=bZIP_1; Domain location=85-145; Score =19.3; E_value=0.0033; Accession=PF00170.13; Description=bZIP transcription factor
  Pfam annotation: Domain name=bZIP_2; Domain location=86-143; Score =63.2; E_value=9.6e-16; Accession=PF07716.7; Description=Basic region leucine zipper
  Pfam module annotation: Pfam domain module=bZIP_1::bZIP_2; Domain location=85-145::86-143
MDDGDLDFSNPDTFLCPAIGNDPPSSCSMDSYFDDILKDTEHHACTHTHTCNPPVHDHSHTHTCVHVHTKIVAASPDAAETAESPSENNASKKRPSGNRAAVRKYREKKKAHTASLEEEVVHLRALNQQLMKKLQNHAALEAEVARLRCLLVDIRGRIEGEIGAFPYQRPVKNIDLVSSVDQGSFLGGAQITNSCDFRCNDQMYCNPGMQGAMNAQVLGQGACDIANIQCMGSPKSGSTKLPVCGGMDAVPAGCLPNVEKK

SEQ ID NO: 92266 - protein, 64 aa, Setaria italica
  Transcript Sequence Number=SeqID_26292
KHLIGCILDTTPSTDHDVLLCQSLIAYVILSYCFSNFHSECAFSMFIPFSCLIGSIMPRYLQDR

SEQ ID NO: 92267 - protein, 157 aa, Setaria italica
  Transcript Sequence Number=SeqID_26293
  Gene Ontology: Mol. function=metal ion binding; Cellular component =cell wall; Biological process=cell redox homeostasis
  Homolog annotation: Hit_ID=B9RJ66; Match level="QueryCoverage=63%, HitCoverage=26%, E-value=9e-34, Identity=65%"; Hit description=Zinc finger protein, putative
  Pfam annotation: Domain name=zf-C3HC4; Domain location=59-99; Score =44.5; E_value=4.1e-10; Accession=PF00097.17; Description=Zinc finger, C3HC4 type (RING finger)
TLRGIASIEDCAAGPGLDDLIEQLTQNDRRGPPPAAQSSIDAMPTVKITQRHLSGDSHCPVCKEKFELGSEAREMPCNHLYHSDCIVPWLEQHNSCPVCRYELPTQGSATGASCSRTRSTNQSQSSSSSSSSGRTSGRQRRRNPFSFLWPFRSSSSR

SEQ ID NO: 92268 - protein, 78 aa, Setaria italica
  Transcript Sequence Number=SeqID_26294
  Gene Ontology: Cellular component=small-subunit processome; Biological process=rRNA processing
  Homolog annotation: Hit_ID=Q84VB4; Match level="QueryCoverage=100%, HitCoverage=34%, E-value=6e-27, Identity=82%"; Hit description=WD repeat protein (Fragment)
TELKDILYCRVKECKDTIGFNLAAMDHLKELLAMRSDAPFRDAKAKLMEIRQELSKRSDRPDGNERRKKKRKKASGES

SEQ ID NO: 92269 - protein, 103 aa, Setaria italica
  misc_feature (22)..(22): Xaa can be any naturally occurring amino acid
  Transcript Sequence Number=SeqID_26295
  Gene Ontology: Mol. function=damaged DNA binding; Cellular component =nucleus; Biological process=proteasomal ubiquitin-dependent protein catabolic process
  Homolog annotation: Hit_ID=Q40742; Match level="QueryCoverage=50%, HitCoverage=13%, E-value=4e-10, Identity=59%"; Hit description =Probable DNA repair protein RAD23
ERNQTKTTQGQNVHPADGQVFXLHQGKVLKDETTLEENKVLENDFIIIALCKSVSSSYIPEGMETKEWGGIDRETDERCCHGKRPRRHLCWDGKNTILVARLG

SEQ ID NO: 92270 - protein, 96 aa, Setaria italica
  Transcript Sequence Number=SeqID_26296
EGARPGLQDDRPGRYVTAPRGAPGPPPPQMGPPYGGPGYAPPPYGPGYGYGYGSGPGPGPGPEYGGMGMNGGGYETGGYGGMGSGGYGQSYGAWVR

SEQ ID NO: 92271 - protein, 125 aa, Setaria italica
  Transcript Sequence Number=SeqID_26297
  Gene Ontology: Mol. function=voltage-gated chloride channel activity; Cellular component=integral to membrane; Biological process=chloride transport
  Homolog annotation: Hit_ID=B9ST82; Match level="QueryCoverage=68%, HitCoverage=10%, E-value=4e-24, Identity=64%"; Hit description =Voltage-gated clc-type chloride channel, putative
MPNICAFILASKDKEIFFTLSDGKNILTQRYLQNSPSISSCVTRGFQYRGSERGLLTCFPDTDLTTAKNLMEAKGIKQLPVVKRGVGHRTAGKRKPIALLHYDSIGCCLREEVENWKTICQRMAC

SEQ ID NO: 92272 - protein, 71 aa, Setaria italica
  Transcript Sequence Number=SeqID_26298
ITELKSSARIGQRPRSTRLTCCHATLAASSSDHMGVEMLMAREHEQLPRSACRYQRLRGELGGGGGGSRGG

SEQ ID NO: 92273 - protein, 282 aa, Setaria italica
  misc_feature (9)..(9): Xaa can be any naturally occurring amino acid
  Transcript Sequence Number=SeqID_26299
  Gene Ontology: Mol. function=methyltransferase activity; Cellular component=nucleus; Biological process=tRNA processing
  Homolog annotation: Hit_ID=B9S623; Match level="QueryCoverage=83%, HitCoverage=76%, E-value=7e-89, Identity=64%"; Hit description=tRNA, putative
  Pfam annotation: Domain name=GCD14; Domain location=1-273; Score =385.9; E_value=6.9e-113; Accession=PF08704.2; Description=tRNA methyltransferase complex GCD14
  Pfam annotation: Domain name=Methyltransf_11; Domain location=81-179; Score=14.2; E_value=0.0043; Accession=PF08241.4; Description =Methyltransferase domain
  Pfam annotation: Domain name=Methyltransf_12; Domain location=81-177; Score=8.3; E_value=0.077; Accession=PF08242.4; Description =Methyltransferase domain
  Pfam module annotation: Pfam domain module=GCD14::Methyltransf _11::Methyltransf_12; Domain location=1-273::81-179::81-177
DWIGLPFGXSKVFSASGGGGGRGVGGKGGGGGKAGGGFVHLLAPTPELWTLVLSHRTQILYIADISLVVAYLELVPGCVVLESGTGSGSLTTSLARAVAPHGRVHTFDFHEQRAASAREDFERNGLSSLITVNVRDIQGEGFPEEHRAATDAVFLDLPQPWLAIPSVGSMLKQDGILCSFSPCIEQVQRACEAMRSCFTDIRTFEILLRTYEVRDGALKSGTADESNMGPPQKRKRSTASGENADHAQKNNSILVRPCSTAKGHTGYLTFARLRVSDDQTES

SEQ ID NO: 92274 - protein, 35 aa, Setaria italica
  Transcript Sequence Number=SeqID_26300
VDDDSASVSSTDFIAANTSLEEYLKGRWSRSSSFD

SEQ ID NO: 92275 - protein, 67 aa, Setaria italica
  Transcript Sequence Number=SeqID_26301
MDAGLLSAFIKKLVARLFVLAEEKYKLYNDFKEDIHFLMEELPMITTAIDEQLSGRDDLALHFKINE

SEQ ID NO: 92276 - protein, 165 aa, Setaria italica
  Transcript Sequence Number=SeqID_26302
  Gene Ontology: Mol. function=nucleotide binding; Biological process =apoptosis
  Homolog annotation: Hit_ID=Q2R8J8; Match level="QueryCoverage=97%, HitCoverage=17%, E-value=1e-28, Identity=44%"; Hit description=NB -ARC domain containing protein, expressed
MDAGLLSAFIKKLVARLFVLAEEKYKLYNDFKEDIHFLMEELPMITTAIDEQLSGRDDLALHFKINELHQLAQEMEDCIDHIMYRASKEQQPWYHINHTSGNRITSRLQLAKEMKRLKRRLQEAHQRKERYPVSCPSHTELPPSYSDRLIAQEDLVGIDAPLLVK

SEQ ID NO: 92277 - protein, 61 aa, Setaria italica
  Transcript Sequence Number=SeqID_26303
NTYIRGVLKKASEQVLPGSNVKHYHKKSSCIHIRTIKWVLALVQTLLRTTRGSLITASTLL

SEQ ID NO: 92278 - protein, 163 aa, Setaria italica
  misc_feature (135)..(135): Xaa can be any naturally occurring amino acid
  Transcript Sequence Number=SeqID_26304
  Subcellular localization annotation: CTP_CleavageSite=46; ConfidenceScore=5.31e-01
MVEVGSAVRAQPTWAPAAARGRRSRGQASAALAIASAPAARWVRCRAMERPPTVRMVTIPFADLKERDKDLGDKIEEGLGPQGLGIISIAGVPGFPELRKSLLRLAPRIANLPESSSCFLTSSDSRYNFGWSHGXEKLESGKLDTFKGSFMRTHLDVPTMDDA

SEQ ID NO: 92279 - protein, 70 aa, Setaria italica
  Transcript Sequence Number=SeqID_26305
ELVYFVSYDSKQTEEVESVSSWCGWHTDHGSLTGLTCGLFTKDSVEVPCPDSAAGLYIRTRDNQVVKVAS

SEQ ID NO: 92280 - protein, 281 aa, Setaria italica
  Transcript Sequence Number=SeqID_26306
  Pfam annotation: Domain name=2OG-FeII_Oxy; Domain location=114-238; Score=7.5; E_value=0.03; Accession=PF03171.12; Description=2OG -Fe(II) oxygenase superfamily
EDSDSRYNFGWSHGKEKLESGKLDTFKGSFYANPILDVPTMDDAVVSRYPSYCRPNIWPTDSLPELEIAFKALGKLMMEVGLMLAHHCDRYVMQQGVGSYDGDSLEQTIARSRCHKGRLLYYFPRQLSKQTEEVESVSSWCGWHTDHGSLTGLTCGLFTKDSVEVPCPDSAAGLYIRTRDNQVVKVVFDEDQLAYQIGETAEILSRGYLCATPHCVQAPSSENASNVDRSTFALFMQPDWNEKLEFPSEIPYHQELIPPNETLTFGEYSKRLVNKYYQAAM

SEQ ID NO: 92281 - protein, 331 aa, Setaria italica
  Transcript Sequence Number=SeqID_26307
  Gene Ontology: Mol. function=hydrolase activity, hydrolyzing O -glycosyl compounds; Cellular component=extracellular region; Biological process=carbohydrate metabolic process
  Homolog annotation: Hit_ID=P49237; Match level="QueryCoverage=93%, HitCoverage=93%, E-value=1e-140, Identity=80%"; Hit description =Glucan endo-1,3-beta-glucosidase, acidic isoform
  Pfam annotation: Domain name=Glyco_hydro_17; Domain location=29-331; Score=636.9; E_value=1.9e-188; Accession=PF00332.10; Description =Glycosyl hydrolases family 17
MAKQGAASMLALALLLGTFAAIPTGVQSIGVCYGVNGNGLPSAGDVVQLYQSKGINLMRIYFPDSNALQALSGSNIGVIMDVPNDKLGSIASDPNAAAGWVRDNVQAFSGVSFRYIAVGNEVAGGDTANILPAMRNINDALNNAGLGSIKVSTAVQSGVTQGFPPSQGSFSAGHMGPIAQFLQSTGAPLLANVYPYFSYVGNQAQIDINYALFTSPGTVVQDGGNAYQNLFDALVDTFYSALENAGAGSVGIVVSESGWPSAGGDAASTDNARTYNQNLINHVGQGTPKRPGAIETYIFAMFNEDQKPGAETEKHFGLFNPDKSPVYDINF

SEQ ID NO: 92282 - protein, 135 aa, Setaria italica
  misc_feature (8)..(8): Xaa can be any naturally occurring amino acid
  Transcript Sequence Number=SeqID_26308
  Homolog annotation: Hit_ID=B6SXP2; Match level="QueryCoverage=99%, HitCoverage=24%, E-value=2e-33, Identity=52%"; Hit description =Pentatricopeptide repeat protein PPR986-12
REDIPSHXRLINDCMYDILGVQSKRNVMRKRKEDFVNSSSNQARPKSNDMVSSNISVCPSMTRFTKDDLLMHIVELHRRGGISSDASILASALSSCADMKTLTGGAHLQALLVKVGYDSSVLVGSALISFYSRCG

SEQ ID NO: 92283 - protein, 45 aa, Setaria italica
  Transcript Sequence Number=SeqID_26309
GGMAEECPVAGGVAEFWLPDEFLDDDFFSEEEKAAVAAKSESDEE

SEQ ID NO: 92284 - protein, 47 aa, Setaria italica
  misc_feature (9)..(9): Xaa can be any naturally occurring amino acid
  Transcript Sequence Number=SeqID_26310
  Gene Ontology: Mol. function=nucleic acid binding
  Homolog annotation: Hit_ID=Q9M837; Match level="QueryCoverage=100%, HitCoverage=18%, E-value=9e-10, Identity=74%"; Hit description =Putative RRM-containing protein
GKYVGNRPXIKLRKSNWKERTDVEALERQKNHVQRKPKMPKKGILHK

SEQ ID NO: 92285 - protein, 238 aa, Setaria italica
  Transcript Sequence Number=SeqID_26311
  Gene Ontology: Mol. function=nucleic acid binding
  Homolog annotation: Hit_ID=Q9M837; Match level="QueryCoverage=73%, HitCoverage=66%, E-value=2e-71, Identity=75%"; Hit description =Putative RRM-containing protein
  Pfam annotation: Domain name=RRM_1; Domain location=132-202; Score =86.0; E_value=1.3e-22; Accession=PF00076.14; Description=RNA recognition motif. (a.k.a. RRM, RBD, o
  Subcellular localization annotation: CTP_CleavageSite=45; ConfidenceScore=5.16e-01
MPSNPPPPPPPGSSAPAPAGGSYFPLPFHLQQHQPQPQMPPPPMPANSYQQYQQQLHQAHQLFQRDAQTITPEALQSVKAALATSDVLDPTAAASARPSDPSTSKKPIPRRAAGQSWEDPTLTEWPENDYRLFCGDLGNEVNDDVLSKAFSRFPSFNMARVVRDKRTGKTKGYGFVSFSNPTDLAAAIKEMNGKYVGNRPIKLRKSNWKERTDVEALERQKNHVQRKPKMHKKGILHK

SEQ ID NO: 92286 - protein, 78 aa, Setaria italica
  Transcript Sequence Number=SeqID_26312
KTWDDLSFRCILIVQGKSEWKRLARLIPLTVVHLVQPLFLAPLLSICAKKGTLVVRKYHTVQVSNLVNHVRKNFMNGN

SEQ ID NO: 92287 - protein, 301 aa, Setaria italica
  Transcript Sequence Number=SeqID_26313
  Gene Ontology: Mol. function=mannosyl-oligosaccharide glucosidase activity; Cellular component=endoplasmic reticulum membrane; Biological process=oligosaccharide metabolic process
  Homolog annotation: Hit_ID=Q8RZJ2; Match level="QueryCoverage=99%, HitCoverage=33%, E-value=1e-147, Identity=82%"; Hit description =Putative alpha-glucosidase 1
  Pfam annotation: Domain name=Glyco_hydro_63; Domain location=1-299; Score=-457.9; E_value=0.00018; Accession=PF03200.8; Description =Mannosyl oligosaccharide glucosidase
RTVMRSVTPLSAPRMMDLPQFQGDHKESLYWGTYRPNVYLGIRSRTPLSLIAGLMWIGLKNGQYFLRHVCQDSDELSTYGWTAHNGRDYGHQMLVDHGLLLTTSFLKEKGEGSGYGGDWAVRLGANSERSSVNDAQGSTTHLFFYIADESGKSITMASHVPSSRGPVLLASGSHDEIGDWELYLRSEDDLEIHRAGFKSMSMHNLSDLVQQAVATNAMQTGNLNLPDMTEDSSNIMTYQVSIKTPAQIDIVFLSGSASKNPKIEERISNLTGPMLSARLESKQKEFEERYDQIFNVNNKID

SEQ ID NO: 92288 - protein, 79 aa, Setaria italica
  Transcript Sequence Number=SeqID_26314
  Gene Ontology: Mol. function=1,3-beta-glucan synthase activity; Cellular component=1,3-beta-glucan synthase complex; Biological process=1,3-beta-glucan biosynthetic process
  Homolog annotation: Hit_ID=Q8W0J2; Match level="QueryCoverage=93%, HitCoverage=4%, E-value=1e-17, Identity=63%"; Hit description=1,3 -beta-glucan synthase component-like
KDTQVRVLTIFITWAALRFLQSLLDIGTQFRRAFRDGRMLAVRMVLKVIAAAAWVLAFAVLYKGIWDQRRSNGQWSSAV

SEQ ID NO: 92289 - protein, 217 aa, Setaria italica
  misc_feature (7)..(7): Xaa can be any naturally occurring amino acid
  misc_feature (26)..(26): Xaa can be any naturally occurring amino acid
  Transcript Sequence Number=SeqID_26315
  Gene Ontology: Mol. function=heme oxygenase (decyclizing) activity; Cellular component=chloroplast; Biological process=heme oxidation
  Homolog annotation: Hit_ID=Q94FW8; Match level="QueryCoverage=79%, HitCoverage=52%, E-value=6e-90, Identity=92%"; Hit description=Heme oxygenase 2 (Fragment)
  Pfam annotation: Domain name=Heme_oxygenase; Domain location=24-214; Score=-66.2; E_value=0.03; Accession=PF01126.12; Description=Heme oxygenase
GAEDADXGADADASASEDDDNDGDDXVKEEHEKEEDGELVEGEWMPSMEGFVLYLVDSKLVFDTIERVVAESTDVAYVYFRKSGLERSASISKDLEWFREQGVEIPEPSTLGSTYATYLTELAESNAPAFLSHYYNIYFAHVTGGVAIGNKIRDKILDGRELEFCKWDTDAELLLKDAREKLNELSKHWTRKDRNLCLKEAAKCFQYLGKIVRLIIS

SEQ ID NO: 92290 - protein, 148 aa, Setaria italica
  Transcript Sequence Number=SeqID_26316
  Homolog annotation: Hit_ID=B6TSA2; Match level="QueryCoverage=98%, HitCoverage=27%, E-value=9e-49, Identity=71%"; Hit description=Small nucleolar ribonucleoprotein complex subunit
  Subcellular localization annotation: CTP_CleavageSite=28; ConfidenceScore=5.34e-01
MAAADTSKPFFPAAPHQALLPSRGAAARASLDGSYWRAFRSSELVSGADFPVTDLTFAPAAATASSPTLAAAWSTSLHLFSGDPLKSLRRISVAGDLVFSPSFRCDGALLAAGDKKGVVRVFRADKPATGAALRTLRAHAAETRVVRY

SEQ ID NO: 92291 - protein, 76 aa, Setaria italica
  Transcript Sequence Number=SeqID_26317
  Gene Ontology: Mol. function=single-stranded DNA binding; Cellular component=mitochondrion
  Homolog annotation: Hit_ID=B9STF2; Match level="QueryCoverage=100%, HitCoverage=35%, E-value=3e-24, Identity=69%"; Hit description =Single-stranded DNA-binding protein, mitochondrial, putative
AVHNEELGAYAVQKLVKNSAVFVEGDIETRVYSDSVNDQVKNIPEICLRRDGKIRLLQSGEGDVSKSLEELREGLF

SEQ ID NO: 92292 - protein, 88 aa, Setaria italica
  Transcript Sequence Number=SeqID_26318
  Gene Ontology: Mol. function=hydrolase activity, acting on glycosyl bonds; Biological process=cell wall organization and biogenesis
RWTTPGHEERPKGYLFNRPPPPPGESREWEDWELPCYVTSFLTVVILGVGLNAKPDLTIETWAHQKALERLQQQELAGAGAASDGDAE

SEQ ID NO: 92293 - protein, 133 aa, Setaria italica
  misc_feature (84)..(84): Xaa can be any naturally occurring amino acid
  Transcript Sequence Number=SeqID_26319
  Gene Ontology: Mol. function=transferase activity, transferring groups other than amino-acyl groups
  Homolog annotation: Hit_ID=Q5VP57; Match level="QueryCoverage=66%, HitCoverage=37%, E-value=1e-17, Identity=57%"; Hit description =Anthocyanin 5-aromatic acyltransferase-like
LSPVCLPIPCCVSQLSAGEIQSLKQHIHQGIRTNTTGVEPSKPPSTYVAISSLAWTSIVRAKPAVRDADDAYFMVSADCRRRLXPPLGDGFFGNAILAIFARASGEPGRGEGAMQDEVVLRVTTPCTRTPSPG

SEQ ID NO: 92294 - protein, 283 aa, Setaria italica
  Transcript Sequence Number=SeqID_26320
  Gene Ontology: Mol. function=transcription regulator activity; Cellular component=nucleus; Biological process=regulation of transcription
  Homolog annotation: Hit_ID=B6TSQ0; Match level="QueryCoverage=100%, HitCoverage=61%, E-value=6e-82, Identity=62%"; Hit description=DNA binding protein
  Pfam annotation: Domain name=HLH; Domain location=131-180; Score =47.0; E_value=7.2e-11; Accession=PF00010.18; Description=Helix-loop -helix DNA-binding domain
LPCKGGVLELGSDVAVRETPEALRAIQSALAVAPAPREECMRIFGKDLSPSSRTPRPLTMGLSVTGDNWAPQPGGHATASTPPDKTEAAKPKPPEPPKSIDFSKAGKPGQAGGEERRPRKRGRKPANGREEPLNHVEAERQRREKLNQRFYALRAVVPKISKMDKASLLSDAIAYIQELVLRLRGGGGGVAPAARAESPAVEVKAMQDEVVLRVTTPLYAHPVSRVFHAIRDAQLSVAASDVAVADDAVTHTLVLRSAGPEQLTAETVLAAMSRGMTSATPSP

SEQ ID NO: 92295 - protein, 748 aa, Setaria italica
  Transcript Sequence Number=SeqID_26321
  Gene Ontology: Mol. function=binding; Cellular component =intracellular; Biological process=RNA processing
  Homolog annotation: Hit_ID=B9S614; Match level="QueryCoverage=100%, HitCoverage=82%, E-value=0.0, Identity=65%"; Hit description=XPA -binding protein, putative
  Pfam annotation: Domain name=DUF526; Domain location=90-153; Score= -19.0; E_value=0.091; Accession=PF04380.5; Description=Protein of unknown function (DUF526)
  Pfam annotation: Domain name=HAT; Domain location=362-394; Score=2.0; E_value=15; Accession=PF02184.8; Description=HAT (Half-A-TPR) repeat
  Pfam annotation: Domain name=HAT; Domain location=435-469; Score=9.0; E_value=0.84; Accession=PF02184.8; Description=HAT (Half-A-TPR) repeat
  Pfam annotation: Domain name=HAT; Domain location=544-577; Score=6.3; E_value=2.5; Accession=PF02184.8; Description=HAT (Half-A-TPR) repeat
  Pfam annotation: Domain name=TPR_2; Domain location=256-289; Score =8.0; E_value=3.4; Accession=PF07719.9; Description=Tetratricopeptide repeat
  Pfam annotation: Domain name=TPR_2; Domain location=294-326; Score =2.3; E_value=18; Accession=PF07719.9; Description=Tetratricopeptide repeat
  Pfam annotation: Domain name=TPR_2; Domain location=382-415; Score =8.9; E_value=2.7; Accession=PF07719.9; Description=Tetratricopeptide repeat
  Pfam annotation: Domain name=TPR_2; Domain location=421-454; Score =2.9; E_value=15; Accession=PF07719.9; Description=Tetratricopeptide repeat
  Pfam annotation: Domain name=TPR_2; Domain location=457-490; Score =3.3; E_value=13; Accession=PF07719.9; Description=Tetratricopeptide repeat
  Pfam annotation: Domain name=TPR_2; Domain location=93-126; Score =6.9; E_value=4.6; Accession=PF07719.9; Description=Tetratricopeptide repeat
  Pfam module annotation: Pfam domain module=DUF526::HAT::HAT::HAT::TPR_ 2::TPR_2::TPR_2::TPR_2::TPR_2::TPR_2; Domain location=90-153::362 -394::435-469::544-577::256-289::294-326::382-415::421-454::457 -490::93-126
TSLRVFRRYLQFDPSHAEDFINFLITANRWQEAADRLASVLNDDGFRSVKGKTRHQLWLELCEILTKHADEVAGLKVDAILRGGIRKFTDEVGKLWTSLADYYVRRGLFEKARDVFEEGVSSVVTVKEFSVVFEAYTQFEQSMLAAKLEAAEEEGAEDEDEGGGRKNGMDKLSKKFLEEFWLNDEDDTDLRMARFERLLDRRPELLSSVLLRQNPHNVEEWHRRVKLFEKDPARQVATYVEAVKTVDPMKAVGKPHTLWVAFAKMYEKHSRLDSAEDIFKRATQVNYKAVDHLASIWCEWAEMELRHSNFDKAIELMRQATAEPSVEVKRRAAAEGNEPVQMKVHKSLKLWSFYVDLEESLGTLDSTRAVYERILDLRIATPQIILNYAYLLEEHRYFEDAFKVYERGVKIFKYPHVKAIWVTYLTKFVQRYKRSKLERARELFHEAVQQAPPDEKKPLYLQWAKLEEDYGLAKRAMNVYDEAVRAVPNSEKMAMYEIYIARAAELFGVPRTRQIYEQAIESGLPDRDVLTMCMKFAELERSLGEIDRSRAIYVHASNYADPNNSDFWKKWNDFEIQHGNEDTFREMLRIKRTVAASRSQTHFILPEYLMQRDQRLNLDEAVDTLKRAGVPEDEMAALERQLAPGPSTAPSAAQSTAPASANRMMSFVSAGVEAQAESSRQQAGNNEDIELPDESDDEEPDVQIAEKSVPAAVFGELGKRAAESQEESSGAQENEQLGALERIKRRRQ

SEQ ID NO: 92296 - protein, 188 aa, Setaria italica
  Transcript Sequence Number=SeqID_26322
  Gene Ontology: Cellular component=plasma membrane
  Homolog annotation: Hit_ID=B6TMF3; Match level="QueryCoverage=74%, HitCoverage=68%, E-value=3e-68, Identity=86%"; Hit description =Wound/stress protein
  Pfam annotation: Domain name=PLAT; Domain location=38-167; Score =33.0; E_value=1.2e-06; Accession=PF01477.15; Description=PLATLH2 domain
MAKLSPCLLLVVFGAVACASAAAAVVTEVVARDPEDKCVYTVYVRTGSIWKGGTDSKIGVTLVGADGSGIRIPDLEGWGGLMGAGHDYYERGNLDIFSGRGPCMRAAPCAMNLTSDGTGPHHGWYCNYVEVTSTGPHLGCAQQLFTVEQWLATDAPPYRLYKTVDKCHEKRSAAATAGDDVEAAATAL

SEQ ID NO: 92297 - protein, 100 aa, Setaria italica
  Transcript Sequence Number=SeqID_26323
  Gene Ontology: Mol. function=protein transporter activity; Cellular component=nuclear pore; Biological process=protein import into nucleus, docking
  Homolog annotation: Hit_ID=Q5VN12; Match level="QueryCoverage=92%, HitCoverage=7%, E-value=2e-33, Identity=77%"; Hit description =Putative Importin 9
  Pfam annotation: Domain name=HEAT; Domain location=27-61; Score=8.6; E_value=4.4; Accession=PF02985.14; Description=HEAT repeat
  Pfam annotation: Domain name=HEAT; Domain location=64-100; Score =10.5; E_value=2.6; Accession=PF02985.14; Description=HEAT repeat
  Pfam module annotation: Pfam domain module=HEAT::HEAT; Domain location=27-61::64-100
VLLKQFIKQHWQEDEENFVPPVVSASEKVVIRQLLLTSLDDSHGKIRTAISMAVAAIGQQDWPEDWPELLPLLLNLITDQNNGNGVRGALRCLALLSDDL

SEQ ID NO: 92298 - protein, 190 aa, Setaria italica
  misc_feature (33)..(33): Xaa can be any naturally occurring amino acid
  Transcript Sequence Number=SeqID_26324
  Gene Ontology: Mol. function=nucleic acid binding
  Homolog annotation: Hit_ID=Q10L02; Match level="QueryCoverage=53%, HitCoverage=42%, E-value=3e-50, Identity=91%"; Hit description=RNA recognition motif family protein, expressed
  Pfam annotation: Domain name=RRM_1; Domain location=59-129; Score =67.9; E_value=3.8e-17; Accession=PF00076.14; Description=RNA recognition motif. (a.k.a. RRM, RBD, o
MAGYRSRSPSWSYSPRRRYSRSPPRRKHYDDPXDRYRGGGGGGGGPRRFYGRPSAQSGLLIRNISLTVRPEDIRVPFEQFGPVKDVYLPRNFHTRELRGFGFVKFRYPEDAAVAKQEMNHQVIGGQEISIVYAEENRKTPQEMRMRTRISGRYMDGRFTRRSLSRSPRSRSHSHSPSPSPLRHHFSYESI

SEQ ID NO: 92299 - protein, 57 aa, Setaria italica
  Transcript Sequence Number=SeqID_26325
MEIKGIAIFCFLDNIVGHSRYLWWIDKKIPSRSHYVACCVTSLKCFRSIKYQLQTSV

SEQ ID NO: 92300 - protein, 48 aa, Setaria italica
  misc_feature (43)..(43): Xaa can be any naturally occurring amino acid
  Transcript Sequence Number=SeqID_26326
MAGLDLGTAATRYVHQLHHLHPDLQLQHNYASKQPEPSDDDPXGSGGG

SEQ ID NO: 92301 - protein, 190 aa, Setaria italica
  Transcript Sequence Number=SeqID_26327
  Gene Ontology: Mol. function=protein binding; Cellular component =chloroplast
  Homolog annotation: Hit_ID=B9SJT2; Match level="QueryCoverage=100%, HitCoverage=83%, E-value=1e-85, Identity=81%"; Hit description =Thylakoid lumenal 17.4 kDa protein, chloroplast, putative
  Pfam annotation: Domain name=Pentapeptide; Domain location=123-162; Score=37.5; E_value=5.2e-08; Accession=PF00805.14; Description =Pentapeptide repeats (8 copies)
  Pfam annotation: Domain name=Pentapeptide; Domain location=78-117; Score=29.5; E_value=1.3e-05; Accession=PF00805.14; Description =Pentapeptide repeats (8 copies)
  Pfam module annotation: Pfam domain module=Pentapeptide::Pentapeptide; Domain location=123-162::78-117
DGPEGQSFRFRLACGVLAAWAVASASNPVIAASQRLPPLSTEPNRCERAFVGNTIGQANGVYDKPLDLRFCDYTNEKTNLKGKSLAAALMSDAKFDGADMSEVVMSKAYAVGASFKGTDFTNAVIDRVNFEKADLTGAIFKNTVLSGSTFNDAKMEDVVFEDTIIGYIDLQKLCTNTSISADGRLELGCR

SEQ ID NO: 92302 - protein, 182 aa, Setaria italica
  misc_feature (12)..(12): Xaa can be any naturally occurring amino acid
  Transcript Sequence Number=SeqID_26328
  Gene Ontology: Mol. function=protein binding
  Homolog annotation: Hit_ID=B6TKJ6; Match level="QueryCoverage=99%, HitCoverage=41%, E-value=9e-41, Identity=53%"; Hit description =Receptor-like protein kinase
  Pfam annotation: Domain name=LRR_1; Domain location=101-122; Score =11.6; E_value=1.8; Accession=PF00560.25; Description=Leucine Rich Repeat
  Pfam annotation: Domain name=LRR_1; Domain location=124-145; Score =8.0; E_value=8.9; Accession=PF00560.25; Description=Leucine Rich Repeat
  Pfam annotation: Domain name=LRR_1; Domain location=149-172; Score =3.5; E_value=65; Accession=PF00560.25; Description=Leucine Rich Repeat
  Pfam annotation: Domain name=LRR_1; Domain location=28-50; Score=3.9; E_value=54; Accession=PF00560.25; Description=Leucine Rich Repeat
  Pfam annotation: Domain name=LRR_1; Domain location=52-75; Score =15.3; E_value=0.25; Accession=PF00560.25; Description=Leucine Rich Repeat
  Pfam annotation: Domain name=LRR_1; Domain location=77-99; Score =14.5; E_value=0.45; Accession=PF00560.25; Description=Leucine Rich Repeat
  Pfam module annotation: Pfam domain module=LRR_1::LRR_1::LRR_1::LRR _1::LRR_1::LRR_1; Domain location=101-122::124-145::149-172::28 -50::52-75::77-99
  Subcellular localization annotation: CTP_CleavageSite=68; ConfidenceScore=5.35e-01
QLRVMAVALDPXGYSGALPAVVLSSLPFLASLSLAGNRFHGALPSGVPLQASLRILDLSGNAFSGAIPASLFTAASGLQELYLSRNGFSGGVPPQLALLGALSRLELQHNGFTGSLPSLAAMRSLYHLDVSGNALSGPLLAAPGLLPPSLLSVVARNNSFSGPFRAAALAALPAVRVMDLTG

SEQ ID NO: 92303 - protein, 197 aa, Setaria italica
  misc_feature (28)..(28): Xaa can be any naturally occurring amino acid
  Transcript Sequence Number=SeqID_26329
  Gene Ontology: Mol. function=pseudouridine synthase activity; Cellular component=cytosol; Biological process=pseudouridine synthesis
  Homolog annotation: Hit_ID=Q0E0Y3; Match level="QueryCoverage=92%, HitCoverage=48%, E-value=1e-73, Identity=76%"; Hit description=RNA pseudourine synthase 7
  Pfam annotation: Domain name=PseudoU_synth_2; Domain location=1-127; Score=98.6; E_value=2.1e-26; Accession=PF00849.14; Description=RNA pseudouridylate synthase
LFANPAFCSTVHRLDRLVSGLLIFAKNXADRAECFRQQIEAGLLQKEYVAKVFGVFPDGEQTVDANVNFNAREGRSTVEVSDGSGKEPNGKQALTRFQRICTDGTYSIVLCKPVTGRTHQIRVHLKHTGYPIANDELYLSGNFCPRSPKGTSASTATAPLDPDNSAADHGSKDAEADESFDIDPMCTNCPNLDYQVK

SEQ ID NO: 92304 - protein, 55 aa, Setaria italica
  Transcript Sequence Number=SeqID_26330
  Gene Ontology: Mol. function=DNA binding; Cellular component=nucleus; Biological process=regulation of transcription
  Homolog annotation: Hit_ID=Q09GS2; Match level="QueryCoverage=85%, HitCoverage=20%, E-value=1e-18, Identity=87%"; Hit description =Transcription factor MYBJ7
RAEEERRWGRAPCCDKATVKKGPWSPEEDAMLKNYIEEHGTGGNWIALPHKIGLK

SEQ ID NO: 92305 - protein, 69 aa, Setaria italica
  Transcript Sequence Number=SeqID_26331
VLDGGESLDFSTCGDLFYCRQALMLRSSPLAVSISLILILCQLLSSMLIKDLLNTAELSVQRTVRLLCF

SEQ ID NO: 92306 - protein, 68 aa, Setaria italica
  Transcript Sequence Number=SeqID_26332
  Gene Ontology: Mol. function=methyltransferase activity
  Homolog annotation: Hit_ID=Q9AY72; Match level="QueryCoverage=100%, HitCoverage=22%, E-value=3e-33, Identity=95%"; Hit description =AFR615Wp, putative, expressed
  Pfam annotation: Domain name=DUF858; Domain location=1-68; Score= -69.5; E_value=1e-05; Accession=PF05891.4; Description=Eukaryotic protein of unknown function (DUF858)
GVLGGYGCVNDADVKGSDAFLRPLLAERFGTAKRHLVALDCGSGIGRVTKNFLLRHFNEVDLVEPVSH

SEQ ID NO: 92307 - protein, 91 aa, Setaria italica
  Transcript Sequence Number=SeqID_26333
MQALGQNIRAHSILQRKREKVNRKYTQPARPRRQLSPGFLEDALDEDDEPEYGSRRVPGRRRFEDELEAEALAERRIINAKKSNMNRNVPR

SEQ ID NO: 92308 - protein, 586 aa, Setaria italica
  Transcript Sequence Number=SeqID_26334
  Gene Ontology: Mol. function=protein binding; Cellular component =nucleus; Biological process=regulation of transcription, DNA -dependent
  Homolog annotation: Hit_ID=B9I2V4; Match level="QueryCoverage=75%, HitCoverage=71%, E-value=1e-117, Identity=53%"; Hit description=PAF1 complex component
  Pfam annotation: Domain name=Leo1; Domain location=148-509; Score =330.9; E_value=2.5e-96; Accession=PF04004.5; Description=Leo1-like protein
GGEVDGEAENGGEGEGESEGQVGMEEESEGEAHRADLDQGESDGDKVQSSPERELDDQRVEPDARGMDSEDEGYQQRTVSSRRRGVVASESEGSEDNYYADGGQEDEEPRQTRKPSSPMEEERDQEVVRDVFGDSDEDEPGPYRTRHDIDEDSHRSPIEDEGQYEKDMQPDDVVADEDMHYESDENRELNTKEKPVGPPLDLVVPFRQPPARPDKMNVIKVSNIMGIDPKPFDPKTYVEEDVFVTDESGTKKRIRLEDNIVRWRTVRNPDGTTSYESNARFVKWKDGSMQLLIGNEVLDISVHDAHHDQSHLFLRNGKGILQSQGRLLHKMRFMPSSLSSKSHRLLTALVDSQNKKTVKMQKWFETKDPEKVKQENERALGQNIRAHSILQRKREKVNRKYTQPARPRRQLSPGFLEDALDEDDEPEYGSRRVPGRRRFEDELEAEALAERRIINAKKSNMNRNVPRNTSYPPARPPRRQVDEYSESEREESEYETDGEDIEHSPIRGREDELDEDEYEEDAEEAPLSDEEMEAPKRKRESGGGGHRREELVSEEEEEDDDDSPPRKQQAVQHRRKAVVFDDSDED

SEQ ID NO: 92309 - protein, 86 aa, Setaria italica
  Transcript Sequence Number=SeqID_26335
LPVASLDDDGQLANPVYFLALRVPPLLFQSELKLNIISILRAQSSLLSHSPVPFTCSSLGELRRKSRGGEERQRQGRPHREQQVSY

SEQ ID NO: 92310 - protein, 150 aa, Setaria italica
  Transcript Sequence Number=SeqID_26336
  Gene Ontology: Mol. function=peroxidase activity; Cellular component =integral to membrane; Biological process=response to oxidative stress
  Homolog annotation: Hit_ID=Q8GY91; Match level="QueryCoverage=99%, HitCoverage=44%, E-value=2e-54, Identity=67%"; Hit description =Putative L-ascorbate peroxidase 6
  Pfam annotation: Domain name=peroxidase; Domain location=6-150; Score= 31.9; E_value=2.3e-12; Accession=PF00141.15; Description=Peroxidase
KSGGMNGSIIYEVDRPENTGVSRSIKILGKAKAGIDDIQKVSWADLIAVAGAEAVALCGGPEIPVRLGRLDSSTADPAGKLPEETLDAAALKTLFSTKGFSTQEMVALSGAHTIGGKGFGSPIVFDNSYFKVLLEKKPQTSSSGMEAMVG

SEQ ID NO: 92311 - protein, 138 aa, Setaria italica
  Transcript Sequence Number=SeqID_26337
  Gene Ontology: Mol. function=peroxidase activity; Cellular component =mitochondrial matrix; Biological process=response to oxidative stress
  Homolog annotation: Hit_ID=Q8GY91; Match level="QueryCoverage=85%, HitCoverage=35%, E-value=6e-41, Identity=66%"; Hit description =Putative L-ascorbate peroxidase 6
  Pfam annotation: Domain name=peroxidase; Domain location=4-113; Score= -78.6; E_value=0.00077; Accession=PF00141.15; Description=Peroxidase
GSCIQCLFRKFTSRISSTGKLPEETLDAAALKTLFSTKGFSTQEMVALSGAHTIGGKGFGSPIVFDNSYFKVLLEKKPQTSSSGMEAMVGLRTDWALTEDEECLRWIRIYAEDQARFFDDFRDTYIKLVDSGATWRAA

SEQ ID NO: 92312 - protein, 54 aa, Setaria italica
  Transcript Sequence Number=SeqID_26338
QNFLPASLPSLQPPTFSRIPGLIPDSELQTVGFTLDGNDTIDSFVKAQIVIYDQ

SEQ ID NO: 92313 - protein, 263 aa, Setaria italica
  misc_feature (194)..(194): Xaa can be any naturally occurring amino acid
  Transcript Sequence Number=SeqID_26339
  Gene Ontology: Mol. function=nucleic acid binding; Cellular component= chloroplast envelope; Biological process=response to DNA damage stimulus
  Homolog annotation: Hit_ID=Q7XNH0; Match level="QueryCoverage=100%, HitCoverage=23%, E-value=1e-127, Identity=81%"; Hit description =OSJNBa0096F01.3 protein
  Pfam annotation: Domain name=SNF2_N; Domain location=3-263; Score =76.0; E_value=1.3e-19; Accession=PF00176.15; Description=SNF2 family N-terminal domain
DTRVLRDHGTRAHTSRSSVRGGTLIICPMPLLGQWKDELEAHSTQGALSVFVHYGGDKTDNLMLMAEHDVVLTTYGVLSAAYKADRTSIFHRMDWYRIVLDEAHTIKSPKTKGAQAAFGLNSQCRWCLTGTPLQNNLEDLYSLFCFLHVEPWCSANWWQKLIQKPYENGDDRGLKIVRAILRPLMLRRTKETKXDKIGKPILVLPPAHIEVVECEQSEQERDFYEALFRRSKVQFDKFVAQGSVHNNYANILELLLRLRQCCN

SEQ ID NO: 92314 - protein, 80 aa, Setaria italica
  Transcript Sequence Number=SeqID_26340
  Gene Ontology: Mol. function=galactosylgalactosylxylosylprotein 3 -beta-glucuronosyltransferase activity; Cellular component=membrane
  Homolog annotation: Hit_ID=Q50HW3; Match level="QueryCoverage=100%, HitCoverage=23%, E-value=3e-38, Identity=87%"; Hit description =Glycosyltransferase
WDADKRAHQAWNYIRLLDTVREGFQETTFIEQLVEDESHMEGIPAGCSKIMNFNLRLEDKHLGYPKGWQMTENLDVIIPL

SEQ ID NO: 92315 - protein, 219 aa, Setaria italica
  Transcript Sequence Number=SeqID_26341
  Gene Ontology: Mol. function=phosphoribosylformylglycinamidine synthase activity; Cellular component=chloroplast; Biological process='de novo' IMP biosynthetic process
  Homolog annotation: Hit_ID=B9SDY9; Match level="QueryCoverage=99%, HitCoverage=15%, E-value=3e-98, Identity=77%"; Hit description =Phosphoribosylformylglycinamidine synthase, putative
  Pfam annotation: Domain name=AIRS; Domain location=93-219; Score= -0.7; E_value=0.074; Accession=PF00586.16; Description=AIR synthase related protein, N-terminal domain
KERQLGEEINVKMGLAFDKQDIDYYTHLFRDDIKRNPTTVELFDIAQSNSEHSRHWFFNGKLVIDGETMPNTLFQLVKRPLKANLNNSVIGFKDNSSAIKGFPVNQLRPTIPGSTSPLSIMMRELDILFTAETHNFPCAVAPYPGAETGAGGRIRDTHATGKGSFVVASTAGYCVGNLRIDNAYMPWEDPSFSYPVNLASPLRILVDASDGASDYGNKV

SEQ ID NO: 92316 - protein, 69 aa, Setaria italica
  Transcript Sequence Number=SeqID_26342
IPINFKTTNNNSVSTNFIHYECISAYTEYCISFHEQHQTWQCTCGMRALSIEQTQGDSSSNRDRNNKLA

SEQ ID NO: 92317 - protein, 77 aa, Setaria italica
  misc_feature (1)..(12): Xaa can be any naturally occurring amino acid
  Transcript Sequence Number=SeqID_26343
XXXXXXXXXXXXHTQLNLLLHTGMNPVKIVVIQIGSYKSGVFLPLGRVQANSLLFTPKSKLLLSTRYPPQSYPYSMN

SEQ ID NO: 92318 - protein, 89 aa, Setaria italica
  Transcript Sequence Number=SeqID_26344
SARSPCTADDDRPPPRHGLPAHPAPPARPPLLAGDTAPTSQAIVDLKKGEHLLKCGKRGKPKFCAFRLSSLLQVFLHGVFFTKSFLRLI

SEQ ID NO: 92319 - protein, 57 aa, Setaria italica
  Transcript Sequence Number=SeqID_26345
  Subcellular localization annotation: CTP_CleavageSite=27; ConfidenceScore=5.37e-01
MDPSGSASRQGRLLISPSLSTPTFSTRSASQSPAANPAPQHHHERRNSTSSPKPSFP

SEQ ID NO: 92320 - protein, 35 aa, Setaria italica
  Transcript Sequence Number=SeqID_26346
MGGSVGCLGGGSKSGQNQNGQAVAASSPRSGRVLS

SEQ ID NO: 92321 - protein, 114 aa, Setaria italica
  Transcript Sequence Number=SeqID_26347
ERWRQRRRLLLSRAAEHHAGLASSLTRSSSTVPPPSIATTAPPPSIAAATQPPPDPQLRGGHRAPTLQPPSFYTVGVEIFKRSSTSPCLRRRLSPESVAELLNCSSPCPYVTYC

SEQ ID NO: 92322 - protein, 131 aa, Setaria italica
  Transcript Sequence Number=SeqID_26348
IKLTSISCSSSLGVVELNSGDVGARRGAIEELGDGFRAQSATETRAGGGALEDLDAHGVEARRLQCRGSVTTAQLRIRRWLCGGGDRRRRCSGGYSGGGGGYGGGGGYGGSGGYGGGNQSYGSGGGGQDAF

SEQ ID NO: 92323 - protein, 204 aa, Setaria italica
  Transcript Sequence Number=SeqID_26349
  Gene Ontology: Mol. function=protein serine/threonine kinase activity; Biological process=protein amino acid phosphorylation
  Homolog annotation: Hit_ID=Q84QB8; Match level="QueryCoverage=89%, HitCoverage=46%, E-value=1e-93, Identity=88%"; Hit description =Protein kinase domain containing protein, expressed
  Pfam annotation: Domain name=Pkinase; Domain location=56-204; Score= -28.4; E_value=8.4e-07; Accession=PF00069.17; Description=Protein kinase domain
  Pfam annotation: Domain name=Pkinase_Tyr; Domain location=56-204; Score=-53.2; E_value=3.5e-10; Accession=PF07714.9; Description =Protein tyrosine kinase
  Pfam module annotation: Pfam domain module=Pkinase::Pkinase_Tyr; Domain location=56-204::56-204
  Subcellular localization annotation: CTP_CleavageSite=42; ConfidenceScore=5.65e-01
MGGSVGCLGGGSKSGQNQNGQAVAASSPRSGRVLSGAGNNVRVFSLNELKTATRNFHMMNCIGRGGFGAVYKGNLKDGTQIAIKKLAAESKQGISEFLTEINVISNVKHPNLVKLLGCCVEGNNRLLVYEYAENNSLANALLGPKSKCIPLDWQKRAAICIGTASGLAFLHEEAQPRIVHRDIKASNILLDKKLLPKIGDFGLA

SEQ ID NO: 92324 - protein, 312 aa, Setaria italica
  Transcript Sequence Number=SeqID_26350
  Gene Ontology: Mol. function=protein serine/threonine kinase activity; Biological process=protein amino acid phosphorylation
  Homolog annotation: Hit_ID=Q84QB8; Match level="QueryCoverage=95%, HitCoverage=76%, E-value=1e-140, Identity=84%"; Hit description =Protein kinase domain containing protein, expressed
  Pfam annotation: Domain name=Pkinase; Domain location=7-245; Score =52.3; E_value=1.8e-12; Accession=PF00069.17; Description=Protein kinase domain
  Pfam annotation: Domain name=Pkinase_Tyr; Domain location=2-245; Score=17.2; E_value=7.1e-15; Accession=PF07714.9; Description =Protein tyrosine kinase
  Pfam module annotation: Pfam domain module=Pkinase::Pkinase_Tyr; Domain location=7-245::2-245
FLSFYSFFLYFALCELLRSINVISNVKHPNLVKLLGCCVEGNNRLLVYEYAENNSLANALLGPKSKCIPLDWQKRAAICIGTASGLAFLHEEAQPRIVHRDIKASNILLDKKLLPKIGDFGLAKLFPDAITHISTRVAGTMGYLAPEYALLGQLTKKADIYSFGVLLLEVISGESSSKSTWGPDMHVLVEWTWKLREEGRLLEIVDPDLEKYPEEQMLRFIKVALLCTQATSQQRPSMKQVVNMLSNRIEIDLQNVVPPGVLKEPRQRTGGFGGLTLDTSSSQSTKCNPAESYSTQTNMNTGQFSTTEVSPR

SEQ ID NO: 92325 - protein, 168 aa, Setaria italica
  Transcript Sequence Number=SeqID_26351
  Gene Ontology: Mol. function=nucleic acid binding; Cellular component= mitochondrion; Biological process=translation
  Homolog annotation: Hit_ID=B6SIF0; Match level="QueryCoverage=72%, HitCoverage=77%, E-value=3e-50, Identity=78%"; Hit description =Glycine-rich RNA-binding protein 2
  Pfam annotation: Domain name=GRP; Domain location=91-164; Score= -17.3; E_value=0.005; Accession=PF07172.3; Description=Glycine rich protein family
  Pfam annotation: Domain name=RRM_1; Domain location=39-109; Score =115.6; E_value=1.6e-31; Accession=PF00076.14; Description=RNA recognition motif. (a.k.a. RRM, RBD, o
  Pfam module annotation: Pfam domain module=GRP::RRM_1; Domain location=91-164::39-109
  Subcellular localization annotation: CTP_CleavageSite=30; ConfidenceScore=5.57e-01
MAAFNKLGSLLRHSALTSGAPASSAPALFNAARLMSTKLFVGGLSWGTDDQTLRQAFSTFGEVTEARIITDRETGRSRGFGFVNFSNSDEAKEAVSSMDGQELDGRSVRVNFANERPPAGNRGGGGYGGGGYSGGGGGYGGGGGYGGSGGYGGGNQSYGSGGGGQDAF

SEQ ID NO: 92326 - protein, 45 aa, Setaria italica
  Transcript Sequence Number=SeqID_26352
  Gene Ontology: Mol. function=glutamate dehydrogenase activity; Cellular component=mitochondrion; Biological process=amino acid metabolic process
  Homolog annotation: Hit_ID=Q94F14; Match level="QueryCoverage=100%, HitCoverage=19%, E-value=5e-18, Identity=93%"; Hit description =Glutamate dehydrogenase 2
LGTNAQTMAWMLDEYSKFHGHSPAVVTGKPIDLGGSLGRDAATGR

SEQ ID NO: 92327 - protein, 778 aa, Setaria italica
  Transcript Sequence Number=SeqID_26353
KLNDILMAYSSGGVRRGSVEIGKQLLRGAMDLEESLSMLMMLQDASDYMETSGEGKVLLLEGGKENWKSSTPHSTSSASARLVEIVDDDSETEQADNARSPSDAFMQIVPHSLSQNYRSNQSSPLQFTAVTNNSKSNATSGEKDDSKVRMPSLIAKLMGLENLPSAKAVAERKGTERFVKPEAVPRRATAKNAMVGTLPIRIIASERVPSKGQSKNFQTREWNISLTKSEEPVLSNRFSHLMSDKQTRQTMRQVLSKQEGTDRRASLSQVVDDKIVHQDMKLTEDSNQQKTAISAGKKMNFLQRFRKNAKNKPVTEEKDIVQENKQNLGKKQTISIKQRDSEVKPRRTREKFNKENLATPESKAQGKNGKTAKTDKMRRQPQSKLTDKHIMDIMEKKVQSYSRTTQSETASQNYRRTKSETASQNLEHKRPLRSEPKRTKEKFEYIAMTELKNAEETKVDDTGAPKPLDNTPSDDGVFKQSTVEMKDSNSTSGISADQSEKQFTEEINDPITTVEQTTADSIAEENDARVDHTSSETTQILETISEGELQEQQLQQMTEVHDQSRNGLDHIMKPDNLTDSKNHKMIVVSCDSFTENQLLLTEMLLKDPYLLETAKAITGFHAPVSAIHVNTGKWLDKGNEVLSDVGREVIRRKGKRTEAMVDVSTTRTANLKLQTLSDLIRELDGDIQSLNIPRKLHQQSDNSTAENLKMVLLSDIEHTHSDANSVWDFGWNRLRDLPIEKNEVVKDLEKNILGGIITDVARELIDVSLRHGCCACEA

SEQ ID NO: 92328 - protein, 230 aa, Setaria italica
  Transcript Sequence Number=SeqID_26354
  Gene Ontology: Mol. function=hydrolase activity, hydrolyzing O -glycosyl compounds; Cellular component=cellular_component; Biological process=carbohydrate metabolic process
  Homolog annotation: Hit_ID=B6SWK9; Match level="QueryCoverage=98%, HitCoverage=34%, E-value=5e-93, Identity=76%"; Hit description=Auxin- induced beta-glucosidase
  Pfam annotation: Domain name=Glyco_hydro_3_C; Domain location=1-165; Score=148.4; E_value=2.2e-41; Accession=PF01915.14; Description =Glycosyl hydrolase family 3 C terminal domain
RGTRQPIAAAVDAARRSDATVIVAGLDQKVEAEGLDRSTLLLPGRQAELISAVAKESKGPVVLVLMSGGPIDIAFAQNDPRIAAILWVGYPGQAGGQAIADVIFGHHNPGGKLPVTWYPEDYLRKAPMTNMAMRANPGSGYPGRTYRFYTGPTILPFGHGLSYTQFTHTLAHAPEKLTVQLTGGHASAAAASSSFPNATRSAGAVRVAHARCEGLTVPVHVDVRNAGDRD

SEQ ID NO: 92329 - protein, 638 aa, Setaria italica
  Transcript Sequence Number=SeqID_26355
  Gene Ontology: Mol. function=protein serine/threonine kinase activity; Biological process=protein amino acid phosphorylation
  Homolog annotation: Hit_ID=Q5N7Q8; Match level="QueryCoverage=98%, HitCoverage=94%, E-value=0.0, Identity=57%"; Hit description=Wall -associated kinase 4-like
  Pfam annotation: Domain name=Pkinase; Domain location=323-596; Score =139.2; E_value=1.3e-38; Accession=PF00069.17; Description=Protein kinase domain
  Pfam annotation: Domain name=Pkinase_Tyr; Domain location=323-596; Score=117.6; E_value=4.2e-32; Accession=PF07714.9; Description =Protein tyrosine kinase
  Pfam module annotation: Pfam domain module=Pkinase::Pkinase_Tyr; Domain location=323-596::323-596
RTTLPPACSEVVTCAGQVVRYPFSLNSSESDCGYPGLDLFCEDNATLILPVKSHRYRVVGIDYQAHTVAVSDDDISKYANTGGCLRLHVNLTIDYTNSWLQLTQSDSNVTFLYNCKKSISWFPAVELRGCQQQDGKKSYMLPDGGITGTEAYEHECEEVVVAPVLGLHKEEILPLTNGSFEVVKAGFELMYNAHSQQCDGCERSGGWCGYQRNDTHGGMNFTCFCDNGPAAARCRSKKTPLKVIAGASAAAAGLAVLGAGAFLFIMRKRRKNNVINSSSKLLKYSGSGGTPRSRVGDMESGSIDDPATHLFTYEELEEATNSFDENRELGDGGFGTVYKGYLKDGRVVAVKRLYNSYRRLEQFHNEAAILSGLRHPNLVMFYGCTSSQSRELLLVYEFVANGTVADHLHGPRAPERALSWPLRLNVAIESAAALAYLHAIEPPVVHRDVKTTNILLDADFHVKVADFGLSRLFPLDVTHVSTAPQGTPGYVDPEYHQCYQLTDKSDVYSFGVVLVELISSKPAVDITRHRNEINLAGMAISKIQKCQLEQLVDLDLGYESDPATKKMMTMVAELAFRCLQQNGEMRPPMKEVLEVLRSIQGECPMEKDGDKHKDGPFSPTTVHAPWDSRATTPNTSRD

SEQ ID NO: 92330 - protein, 227 aa, Setaria italica
  Transcript Sequence Number=SeqID_26356
  Gene Ontology: Mol. function=hydrolase activity; Biological process =metabolic process
  Homolog annotation: Hit_ID=B6TIA5; Match level="QueryCoverage=77%, HitCoverage=54%, E-value=2e-48, Identity=58%"; Hit description =Gibberellin receptor GID1L2
  Pfam annotation: Domain name=Abhydrolase_3; Domain location=123-227; Score=-21.9; E_value=4.3e-06; Accession=PF07859.5; Description =alphabeta hydrolase fold
  Subcellular localization annotation: CTP_CleavageSite=46; ConfidenceScore=5.00e-01
MSLAARLRHYTNRLVRALHPSRIPPPLQSAARPASHSHRRRERAVMAAAADPDTEVQADFFPMVRQYRSGRVERFMNMPPLPAGTDPATGVASKDVVLDPATGVWARLFLPPGVPKGKKLPVVVYYHGGAYVVGSAADPFTHSYLNALVAEAGVLAVAPEYRLAPEHPLPAAYDDSWEALRWVASHAAGGTGPEPWLAEHGDFSRVFLAGASAGGTIAHVVAARAGG

SEQ ID NO: 92331 - protein, 149 aa, Setaria italica
  Transcript Sequence Number=SeqID_26357
  Subcellular localization annotation: CTP_CleavageSite=26; ConfidenceScore=5.10e-01
SSRSSPSPPSSALSSLLVAKKSHQLAAMDRSKSYAGGRMQIEPYYGGGARPDFRSYSYSAGGGGGMGMSSYSYQYEYGGGAAGAAADGDLKRSKSSKRRWLALGDPDMERKRRVAAYKAYAVEGKVKGSFRKSFKWIKDRYLHLVYGWS

SEQ ID NO: 92332 - protein, 84 aa, Setaria italica
  Transcript Sequence Number=SeqID_26358
LREDLRLAPRVPDVLVLGSGLWHMLHVTDAASYGDALASVAGAAKSLRSPLPVPPPHMFWLGLPHLVNHMLNTDAKRAHMNGTM

SEQ ID NO: 92333 - protein, 361 aa, Setaria italica
  Transcript Sequence Number=SeqID_26359
  Gene Ontology: Mol. function=transferase activity
  Homolog annotation: Hit_ID=B6T7B6; Match level="QueryCoverage=89%, HitCoverage=99%, E-value=1e-168, Identity=87%"; Hit description =Glutathione S-transferase, C-terminal-like
  Pfam annotation: Domain name=GST_C; Domain location=219-314; Score =28.2; E_value=3.5e-05; Accession=PF00043.17; Description=Glutathione S-transferase, C-terminal domain
  Subcellular localization annotation: CTP_CleavageSite=35; ConfidenceScore=5.53e-01
MPTLATPSSLLLTRRLLAVRTFSTSSAGYSTTTTVEMARSALDEVTDTGAFDRSPSTFRSSVSSDASARFTPVPGRYHLYVSYACPWASRCLAFLKLKGLDHAIGVTAVKPIFERTKETDDHLGWVFPTTADEEPGAEPDPFNGAKSVRELYEIASPNYAGKPTVPVLWDKQLKTVVNNESSEIIRMLNTEFNNIAGNPGLDLYPVHLRASINEINELVYDAINNGVYKCGFAKQQGPYDEAVTRLYEALDKCEEILGKQPYICGNQLTEADIRLFVTLIRFDEVYAVHFKCNKKLLREYPNLFNYTKDIYQIPGIRNTVNMEHIRKHYYGSHPSINPYGIIPAGPKIDYNAPHDRERFSS

SEQ ID NO: 92334 - protein, 282 aa, Setaria italica
  misc_feature (273)..(273): Xaa can be any naturally occurring amino acid
  Transcript Sequence Number=SeqID_26360
  Gene Ontology: Mol. function=transferase activity, transferring glycosyl groups; Biological process=metabolic process
  Homolog annotation: Hit_ID=B6U7W5; Match level="QueryCoverage=97%, HitCoverage=56%, E-value=1e-123, Identity=80%"; Hit description =Cytokinin-O-glucosyltransferase 2
PLCVSQPPVTCLVVDAVMSFGYDAAREIGVPIAALWTASACGFMGYRNYRGLVDRGLVPFGDAADLADVPGGLLATVVDDARGMCGGVQLRDFPSFIRTVDRDDILLNFLMRESERLSLPDAVMVNTFEDLEGATLDAMRAILPPVYPVGPLVLRERLEIPAGTPLAGLGSNLWKEQDGLLEWLAGRPSCSIVYVNFGSITVMTNSQLLEFAWGLAASGYPFLWNIRPDLVKGDAAVLPPEFAAAVEGRALLTTWCSQEAVLQHEAVGVFLTXTSGWNSTLE

SEQ ID NO: 92335 - protein, 72 aa, Setaria italica
  Transcript Sequence Number=SeqID_26361
KQRGLRGYVAYTYHAQDMLPIHIMPNRSFCSSICGSINSLRAWPSCLTTTLLETQMANNLGRMRRCTLVLLS

SEQ ID NO: 92336 - protein, 171 aa, Setaria italica
  Transcript Sequence Number=SeqID_26362
  Homolog annotation: Hit_ID=B5XEV0; Match level="QueryCoverage=88%, HitCoverage=88%, E-value=6e-14, Identity=36%"; Hit description =Troponin C-akin-1 protein
  Pfam annotation: Domain name=AIG2; Domain location=9-120; Score=94.2; E_value=4.6e-25; Accession=PF06094.4; Description=AIG2-like family
QQPAKRTLVFTYGTLKRGFSNHPLLQELSQGGDASFVGAAVTAPRLPLVCGPYRVPFLINLPGEGGHRVAGELYAVTPRGLARLDELEGVSRGHYERLPIAVDLAEGGCARVDAVAYYAHRDYAAELWRRSGEKGYPEYSHAVAHGYVRRKDRPQGQTFLEQIRIFVSSQS

SEQ ID NO: 92337 - protein, 70 aa, Setaria italica
  Transcript Sequence Number=SeqID_26363
  Gene Ontology: Mol. function=sequence-specific DNA binding; Cellular component=intracellular; Biological process=DNA repair
  Homolog annotation: Hit_ID=B6UFK1; Match level="QueryCoverage=100%, HitCoverage=18%, E-value=8e-36, Identity=94%"; Hit description =Mating-type switching protein swi10
  Pfam annotation: Domain name=Rad10; Domain location=1-51; Score=74.4; E_value=4.2e-19; Accession=PF03834.6; Description=DNA repair protein rad10
KHIRNARWTFADVVPDYVLGQSSCALYLRYHLLHPDYLYYRIRELQKNFRLRVILCHVDVEDVVKPLHEI

SEQ ID NO: 92338 - protein, 66 aa, Setaria italica
  Transcript Sequence Number=SeqID_26364
IWSLLQFTTIERSVLRLMMRSNIYANIYMHGTTSYSSSCLLLVACAHRPLTCPEIKWLDVLIMFHY

SEQ ID NO: 92339 - protein, 99 aa, Setaria italica
  misc_feature (44)..(44): Xaa can be any naturally occurring amino acid
  Transcript Sequence Number=SeqID_26365
MARRGGEITAAFPGGGAGIAGASTGTPTPAASPYQVAVEIEEQXYSPFGNIEVPDSRGCCSGFTGSVTKVFFILHLLAFIALTIFLGVQASSHQNPTYK

SEQ ID NO: 92340 - protein, 83 aa, Setaria italica
  Transcript Sequence Number=SeqID_26366
RTNDLPEDTANLVEFTLSIKDQETGEHRNKGTGRCPFAKNARTWGWSKFISLEDFKDSANGYLVKTKCCIVAEVAIVGSSKME

SEQ ID NO: 92341 - protein, 284 aa, Setaria italica
  Transcript Sequence Number=SeqID_26367
  Gene Ontology: Mol. function=protein binding
  Homolog annotation: Hit_ID=Q7XDC5; Match level="QueryCoverage=61%, HitCoverage=26%, E-value=3e-16, Identity=30%"; Hit description=MATH domain containing protein
  Pfam annotation: Domain name=MATH; Domain location=39-162; Score =19.5; E_value=0.0013; Accession=PF00917.18; Description=MATH domain
  Subcellular localization annotation: CTP_CleavageSite=22; ConfidenceScore=5.06e-01
MGNSSSRGRSKLGQGHGSKVAPSSPAGDQSQPMTFKWNIDGFSSLLDKGAGWTYSRVFEVMGHNWYLKLNPRDKDNKEYVSLRLELDNSSVKSDTIVDASFKLLIYDQSFGKHREHEVSHSFQTASTSSGISCMISLNKLKKRSSKFLLNNCCVFGVEFVKVTTLKVNTTSETLFVQKTSIFNEAKTYTWDIDDFFALKNPGYSPEFEVGGYKWHITMYPSRDGNHLSLYLKLKRTNDLPEDTANLVEFTLSIKDQETGEHRNKGTGVCLAQRILLVLRNSRFQ

SEQ ID NO: 92342 - protein, 145 aa, Setaria italica
  Transcript Sequence Number=SeqID_26368
  Gene Ontology: Cellular component=cell wall
  Homolog annotation: Hit_ID=B6STQ1; Match level="QueryCoverage=84%, HitCoverage=37%, E-value=3e-29, Identity=60%"; Hit description=Phi-1- like phosphate-induced protein
MVCRVLVAAVVLMSLAQLSVGSRRLMELYIPPASDQLTYHHGTVLSGDIPVSVLWYGRFTPAQKSIVSDFLFSLTTAPGAATPSVGQWWGTIDQLYLSSAATNGAGPATPTRVLLDAQVSDEARSLGNSLTLAQIEELAARAGGK

SEQ ID NO: 92343 - protein, 125 aa, Setaria italica
  Transcript Sequence Number=SeqID_26369
TPIKQKLHQVACCLVSLLTSENELAAGHSILVGAMASLLRWKDKYVKERLQGLSAGLSCSSAAATSVIVSSGRAIDRHSPRLRDPDRRFPPPVPKPPSSPYHYDDGKDKRKKKAAADGGVSSASS

SEQ ID NO: 92344 - protein, 108 aa, Setaria italica
  Transcript Sequence Number=SeqID_26370
ASLHTPLSDGLVHPPSSSSVLNELNPSQTADSTFLITIYCHSLLQFQQHSFNKIVLYTHTRIHPIIQVRGQDQAKVQLTYVPAGSSCRIEQKPRIRTAACQPHLLRPP

SEQ ID NO: 92345 - protein, 88 aa, Setaria italica
  Transcript Sequence Number=SeqID_26371
  Gene Ontology: Mol. function=threonine-type endopeptidase activity; Cellular component=proteasome core complex; Biological process =ubiquitin-dependent protein catabolic process
  Homolog annotation: Hit_ID=O23708; Match level="QueryCoverage=100%, HitCoverage=37%, E-value=3e-38, Identity=86%"; Hit description =Proteasome subunit alpha type-2-A
QVDPSGSYFSWKASAMGKNVSNAKTFLEKRYTEDMELDDAIHTAILTLKEGYEGQISSNNIEIGIIRSDREFRVLSPAEIKDFLEEVE

SEQ ID NO: 92346 - protein, 155 aa, Setaria italica
  misc_feature (63)..(63): Xaa can be any naturally occurring amino acid
  Transcript Sequence Number=SeqID_26372
  Gene Ontology: Mol. function=threonine-type endopeptidase activity; Cellular component=proteasome core complex; Biological process =ubiquitin-dependent protein catabolic process
  Homolog annotation: Hit_ID=A7P2U5; Match level="QueryCoverage=100%, HitCoverage=52%, E-value=2e-53, Identity=71%"; Hit description =Proteasome subunit alpha type
  Pfam annotation: Domain name=Proteasome; Domain location=4-155; Score= -17.1; E_value=0.0018; Accession=PF00227.18; Description=Proteasome A- type and B-type
LTAVGSGQTSLGIKAANGVVIATEKKLPSILVDETSVSITSSCFFYSLRLHSVAPHTHPQKYXTITCLKKLQVQKIQALTPNIGVVYSGMGPDFRVLVRKSRKQAQQYYRLYKEHIPVTQLVRETAAVMQEFTQSGGVRPFGVSLLIAGYDDNGP

SEQ ID NO: 92347 - protein, 113 aa, Setaria italica
  Transcript Sequence Number=SeqID_26373
  Gene Ontology: Mol. function=threonine-type endopeptidase activity; Cellular component=proteasome core complex; Biological process =ubiquitin-dependent protein catabolic process
  Homolog annotation: Hit_ID=O23708; Match level="QueryCoverage=88%, HitCoverage=42%, E-value=1e-46, Identity=92%"; Hit description =Proteasome subunit alpha type-2-A
  Pfam annotation: Domain name=Proteasome_A_N; Domain location=6-28; Score=30.9; E_value=5.1e-06; Accession=PF10584.1; Description =Proteasome subunit A N-terminal signa
MGDSQYSFSLTTFSPSGKLVQIEHALTAVGSGQTSLGIKAANGVVIATEKKLPSILVDETSVQKIQALTPNIGVVYSGMGPDFRVLLRKSRKQAQQVINLDKEVKIKKEKNQK

SEQ ID NO: 92348 - protein, 235 aa, Setaria italica
  Transcript Sequence Number=SeqID_26374
  Gene Ontology: Mol. function=threonine-type endopeptidase activity; Cellular component=proteasome core complex; Biological process =ubiquitin-dependent protein catabolic process
  Homolog annotation: Hit_ID=O23708; Match level="QueryCoverage=100%, HitCoverage=100%, E-value=1e-121, Identity=90%"; Hit description =Proteasome subunit alpha type-2-A
  Pfam annotation: Domain name=Proteasome; Domain location=29-213; Score=257.4; E_value=3.5e-74; Accession=PF00227.18; Description =Proteasome A-type and B-type
  Pfam annotation: Domain name=Proteasome_A_N; Domain location=6-28; Score=30.9; E_value=5.1e-06; Accession=PF10584.1; Description =Proteasome subunit A N-terminal signa
  Pfam module annotation: Pfam domain module=Proteasome::Proteasome_A _N; Domain location=29-213::6-28
MGDSQYSFSLTTFSPSGKLVQIEHALTAVGSGQTSLGIKAANGVVIATEKKLPSILVDETSVQKIQALTPNIGVVYSGMGPDFRVLVRKSRKQAQQYYRLYKEHIPVTQLVRETAAVMQEFTQSGGVRPFGVSLLIAGYDDNGPQLYQVDPSGSYFSWKASAMGKNVSNAKTFLEKRYTEDMELDDAIHTAILTLKEGYEGQISSNNIEIGIIRADREFKVLSPSEIKDFLEEVE

SEQ ID NO: 92349 - protein, 65 aa, Setaria italica
  Transcript Sequence Number=SeqID_26375
  Subcellular localization annotation: CTP_CleavageSite=37; ConfidenceScore=5.03e-01
REASRDRAHGCPYNVCIAREARATVSNGAVKADPLTRSSTTSRHRRRRRRSGRPRRRLSYYGRRA

SEQ ID NO: 92350 - protein, 69 aa, Setaria italica
  Transcript Sequence Number=SeqID_26376
AKARGAPVALVVRSGTEILFHYIMDCIHAAAKMCLLLQSAITDGSAEKAEGEKKARKEKAPAVTQSLTR

SEQ ID NO: 92351 - protein, 247 aa, Setaria italica
  misc_feature (145)..(145): Xaa can be any naturally occurring amino acid
  Transcript Sequence Number=SeqID_26377
  Gene Ontology: Mol. function=electron carrier activity; Cellular component=nucleus
  Homolog annotation: Hit_ID=A3WEC9; Match level="QueryCoverage=99%, HitCoverage=80%, E-value=2e-57, Identity=45%"; Hit description =Putative SyrP-like protein
FGYEELPYVGGAAPRTNVVGRVFTANESPPDQKIPFHHEMAQVPTFPSKLFFFCEVEPKSGGETPIVLSHYVYKRMKEKFPEFVEKLEKDGLIYTRVLGEGDDPSSPIGRGWQSTFLTKDKAVAEERAAQLGMKLEWTDDGVKTXIMGPIPAVKWDESRGRKIWFNSMVAAYTGWKDARNDPVKAVTFGDGSPLPADVIAECGKILEEECVAVPWQHGDILLIDNWAVLHSRRSFEPPRRVLASLCK

SEQ ID NO: 92352 - protein, 115 aa, Setaria italica
  Transcript Sequence Number=SeqID_26378
LVLVVHAYVSSDWIVLCTVTVQIGCSLHIEVIYLLAGIIVIRGSLPTSVISVPRISLGGHLSSWHLANKLLADLEGTPRLQLSYQRMFMIFFVRKISSEKKRKNKGEQIDKESWA

SEQ ID NO: 92353 - protein, 57 aa, Setaria italica
  Transcript Sequence Number=SeqID_26379
  Gene Ontology: Mol. function=hydrolase activity; Biological process =lipid catabolic process
  Homolog annotation: Hit_ID=Q9XE77; Match level="QueryCoverage=100%, HitCoverage=13%, E-value=5e-15, Identity=70%"; Hit description =Patatin-like protein
LTHDVRVADTVTNVVVPAFDVKFLQPVIFTTYEAKADPLKNAHLSDICISTSAAPTY

SEQ ID NO: 92354 - protein, 79 aa, Setaria italica
  Transcript Sequence Number=SeqID_26380
  Subcellular localization annotation: CTP_CleavageSite=36; ConfidenceScore=5.40e-01
ACPNSSFFSMRTALFGSSNCCPSTPFWMLSLKQCCSCGNRAGRASGMYLDLPPVVHWDLIFCLGFATGTFYLIYLVQPR

SEQ ID NO: 92355 - protein, 137 aa, Setaria italica
  misc_feature (82)..(82): Xaa can be any naturally occurring amino acid
  Transcript Sequence Number=SeqID_26381
  Gene Ontology: Mol. function=cysteine-type peptidase activity; Biological process=proteolysis
  Homolog annotation: Hit_ID=A7U1X2; Match level="QueryCoverage=83%, HitCoverage=8%, E-value=2e-15, Identity=46%"; Hit description =Disease resistance protein
EDEVEEGLLSFPSHLSISLLKLEICNCKKLFLHPEDGGIGHLTSLQSLQIQGCDELLSWWSMEEAIVHRPFPTFLRKLIIRXVSSLKAMYLLSNLRCLTHLEIVDCNNLNIDGFDPLLAQCLTKTLCLSTITIDSPQ

SEQ ID NO: 92356 - protein, 59 aa, Setaria italica
  misc_feature (45)..(45): Xaa can be any naturally occurring amino acid
  Transcript Sequence Number=SeqID_26382
  Gene Ontology: Mol. function=hydrogen ion transporting ATP synthase activity, rotational mechanism; Cellular component=proton -transporting ATP synthase complex, catalytic core F(1); Biological process=ATP synthesis coupled proton transport
  Homolog annotation: Hit_ID=B9FXH0; Match level="QueryCoverage=84%, HitCoverage=14%, E-value=2e-17, Identity=90%"; Hit description=ATP synthase gamma chain
MACESFTVGTPLTSEAVDKVELLYSKFVSLVRSDPIIQTLLPMSXPKGEICDVNGVCVD

SEQ ID NO: 92357 - protein, 73 aa, Setaria italica
  Transcript Sequence Number=SeqID_26383
  Gene Ontology: Mol. function=hydrogen ion transporting ATP synthase activity, rotational mechanism; Cellular component=proton -transporting ATP synthase complex, catalytic core F(1); Biological process=ATP synthesis coupled proton transport
  Homolog annotation: Hit_ID=P0C1M0; Match level="QueryCoverage=72%, HitCoverage=14%, E-value=4e-20, Identity=92%"; Hit description =Inceptin
SPSRWARRSPPAPAPAGCRGGVPTVKDSQAICDLVYSLFVSEAVDKVELLYSKFVSLVRSDPIIQTLLPISPL

SEQ ID NO: 92358 - protein, 373 aa, Setaria italica
  misc_feature (15)..(15): Xaa can be any naturally occurring amino acid
  misc_feature (129)..(129): Xaa can be any naturally occurring amino acid
  misc_feature (142)..(142): Xaa can be any naturally occurring amino acid
  misc_feature (164)..(164): Xaa can be any naturally occurring amino acid
  misc_feature (181)..(181): Xaa can be any naturally occurring amino acid
  misc_feature (237)..(237): Xaa can be any naturally occurring amino acid
  misc_feature (268)..(268): Xaa can be any naturally occurring amino acid
  misc_feature (291)..(291): Xaa can be any naturally occurring amino acid
  misc_feature (314)..(314): Xaa can be any naturally occurring amino acid
  Transcript Sequence Number=SeqID_26384
  Gene Ontology: Mol. function=hydrogen ion transporting ATP synthase activity, rotational mechanism; Cellular component=proton -transporting ATP synthase complex, catalytic core F(1); Biological process=ATP synthesis coupled proton transport
  Homolog annotation: Hit_ID=P0C1M0; Match level="QueryCoverage=90%, HitCoverage=91%, E-value=1e-170, Identity=93%"; Hit description =Inceptin
  Pfam annotation: Domain name=ATP-synt; Domain location=41-369; Score =502.0; E_value=7.8e-148; Accession=PF00231.11; Description=ATP synthase
  Subcellular localization annotation: CTP_CleavageSite=40; ConfidenceScore=5.82e-01
MSCSHLSTAWSSSAXLASSASSTRRRSSAPRSGGSGLVVRCSLRELRSRIDSVRNTQKITEAMKLVAAAKVRRAQEAVVSSRPFSEALVEVLYNMNQEIQTEDIDLPLTRTRPVKKVALVVLTGERGLXCGSFNNNVLKKAXTRIDELKQLGLEYTVISVGKKXGNAYFQRRPLHSRLERXLEVSGVPTVKDSQAICDLVYSLFVSEAVDKVELLYSKFVSLVRSDPIIQTLLPMSXPKGEICDVNGRSSVDATEDELFRLTTKEGKXLTVEREKVKIETQPFSPVVQFEXDPVQILDALLPLYLNSQILRALXQESLASELAARMSAMSSATDNAIELRKNLSIAYNRQRQAKITGEILEIVAGADALAGSA

SEQ ID NO: 92359 - protein, 72 aa, Setaria italica
  Transcript Sequence Number=SeqID_26385
  Gene Ontology: Mol. function=electron carrier activity; Cellular component=chloroplast; Biological process=thiamin biosynthetic process
  Homolog annotation: Hit_ID=B9SA39; Match level="QueryCoverage=87%, HitCoverage=17%, E-value=2e-29, Identity=95%"; Hit description =Electron transfer flavoprotein-ubiquinone oxidoreductase, putative
  Pfam annotation: Domain name=Thi4; Domain location=1-70; Score= -108.6; E_value=0.0006; Accession=PF01946.9; Description=Thi4 family
VKLFNAVAVEDLIVKQGRVGGVVTNWALVSMNHDTQSCMDPNVMEAKIVVSSCGHDGPFGATGGVHVEGLHP

SEQ ID NO: 92360 - protein, 208 aa, Setaria italica
  Transcript Sequence Number=SeqID_26386
  Gene Ontology: Mol. function=electron carrier activity; Cellular component=chloroplast; Biological process=thiamin biosynthetic process
  Homolog annotation: Hit_ID=Q41738; Match level="QueryCoverage=100%, HitCoverage=57%, E-value=2e-94, Identity=87%"; Hit description =Thiazole biosynthetic enzyme 1-1, chloroplastic
  Pfam annotation: Domain name=Thi4; Domain location=1-157; Score =214.2; E_value=3.4e-61; Accession=PF01946.9; Description=Thi4 family
ELGVAYDEAEDYVVVSHAALFTSTVMSRLPGPRPNVKLFNAVAAEDLIVKQGRVAGVVTNWALVAMNHGTQSCMDPNVMEAKVVVSSCGHDGPFGATGVKRLQDIGMISAVPGMKALDMNTAEDAIVRLTREVVPGMIVTGMKVAEIDGAPRMGPTFGAMMISGQKAAHLALKALGRPNAIDGTTQTASQAWREELVMASKDDEVVDA

SEQ ID NO: 92361 - protein, 223 aa, Setaria italica
  misc_feature (92)..(92): Xaa can be any naturally occurring amino acid
  Transcript Sequence Number=SeqID_26387
  Gene Ontology: Mol. function=electron carrier activity; Cellular component=chloroplast; Biological process=thiamin biosynthetic process
  Homolog annotation: Hit_ID=Q41738; Match level="QueryCoverage=78%, HitCoverage=48%, E-value=5e-78, Identity=90%"; Hit description =Thiazole biosynthetic enzyme 1-1, chloroplastic
  Pfam annotation: Domain name=Thi4; Domain location=13-172; Score =143.5; E_value=6.4e-40; Accession=PF01946.9; Description=Thi4 family
FFFFFFSSISLLFIRCCQKGPTEWWPHETEHTVARHGSWQCYETGDARRVELFNAVAVEDLIVKQGRVGGVVTNWALVSMNHDTQSCMDPNXVMEAKIVVSSCGHDGPFGATGVKRLQDIGMISAVPGMKALDMNTAEDEIVRLTREVVPGMIVTGMEVAEIDGAPRMGPTFGAMMISGQKAAHLALKALGRPNAIDGTAQTVPQVWREEFVIASKDDEVVDA

SEQ ID NO: 92362 - protein, 355 aa, Setaria italica
  misc_feature (121)..(121): Xaa can be any naturally occurring amino acid
  misc_feature (202)..(202): Xaa can be any naturally occurring amino acid
  misc_feature (239)..(239): Xaa can be any naturally occurring amino acid
  misc_feature (296)..(296): Xaa can be any naturally occurring amino acid
  Transcript Sequence Number=SeqID_26388
  Gene Ontology: Mol. function=electron carrier activity; Cellular component=chloroplast; Biological process=thiamin biosynthetic process
  Homolog annotation: Hit_ID=Q41738; Match level="QueryCoverage=100%, HitCoverage=100%, E-value=1e-153, Identity=81%"; Hit description =Thiazole biosynthetic enzyme 1-1, chloroplastic
  Pfam annotation: Domain name=DAO; Domain location=85-317; Score= -14.2; E_value=9.6e-05; Accession=PF01266.16; Description=FAD dependent oxidoreductase
  Pfam annotation: Domain name=Pyr_redox_2; Domain location=85-343; Score=-64.0; E_value=0.058; Accession=PF07992.6; Description =Pyridine nucleotide-disulphide oxidore
  Pfam annotation: Domain name=Thi4; Domain location=58-304; Score =506.7; E_value=3e-149; Accession=PF01946.9; Description=Thi4 family
  Pfam module annotation: Pfam domain module=DAO::Pyr_redox_2::Thi4; Domain location=85-317::85-343::58-304
  Subcellular localization annotation: CTP_CleavageSite=30; ConfidenceScore=5.76e-01
MATTASTLLKSSFAGARLPSAPRAPSSVVVAAPRAGPICASISSTPSNPPYDLTSFRFSPIKESIVSREMTRRYMTDMITYADTDVVIVGAGSAGLSCAYELSKDPSISIAIVEQSVSPGXGGAWLGGQLFSAMVVRKPAHLFLDELGIAYDEAEDYVVIKHAALFTSTVMSRLLARPNVKLFNAVAVEDLIVKQGRVGGVXVTNWALVSMNHDTQSCMDPNVMEAKIVVSSCGHDGPXSGATGVKRLQDIGMISAVPGMKALDMNTAEDEIVRLTREVVPGMIVTGMEVAEIDGXPREWAPTFGAMMISGQKAAHLALKALGRPNAIDGTAQTVPQVWREEFVIASKDDEVVDA

SEQ ID NO: 92363 - protein, 89 aa, Setaria italica
  Transcript Sequence Number=SeqID_26389
  Gene Ontology: Mol. function=glutathione transferase activity; Cellular component=cytoplasm; Biological process=aromatic amino acid family metabolic process
  Homolog annotation: Hit_ID=B6U5S1; Match level="QueryCoverage=100%, HitCoverage=41%, E-value=2e-38, Identity=86%"; Hit description =Glutathione S-transferase
LPQDLKKKAINLQIANIVCSSIQPLQCYAVIGLVDGTLGSDESLQIVRRYIDKGFRAIEKLLEGCDSKYATGDEIQLADVFLHRRSIAG

SEQ ID NO: 92364 - protein, 146 aa, Setaria italica
  Transcript Sequence Number=SeqID_26390
  Gene Ontology: Mol. function=glutathione transferase activity; Cellular component=cytoplasm; Biological process=aromatic amino acid family metabolic process
  Homolog annotation: Hit_ID=B6U5S1; Match level="QueryCoverage=99%, HitCoverage=68%, E-value=4e-73, Identity=91%"; Hit description =Glutathione S-transferase
  Pfam annotation: Domain name=GST_C; Domain location=38-130; Score =46.0; E_value=1.4e-10; Accession=PF00043.17; Description=Glutathione S-transferase, C-terminal domain
LAIILYLEDKYPQHPLLPQDLKKKAINLQIANIVCSSIQPLQCYAVIGLVDGTLGSDESLQIVRRYIDKGFRAIEKLLEGCDSKYATGDEIQLADVFLAPQIHAGVTRFQIDMSKYPLLERFYKAYMEIPAVQVAVPEKQPDAPSP

SEQ ID NO: 92365 - protein, 60 aa, Setaria italica
  Transcript Sequence Number=SeqID_26391
  Gene Ontology: Mol. function=threonine-type endopeptidase activity; Cellular component=proteasome core complex; Biological process =ubiquitin-dependent protein catabolic process
  Homolog annotation: Hit_ID=B6SMN8; Match level="QueryCoverage=100%, HitCoverage=27%, E-value=1e-25, Identity=90%"; Hit description =Proteasome subunit beta type
MARFDPYENNGGTCVAVAGADYCVVADDTRLSVGYSILSRDHSKIAQLADKCVLASSGFQ

SEQ ID NO: 92366 - protein, 218 aa, Setaria italica
  misc_feature (15)..(15): Xaa can be any naturally occurring amino acid
  misc_feature (19)..(19): Xaa can be any naturally occurring amino acid
  misc_feature (112)..(112): Xaa can be any naturally occurring amino acid
  Transcript Sequence Number=SeqID_26392
KSCIHEYDAHDEHAXRDPXNDAYAAPENLRVNASLNSRHISAAPSLRGIRDERINHHLRLPHRTEEFERVFDAMNRDMEHLNKHSYDSDASIQYPTATSGNDRYSHSPEIQXIGIARRPARHHESASFENLSDQEASPLVSRKRYRSPAYLYHDVYHADDGFAGCEHYDDDMDAYVLPPPRVSGYDMVDDDDEYHLPANCNCFSRLALPHRKQVGNGL

SEQ ID NO: 92367 - protein, 154 aa, Setaria italica
  misc_feature (46)..(46): Xaa can be any naturally occurring amino acid
  Transcript Sequence Number=SeqID_26393
  Subcellular localization annotation: CTP_CleavageSite=65; ConfidenceScore=5.25e-01
MAKVAAEATGRQAASFVLGCVAALTVVLLLQRRPEDLITRPVAPVXSSGGRSSSSSSSGRDGTCSCSSPSSTPTGPPPVIVAADHQSDATKQPGAAGAATDATADDLSRLPASPAHRQQQEGRDAEEDEDAEFRGLAAVVARAATADDRTVIIT

SEQ ID NO: 92368 - protein, 146 aa, Setaria italica
  Transcript Sequence Number=SeqID_26394
LPKLGYCKSGADLTMQLKPQETFHWVAGPWMMCSSPCDGGIRYRDVACYGSLDDNTIKHYPVDDASCSADEMPAKQEGCNQQSCGDPETTQAMNPKRSGMSGWLVALIVFLGLGAIGGIAFTSYTYYRRRASGSSGFVYVMMEAYY

SEQ ID NO: 92369 - protein, 103 aa, Setaria italica
  Transcript Sequence Number=SeqID_26395
  Gene Ontology: Mol. function=sequence-specific DNA binding; Cellular component=nucleus; Biological process=regulation of transcription, DNA-dependent
  Homolog annotation: Hit_ID=Q6IEQ6; Match level="QueryCoverage=78%, HitCoverage=25%, E-value=3e-09, Identity=49%"; Hit description=WRKY transcription factor 25
PISLRAPSQDLRGQSTGEAPAAMAVDLMGCYAPRRANDQLAIQEAAAAGLRSLELLVSSLSSQAAAPQKAAQQLQHQQQPFGEIADQAVSKFRKVISILDRTG

SEQ ID NO: 92370 - protein, 241 aa, Setaria italica
  Transcript Sequence Number=SeqID_26396
  Homolog annotation: Hit_ID=B6SYZ1; Match level="QueryCoverage=97%, HitCoverage=46%, E-value=1e-114, Identity=85%"; Hit description =Pentatricopeptide repeat protein PPR566-6
  Pfam annotation: Domain name=PPR; Domain location=111-145; Score=4.4; E_value=2.7; Accession=PF01535.12; Description=PPR repeat
  Pfam annotation: Domain name=PPR; Domain location=146-180; Score =27.8; E_value=4.3e-05; Accession=PF01535.12; Description=PPR repeat
  Pfam annotation: Domain name=PPR; Domain location=181-215; Score =19.8; E_value=0.011; Accession=PF01535.12; Description=PPR repeat
  Pfam module annotation: Pfam domain module=PPR::PPR::PPR; Domain location=111-145::146-180::181-215
LVTLERTRVLASTIEVLARFGQLKVESALEQCVPTASRAILEAMSSGFIRAGKVDLTRKLLELARINNRTLHPSIYVKLMLEAIRTPEGYGLAMALVDELGERSDLELRPQDCTSVMKVCIKLRRYTAVESLFSWFRESGGSPTVVMYTTVIHSRCRDGMHREALSLAWEMEQAGCLLDLPAYRVIVKLCVALRDPERALRYLLRMEEAGFVPTSDMYNGLIEGYAAEGRLARCRQLIRES

SEQ ID NO: 92371 - protein, 229 aa, Setaria italica
  Transcript Sequence Number=SeqID_26397
  Gene Ontology: Mol. function=structural constituent of ribosome; Cellular component=ribonucleoprotein complex; Biological process =translation
  Homolog annotation: Hit_ID=B4FAZ7; Match level="QueryCoverage=92%, HitCoverage=92%, E-value=1e-115, Identity=93%"; Hit description=50S ribosomal protein L13
  Pfam annotation: Domain name=Ribosomal_L13; Domain location=93-220; Score=282.0; E_value=1.3e-81; Accession=PF00572.10; Description =Ribosomal protein L13
  Subcellular localization annotation: CTP_CleavageSite=40; ConfidenceScore=5.54e-01
MATAVAASAFLSSSFAPRHHHRRLARSVTRRAAPAGLAVRCEQSDKQKRQPLAALVPREQRFMFEGDELCGPDIWNTTWYPKAADHVTTEKTWYVVDAADKILGRLASTIAVHIRGKNEPTYTPSVDMGAFVIVVNAEKVAVSGKKRSQKLYRRHSGRPGGMKEETFDQLQKRIPERIIEHAVRGMLPKGRLGRRLFTHLKVYKGAEHPHVAQKPVPLPIRDKRIQKTD

SEQ ID NO: 92372 - protein, 231 aa, Setaria italica
  Transcript Sequence Number=SeqID_26398
  Gene Ontology: Mol. function=binding; Cellular component=chloroplast
  Homolog annotation: Hit_ID=B9T3G5; Match level="QueryCoverage=93%, HitCoverage=83%, E-value=1e-54, Identity=29%"; Hit description =Pentatricopeptide repeat-containing protein, putative
  Pfam annotation: Domain name=PPR; Domain location=129-163; Score =22.2; E_value=0.0021; Accession=PF01535.12; Description=PPR repeat
  Pfam annotation: Domain name=PPR; Domain location=164-198; Score =27.6; E_value=5.1e-05; Accession=PF01535.12; Description=PPR repeat
  Pfam annotation: Domain name=PPR; Domain location=199-231; Score=2.5; E_value=4.5; Accession=PF01535.12; Description=PPR repeat
  Pfam annotation: Domain name=PPR; Domain location=24-58; Score=38.0; E_value=3.7e-08; Accession=PF01535.12; Description=PPR repeat
  Pfam annotation: Domain name=PPR; Domain location=59-93; Score=24.0; E_value=0.00061; Accession=PF01535.12; Description=PPR repeat
  Pfam annotation: Domain name=PPR; Domain location=94-128; Score=35.4; E_value=2.3e-07; Accession=PF01535.12; Description=PPR repeat
  Pfam module annotation: Pfam domain module=PPR::PPR::PPR::PPR::PPR::PP R; Domain location=129-163::164-198::199-231::24-58::59-93::94-128
RGLTMRALDLFDEMIRSGVAPDSWSYNALMHCLFRSGHPEDAYRVFADMAEKGVTPSATTYNTMLDGLFRTGHATNAYRMFRYLQRGGLPIGIVTYNTMINGLCKSGKVGYARMVLKELGSTEHAPNAVTYTTVMKCCFRYGRFDQGLETFLSLLEGGYISDAFPYTTVISALVKKGRMQEANTYCELMIQSGSTIDNVCYNTLIHLRCQEGKLDDAFELLNMMEEGGLES

SEQ ID NO: 92373 - protein, 261 aa, Setaria italica
  Transcript Sequence Number=SeqID_26399
  Gene Ontology: Cellular component=nucleus
  Homolog annotation: Hit_ID=B9T3H1; Match level="QueryCoverage=98%, HitCoverage=56%, E-value=7e-73, Identity=49%"; Hit description =Protein SET DOMAIN GROUP, putative
  Pfam annotation: Domain name=Rubis-subs-bind; Domain location=72-207; Score=-9.0; E_value=0.099; Accession=PF09273.3; Description=Rubisco LSMT substrate-binding
GDLFNYAAPDDASFEEEDIAEVERLTDGGYEDSNAYCLYARKNYKKGEQVLLGYGTYTNLELLEHYGFLLSENPNEKTFIQLDVDIYSIGTWPKDSLYIHTNGHPSFALLCALRLWATPTNRRKAVSHQIYSGSILSTENEVEIMKWLISKCEGTLQQLPTTVEFDESLLVFLRKIQNSTNCRTDVKQSGFEQEFAVFLHFHHRLKLDCSDNSQLPVQFLRSLERWELAVQWRCNYKKTLKKCISYCKSLVHGLPLQLNQQ

SEQ ID NO: 92374 - protein, 49 aa, Setaria italica
  Transcript Sequence Number=SeqID_26400
  Gene Ontology: Mol. function=protein binding; Cellular component =integral to membrane; Biological process=protein amino acid phosphorylation
  Homolog annotation: Hit_ID=B6SQE5; Match level="QueryCoverage=100%, HitCoverage=19%, E-value=9e-14, Identity=77%"; Hit description =BRASSINOSTEROID INSENSITIVE 1-associated receptor kinase 1
  Pfam annotation: Domain name=LRR_1; Domain location=18-40; Score =17.8; E_value=0.047; Accession=PF00560.25; Description=Leucine Rich Repeat
GNAGISGPLIPDLGGLQNLQYLELYDNSLNGTIPATLGNLTKLISLDLY

SEQ ID NO: 92375 - protein, 81 aa, Setaria italica
  Transcript Sequence Number=SeqID_26401
  Gene Ontology: Mol. function=phosphopyruvate hydratase activity; Cellular component=phosphopyruvate hydratase complex; Biological process=glycolysis
  Homolog annotation: Hit_ID=A9P745; Match level="QueryCoverage=100%, HitCoverage=16%, E-value=1e-40, Identity=98%"; Hit description =Enolase
VTESIQAALDSKAAGWGVMVSHRSGETEDNFIADLAVGLASGQIKTGAPCRSERLAKYNQLLRIEEELGNVRYAGEAFRSP

SEQ ID NO: 92376 - protein, 129 aa, Setaria italica
  Transcript Sequence Number=SeqID_26402
  Gene Ontology: Cellular component=endosome membrane; Biological process=protein transport
  Homolog annotation: Hit_ID=Q0WTY4; Match level="QueryCoverage=100%, HitCoverage=54%, E-value=4e-26, Identity=55%"; Hit description =Vacuolar protein sorting-associated protein 2 homolog 2
KVASKAMAAMNKQMEPVKQIKVMKEFQKQSTQLDMTLEMMSDAIDETLDKDEAEEETEELTNQVLDEIGVDVASQLSSAPKGRIGATNKKVDNSQARNAAAPARNVAAPPESSAEVDDLERRLASLRRI

SEQ ID NO: 92377 - protein, 228 aa, Setaria italica
  Transcript Sequence Number=SeqID_26403
  Gene Ontology: Mol. function=metal ion binding
  Homolog annotation: Hit_ID=B6SSZ2; Match level="QueryCoverage=99%, HitCoverage=85%, E-value=9e-97, Identity=79%"; Hit description=RING zinc finger protein-like
  Pfam annotation: Domain name=zf-C3HC4; Domain location=45-99; Score =4.7; E_value=0.03; Accession=PF00097.17; Description=Zinc finger, C3HC4 type (RING finger)
  Subcellular localization annotation: CTP_CleavageSite=20; ConfidenceScore=5.04e-01
NWGFASNAWTSGLGKRSPPNCASSSAACSDDEASSCTSREEGLECPICWESFNIVENVPYVLWCGHTMCKNCILGLQWAVIKVPTVPIQLPFFICCPWCNLLSLRIFYKGNLIFPRKNYFLLWMVEGMNGERARSRSGIYTEQHTPLLPSSSRANGNAGYSNPTRRSLPPQADTSNANHANHGIPLLNSERVQASLRKSLSFLVHLTAKFPLVFMFLLIVLYAIPASV

SEQ ID NO: 92378 - protein, 149 aa, Setaria italica
  Transcript Sequence Number=SeqID_26404
  Gene Ontology: Mol. function=transferase activity, transferring glycosyl groups; Biological process=metabolic process
  Homolog annotation: Hit_ID=B6T4P0; Match level="QueryCoverage=100%, HitCoverage=32%, E-value=2e-60, Identity=81%"; Hit description =Anthocyanidin 5,3-O-glucosyltransferase
FYPSAAGDLAVYLQVPDLWRRAAPSSLKDMGKAPLDFAGVPPVRALDMPDTMQDWDIDVCRVRLQQIARMPEATGILVNSFECLEPRALEALRGGHCLPGRSTPKIYCVGPLVDCGGAEENGERHACLEWMDRQPKRSVVFLCFGSMGA

SEQ ID NO: 92379 - protein, 116 aa, Setaria italica
  Transcript Sequence Number=SeqID_26405
  Gene Ontology: Mol. function=protein serine/threonine kinase activity; Biological process=protein amino acid phosphorylation
  Homolog annotation: Hit_ID=B8XSN7; Match level="QueryCoverage=100%, HitCoverage=17%, E-value=3e-53, Identity=84%"; Hit description =Lectin receptor-type kinase
FGLARLYDHGTDAQTTHVVGTMGYLAPELVRTGKATPLTDVFAFGVFLLEVACGRRPIERGEHDNRVVLVDWVLEHHRGGSILEAVDPRLMGKFDLEEAILVLKLGLLCTHPLPNA

SEQ ID NO: 92380 - protein, 188 aa, Setaria italica
  Transcript Sequence Number=SeqID_26406
  Homolog annotation: Hit_ID=Q016V2; Match level="QueryCoverage=96%, HitCoverage=14%, E-value=3e-10, Identity=27%"; Hit description=[S] KOG4732 Uncharacterized conserved protein
FNDKVHDWQAVWAYALGPEPELVLSLRMALDDNHDSVVLSCAKVINVMLSFEFNESYFESSERVVDHGKDICTAPVFRSKPDLDGGFLEGGFWKYNTKPSNILPQYGDNDEDEGDEKHTIQDDVVVSGQDVAAGFIRMGILPRICFLLEMDPPPVLEDYLVSILVALARHSPQSANAILNCPRLIQSV

SEQ ID NO: 92381 - protein, 85 aa, Setaria italica
  Transcript Sequence Number=SeqID_26407
STRPVAAPEAVDMWRKNLIQGYRSVLSFSCNVSSWLVRRRGLIDWKLDFQRYIMFGGHAFYSFSWFFFLLFFMVPVLPVTCLCEI

SEQ ID NO: 92382 - protein, 51 aa, Setaria italica
  Transcript Sequence Number=SeqID_26408
PFPTTRLIDQLQAALANALAACCPVAGRFVTEKHGAGGCCFVSIDCDRGGG

SEQ ID NO: 92383 - protein, 72 aa, Setaria italica
  Transcript Sequence Number=SeqID_26409
  Gene Ontology: Mol. function=DNA binding; Cellular component =extrachromosomal circular DNA; Biological process=DNA recombination
  Homolog annotation: Hit_ID=P10025; Match level="QueryCoverage=100%, HitCoverage=16%, E-value=8e-34, Identity=97%"; Hit description =Plasmid recombination enzyme
HTEIGTLKAHIRDLQMNIKVYIQQTKKVFKEQFKAFRGLIKNELDMKGVDNQFEREHTREIRSRQKGYDMER

SEQ ID NO: 92384 - protein, 61 aa, Setaria italica
  Transcript Sequence Number=SeqID_26410
THLFAIRNLHMQFMECTILSLANFLLHQHAAMATSPSLLETNWMLRLRKDRRCHSCTDPHR

SEQ ID NO: 92385 - protein, 75 aa, Setaria italica
  Transcript Sequence Number=SeqID_26411
  Gene Ontology: Mol. function=exonuclease activity; Cellular component= intracellular
  Homolog annotation: Hit_ID=Q2QWN8; Match level="QueryCoverage=100%, HitCoverage=12%, E-value=3e-31, Identity=85%"; Hit description =Exonuclease family protein, putative, expressed
SSLDDLGDIPFPVTYYTLSEKDLEDNGYSFNLSGFVPTVSAPSGSSPHKILALDCEMCVTGAGFELTRVTLVDIR

SEQ ID NO: 92386 - protein, 169 aa, Setaria italica
  Transcript Sequence Number=SeqID_26412
  Gene Ontology: Mol. function=binding
  Homolog annotation: Hit_ID=B6SWN3; Match level="QueryCoverage=98%, HitCoverage=29%, E-value=2e-63, Identity=77%"; Hit description =Armadillo-repeat containing protein
  Pfam annotation: Domain name=Arm; Domain location=95-135; Score=16.5; E_value=0.098; Accession=PF00514.15; Description=Armadillobeta -catenin-like repeat
ELGARCREPPKAGKLQMQSDLDALAGKLDLNLRDCALLVKTGVLSDATVPVAQAEAAATAGAQTDVRELLARLQIGHAEAKHRAVDGLLDALRENEESVLSALGRGNVAALVQLLTATAPKVREKAATVLCLLAESGTCEGLLVSEGALPPLIRLAESGSVVGREKAVI

SEQ ID NO: 92387 - protein, 39 aa, Setaria italica
  Transcript Sequence Number=SeqID_26413
ISHGAIGYLKKLSDMDVAGARKLLERLERGSLRSLFSRD

SEQ ID NO: 92388 - protein, 209 aa, Setaria italica
  Transcript Sequence Number=SeqID_26414
  Gene Ontology: Mol. function=binding
  Homolog annotation: Hit_ID=Q9AUY1; Match level="QueryCoverage=98%, HitCoverage=35%, E-value=4e-80, Identity=76%"; Hit description =Armadillo/beta-catenin-like repeat family protein, expressed
  Pfam annotation: Domain name=Arm; Domain location=121-162; Score=8.6; E_value=1; Accession=PF00514.15; Description=Armadillobeta-catenin -like repeat
  Pfam annotation: Domain name=Arm; Domain location=41-78; Score=13.4; E_value=0.25; Accession=PF00514.15; Description=Armadillobeta -catenin-like repeat
  Pfam annotation: Domain name=Arm; Domain location=79-119; Score=31.2; E_value=4.2e-06; Accession=PF00514.15; Description=Armadillobeta -catenin-like repeat
  Pfam module annotation: Pfam domain module=Arm::Arm::Arm; Domain location=121-162::41-78::79-119
NLDGRAVVSEGGLRSLLAYIDGPLPQESVVSALRNLVATVSPDTLVSLCVLPRLVHALRDGSVGAQQAAAAAICKVSSSTDMKRLVGEHGCIPLLVRLLEAKSNGAREAAAQAVASLMGYPPNARDIKKDEKSVPNLVQLLEPSPHNTAKKYAISCLLALSASKRCKKLMISHGAIGYLKKLSEKDVAGAKKLLEKLERGRLRSLFSRK

SEQ ID NO: 92389 - protein, 261 aa, Setaria italica
  Transcript Sequence Number=SeqID_26415
  Gene Ontology: Mol. function=binding
  Homolog annotation: Hit_ID=B6SWN3; Match level="QueryCoverage=86%, HitCoverage=40%, E-value=1e-105, Identity=87%"; Hit description =Armadillo-repeat containing protein
  Pfam annotation: Domain name=Arm; Domain location=111-152; Score =24.5; E_value=0.00042; Accession=PF00514.15; Description =Armadillobeta-catenin-like repeat
  Pfam annotation: Domain name=Arm; Domain location=154-192; Score=2.4; E_value=6; Accession=PF00514.15; Description=Armadillobeta-catenin -like repeat
  Pfam annotation: Domain name=Arm; Domain location=195-232; Score =13.4; E_value=0.25; Accession=PF00514.15; Description=Armadillobeta -catenin-like repeat
  Pfam annotation: Domain name=Arm; Domain location=29-69; Score=12.0; E_value=0.36; Accession=PF00514.15; Description=Armadillobeta -catenin-like repeat
  Pfam annotation: Domain name=Arm; Domain location=70-110; Score=30.4; E_value=7.2e-06; Accession=PF00514.15; Description=Armadillobeta -catenin-like repeat
  Pfam annotation: Domain name=HEAT; Domain location=117-154; Score =1.1; E_value=36; Accession=PF02985.14; Description=HEAT repeat
  Pfam annotation: Domain name=HEAT; Domain location=197-234; Score =12.2; E_value=1.6; Accession=PF02985.14; Description=HEAT repeat
  Pfam annotation: Domain name=HEAT; Domain location=35-71; Score=3.5; E_value=18; Accession=PF02985.14; Description=HEAT repeat
  Pfam module annotation: Pfam domain module=Arm::Arm::Arm::Arm::Arm::HE AT::HEAT::HEAT; Domain location=111-152::154-192::195-232::29-69::70 -110::117-154::197-234::35-71
VDKTRLQRTATQPKVREKAATVLCLLAESGTCEGLLVSEGALPPLIRLAESGSVVGREKAVITLQRLSMSPDIARAIVGHSGVRPLIDVCQTGDSISQSAAAGALKNISAVPEVRQALAEEGVVRVMINLLDSGVVPGSKEYAAECLQNLTSSNDNLRRAVVSEGGLRSLLAYIDGPLPQESPVAALRNLVATVSPDTLVSLCVLPRLVHALRDGSVGAQQAAAAAICKVSSSCTRLGTLFSSFLMSRALGGYPIRLATPT

SEQ ID NO: 92390 - protein, 221 aa, Setaria italica
  misc_feature (127)..(127): Xaa can be any naturally occurring amino acid
  misc_feature (150)..(150): Xaa can be any naturally occurring amino acid
  misc_feature (154)..(154): Xaa can be any naturally occurring amino acid
  misc_feature (159)..(159): Xaa can be any naturally occurring amino acid
  Transcript Sequence Number=SeqID_26416
  Gene Ontology: Mol. function=sodium:hydrogen antiporter activity; Cellular component=integral to membrane; Biological process=sodium ion transport
  Homolog annotation: Hit_ID=C0PFZ2; Match level="QueryCoverage=100%, HitCoverage=50%, E-value=4e-62, Identity=53%"; Hit description =Sodium/hydrogen exchanger
LLNFIGKFLYLFFTSTILGVATGLLSAYVIKKLCFARHSTDREVSIMMLMAYLSYMLSMLLDLSGILTVFFCGIVMSHYTWHNVTESSRVTTKHTFATLSFIAEIFLFLYVGMDALDIDNWKIKTKXRQVPKRNQIKNFKSKNKLIVFLXKMRXAILLXVCHHLIQVFGFLTKPLLTLLIPPRTGPNTSSLLSSQSILDPLLTSMMGSDFDVGQISSPQYN

SEQ ID NO: 92391 - protein, 546 aa, Setaria italica
  misc_feature (517)..(517): Xaa can be any naturally occurring amino acid
  Transcript Sequence Number=SeqID_26417
  Gene Ontology: Mol. function=sodium:hydrogen antiporter activity; Cellular component=integral to membrane; Biological process=sodium ion transport
  Homolog annotation: Hit_ID=C0PFZ2; Match level="QueryCoverage=100%, HitCoverage=100%, E-value=0.0, Identity=85%"; Hit description =Sodium/hydrogen exchanger
  Pfam annotation: Domain name=Na_H_Exchanger; Domain location=23-443; Score=184.2; E_value=3.6e-52; Accession=PF00999.13; Description =Sodiumhydrogen exchanger family
MGLDLGAILKTGGLAVSDRTAIVSINIFIALLCSCIVIGHLLEGNRWVNESITALVMGLLTGGVILLATNGTNSRILVFSEDLFFIYLLPPIIFNAGFQVKKKQFFRNFMTIILFGAVGTLISFVIITLGAIGLFKKLDVGPLELGDYLAIGAIFSATDSVCTLQVLNQDETPLLYSLVFGEGVVNDATSVVLFNAIENLDMGHFDAFVLLNFIGKFLYLFFTSTILGVATGLLSAYVIKKLCFARHSTDREVSIMMLMAYLSYMLSMLLDLSGILTVFFCGIVMSHYTWHNVTESSRVTTKHTFATLSFIAEIFLFLYVGMDALDIEKWKLASSSPKEPIALSAIILGLVMVGRAAFVFPLSFLSNLSKKEARPKISFKQQVIIWWAGLMRGAVSIALAYNKFTASGHTAVRVNAIMITSTVIVVLFSTMVFGFLTKPLLTLLIPPRTGPNTSSLLSSQSILDPLLTSMMGSDFDVGQISSPQYNLQFILTAPTRSVHRLWRKFDDRFMRPMFGGXGFVPFVPGSPVEPSDPDSHLGTVTETDHS

SEQ ID NO: 92392 - protein, 123 aa, Setaria italica
  misc_feature (2)..(2): Xaa can be any naturally occurring amino acid
  Transcript Sequence Number=SeqID_26418
  Gene Ontology: Mol. function=nucleoside-triphosphatase activity; Cellular component=integral to membrane; Biological process=transport
  Homolog annotation: Hit_ID=Q8GU86; Match level="QueryCoverage=99%, HitCoverage=8%, E-value=1e-43, Identity=67%"; Hit description =Pleiotropic drug resistance protein 5
  Pfam annotation: Domain name=ABC2_membrane; Domain location=1-123; Score=-7.6; E_value=0.0083; Accession=PF01061.16; Description=ABC-2 type transporter
TXKKLPVFYKQRDYLFFPAWTYGLATILLKIPFSFLDSFMWTTVTYYVMGFAPAAGRFFSQFLAYFLTHQMAVAMFRLLGAILKTMVVANTFGMFSLLIVFLFGGFLIPRQDIKPWWIWAYWV

SEQ ID NO: 92393 - protein, 157 aa, Setaria italica
  misc_feature (145)..(145): Xaa can be any naturally occurring amino acid
  Transcript Sequence Number=SeqID_26419
  Gene Ontology: Mol. function=protein serine/threonine phosphatase activity; Cellular component=protein serine/threonine phosphatase complex; Biological process=protein amino acid dephosphorylation
  Homolog annotation: Hit_ID=Q7Y138; Match level="QueryCoverage=99%, HitCoverage=53%, E-value=3e-50, Identity=53%"; Hit description =Probable protein phosphatase 2C 36
SLATVGSCCLVGVVHQRTLFIANLGDSRAFLGKVWHVTEEVLAVPLSAEHNVNYDKARKELIAEHPDDPDIVVFKHNVWRVKGIFQLSRSIDGLWEHLTNQEAVDIVQKHQRAEGSARRLIKAALLEASRKREMTYSHLKTIGKXVRRHFHDDITVI

SEQ ID NO: 92394 - protein, 757 aa, Setaria italica
  Transcript Sequence Number=SeqID_26420
  Gene Ontology: Mol. function=protein serine/threonine phosphatase activity; Cellular component=protein serine/threonine phosphatase complex; Biological process=protein amino acid dephosphorylation
  Homolog annotation: Hit_ID=Q7Y138; Match level="QueryCoverage=44%, HitCoverage=89%, E-value=1e-123, Identity=64%"; Hit description =Probable protein phosphatase 2C 36
  Pfam annotation: Domain name=PP2C; Domain location=413-688; Score =116.1; E_value=1.1e-31; Accession=PF00481.13; Description=Protein phosphatase 2C
  Pfam annotation: Domain name=Pkinase; Domain location=27-307; Score =194.9; E_value=2.2e-55; Accession=PF00069.17; Description=Protein kinase domain
  Pfam annotation: Domain name=Pkinase_Tyr; Domain location=27-307; Score=55.6; E_value=2e-17; Accession=PF07714.9; Description=Protein tyrosine kinase
  Pfam module annotation: Pfam domain module=PP2C::Pkinase::Pkinase _Tyr; Domain location=413-688::27-307::27-307
MENDPQHTSVMPRDFTFHLLEQITNKFSKDRIIGYGGYGVVYKGVLDNGEEVAVKKLYNKHPGLDDDKQFTNECTNLMRLQHQNIVRLVGYCYEIAHKVVEYDGQYVYAGVEERALCFEYLQGGTLEKLLSDESCGLGWHKRYKIIRGVCEGLHYLHNGSKDPIYHLDLKPANIMLDKNMVPKIGDFGLSRLFDSTQTCTTKVIIGTPGYMPPEYINRYQITQKFDVFSLGVIIIQVMAGRGGYLKCGDMSHQEFIDLVQGNWGKRLQVTMSSHTSHEIKTCIEIALRCVESDRVKRPTIAEIVDELNKIDDVKRSLADEDNLHSTQVKLYTNSGAADAEGALTVDHRDDGKEQEHMTLEDKILEDDPSDTEYPGPQTGGTLERLPTLKAKSGGRKAQDDLLWCHDLARCQDGDFSVAAMQANHFMEDQCLVESGLPFGTFAGIFDGHGGPEAAYFIRDHLLPNLQETSSGLQGVTADAIREAFLATEQGFITLVSRQWETKPSLATVGSCCLVGVVHQRTLFIANLGDSRAVLGKVWHVTEEVLAVPLSAEHNVNYDKARKELIAEHPDDPDIVVFKHNVWRVKGIFQLSRSIGDAFLKDPRYNMEPLTTKFRLRTPFSKPLLSASPSILSHSLQPCDRFVIFASDGLWEHLTNQEAVDIVQKHQRAEGSARRLIKAALLEASRKREMTYSHLKTIGKGVRRHFHDDITVIVLFFSHAVQPLSIRCPLDNGSNGPLSSSSMDAQFLAPGNADEMLS

SEQ ID NO: 92395 - protein, 391 aa, Setaria italica
  misc_feature (76)..(76): Xaa can be any naturally occurring amino acid
  Transcript Sequence Number=SeqID_26421
  Gene Ontology: Mol. function=transporter activity; Cellular component= integral to membrane; Biological process=transport
  Homolog annotation: Hit_ID=Q6H4F0; Match level="QueryCoverage=99%, HitCoverage=74%, E-value=1e-140, Identity=63%"; Hit description =Membrane transport protein-like
ADSTDDDNRGAAFGWLQLTSSIGSIFGGFFALMLAQTTFLGIAGWRIAFHLVAIVSVVVGILVWLFAVDPHFPANXAGLHATPISKKSALDEARELLIEAKSIIQIPTFQVFVAQGVSGSFPWSALSFLSMWLELIGFSHEETAMFTTIFAVATSIGGLLGGKMGDFLAQRYPNAGRIILSQISAGSAIPLAAVLLLGLPDDPSRSSGVAHGLVLFIMGLIISWNGAATNCPIFAEIVPEKQRTSIYALDRTFESILASFAPPVVGLLSQHLYGFKPDDKGSSPEQDRENAASLAKALYTAISIPMVICSSIYTFMYRTYPRDRDRARMQSMIQSELDQIELFHGCGDDRFDLFESADDGEKPDQVDAIYGSEESAQADAGTARLLGNHEL

SEQ ID NO: 92396 - protein, 57 aa, Setaria italica
  Transcript Sequence Number=SeqID_26422
TRSTWYRLLAAAATSTEGPCSCGTTDGPAEKATSRETAQQEIHGSGMGTAQVGGVRE

SEQ ID NO: 92397 - protein, 110 aa, Setaria italica
  Transcript Sequence Number=SeqID_26423
  Gene Ontology: Mol. function=ubiquitin-protein ligase activity; Cellular component=ubiquitin ligase complex; Biological process =ubiquitin-dependent protein catabolic process
  Homolog annotation: Hit_ID=B9T786; Match level="QueryCoverage=65%, HitCoverage=10%, E-value=4e-11, Identity=43%"; Hit description =Spotted leaf protein, putative
ASPLPPSSSEAAEREAKVEGAEEEEGEVVERLVELVGEIAAISDFRNSYRRQFCNLSRRIRLLVPMLEEAKEAPTPLPVASEAALRRLREALYGAGELLRLGSSGSKIFL

SEQ ID NO: 92398 - protein, 99 aa, Setaria italica
  Transcript Sequence Number=SeqID_26424
FRFCVTVNSTQTREQGEKGRIKLQKSCLLSVGGHRRVFWNQIPQCFGINLVGDVIQILLFCTCLCSVLFLVCTSTFMYECHNCLAAWCSSISILKKKKK

SEQ ID NO: 92399 - protein, 467 aa, Setaria italica
  Transcript Sequence Number=SeqID_26425
  Gene Ontology: Mol. function=zinc ion binding; Cellular component =intracellular
KEPPRRPSPPPLPKEPQLFPSPLRFPLEQRPVVAVVPNVDEPEVVAETTVTAKLEDEADTCFKEADQYKEAELEVSNLLDKDTPMLPCFLPSPSEAIGTDGSSTTCGAGGSVSNSIAPSTTTNTFAGLFASATTSTTSQSRSLRDLIGVDPTFLCLAIGAPSSLFPQTSASNPGTFAPPPAPHMSATALLQKAAEVGASQSSSSFLKEFGLASSSSSSPPSKQLPQGRFAENSMQPWHHRSNQQMERHRNHQQREMESSSQPWHHRSHQQMEMERHRNRQQMEMESSSQPWHHRSTQQMEMERHRNHQQREMESSSQRWHHHRSDQQMDMERHRSHQQMEMESSTQRWPHNRSSQQMEVMERHHRTSQQMERESRAMLSGGLGLGLAYESGNAGLPDLMMGPSPLFGPKPATLDFLGLGIGGTMGGSTTNGGLPALMVGGELDVGSSAQVPAPWEDAKRKTNGRTIL

SEQ ID NO: 92400 - protein, 66 aa, Setaria italica
  Transcript Sequence Number=SeqID_26426
  Gene Ontology: Mol. function=protein binding
  Homolog annotation: Hit_ID=O49448; Match level="QueryCoverage=77%, HitCoverage=13%, E-value=5e-16, Identity=78%"; Hit description =Extensin-like protein
  Pfam annotation: Domain name=LRR_1; Domain location=33-52; Score =13.9; E_value=0.67; Accession=PF00560.25; Description=Leucine Rich Repeat
  Pfam annotation: Domain name=LRR_1; Domain location=9-31; Score=9.1; E_value=5.6; Accession=PF00560.25; Description=Leucine Rich Repeat
  Pfam module annotation: Pfam domain module=LRR_1::LRR_1; Domain location=33-52::9-31
PDTFLHLRLLHELDLSNNRLVGPFPEVVLTLPSLRYLDLRFNEFEGPIPPALFDRRLDAIFINNNR

SEQ ID NO: 92401 - protein, 187 aa, Setaria italica
  Transcript Sequence Number=SeqID_26427
  Gene Ontology: Mol. function=hydrolase activity, acting on ester bonds; Biological process=lipid metabolic process
  Homolog annotation: Hit_ID=B6SZZ2; Match level="QueryCoverage=100%, HitCoverage=50%, E-value=1e-102, Identity=94%"; Hit description =Anther-specific proline-rich protein APG
  Pfam annotation: Domain name=Lipase_GDSL; Domain location=2-168; Score=6.8; E_value=0.0022; Accession=PF00657.14; Description=GDSL -like LipaseAcylhydrolase
VLSTGTRISESPDGFVNDLIFHLRDQLTRLYTLDARKFVVANVGPLGCIPYQKTINRVGEDECVKLPNQLAAQYNGRLRELLIELNGNLPGARFCLANVYDLVMELITNYPNYGFETASVACCGNGGSYDGMVPCGPTTSMCDARDKHVFWDPYHPSEAANVLLAKYIVDGDSKYISPMNLRKLYSL

SEQ ID NO: 92402 - protein, 78 aa, Setaria italica
  Transcript Sequence Number=SeqID_26428
INYHLQISKRLGAKDIYFVVRLNFLLLVTFLPNFIWMNLYTFFIVSRMYKVLAKPILEEMFIIYILEVQNYKQHKEKM

SEQ ID NO: 92403 - protein, 145 aa, Setaria italica
  Transcript Sequence Number=SeqID_26429
  Gene Ontology: Mol. function=transcription factor activity; Cellular component=nucleus
  Homolog annotation: Hit_ID=B6SSK0; Match level="QueryCoverage=77%, HitCoverage=33%, E-value=8e-12, Identity=40%"; Hit description =Ethylene-responsive element binding protein 2
VDLVDGDDVPDAAHAPSVKSEAETSDSVSDASGCSTLPDFSWQGMSATDDGATWPAAGFHVELGRPSKRAGTEPQEPEEEEMAPPPAASEESADMLLDAFMFGDHFSFFNGGAYESLDGLFGGDASLSLGNEGVGLWSFDDTVCY

SEQ ID NO: 92404 - protein, 292 aa, Setaria italica
  misc_feature (40)..(40): Xaa can be any naturally occurring amino acid
  Transcript Sequence Number=SeqID_26430
  Gene Ontology: Mol. function=superoxide dismutase activity; Cellular component=chloroplast
  Homolog annotation: Hit_ID=B6UE68; Match level="QueryCoverage=99%, HitCoverage=77%, E-value=1e-103, Identity=71%"; Hit description =EMB1374
  Pfam annotation: Domain name=BolA; Domain location=213-292; Score =153.8; E_value=5.4e-43; Accession=PF01722.10; Description=BolA-like protein
  Pfam annotation: Domain name=SufE; Domain location=2-129; Score=97.8; E_value=3.7e-26; Accession=PF02657.7; Description=Fe-S metabolism associated domain
  Pfam module annotation: Pfam domain module=BolA::SufE; Domain location=213-292::2-129
SDLFQSVPDARTRYKQLLAYASRLPPMDPALKTDSNRVRXGCVSQVCYHAEPEEGDGGGRSVRFHADSDAQLTKGLAALLVLGLSGAPAADVAKVPVEFIELLGIRQSLSPSRNSGLLNMLNLMKLKALEIAGDTGGDSTTGQQSVQEVAEPRANGMENKGSEFAAFGVQEEEKSVADMPNEEEQLVEVPDNFVEGNGSSLGGGRKERIRESLERALSPVELEIEDISHLHKGHAGVAGSNGETHFNVRVVSKEFEGKSLLKRHRAVYDLLQDELKTGLHALSIDAKTPSEV

SEQ ID NO: 92405 - protein, 61 aa, Setaria italica
  Transcript Sequence Number=SeqID_26431
  Gene Ontology: Mol. function=structural constituent of ribosome; Cellular component=ribonucleoprotein complex; Biological process =translation
  Homolog annotation: Hit_ID=P0C464; Match level="QueryCoverage=100%, HitCoverage=42%, E-value=8e-27, Identity=98%"; Hit description=30S ribosomal protein S11, chloroplastic
  Subcellular localization annotation: CTP_CleavageSite=23; ConfidenceScore=5.08e-01
MTKAIPKIGSRKKVRIGLRRNARFSLRKSARRITKGVIHVQASFNNTIITVTDPQGRVVFW

SEQ ID NO: 92406 - protein, 149 aa, Setaria italica
  Transcript Sequence Number=SeqID_26432
  Gene Ontology: Mol. function=metal ion binding
  Homolog annotation: Hit_ID=B6SZ98; Match level="QueryCoverage=78%, HitCoverage=32%, E-value=1e-37, Identity=70%"; Hit description=S -ribonuclease binding protein SBP1
MAVQAQYPSNLLFHDRGEPERKEMDMPRPPQLAGVSPAAVYFASGGASGNRRKRPREAMAPPPAAAKEEYVNLFTLQPQQSTSFANMAQFQSQNRVSSSPSPAATALVSTGLRLAFDEQQQQQQQQQQQESTKQMNALRYSSSPSLFST

SEQ ID NO: 92407 - protein, 426 aa, Setaria italica
  Transcript Sequence Number=SeqID_26433
  Gene Ontology: Mol. function=protein tyrosine kinase activity; Cellular component=integral to plasma membrane; Biological process =protein amino acid phosphorylation
  Homolog annotation: Hit_ID=B6SSJ5; Match level="QueryCoverage=100%, HitCoverage=53%, E-value=1e-99, Identity=60%"; Hit description=Wound and phytochrome signaling involved receptor like kinase
  Pfam annotation: Domain name=Pkinase; Domain location=196-426; Score=- 56.0; E_value=3.7e-05; Accession=PF00069.17; Description=Protein kinase domain
  Pfam annotation: Domain name=Pkinase_Tyr; Domain location=199-392; Score=-81.5; E_value=2.6e-08; Accession=PF07714.9; Description =Protein tyrosine kinase
  Pfam module annotation: Pfam domain module=Pkinase::Pkinase_Tyr; Domain location=196-426::199-392
YGVAGYAIAALRRRFQVVDVSSNYLDGALNGSDGVVITTTNCFHGVPGQRSRVDCEEFYRKQGVNLVDAPAPSPLPSASPLPQPSPEVKRKKQGISKNVLIGVLVAAGALMVLFLAVLLFCLVKMSSRGRSRGRGVEINEEGTGTRSARRRDSSVNPVASSPSAVSPRANGGPKKDVSAIAGDFSYEELVDATGGFGDDKLIKHGHSGDIYHGVLENGSHVIVKKVGSKGINKHASELDFYSRYSHDRIVPLLGYLSKDDEEFLAYKYMPKGDLTDALHKKPVDTADGLPSLDWITRLKIATGVAEAMCFLHDECSPPLVHRDIQASSVLLDDKYEVRLGSMSDICAQQSGGSQNVFSRILRSSKSLDKHTSGPPATCSYDVLCFGKVLLELVTGNFGISGSNDAASEEWLANTLNQINGGDKASV

SEQ ID NO: 92408 - protein, 87 aa, Setaria italica
  misc_feature (1)..(9): Xaa can be any naturally occurring amino acid
  Transcript Sequence Number=SeqID_26434
XXXXXXXXXQWHLFFFSFSRLHKHHQVHITLATSHLLGTHDTCSSHLASHVTCAAHVFNTDEHTRSCARACVNIWVFCQSGNDFGPF

SEQ ID NO: 92409 - protein, 105 aa, Setaria italica
  misc_feature (12)..(12): Xaa can be any naturally occurring amino acid
  Transcript Sequence Number=SeqID_26435
  Gene Ontology: Mol. function=DNA binding; Biological process =regulation of transcription
  Homolog annotation: Hit_ID=Q8H045; Match level="QueryCoverage=99%, HitCoverage=15%, E-value=4e-40, Identity=83%"; Hit description=NAC protein
RVRSSFSCLPSXKVDVALECARLQHRLSLPPLEVEDFPQDVSLDTKTNILRSNPNEVDILQEFLSVASASQELINGTSSSYPAEIWPGAGTSSASTHYINELSSL

SEQ ID NO: 92410 - protein, 194 aa, Setaria italica
  Transcript Sequence Number=SeqID_26436
  Homolog annotation: Hit_ID=Q9CAC4; Match level="QueryCoverage=95%, HitCoverage=22%, E-value=2e-25, Identity=43%"; Hit description=IFA -binding protein
ALDDSLTYFEMERLSILEELKTLEERLFTLEDDDVTANAAAGHSSGDMDLSADVLHSPEDILTGDKARCRGRTSISRGKSLLPLFDAVGNETCDQMPSARVGEADQADDSATKPASVLAKEQERLAIIEEVDHVYERLQALEADKEFLRHCIKSLKKGDKGMDLLQEILQHLRDLRNVELHVKNAGDAIAANSV

SEQ ID NO: 92411 - protein, 69 aa, Setaria italica
  Transcript Sequence Number=SeqID_26437
  Subcellular localization annotation: CTP_CleavageSite=36; ConfidenceScore=5.42e-01
MKRLAQKTNEVTDTNTSQTQRKRTQLLRKVCPCSFRCSASISLLLVPTMLLIQLQFRCSWCPPGPAGSP

SEQ ID NO: 92412 - protein, 50 aa, Setaria italica
  Transcript Sequence Number=SeqID_26438
MVASLKLHGTTQYELWKVFHFYSCTDNIVNTLADDSFSSREAPNIIFKKK

SEQ ID NO: 92413 - protein, 168 aa, Setaria italica
  Transcript Sequence Number=SeqID_26439
EQPQSVQTSQQPTPEGCDHRNTDKTQLVYQQADGISGAVENTSSLSENVVSAGVYHTAPLTKPKDMTILSNSVDLNHCIETSNSSNCLNSISLARRKVPCQNFNDVNSHLDSDDGLSPDVECLGERNHMLSQASYAPSLTAKAISGDRGPLSQPSSSCASARSRSTLT

SEQ ID NO: 92414 - protein, 82 aa, Setaria italica
  Transcript Sequence Number=SeqID_26440
  Homolog annotation: Hit_ID=B6TT91; Match level="QueryCoverage=69%, HitCoverage=12%, E-value=8e-19, Identity=89%"; Hit description=BSD domain containing protein
GLARLPGRQAVADLAKIASSLLPPEGGDADWAESAVGVTEEVVAFARDAALRHELWLDFPLLPDDADSDDFDMTDAQQDHAL

SEQ ID NO: 92415 - protein, 91 aa, Setaria italica
  Transcript Sequence Number=SeqID_26441
AGDSKLKPVAQLLQCIDLFGEETKAREANVSSASVMHVGLLTRQIMERCELSRWSTHGKHEGSRQAAGLPSEPHGNGAGGDLREPGGEHER

SEQ ID NO: 92416 - protein, 133 aa, Setaria italica
  misc_feature (96)..(96): Xaa can be any naturally occurring amino acid
  Transcript Sequence Number=SeqID_26442
  Gene Ontology: Mol. function=microtubule motor activity; Cellular component=microtubule associated complex; Biological process =microtubule-based movement
  Homolog annotation: Hit_ID=Q7XKR9; Match level="QueryCoverage=83%, HitCoverage=10%, E-value=1e-34, Identity=64%"; Hit description =OSIGBa0144C23.2 protein
NPLKRKLDVSSAATLPHDAAAPAPDSGVQVVVRIRPPCRVDDEEAGEDGRGPEACMRKTAVNSVAIHGQDFTFDAVADAVSTQEDIFNLVGLPLVXNCLSGFNSSIFAYGQTGSGKTSLCGASVCAVRRFSEQ

SEQ ID NO: 92417 - protein, 167 aa, Setaria italica
  misc_feature (156)..(156): Xaa can be any naturally occurring amino acid
  Transcript Sequence Number=SeqID_26443
  Homolog annotation: Hit_ID=Q9M897; Match level="QueryCoverage=79%, HitCoverage=57%, E-value=8e-14, Identity=36%"; Hit description =F16B3.6 protein
  Pfam annotation: Domain name=DUF679; Domain location=83-167; Score =49.6; E_value=1e-14; Accession=PF05078.4; Description=Protein of unknown function (DUF679)
ILFTTCSSTGLRFGEDDQGGGEGSAAMATATAARHDDVESQHEEHDDASSHEQQAQRPLLEKRSLADDGGGMSPIQRAISQTYQSTAHLATLLPTGTVLAFQLLSPIVTDQGHCVRANRAMAGALLALCALSCFVLSFTDSFRDATGAVRYGFATXAALVIDGGAPL

SEQ ID NO: 92418 - protein, 42 aa, Setaria italica
  Transcript Sequence Number=SeqID_26444
FAWSGNQLYCVESINMSVKTTVWSCLLSHMTKLFVYSSSNTT

SEQ ID NO: 92419 - protein, 139 aa, Setaria italica
  misc_feature (108)..(108): Xaa can be any naturally occurring amino acid
  Transcript Sequence Number=SeqID_26445
  Gene Ontology: Cellular component=chloroplast
  Homolog annotation: Hit_ID=Q9SW33; Match level="QueryCoverage=64%, HitCoverage=38%, E-value=2e-20, Identity=60%"; Hit description =Thylakoid lumenal 17.9 kDa protein, chloroplastic
  Subcellular localization annotation: CTP_CleavageSite=8; ConfidenceScore=5.24e-01
RGPRRRAPAARAVPFVRPPPLQGKPFASSTPYAQSQQLQLGLDKLGKIRPCPSTNPGCVSTNALGSSGSFASPLVIPESSAGDKAVASLRQAIEKTQSNVDFKVDQDXTPYGHYIEAEMDGGVGRDVMEFLVKKDAGVV

SEQ ID NO: 92420 - protein, 133 aa, Setaria italica
  Transcript Sequence Number=SeqID_26446
HFLIILLRRKALNKTVQQLLVVFGGKGKNTFGAVGGKKYLERNLSVSWEANIRARGKHVISKQQEGAFYILWPGGPTPRGTQIPGWKPHPKPTPTNPHPKSPKQRTISHPLNGPKQPRTSRVFSSKNKGKRAS

SEQ ID NO: 92421 - protein, 300 aa, Setaria italica
  Transcript Sequence Number=SeqID_26447
  Gene Ontology: Mol. function=protein serine/threonine kinase activity; Cellular component=cytoplasm; Biological process=protein amino acid phosphorylation
  Homolog annotation: Hit_ID=Q6Z437; Match level="QueryCoverage=93%, HitCoverage=75%, E-value=1e-162, Identity=97%"; Hit description =Mitogen-activated protein kinase 3
  Pfam annotation: Domain name=Pkinase; Domain location=1-249; Score =223.1; E_value=7e-64; Accession=PF00069.17; Description=Protein kinase domain
  Pfam annotation: Domain name=Pkinase_Tyr; Domain location=4-244; Score=-79.4; E_value=1.9e-08; Accession=PF07714.9; Description =Protein tyrosine kinase
  Pfam module annotation: Pfam domain module=Pkinase::Pkinase_Tyr; Domain location=1-249::4-244
VDALRTLRELKLLRHLRHENVIALKDIMMPAHRRSFKDVYLVYELMDTDLHQIIKSPQGLSNDHCQYFLFQLLRGLKYLHSAEILHRDLKPGNLLVNANCDLKICDFGLARTNSSKGQFMTEYVVTRWYRAPELLLCCDNYGTSIDVWSVGCIFAELLGRKPIFPGTECLNQLKLIVNVLGTMSESDLEFIDNPKARRYIKSLPYTPGVPLATMYPHAHPLAIDLLQKMLIFDPTKRISVTEALEHPYMSPLYDPSANPPAQVPIDLDIDENISSEMIREMMWQEMLHYHPEVVTAVSMS

SEQ ID NO: 92422 - protein, 164 aa, Setaria italica
  Transcript Sequence Number=SeqID_26448
MDGELELPEFNPRERVKQQISVPFLWEVKPGAPKRDWVISKPVASESACPSPTPTKLVVSVPFQWEEKPGKPIQEASPFHVLPDHGGFVASSRSLNPFAVESEEEYSLGFDLEAFGFPDNNDASGAAAAAWVDGSSGRRDAWFSFSESEDYSHSSGDTSAQDQV

SEQ ID NO: 92423 - protein, 150 aa, Setaria italica
  misc_feature (62)..(62): Xaa can be any naturally occurring amino acid
  misc_feature (76)..(76): Xaa can be any naturally occurring amino acid
  Transcript Sequence Number=SeqID_26449
  Subcellular localization annotation: CTP_CleavageSite=64; ConfidenceScore=5.16e-01
MAAMGGRGPAVIKGGGGGGDRPVGSRLVSVAVGGFLFFLVLLRSSRHDVAVVLDARTGDVRXPAATAGRETRPPAXSAEQSNGMAAAEPFSSGVSDAVIGGDRNDDDVETDAAPEEAERQSNAAAATINSDEQAQPEPAAEDAPQDKSLT

SEQ ID NO: 92424 - protein, 96 aa, Setaria italica
  misc_feature (8)..(8): Xaa can be any naturally occurring amino acid
  Transcript Sequence Number=SeqID_26450
  Gene Ontology: Mol. function=ferredoxin reductase activity; Cellular component=plastid; Biological process=lipoate biosynthetic process
  Homolog annotation: Hit_ID=B6TCL0; Match level="QueryCoverage=100%, HitCoverage=59%, E-value=7e-31, Identity=80%"; Hit description =Ferredoxin-thioredoxin reductase, variable chain
  Pfam annotation: Domain name=FeThRed_A; Domain location=16-89; Score =137.7; E_value=3.8e-38; Accession=PF02941.7; Description=Ferredoxin thioredoxin reductase variable alpha chain
SSPDVAAXQAAAAPKVGKRVRVTAPVRVHHVAKAPGLDLRGMEGVVKQYVGVWKGKRVTANLPFKVEFELNLDGQDKPVRFIAHLREREFEIVGDE

SEQ ID NO: 92425 - protein, 121 aa, Setaria italica
  misc_feature (108)..(108): Xaa can be any naturally occurring amino acid
  Transcript Sequence Number=SeqID_26451
  Gene Ontology: Mol. function=structural constituent of ribosome; Cellular component=ribonucleoprotein complex; Biological process =translation
  Homolog annotation: Hit_ID=B6TQ75; Match level="QueryCoverage=88%, HitCoverage=56%, E-value=6e-53, Identity=90%"; Hit description=50S ribosomal protein L13
  Pfam annotation: Domain name=Ribosomal_L13; Domain location=43-120; Score=29.7; E_value=1.6e-07; Accession=PF00572.10; Description =Ribosomal protein L13
  Subcellular localization annotation: CTP_CleavageSite=13; ConfidenceScore=5.06e-01
LPLHPTTVPLQRVGMATTSPAFTGNLKKALAGLRRINLDGLRWRVFDAKGQVLGRLASQIAVALQGKDKPTYAPHVENGDMCIVLNAKDISVTGRKMTDKIYYWHTGXRRLKDQMEKDPTE

SEQ ID NO: 92426 - protein, 81 aa, Setaria italica
  misc_feature (61)..(61): Xaa can be any naturally occurring amino acid
  Transcript Sequence Number=SeqID_26452
  Gene Ontology: Mol. function=structural constituent of ribosome; Cellular component=ribosome
  Homolog annotation: Hit_ID=B6TQ75; Match level="QueryCoverage=76%, HitCoverage=31%, E-value=1e-24, Identity=88%"; Hit description=50S ribosomal protein L13
VLRMLPRNRLRDDRDRKLRIFSGNEHPFHDRALEPFVMPPRQVREMRPRARRALIRAQKKXQANRTKEEEDAKNTKAEATA

SEQ ID NO: 92427 - protein, 196 aa, Setaria italica
  Transcript Sequence Number=SeqID_26453
  Gene Ontology: Mol. function=structural constituent of ribosome; Cellular component=ribonucleoprotein complex; Biological process =translation
  Homolog annotation: Hit_ID=B6TQ75; Match level="QueryCoverage=98%, HitCoverage=98%, E-value=6e-91, Identity=84%"; Hit description=50S ribosomal protein L13
  Pfam annotation: Domain name=Ribosomal_L13; Domain location=28-154; Score=130.3; E_value=6.1e-36; Accession=PF00572.10; Description =Ribosomal protein L13
MATAPAFTGNLKKALAGLRRINLDGLRWRVFDAKGQVLGRLASQIAVVLQGKDKPTYAPHVENGDMCIVLNAKDISVTGRKMTDKIYYWHTGYIGHLKERRLKDQMEKDPTEVIRKAVLRMLPRNRLRDDRDRKLRIFSGNEHPFHDRPIEPFVMPPRQVREMRPRARRALIRAQKKEQAIRAKEEEGTKNAEITA

SEQ ID NO: 92428 - protein, 94 aa, Setaria italica
  misc_feature (55)..(55): Xaa can be any naturally occurring amino acid
  Transcript Sequence Number=SeqID_26454
  Gene Ontology: Mol. function=hydrolase activity, acting on ester bonds; Biological process=lipid metabolic process
  Homolog annotation: Hit_ID=Q2QNG3; Match level="QueryCoverage=91%, HitCoverage=18%, E-value=1e-17, Identity=55%"; Hit description=GDSL -like Lipase/Acylhydrolase family protein, expressed
LTRSLFLISTGGNDFDAFDNGVPQSQAPEFIAGMVAVYLKHIKPLKINKFMCRSXYELGARRLALLDMLPVGCLPSQRAITANGECDNQIGQTT

SEQ ID NO: 92429 - protein, 390 aa, Setaria italica
  Transcript Sequence Number=SeqID_26455
  Gene Ontology: Mol. function=hydrolase activity, acting on ester bonds; Biological process=lipid metabolic process
  Homolog annotation: Hit_ID=B6TJQ3; Match level="QueryCoverage=89%, HitCoverage=88%, E-value=1e-89, Identity=50%"; Hit description=GDSL -motif lipase/hydrolase-like protein
  Pfam annotation: Domain name=Lipase_GDSL; Domain location=46-359; Score=140.5; E_value=5.4e-39; Accession=PF00657.14; Description=GDSL- like LipaseAcylhydrolase
MAVAAGALLVLAAAAAVLCSSATGDDVFGAAQSTGIGHGRPVVPAVYVFGDSLVDAGNNDFLPPPAPRAVPPNGVDLPRTVLRRTGRFTNGYNLADITAQHLGFKMSPPAYLSLTPLLSFDLLRGRGGANYASGGSGILDITGNGSVIPLSKQVQMFAETKATIIRTGLVDRETLDDLLTRSLFLISTGGNDFDAFDNGVPQSQAPEFIAGMVAVYLKHIKELYELGARRLALLDMLPVGCLPSQRAITANGECDTNGNSMSQMFNALLRTEIAKAVVTSMPSLKYSIASLYNTYTDMIANPALAGFHEVKRGCCGSGKFNGEVPCTVISNLCANRDEYLFWDMVHGTQAAYRWAVLAFFYGPTRDAEPINLAQLMQEPLSMVEAPYSST

SEQ ID NO: 92430 - protein, 55 aa, Setaria italica
  Transcript Sequence Number=SeqID_26456
DLKHTLEELNQRGVFSTQELARHGSCGWGGGQRHRQARRVAPGGVQAAEGPASAN

SEQ ID NO: 92431 - protein, 263 aa, Setaria italica
  Transcript Sequence Number=SeqID_26457
MNNMGPNCRATAAVNHNQVAHAVSGSLENGALSPHELKRSVHFQQCEPAEPLAKHPRMEQNLLLQRRSMSSTAEHSAEILKSPVRAPIGIPFCSASVGGARKFPQPPIGASDVRFNSSFEHGELSNTELLHRRMEKTAETLGLAGVTMDSAELLNCALDKYMKNLIRSSVQLIGGSVQRDARKGTPSYKQQAYGKQINGVLLPNHVHMQSSSGPSGATNEIKSNHLISINDFKVAMQLNPQQLGEDWPVVLEKICLCSSEEND

SEQ ID NO: 92432 - protein, 55 aa, Setaria italica
  Transcript Sequence Number=SeqID_26458
YASIKIQNTMKYQRTMLQPNQDKYLSCTKSIPYFLSVQDGISGAQSGHQFCSIRI

SEQ ID NO: 92433 - protein, 147 aa, Setaria italica
  Transcript Sequence Number=SeqID_26459
  Pfam annotation: Domain name=PAE; Domain location=2-147; Score=-33.8; E_value=1e-13; Accession=PF03283.5; Description=Pectinacetylesterase
SSVLYFRGQRIWDAIITDLLQKGLAKAVNVLLSGCSAGGLATFFHCDSLKERLGGATTVKFLSDAGFFLDLNDISGINNIRQFFSSLVSVQGVQKNLNKDCQNSTDYPYLCFFPQYALPYISTPYFILNSAYDVYQFHHIFVPPSSD

SEQ ID NO: 92434 - protein, 197 aa, Setaria italica
  Transcript Sequence Number=SeqID_26460
  Homolog annotation: Hit_ID=O65250; Match level="QueryCoverage=82%, HitCoverage=39%, E-value=5e-45, Identity=48%"; Hit description =F21E10.11 protein
  Pfam annotation: Domain name=PAE; Domain location=2-174; Score=15.6; E_value=8.7e-17; Accession=PF03283.5; Description=Pectinacetylesteras e
CPFFSRNDISGINNIRQFFSSLVSVQGVQKNLNKDCQNSTDYPYLCFFPQYALPYIRTPYFILNSAYDVYQFHHIFVPPSSDPRGQWSRCKMDPGACSTSQIATLQGLRNAMLTSLKQIEGEPEAGMFINSCFAHCQSELQDTWFAPDSPMIHDRKIAEVIGDWYFERDAAKEIDCAYPCDSTCHNLIPSDQELRMY

SEQ ID NO: 92435 - protein, 190 aa, Setaria italica
  Transcript Sequence Number=SeqID_26461
SASNGQRAARDSSANLWKCIELDDIRFEAAMVTADGSPLLDVPPPEGVVRIGVAFQQFTSNTSVEQLFFVLGVYTYFGQVAESISKVSKGNKSGVSESSAEKFENKLPSDTAVSLTMNNLQLNFLESLSAHDIHMPLVQFGGEDLFLKVSHRTLGGAFAVTTNLLWRTVNVNCLEGESAMICENGIAVTG

SEQ ID NO: 92436 - protein, 73 aa, Setaria italica
  Transcript Sequence Number=SeqID_26462
LQCHTVSPQNRYYKGTTDCPSPNGYLAGPSNMLAGPTDLNQNTRGEATHISTRCSFTWQLSWLIPQAPPPALV

SEQ ID NO: 92437 - protein, 105 aa, Setaria italica
  Transcript Sequence Number=SeqID_26463
  Homolog annotation: Hit_ID=Q2R482; Match level="QueryCoverage=95%, HitCoverage=10%, E-value=6e-29, Identity=75%"; Hit description=DNA replication licensing factor MCM2, putative, expressed
RDVRTGPAADRKLPRMLHDQDTDEDMNFRRPKRHRTSFRPPSGPRTPRSDDDGDGATPSSPGRSQRGYSGGDVPMTDQTDDDPYEDEIDEEDEMNMYRVQRYTER

SEQ ID NO: 92438 - protein, 103 aa, Setaria italica
  misc_feature (85)..(85): Xaa can be any naturally occurring amino acid
  Transcript Sequence Number=SeqID_26464
  Homolog annotation: Hit_ID=Q2HVB6; Match level="QueryCoverage=98%, HitCoverage=19%, E-value=8e-22, Identity=52%"; Hit description =Protein F1K23.6-, putative
NVSQSIPEKFHWKIEVCFHRNASMGLCQCEAGEWQGFQDGLWTAVYSPYGNKYVDVKLADKKSARFTLSIQEEFQKWRLACLGFXDFILLFLSPTVSKWAPFY

SEQ ID NO: 92439 - protein, 234 aa, Setaria italica
  misc_feature (162)..(162): Xaa can be any naturally occurring amino acid
  Transcript Sequence Number=SeqID_26465
  Gene Ontology: Mol. function=hydrolase activity, acting on acid anhydrides, in phosphorus-containing anhydrides; Cellular component =nucleus; Biological process=ribosome biogenesis
  Homolog annotation: Hit_ID=A3BT52; Match level="QueryCoverage=100%, HitCoverage=27%, E-value=1e-117, Identity=88%"; Hit description=DEAD- box ATP-dependent RNA helicase 29
  Pfam annotation: Domain name=DEAD; Domain location=1-104; Score=43.5; E_value=8.6e-10; Accession=PF00270.21; Description=DEADDEAH box helicase
  Pfam annotation: Domain name=Helicase_C; Domain location=173-234; Score=21.3; E_value=0.00072; Accession=PF00271.23; Description =Helicase conserved C-terminal domain
  Pfam module annotation: Pfam domain module=DEAD::Helicase_C; Domain location=1-104::173-234
TKQLGKFTDLRTSVIVGGDSMESQFEELSECPDIIIATPGRLMHHLNDVKDMTLRSVEYVVFDEADSLFSMGFAEHLHDILKKLSDTRQTLLFSATLPSALADFAKAGLRDPQVVRLDLDKKISPDLNLVFFTLRQEEKLAALLYLVRERISSEEQTMIFVXTKHHVEFLNILFREEGLEPSLSYGAMDQEARMIHISKFRARKTMLLIVTDVAARGLDIPLLDNVVNWDFPAK

SEQ ID NO: 92440 - protein, 150 aa, Setaria italica
  Transcript Sequence Number=SeqID_26466
  Gene Ontology: Mol. function=electron carrier activity; Cellular component=peroxisome; Biological process=metabolic process
  Homolog annotation: Hit_ID=B6UCS5; Match level="QueryCoverage=76%, HitCoverage=31%, E-value=4e-54, Identity=91%"; Hit description =Hydroxyacid oxidase 1
  Pfam annotation: Domain name=FMN_dh; Domain location=1-147; Score= -54.8; E_value=4.3e-11; Accession=PF01070.10; Description=FMN -dependent dehydrogenase
NSDKYISFQFIFTRAVFVIFQKNVSGLAAYVTSQIDSSLSWKDIKWLQTITSLPILVKGVITAEDARIAIECGVAGIIMSNHGGRQLDYLPATICCLEEVVREAKGRVPVFLDGGIRRGTDVFKALALGASGVFVSPLLDYPDSLTEKNA

SEQ ID NO: 92441 - protein, 174 aa, Setaria italica
  Transcript Sequence Number=SeqID_26467
  Gene Ontology: Mol. function=oxidoreductase activity; Cellular component=peroxisome; Biological process=metabolic process
  Homolog annotation: Hit_ID=B6UCS5; Match level="QueryCoverage=98%, HitCoverage=46%, E-value=4e-77, Identity=82%"; Hit description =Hydroxyacid oxidase 1
  Pfam annotation: Domain name=FMN_dh; Domain location=14-174; Score =45.4; E_value=1.7e-16; Accession=PF01070.10; Description=FMN -dependent dehydrogenase
MALITNVSDYEELAKQKLSKMVYDFYAAGAEDQRTLKENREAFSRILFRPRVLIDVSCINMSMSVLGYNISMPIMVAPTALHKLAHPEGEVASARATAAAGTIMMLSSWSSYSIEEVNSSGPGLRFFQLSVFKDRNFVQQLVRRAENAGYKAIAITVDAPRLGRREADVRNRSS

SEQ ID NO: 92442 - protein, 294 aa, Setaria italica
  Transcript Sequence Number=SeqID_26468
  Gene Ontology: Mol. function=electron carrier activity; Cellular component=peroxisome; Biological process=metabolic process
  Homolog annotation: Hit_ID=B6UCS5; Match level="QueryCoverage=100%, HitCoverage=80%, E-value=1e-142, Identity=85%"; Hit description =Hydroxyacid oxidase 1
  Pfam annotation: Domain name=FMN_dh; Domain location=1-284; Score =458.3; E_value=1.1e-134; Accession=PF01070.10; Description=FMN -dependent dehydrogenase
  Pfam annotation: Domain name=Glu_synthase; Domain location=13-272; Score=-217.2; E_value=0.027; Accession=PF01645.9; Description =Conserved region in glutamate synthase
  Pfam annotation: Domain name=ThiG; Domain location=88-270; Score= -176.2; E_value=0.0014; Accession=PF05690.6; Description=Thiazole biosynthesis protein ThiG
  Pfam module annotation: Pfam domain module=FMN_dh::Glu_synthase::ThiG; Domain location=1-284::13-272::88-270
LMVAPTALHKLAHPEGEVASARATAAAGTIMMLSSWSSYSIEEVNSSGPGLRFFQLSVFKDRNFVQQLVRRAENAGYKAIAITVDAPRLGRREADVRNRFSLPENVVLKCFEGLDLSNLDKKNVSGLAAYVTSQIDSSLSWKDIKWLQTITSLPILVKGVITAEDARIAIECGVAGIIMSNHGGRQLDYLPATICCLEEVVREAKGRVPVFLDGGIRRGTDVFKALALGASGVFIGRPVLFALAVDGEAGVRKALQMLKDELEIAMALSGCTSLKEITRDHVSTEGDRIRRSRL

SEQ ID NO: 92443 - protein, 64 aa, Setaria italica
  Transcript Sequence Number=SeqID_26469
  Gene Ontology: Mol. function=protein serine/threonine kinase activity; Biological process=protein amino acid phosphorylation
KLGIACTRSDPAARPSMRKIVSILDGNDEVLNKFEHRKESTEDWQRRNGANLALVRRFQALGIH

SEQ ID NO: 92444 - protein, 185 aa, Setaria italica
  misc_feature (124)..(124): Xaa can be any naturally occurring amino acid
  Transcript Sequence Number=SeqID_26470
  Gene Ontology: Mol. function=DNA binding; Cellular component=nucleus
  Homolog annotation: Hit_ID=B9S1G1; Match level="QueryCoverage=38%, HitCoverage=22%, E-value=5e-21, Identity=70%"; Hit description=ESC, putative
  Pfam annotation: Domain name=DUF296; Domain location=1-112; Score =149.3; E_value=1.2e-41; Accession=PF03479.7; Description=Domain of unknown function (DUF296)
DVFEALTAYARRRQRGVCVLSAAGTVANVTLRQPQSSQTGPASPAVATLHGRFEILSLAGSFLPPPAPPGATSLAAFLAGGQGQVVGGSVAGALIAAGPVVVVAASFSNVAYERLPLEEGEEVXPPAPPGSDQPGVPFGGDHAAAAAAGGLPFFNLPMGMPPMPMDGNGGWPGAPGGGVGRPPFS

SEQ ID NO: 92445 - protein, 178 aa, Setaria italica
  Transcript Sequence Number=SeqID_26471
  Gene Ontology: Mol. function=sequence-specific DNA binding; Cellular component=nucleus; Biological process=regulation of transcription, DNA-dependent
  Homolog annotation: Hit_ID=B9RX94; Match level="QueryCoverage=75%, HitCoverage=38%, E-value=3e-45, Identity=53%"; Hit description=DNA binding protein, putative
SVSEKKSAASEEKPFPLDTSISNNEDEVSAVFPLETRDKIPELEELEFEAKSAKDSAWYDIAIFLAHRRNRAGEVEVRVRFEGFGADEDEWVNVKKCIRQRSIPVEASQCKSIVEGDLVLCFREGNDEALHFDAHVLEVQRKQHDIRGCRCVFLVEYDHDRSQERVSLKRLSRRPKYF

SEQ ID NO: 92446 - protein, 65 aa, Setaria italica
  Transcript Sequence Number=SeqID_26472
  Gene Ontology: Mol. function=hydrolase activity, hydrolyzing O -glycosyl compounds; Cellular component=cell wall; Biological process= carbohydrate metabolic process
MEGSRALLLVAVAAAVAGLATANFRDDCDIPWEPQNARFTSDGNGLSMSLVSKNSGCMLRTKKQF

SEQ ID NO: 92447 - protein, 295 aa, Setaria italica
  misc_feature (26)..(26): Xaa can be any naturally occurring amino acid
  Transcript Sequence Number=SeqID_26473
  Gene Ontology: Mol. function=nucleoside-triphosphatase activity; Cellular component=mitochondrion; Biological process=DNA metabolic process
  Homolog annotation: Hit_ID=B9T6M8; Match level="QueryCoverage=99%, HitCoverage=74%, E-value=2e-75, Identity=52%"; Hit description=DNA repair protein reca, putative
  Pfam annotation: Domain name=Rad51; Domain location=1-209; Score= -136.1; E_value=0.03; Accession=PF08423.3; Description=Rad51
  Pfam annotation: Domain name=RecA; Domain location=1-294; Score =298.1; E_value=2e-86; Accession=PF00154.13; Description=recA bacterial DNA recombination protein
  Pfam module annotation: Pfam domain module=Rad51::RecA; Domain location=1-209::1-294
ISTGSLKLDLALGIGGLPKGRMVEIXKEASGKTTLALHVVKEAQKNGGYCAYIDAENAFNPSFAEAIGVDSEKLLIAQPDSAENSLSIVNTLVGGSVAVVVVDSVAALIPKCEIEGEIYTNSEDIQSRLMTQALRKIQYTLCRSESLIIFVNQVRTKLSSNPFPGIYKEVPCGGNALGFYAAVRMRTSRRELRYSEDQLMQATGIALSVQIIKNKLAPASLKEAGIDIRFGKGICHESETLEMASSVGVVVKDGSGYWINGVFLPGKAEAEKFLLENAGVADEICNTVRNQFLQR

SEQ ID NO: 92448 - protein, 52 aa, Setaria italica
  Transcript Sequence Number=SeqID_26474
  Gene Ontology: Mol. function=ion channel activity; Cellular component= spliceosome; Biological process=RNA splicing
  Homolog annotation: Hit_ID=B6T2W8; Match level="QueryCoverage=82%, HitCoverage=9%, E-value=6e-16, Identity=100%"; Hit description=Prp18 domain containing protein
TKTDVNTGQLPSKSVEFNSLANGSDLQALLSEENGSGKASEERLRLMPASKE

SEQ ID NO: 92449 - protein, 342 aa, Setaria italica
  Transcript Sequence Number=SeqID_26475
  Gene Ontology: Mol. function=ion channel activity; Cellular component= spliceosome; Biological process=RNA splicing
  Homolog annotation: Hit_ID=B6T2W8; Match level="QueryCoverage=100%, HitCoverage=77%, E-value=1e-148, Identity=80%"; Hit description =Prp18 domain containing protein
  Pfam annotation: Domain name=PRP4; Domain location=31-60; Score=41.9; E_value=2.4e-09; Accession=PF08799.3; Description=pre-mRNA processing factor 4 (PRP4) like
  Pfam annotation: Domain name=Prp18; Domain location=156-300; Score =321.2; E_value=2.1e-93; Accession=PF02840.7; Description=Prp18 domain
  Pfam module annotation: Pfam domain module=PRP4::Prp18; Domain location=31-60::156-300
PALAPKKTTQEEALLSEERRIDELDLPRHEVVRRLRVLREPVTLFGEDDDARLARFKLVLKSGVIDDIDDLDMTEGQTNDFLRDMIEMRKRQKSGRDTYAKGKGKRVGGGDGGDGGAAGDSADDGDGKGSGDDADADKDSKRMRTKFEELCNEDKILVFFKKLLNEWNQELDDMTELEKRTAKGKSMVATFKQCARYLSPLFEFCRKKVLPDDIRQALLVIVECCMKRDYLAAMDQYIKLAIGNAPWPIGVTMVGIHERSAREKIYTNSVAHIMNDETTRKYLQSIKRLMTLCQRRYPALPSKSVEFNSLANGSDLQALLSEENGSGKASEERLRLMPASKE

SEQ ID NO: 92450 - protein, 110 aa, Setaria italica
  Transcript Sequence Number=SeqID_26476
  Gene Ontology: Mol. function=protein serine/threonine kinase activity; Biological process=protein amino acid phosphorylation
  Homolog annotation: Hit_ID=C3SA69; Match level="QueryCoverage=40%, HitCoverage=3%, E-value=5e-12, Identity=68%"; Hit description =Serine/threonine protein kinase (Fragment)
QDHQHQLHSLGEEANISGDKPSKKLLTFPPFSETSSQGSNKRNLQEIYNSGSTRMKFLCNFGGRFLPRPIDGKLRYVGGEKHLIQISRGVSWQGLIYLQMKMMSTMYILW

SEQ ID NO: 92451 - protein, 107 aa, Setaria italica
  Transcript Sequence Number=SeqID_26477
MASKACLFLLAFLSVLLALANPVAGGGIKATFAGSPESWSGEAAVLRQLLSTRLEDAVAPELTVDLHLHRRVLAGMVKGSALKPDSAACIGSCPARGDSYTGRSRDA

SEQ ID NO: 92452 - protein, 77 aa, Setaria italica
  Transcript Sequence Number=SeqID_26478
  Gene Ontology: Mol. function=sequence-specific DNA binding; Cellular component=nucleus; Biological process=regulation of transcription, DNA-dependent
  Homolog annotation: Hit_ID=Q10SW1; Match level="QueryCoverage=93%, HitCoverage=11%, E-value=9e-28, Identity=84%"; Hit description =Rolled leaf1, putative, expressed
TLTHDEALLSRDIHLLQLCTGIDEKSVGSSFQLVFAPIDEHFPDDAPLISSGFRVIPLDMKTVKHRQLQYLFHLFSP

SEQ ID NO: 92453 - protein, 107 aa, Setaria italica
  Transcript Sequence Number=SeqID_26479
  Gene Ontology: Mol. function=protein dimerization activity; Cellular component=nucleus; Biological process=regulation of transcription, DNA-dependent
  Homolog annotation: Hit_ID=Q6TAQ6; Match level="QueryCoverage=99%, HitCoverage=12%, E-value=2e-51, Identity=90%"; Hit description =Homeobox-leucine zipper protein HOX10
  Pfam annotation: Domain name=Homeobox; Domain location=25-85; Score =64.1; E_value=5.4e-16; Accession=PF00046.21; Description=Homeobox domain
MAAAVAMRGGSSDSGGFDKVHGMDSGKYVRYTPEQVEVLERLYIDCPKPSSSRRQQLLRECPILANIEPKQIKVWFQNRRCRDKQRKESSRLQAVNRKLTAMNSFLW

SEQ ID NO: 92454 - protein, 76 aa, Setaria italica
  Transcript Sequence Number=SeqID_26480
  Gene Ontology: Mol. function=sequence-specific DNA binding; Cellular component=nucleus; Biological process=regulation of transcription, DNA-dependent
  Homolog annotation: Hit_ID=Q9AV49; Match level="QueryCoverage=100%, HitCoverage=9%, E-value=3e-24, Identity=71%"; Hit description =Homeobox-leucine zipper protein HOX9
  Subcellular localization annotation: CTP_CleavageSite=35; ConfidenceScore=5.27e-01
NLRSVLTIAFQFPYEMHLQDSVATMARQYVRSVVSAVQRVSMAISPSQSGLNAGQRMLSGFPEAGTLARWVCQSYQ

SEQ ID NO: 92455 - protein, 135 aa, Setaria italica
  Transcript Sequence Number=SeqID_26481
  Gene Ontology: Mol. function=sequence-specific DNA binding; Cellular component=nucleus; Biological process=regulation of transcription, DNA-dependent
  Homolog annotation: Hit_ID=Q9AV49; Match level="QueryCoverage=89%, HitCoverage=14%, E-value=8e-62, Identity=93%"; Hit description =Homeobox-leucine zipper protein HOX9
  Subcellular localization annotation: CTP_CleavageSite=28; ConfidenceScore=5.03e-01
RSEWADYNFDAYSASALKTSPCSLPGLRSMRFSGSQIIMPLAHTVENEEILEVVRLEGQALTHDDGLLSRDIHLLQLCTGIEEKSMGSCFQLVFAPIDELFPDDAPLISSGFRVIPLDIKSVEYFLSFLEIRFMV

SEQ ID NO: 92456 - protein, 261 aa, Setaria italica
  misc_feature (36)..(36): Xaa can be any naturally occurring amino acid
  Transcript Sequence Number=SeqID_26482
  Gene Ontology: Mol. function=sequence-specific DNA binding; Cellular component=nucleus; Biological process=regulation of transcription, DNA-dependent
  Homolog annotation: Hit_ID=Q6TAQ6; Match level="QueryCoverage=93%, HitCoverage=29%, E-value=1e-113, Identity=79%"; Hit description =Homeobox-leucine zipper protein HOX10
  Pfam annotation: Domain name=MEKHLA; Domain location=114-261; Score =301.1; E_value=2.4e-87; Accession=PF08670.3; Description=MEKHLA domain
FNLSPVSTCVSFNHQYLTQDGVPSGRTLDLASSLDXGTATQQASGDGSPDDCNLRSVLTIAFQFPYEMHLQDSVATMARQYVRSVVSAVQRVSMAISPSQSGLNAGQRMLSGFPEAGTLARWVCQSYHYHLGVELLNQSGEGGEALLKMLWHHPDAILCCSFKEKPMFTFANKAGLDMLETSLVALQDLTLDKIFDESGRKALFSDISKLMEQGYVYLPSGVCMSGMGRHVSFDQAVAWKVLGEDSNVHCLAFCFVNWSFV

SEQ ID NO: 92457 - protein, 306 aa, Setaria italica
  misc_feature (80)..(80): Xaa can be any naturally occurring amino acid
  Transcript Sequence Number=SeqID_26483
  Gene Ontology: Mol. function=sequence-specific DNA binding; Cellular component=nucleus; Biological process=regulation of transcription, DNA-dependent
  Homolog annotation: Hit_ID=Q9AV49; Match level="QueryCoverage=75%, HitCoverage=27%, E-value=1e-122, Identity=91%"; Hit description =Homeobox-leucine zipper protein HOX9
MAHGIDLCEVQYIFHLLLSYLLRKHTLLWFILLPLDTSTVHIWSDGLSVISASYTDCYVVKALRHIRQIAQETSGEVAYXLGRQPAVLRTFSQRLSRGFNDAISGFNDDGWSVMGGDGTEDVIIACNSKKTRNSSNPASAFGAPGGIICAKASMLLQSVPPAVLVRFLREHRSEWADYNFDAYSASALKTSPCSLPGLRSMRFSGSQIIMPLAHTVENEEILEVVRLEGQALTHDDGLLSRDIHLLQLCTGIEEKSMGSCFQLVFAPIDELFPDDAPLISSGFRVIPLDIKSVEYFLSFLEIRFMV

SEQ ID NO: 92458 - protein, 777 aa, Setaria italica
  Transcript Sequence Number=SeqID_26484
  Gene Ontology: Mol. function=sequence-specific DNA binding; Cellular component=nucleus; Biological process=regulation of transcription, DNA-dependent
  Homolog annotation: Hit_ID=Q6TAQ6; Match level="QueryCoverage=100%, HitCoverage=92%, E-value=0.0, Identity=85%"; Hit description =Homeobox-leucine zipper protein HOX10
  Pfam annotation: Domain name=MEKHLA; Domain location=630-777; Score =301.5; E_value=1.9e-87; Accession=PF08670.3; Description=MEKHLA domain
  Pfam annotation: Domain name=START; Domain location=101-311; Score =200.7; E_value=3.9e-57; Accession=PF01852.11; Description=START domain
  Pfam annotation: Domain name=bZIP_1; Domain location=4-63; Score=9.0; E_value=0.038; Accession=PF00170.13; Description=bZIP transcription factor
  Pfam module annotation: Pfam domain module=MEKHLA::START::bZIP_1; Domain location=630-777::101-311::4-63
LLGQTKPKQIKVWFQNRRCRDKQRKESSRLQAVNRKLTAMNKLLMEENERLQKQVSQLVHENAHMRQQLQNTSLANDTSCESNVTTPANLRDASNPSGLLSIAEETLTEFLSKATGTAIDWVQMPGMKPGPDSVGIVAISHGCRGVAARACGLVNLEPTKVIEILKDRPSWFRDCRSLEVFTMFPAGNGGTIELVYMQMYAPTTLVPARDFWTLRYTTTMEDGSLVVCERSLSGSGGGPNAASAQQFERAEMLPSGYLVRPCEGGGSIVHIVDHLDLKAWSVPEVLRPLYESSIVVAQKMTTVALRHLRQIAQETSGEVVYALGRQPAVLRTFSQRLSRGFNDAISGFNDDGWSIMGGDGIEDVVVACNSTKKIRNNSNVGITFGAPGGIICAKASMLLQSVPPAVLVRFLREHRSEWADYNIDAYLASSLKASACSLPGLRPMRFSGGQMIMPLAHTVENEEILEVVRLEGQSLTHDEALLSRDIHLLQLCTGIDEKSVGSSFQLVFAPIDEHFPDDAPLISSGFRVIPLDMKTDGVPSGRTLDLASSLDVGTATPQASGDASPDDCNLRSVLTIAFQFPYEMHLQDSVAAMARQYVRSIVSAVQRVSMAISPSRSGLSTGQKIISGFPEAATLVRWICKSYQYHLGVDLVSHSDEAGESLLRMFWDHQDAVLCCSFKEKPVFTFGNQMGIDMLETTLIALQDLTLDKIFDEAGRKALHAEIPKLMEQGYAYLPAGVCLSGMGRHVSYEQAIAWKVLGEDSNVHCLAFCFVNWSFV

SEQ ID NO: 92459 - protein, 259 aa, Setaria italica
  Transcript Sequence Number=SeqID_26485
  Gene Ontology: Mol. function=GTP binding; Cellular component =intracellular
  Homolog annotation: Hit_ID=Q9ZSB8; Match level="QueryCoverage=89%, HitCoverage=38%, E-value=8e-85, Identity=62%"; Hit description =F3H7.11 protein
  Pfam annotation: Domain name=MMR_HSR1; Domain location=1-81; Score =3.1; E_value=0.00052; Accession=PF01926.15; Description=GTPase of unknown function
VGKSTLLNAIAKCSGVVGRPTLTEAPVPGTTLDVIKVDGVLGAQAKLFDTPGLLHGHQLTSRLTSEEMKLVQVRKEMRPRTYRIKTGQSIHIGGLVRLDVEELTVGSIYITVWASSLLPLHMGKTENAATMIKEHFGLQLQPPIGQDRVKELGKWVRKQFKVSGNSWDTNSKDIAIAGLGWFGVGLKGEAVLGLWTYDGVDVISRSSLVHERASIFEEAGFTVSQIVSQADSMTNKLKGTKKTNKKKESKTKLLSTRST

SEQ ID NO: 92460 - protein, 172 aa, Setaria italica
  Transcript Sequence Number=SeqID_26486
AAVAQVAAGAVEGPDESRAADGAQALRDDVERGAHQGDLAREEKAEGDGRVDVAAGDAGGAVDEHEDHAAEGPRDAQHAGAAARLGLGLALVPDHGGQRDVHEEQRGHELGDDGAVQGPLAQLAGVHERRRGRVFVVLLTPCGLHGFTRIHILATTESKEAYRSYRRCLLKC

SEQ ID NO: 92461 - protein, 220 aa, Setaria italica
  Transcript Sequence Number=SeqID_26487
  Gene Ontology: Mol. function=nucleoside-triphosphatase activity; Cellular component=membrane; Biological process=transport
  Homolog annotation: Hit_ID=Q8GU84; Match level="QueryCoverage=100%, HitCoverage=60%, E-value=1e-105, Identity=57%"; Hit description=PDR -like ABC transporter
  Pfam annotation: Domain name=ABC_tran; Domain location=48-220; Score =66.8; E_value=8e-17; Accession=PF00005.19; Description=ABC transporter
VTLPFQPLSLCFNHINYYVDMPAEMKEQGFTESRLQLLSDISGSFRPGVLTALVGVSGAGKTTLMDVLAGRKTSGAVEGDVTLSGYPKKQETFARISGYCEQTDIHSPNVTVYESIAYSAWLRLPSDVDDVTKKMFVEEVMALVELDVLRNALVGLPGVSGLSTEQRKRLTIAVELVANPSIIFMDEPTSGLDARAAAIVMRTVRNTVNTGRTVVCTIHQ

SEQ ID NO: 92462 - protein, 84 aa, Setaria italica
  Transcript Sequence Number=SeqID_26488
  Gene Ontology: Cellular component=membrane
  Homolog annotation: Hit_ID=B6SKY9; Match level="QueryCoverage=86%, HitCoverage=16%, E-value=2e-16, Identity=57%"; Hit description =Integral membrane protein DUF6 containing protein
GIFSTSFCLWAEVAAMRDVSATETAIIYGLEPVWGAAFAWAMLGERWGMTGFVGGIFIIVGSLMAQIFGSIPDTSGGDTYQLNS

SEQ ID NO: 92463 - protein, 196 aa, Setaria italica
  Transcript Sequence Number=SeqID_26489
  Gene Ontology: Mol. function=phosphatidylcholine-sterol O -acyltransferase activity; Cellular component=plasma membrane; Biological process=lipid metabolic process
  Homolog annotation: Hit_ID=B9R6Y0; Match level="QueryCoverage=99%, HitCoverage=45%, E-value=1e-30, Identity=42%"; Hit description=1-O -acylceramide synthase, putative
YVEGVNLFGAPYDFRYAPAAAGLSSEVFSDFSSSLKLLVERASERNGNKPVILLTHSMGGLFTMVFLDRSPLAWRRRYVKHLVMLCLGVGGSPLNMWPLAFDTLSPPSLPGTVLTYGNRSFASMFSLLPSPKVYGDTPLVITGAKNYSADNMVEYLAAVGLSEEQVALYQTRALPVTLNLRAPLVPMTSINGIGVP

SEQ ID NO: 92464 - protein, 65 aa, Setaria italica
  misc_feature (41)..(41): Xaa can be any naturally occurring amino acid
  Transcript Sequence Number=SeqID_26490
GRKVVGKTTLMTHLVCKNEIVKSHFSMVIWVCCRENPGPEXVIMRSLCKKLEFTGCIQDRPKGQG

SEQ ID NO: 92465 - protein, 202 aa, Setaria italica
  Transcript Sequence Number=SeqID_26491
  Gene Ontology: Mol. function=oxidoreductase activity; Biological process=flavonoid biosynthetic process
  Homolog annotation: Hit_ID=B6TCN8; Match level="QueryCoverage=77%, HitCoverage=43%, E-value=1e-52, Identity=64%"; Hit description =NAD(P)H-dependent oxidoreductase
  Pfam annotation: Domain name=Aldo_ket_red; Domain location=54-202; Score=-13.4; E_value=3.1e-07; Accession=PF00248.13; Description =Aldoketo reductase family
  Subcellular localization annotation: CTP_CleavageSite=78; ConfidenceScore=5.51e-01
APGSVNSPRPTARPWNQLTKQRKESAQAAAPPPMASPPRMASARSPKIPEFPAGPAGRPVPAVGLGTASFPLVEEDVRAAVLAALELGYRHLDTASLYRSERAVGEAVAEAARRGVVASREEVFVTTKVWCTQCHPELVLPSLRESLQNLQMEYVDLYLVHWPMAVKPSKPHFPMKREDMVPMDLGGVWQAMEECRRLGLAK

SEQ ID NO: 92466 - protein, 97 aa, Setaria italica
  Transcript Sequence Number=SeqID_26492
  Gene Ontology: Mol. function=protein serine/threonine kinase activity; Biological process=protein amino acid phosphorylation
  Homolog annotation: Hit_ID=Q9LL52; Match level="QueryCoverage=81%, HitCoverage=12%, E-value=5e-12, Identity=45%"; Hit description =Receptor-like kinase
SLVYVFITAITPWVRYIKPSCRYLSMIPLGSWHARAPINASFEDVVKFMRNGFAVRFPVKIEELTYRVIINQCLNDSVSYFYTQISSSSILKRTSAI

SEQ ID NO: 92467 - protein, 201 aa, Setaria italica
  Transcript Sequence Number=SeqID_26493
  Gene Ontology: Mol. function=protein serine/threonine kinase activity; Biological process=protein amino acid phosphorylation
  Homolog annotation: Hit_ID=B9RTY0; Match level="QueryCoverage=81%, HitCoverage=26%, E-value=3e-23, Identity=44%"; Hit description =Mitogen activated protein kinase kinase kinase 3, mapkkk3, mekk3, putative
RFSQSREFGGLGKLAERQMSENDFTFPCEGSCEEDDEFTESKIKEFLDEKAMDLKKLQTPLYEFYNTVNAGASQRVSDVSRASNMANPHLPPRAIKMVGGAAIEPICVNLNNACPRSCARRFSRSSVESSRVLREIASPQLNKLEDKVHDDIQDNPSLSFSKIQKWKEELDQELKREREMRSGGYGKASSPSPRSRRYVVS

SEQ ID NO: 92468 - protein, 120 aa, Setaria italica
  Transcript Sequence Number=SeqID_26494
  Gene Ontology: Mol. function=NAD(P)H dehydrogenase (quinone) activity; Cellular component=plasma membrane; Biological process =oxidation reduction
  Homolog annotation: Hit_ID=B6UDE7; Match level="QueryCoverage=97%, HitCoverage=58%, E-value=2e-51, Identity=85%"; Hit description=NADPH quinone oxidoreductase 1
RDADCFLFASPEYNYSITSPLRTRWTGASRGVNCWASKPAAIVCAGGNFGGGRSSYQLRQVGVFLDIHFINKPELFVFAFSEPDKFFDGDGNLIHAETRERLKQVLLSLQAFTLRLQRKD

SEQ ID NO: 92469 - protein, 142 aa, Setaria italica
  misc_feature (136)..(136): Xaa can be any naturally occurring amino acid
  Transcript Sequence Number=SeqID_26495
  Gene Ontology: Mol. function=microtubule motor activity; Cellular component=microtubule associated complex; Biological process =microtubule-based movement
  Homolog annotation: Hit_ID=B6U192; Match level="QueryCoverage=95%, HitCoverage=16%, E-value=3e-63, Identity=87%"; Hit description=ATP binding protein
  Pfam annotation: Domain name=Kinesin; Domain location=7-139; Score= -115.3; E_value=8.9e-08; Accession=PF00225.15; Description=Kinesin motor domain
VEGLDGPMSRKEKEAGSRSCVKIVNKKEVYLTEYASENDYLRLKRVRGRHFCFDSAFPDSTTQAEVYSTSTADLVEGVLQGRNGTVFCYGATGAGKTYTMLGTMENPGVMVLAIKDLFSKVRQRSHDGNHSIQLSXYLEIYN

SEQ ID NO: 92470 - protein, 91 aa, Setaria italica
  Transcript Sequence Number=SeqID_26496
YGRWPFWFAWPSTIQVRFGVFGAPIDVALKFYVASLEASTSRLEPALSFKLGGPLFQGRRVGWWLRLPASKMTRRTLQGLGCNFILSGIPL

SEQ ID NO: 92471 - protein, 135 aa, Setaria italica
  misc_feature (37)..(37): Xaa can be any naturally occurring amino acid
  Transcript Sequence Number=SeqID_26497
  Gene Ontology: Mol. function=catalytic activity
  Homolog annotation: Hit_ID=Q10AR1; Match level="QueryCoverage=93%, HitCoverage=10%, E-value=4e-23, Identity=38%"; Hit description =Pentatricopeptide, putative, expressed
DHLPFRADGVIWATYLAACRMHKDEEGGKVAVCSLVXLRKSSISTYVFLSSMHAASGNWVEAKVAREAMREKGVAKFPGCSWITVGNKTSLFVVQDTHHPESLSIYEMLGNLTGVLNRDDRIDEYDQLSLSGMLA

SEQ ID NO: 92472 - protein, 100 aa, Setaria italica
  misc_feature (85)..(85): Xaa can be any naturally occurring amino acid
  misc_feature (96)..(96): Xaa can be any naturally occurring amino acid
  Transcript Sequence Number=SeqID_26498
  Gene Ontology: Mol. function=kinase activity; Cellular component =plasma membrane
  Homolog annotation: Hit_ID=B6SHI8; Match level="QueryCoverage=86%, HitCoverage=14%, E-value=1e-37, Identity=80%"; Hit description=CENP -E like kinetochore protein
  Pfam annotation: Domain name=KIP1; Domain location=3-75; Score=134.6; E_value=3.1e-37; Accession=PF07765.4; Description=KIP1-like protein
THSWWWDSHISPQNSKWLAENLEEMEKQVKEVLGLIGEGEFSAEKAEAFYQQQPLLITHVENFHRMYRALAARYDNVTGELRKNXPSSLQSHGSLXSLNQ

SEQ ID NO: 92473 - protein, 66 aa, Setaria italica
  Transcript Sequence Number=SeqID_26499
  Gene Ontology: Mol. function=protein serine/threonine kinase activity; Biological process=protein amino acid phosphorylation
  Homolog annotation: Hit_ID=Q6K2I3; Match level="QueryCoverage=98%, HitCoverage=9%, E-value=9e-20, Identity=67%"; Hit description =Putative OsD305
NIEGKNDAAEALNWRTRVHVVLEAAQGLDYLHKGCNLPIVHRDVKTSNILMGQKLQAKIGDFGLSK

SEQ ID NO: 92474 - protein, 56 aa, Setaria italica
  Transcript Sequence Number=SeqID_26500
ARADKLLAQLRQAARAPDLYDRPAARIMAGATTALSRASALAARCARGHPRLRSLF

SEQ ID NO: 92475 - protein, 84 aa, Setaria italica
  Transcript Sequence Number=SeqID_26501
  Subcellular localization annotation: CTP_CleavageSite=74; ConfidenceScore=5.43e-01
FLVSVLLSLHSASLPSSLSLGSDLQLSTLARRLYPDSIASPPVFFLQPQPRRILPATPTRSIDGSVAELTPLTPCMAIPRQGQY

SEQ ID NO: 92476 - protein, 96 aa, Setaria italica
  Transcript Sequence Number=SeqID_26502
NQNEDEQEHDDHRMENIPVSGVRDLHGYDLNSEQMLLHDGAEKHALDSCHLTDGQMLFDQSAGGQAIVRNMGNGRTIPLINLEDDYEEQSDTRGFL

SEQ ID NO: 92477 - protein, 328 aa, Setaria italica
  Transcript Sequence Number=SeqID_26503
DACMIEPLGEDNGCSEARDEMEAPPPQSEVETSVGDLNRDEQELPAWYRIFDLSIIEAPGGCEIPEIPGDPPADHASDSGPFLVGQTHQQTNDDTSETQGEDEHAGDNRVLGDGHDLNKYDLNSEADEHAQDDTSENEGQDEHAGDNRMLKDGHDLNRYDLNNEAVEDAQDNHLLGNERLLLNHGMGVHDTDRSHLSNGQLLLNQNEDEQEHDDHRMENIPVSGEQLLLSHSADGHHVNNHQMESEVMLLPTGVRDLHGYDLNSEQMLLHDGAEKHALDSCHLTDGQMLFDQSAGGQAIVRNMGNGRTIPLINLEDDYEEQSDTRGFL

SEQ ID NO: 92478 - protein, 222 aa, Setaria italica
  Transcript Sequence Number=SeqID_26504
AVPDAGTRPVVATGADADALRSEIEALRLKIAQLESLLEENTKTLNSKASILEEDNKLIEAMECDIQLLIDGPESTKDSKSKSYSAGNIKSMEDEVQQLQQEVSKINKNSDTIESLARDTERRVETLSSEVKKIEDIIAEQWIQIRQFEQAFVLTKMMASKVHERSRPLQMVFKWPGKETILKAYRFRKAIRRQYIPDTDRPDVFFLGGSVSRSSISIPYRT

SEQ ID NO: 92479 - protein, 176 aa, Setaria italica
  misc_feature (24)..(24): Xaa can be any naturally occurring amino acid
  misc_feature (28)..(28): Xaa can be any naturally occurring amino acid
  misc_feature (175)..(175): Xaa can be any naturally occurring amino acid
  Transcript Sequence Number=SeqID_26505
KTKNKKLTKRTKEDEVQVLQQECXKINXEQRTIESLARDTERRVETLSSEVKKIEDIIAEQWIQIRQFEQAFVLTKMMASKVHERSRPLQMVFKWPGKETILKYAGDIDLKDIFLRGASYAWSCFSHTYKQSSSFRQEINRYYHEAYRFRKAIRRQYIPDTDRPDVFFLGGSVSXS

SEQ ID NO: 92480 - protein, 115 aa, Setaria italica
  Transcript Sequence Number=SeqID_26506
  Gene Ontology: Mol. function=oxidoreductase activity; Cellular component=extracellular region; Biological process=lignin catabolic process
  Homolog annotation: Hit_ID=Q339K6; Match level="QueryCoverage=97%, HitCoverage=18%, E-value=3e-44, Identity=70%"; Hit description =Laccase-15
  Pfam annotation: Domain name=Cu-oxidase; Domain location=2-115; Score= 44.3; E_value=4.8e-10; Accession=PF00394.14; Description=Multicopper oxidase
MEIPIIIGEWWQMDLFKADWGIKQHVIDAYYTASTINGKLGDIYNCSGAVEDGYKLDVEPGKTYLLRVINAALFAEYYLKIAGHKFTVVAADANYVTPYTTDVIAIAPGETVDVP

SEQ ID NO: 92481 - protein, 41 aa, Setaria italica
  Transcript Sequence Number=SeqID_26507
  Homolog annotation: Hit_ID=B6SJX7; Match level="QueryCoverage=100%, HitCoverage=9%, E-value=3e-12, Identity=90%"; Hit description=DAG protein
PSYDGDSREGAGPAYGGDNWQRGSDQYPSPGEGQGNWQGRQ

SEQ ID NO: 92482 - protein, 70 aa, Setaria italica
  Transcript Sequence Number=SeqID_26508
MCGGAILAELIPSATAGGKGRKRAPAAAAKDDDFEAAFREFDEDSDEEVVLVTERKAFAFGAAAGARRSR

SEQ ID NO: 92483 - protein, 189 aa, Setaria italica
  Transcript Sequence Number=SeqID_26509
  Gene Ontology: Mol. function=transferase activity, transferring groups other than amino-acyl groups; Biological process=flavonoid biosynthetic process
  Homolog annotation: Hit_ID=Q01MP2; Match level="QueryCoverage=96%, HitCoverage=40%, E-value=3e-57, Identity=62%"; Hit description =H1005F08.2 protein
RTTRWLSRGCASAGSSPPRTARCCTAAAHLWRCITKARGLDAREITRLCVAVDGRMRMLHPPVPEGYTGNVVLWARPAAAAGDLVSMPLRLAVELISREVARVDDSYFRSFIDFASSGAVEEERLVPSADSSETVLSPDVEVDSLLHAPFYDLDFGGGPPFFFMPSYLSVEGTVFIVRSFSGDRSMDAY

SEQ ID NO: 92484 - protein, 68 aa, Setaria italica
  Transcript Sequence Number=SeqID_26510
  Homolog annotation: Hit_ID=B6U5W5; Match level="QueryCoverage=51%, HitCoverage=9%, E-value=7e-10, Identity=91%"; Hit description=Prp18 domain containing protein
MDLLKRELEKKRKSASADFGGKSFVRRSELEQKQLQKRRDEQRQLLAKASAPAASSDSAAGTAGSDPS

SEQ ID NO: 92485 - protein, 75 aa, Setaria italica
  Transcript Sequence Number=SeqID_26511
LTWQEFVFLRLNIENCWRICFFFLLSIIIGRFKNDLFRTLLFGTLADNLPQSNAVPKAAESFNFLIFFFQCFQYV

SEQ ID NO: 92486 - protein, 135 aa, Setaria italica
  misc_feature (112)..(112): Xaa can be any naturally occurring amino acid
  misc_feature (121)..(122): Xaa can be any naturally occurring amino acid
  misc_feature (125)..(125): Xaa can be any naturally occurring amino acid
  Transcript Sequence Number=SeqID_26512
  Gene Ontology: Mol. function=protein serine/threonine kinase activity; Cellular component=plasma membrane; Biological process =protein amino acid phosphorylation
  Homolog annotation: Hit_ID=Q5N8C4; Match level="QueryCoverage=98%, HitCoverage=12%, E-value=1e-44, Identity=67%"; Hit description =Putative receptor-like protein kinase 2
YKYDYKMLIRISTALVNQTFKAPTAFGPYSFIASTYFPGPINKKSSMGKGAIIGIAIAGCVLIVGLILVAIYALRQKRIAKEAVERTTNPFASWGAGGTDNGDAPQLKGAKXTFSFEELKXXTNXFSEINEIGSG

SEQ ID NO: 92487 - protein, 133 aa, Setaria italica
  misc_feature (86)..(86): Xaa can be any naturally occurring amino acid
  Transcript Sequence Number=SeqID_26513
SVLAANPNHTLTTAWSPSGAPGCASKKLVIVSPDSELKRGRIYFLIPSATLPADRRSKKQGSSKKSGGSKRPSRHHHHSKKSSAGXTAEQDNYLRELLSEKTASSGGHRRRRSGARVGVWRPQLESIVEEASD

SEQ ID NO: 92488 - protein, 177 aa, Setaria italica
  Transcript Sequence Number=SeqID_26514
  Gene Ontology: Mol. function=binding; Cellular component=cellular _component; Biological process=response to unfolded protein
  Homolog annotation: Hit_ID=Q8L724; Match level="QueryCoverage=94%, HitCoverage=28%, E-value=1e-32, Identity=43%"; Hit description =Stress-induced protein sti1-like protein
  Pfam annotation: Domain name=TPR_1; Domain location=108-141; Score =23.2; E_value=0.001; Accession=PF00515.20; Description =Tetratricopeptide repeat
  Pfam annotation: Domain name=TPR_1; Domain location=142-175; Score =27.6; E_value=5.2e-05; Accession=PF00515.20; Description =Tetratricopeptide repeat
  Pfam annotation: Domain name=TPR_2; Domain location=108-141; Score =23.5; E_value=0.00086; Accession=PF07719.9; Description =Tetratricopeptide repeat
  Pfam annotation: Domain name=TPR_2; Domain location=142-175; Score =18.0; E_value=0.041; Accession=PF07719.9; Description=Tetratricopepti de repeat
  Pfam module annotation: Pfam domain module=TPR_1::TPR_1::TPR_2::TPR _2; Domain location=108-141::142-175::108-141::142-175
LDVDVQHEGEHLDQPDFVQMLREVQRNPSSLNTYLSDQRMVQVLTLMLNINIQHKSNGASEPASAQSAPQTPKQQPEAKAREPEPEPEPEPMEVTEEEKERKERKAAAQKEKEAGNAAYKKKDFDTAIQHYTKAMELDDEDISYITNRAAVYLEMGKYDECIKDCDKAVERGRELHA

SEQ ID NO: 92489 - protein, 81 aa, Setaria italica
  Transcript Sequence Number=SeqID_26515
  Homolog annotation: Hit_ID=B9RGP6; Match level="QueryCoverage=95%, HitCoverage=16%, E-value=4e-21, Identity=62%"; Hit description =Transporter, putative
MVGRLKWLPLLVLCSKLCSPGIEGTFYALLMSLQNAGLLMSAWWGGLPLHKLNVTRMEVSNLWIAVLIRNISRACPLDTTV

SEQ ID NO: 92490 - protein, 73 aa, Setaria italica
  Transcript Sequence Number=SeqID_26516
  Gene Ontology: Mol. function=voltage-gated anion channel activity; Cellular component=mitochondrial outer membrane; Biological process =anion transport
  Homolog annotation: Hit_ID=Q9SPD8; Match level="QueryCoverage=87%, HitCoverage=23%, E-value=6e-23, Identity=84%"; Hit description =Voltage-dependent anion channel protein 1b
  Subcellular localization annotation: CTP_CleavageSite=51; ConfidenceScore=5.16e-01
FSVSLPFSFFTFGTQHAPYLVLVLKARFNNSGKASALIQHEWRPKSLVTISAEVDTKTIEKSSKVGIAVALKP

SEQ ID NO: 92491 - protein, 99 aa, Setaria italica
  Transcript Sequence Number=SeqID_26517
  Gene Ontology: Mol. function=protein serine/threonine kinase activity; Cellular component=extracellular region; Biological process=protein amino acid phosphorylation
  Homolog annotation: Hit_ID=Q9SHI3; Match level="QueryCoverage=74%, HitCoverage=10%, E-value=2e-15, Identity=52%"; Hit description =Similar to disease resistance proteins
  Pfam annotation: Domain name=LRR_1; Domain location=11-33; Score=8.1; E_value=8.7; Accession=PF00560.25; Description=Leucine Rich Repeat
  Pfam annotation: Domain name=LRR_1; Domain location=36-58; Score=8.8; E_value=6.2; Accession=PF00560.25; Description=Leucine Rich Repeat
  Pfam annotation: Domain name=LRR_1; Domain location=60-82; Score=8.8; E_value=6.4; Accession=PF00560.25; Description=Leucine Rich Repeat
  Pfam module annotation: Pfam domain module=LRR_1::LRR_1::LRR_1; Domain location=11-33::36-58::60-82
  Subcellular localization annotation: CTP_CleavageSite=43; ConfidenceScore=5.18e-01
LPSTTLEVMKNLVALNASNNSLMGPMPSSICNNAPSLAMLDICLNEFSGTISSEFGNCSMLKVLKAGHNNLTGVLPHELFNATSLEQLSFPNNDLQGIL

SEQ ID NO: 92492 - protein, 75 aa, Setaria italica
  Transcript Sequence Number=SeqID_26518
NPQKPHSSMCMLPIKKCFEHGDLLVDRHKTKLTKSQILFPNHFIRRCKISITIISAATFTVYSKNLSSSPPVFTA

SEQ ID NO: 92493 - protein, 119 aa, Setaria italica
  Transcript Sequence Number=SeqID_26519
  Gene Ontology: Mol. function=lactoylglutathione lyase activity
  Homolog annotation: Hit_ID=B6TPH0; Match level="QueryCoverage=96%, HitCoverage=36%, E-value=8e-56, Identity=92%"; Hit description =Lactoylglutathione lyase
IGEGFGHFGIANEDVYKLAENIKSKGGNITREPGPVKGGSTVIAFAQDPDGYRFALIQRAETPEPLCQVMLRVGDLERSIKFYEKALGMKLLEKKDVPDYKYTIAKLGYADEDKTIYCL

SEQ ID NO: 92494 - protein, 171 aa, Setaria italica
  Transcript Sequence Number=SeqID_26520
  Gene Ontology: Mol. function=lactoylglutathione lyase activity
  Homolog annotation: Hit_ID=B6TPH0; Match level="QueryCoverage=100%, HitCoverage=84%, E-value=9e-87, Identity=73%"; Hit description =Lactoylglutathione lyase
  Pfam annotation: Domain name=Glyoxalase; Domain location=36-161; Score=62.3; E_value=1.9e-15; Accession=PF00903.17; Description =GlyoxalaseBleomycin resistance proteinDioxygenase superfamily
TREPGPVKGGSTVIAFAQDPDGYRFALIQRAETPEPLCQVMLRVGDLERSIKFYEKALGMKLLEKKDVPDYKYTIAKLGYADEDKTTVLELIYNYGVTEYSKGNAYAQVAIGTNDVYKSAEAVDLATKELGGKILRQPGPLPVINTKITSFVDPDGWKVLVDHADFLKELQ

SEQ ID NO: 92495 - protein, 159 aa, Setaria italica
  misc_feature (148)..(148): Xaa can be any naturally occurring amino acid
  Transcript Sequence Number=SeqID_26521
  Gene Ontology: Mol. function=lactoylglutathione lyase activity
  Homolog annotation: Hit_ID=B6TPH0; Match level="QueryCoverage=98%, HitCoverage=75%, E-value=5e-83, Identity=77%"; Hit description =Lactoylglutathione lyase
  Pfam annotation: Domain name=Glyoxalase; Domain location=52-157; Score=23.1; E_value=0.00082; Accession=PF00903.17; Description =GlyoxalaseBleomycin resistance proteinDioxygenase superfamily
MSYLLAENIKSKGGKITREPGPVKGGSTVIAFAQDPDGYLFELIQRAETPEPLCQVMLRVGDLERSIKFYEKALGMKLLRKKDVPDYKYTIAMLGYADEDKTTVLELTYNYGRTEYSKGNAYAQVAIGTNDVYKSAEAVDLATKELGXKILRQPGPLPG

SEQ ID NO: 92496 - protein, 314 aa, Setaria italica
  Transcript Sequence Number=SeqID_26522
  Gene Ontology: Mol. function=lactoylglutathione lyase activity
  Homolog annotation: Hit_ID=B6TPH0; Match level="QueryCoverage=96%, HitCoverage=99%, E-value=1e-148, Identity=83%"; Hit description =Lactoylglutathione lyase
  Pfam annotation: Domain name=Glyoxalase; Domain location=188-303; Score=55.7; E_value=1.8e-13; Accession=PF00903.17; Description =GlyoxalaseBleomycin resistance proteinDioxygenase superfamily
  Pfam annotation: Domain name=Glyoxalase; Domain location=58-179; Score=125.3; E_value=2e-34; Accession=PF00903.17; Description =GlyoxalaseBleomycin resistance proteinDioxygenase superfamily
  Pfam module annotation: Pfam domain module=Glyoxalase::Glyoxalase; Domain location=188-303::58-179
LGFLPYWLERAYCCGCACSLIESSRARSESPSQGMATGSEAAKSAEAVLEWNKQDNKRMLHAVYRVGDLDRTIKYYTECFGMKLLRKRDVPDEKYTNAFLGFGPEDTNFALELTYNYGVDKYDIGEGFGHFGIANEDVYKLAENIKSKGGNITREPGPVKGGSTVIAFAQDPDGYRFALIQRAETPEPLCQVMLRVGDLERSIKFYEKALGMKLLEKKDVPDYKYTIAKLGYADEDKTTVLELIYNYGVTEYSKGNAYAQSAEAVDLATKELGGKILRQPGPLPVINTKITSFVDPDGWKVVLVDHADFLKELQ

SEQ ID NO: 92497 - protein, 198 aa, Setaria italica
  Transcript Sequence Number=SeqID_26523
  Gene Ontology: Mol. function=lactoylglutathione lyase activity
  Homolog annotation: Hit_ID=B6TPH0; Match level="QueryCoverage=97%, HitCoverage=84%, E-value=2e-99, Identity=74%"; Hit description =Lactoylglutathione lyase
  Pfam annotation: Domain name=Glyoxalase; Domain location=62-187; Score=64.6; E_value=3.7e-16; Accession=PF00903.17; Description =GlyoxalaseBleomycin resistance proteinDioxygenase superfamily
LWVDFGIANEDVYKLAENIKSKGGNITREPGPVKGGSTVIAFAQDPDGYRFALIQRAETPEPLCQVMLRVGDLERSIKFYEKALGMKLLEKKDVPDYKYTIAKLGYADEDKTTVLELIYNYGVTEYSKGNAYAQVAIGTNDVYKSAEAVDLATKELGGKILRQPGPLPVINTKITSFVDPDGWKVVLVDHADFLKELQ

SEQ ID NO: 92498 - protein, 125 aa, Setaria italica
  misc_feature (19)..(19): Xaa can be any naturally occurring amino acid
  Transcript Sequence Number=SeqID_26524
  Gene Ontology: Mol. function=lactoylglutathione lyase activity
  Homolog annotation: Hit_ID=B6TPH0; Match level="QueryCoverage=100%, HitCoverage=80%, E-value=4e-57, Identity=68%"; Hit description =Lactoylglutathione lyase
  Pfam annotation: Domain name=Glyoxalase; Domain location=1-114; Score= 19.0; E_value=0.0019; Accession=PF00903.17; Description =GlyoxalaseBleomycin resistance proteinDioxygenase superfamily
SIKFYEKALGMKLLRKKEXRPRINKYTIAMLGYADEDKTTVLELTYNYGRTEYSKGNAYAQVAIGTNDVYKSAEAVDLATKELGGKILRQPGPLPGINTKIASFVDPDGWKVVLVDNADLLKELQ

SEQ ID NO: 92499 - protein, 320 aa, Setaria italica
  misc_feature (180)..(180): Xaa can be any naturally occurring amino acid
  misc_feature (206)..(206): Xaa can be any naturally occurring amino acid
  misc_feature (230)..(230): Xaa can be any naturally occurring amino acid
  misc_feature (251)..(251): Xaa can be any naturally occurring amino acid
  misc_feature (280)..(280): Xaa can be any naturally occurring amino acid
  Transcript Sequence Number=SeqID_26525
  Gene Ontology: Mol. function=lactoylglutathione lyase activity
  Homolog annotation: Hit_ID=B6TPH0; Match level="QueryCoverage=93%, HitCoverage=92%, E-value=1e-151, Identity=90%"; Hit description =Lactoylglutathione lyase
  Pfam annotation: Domain name=Glyoxalase; Domain location=179-309; Score=44.9; E_value=3.2e-10; Accession=PF00903.17; Description =GlyoxalaseBleomycin resistance proteinDioxygenase superfamily
  Pfam annotation: Domain name=Glyoxalase; Domain location=48-169; Score=131.5; E_value=2.8e-36; Accession=PF00903.17; Description =GlyoxalaseBleomycin resistance proteinDioxygenase superfamily
  Pfam module annotation: Pfam domain module=Glyoxalase::Glyoxalase; Domain location=179-309::48-169
ELAAAPVRAPWSNRLGTGLNPIQGMATGSEAVKPAEAVLEWNKQDNKRMLHAVYRVGDLDRTIKYYTECFGMKLLRKRDVPDEKYTNAFLGFGPEETNFALELTYNYGVDKYDIGEGFGHFAIANEDVYKLAENIKSKGGKITREPGPVKGGSTVIAFAQDPDGYLFELIQRAETPEPLXCQVMLRVGDLERSIKFYEKALGMKLXLRKKDVPDYKYTIAMLGYADEDKXTNLFLGSLTYNYGRTEYSKGXNAYAQVAIGTNDVYKSAEAVDLATKELGXKILRQPGPLPGINTKIASFVDPDGWKVVLVDNADLLKELQ

SEQ ID NO: 92500 - protein, 172 aa, Setaria italica
  Transcript Sequence Number=SeqID_26526
GELAQSGDYTPTKLTMLTNTGALNEVMQMDGYLLCEVCNVRTADRVTMMCHLEGSKHISKGQNKGQASSKPPDQAAKEGVKGLSVPEADTSAVATADPETLVLELYGVSHTVRMLQGFLLCELCNVKAPSMNGIRHHLLGKKHKNKANASSDVSANVSTGGNAADKSTTDGQ

SEQ ID NO: 92501 - protein, 61 aa, Setaria italica
  Transcript Sequence Number=SeqID_26527
SQVWCGVDRGGMKCNVCHQINKHSAAGYCYTYSKVAIGTNSLQHRNVTCFFPSKFREKQAK

SEQ ID NO: 92502 - protein, 105 aa, Setaria italica
  Transcript Sequence Number=SeqID_26528
  Subcellular localization annotation: CTP_CleavageSite=48; ConfidenceScore=5.54e-01
MADHSLGFFSAVYSRLRAASSAWRRNDAPARDTQRSLEATVRSRLARRAGAARRFGRSLAFVSFNLEVLLFVYAFWRARRRNFNWRQPLQALPMLVIPALATLIY

SEQ ID NO: 92503 - protein, 81 aa, Setaria italica
  Transcript Sequence Number=SeqID_26529
GNVLRTGSVEAKFVAVDFGTLMFTMERGHDILELKEFILSQAEAYEFKIGDQIFRRPGDPPLDQVLEKLKKQKSHKSKDEL

SEQ ID NO: 92504 - protein, 116 aa, Setaria italica
  Transcript Sequence Number=SeqID_26530
  Gene Ontology: Mol. function=hydrolase activity, hydrolyzing O -glycosyl compounds; Cellular component=cell wall; Biological process= carbohydrate metabolic process
  Homolog annotation: Hit_ID=B6TH17; Match level="QueryCoverage=78%, HitCoverage=33%, E-value=3e-35, Identity=70%"; Hit description =Xyloglucan endotransglucosylase/hydrolase protein 15
  Pfam annotation: Domain name=Glyco_hydro_16; Domain location=1-83; Score=-11.2; E_value=4.4e-06; Accession=PF00722.13; Description =Glycosyl hydrolases family 16
VDGAGGREQQFRLWFDPTTDFHTYSIEWNPKHIIILVDGTPVRAYKNHGVPFPTWQRMRLHGTLWNADEWATQGGRVKTDWTRAPFYAYYRNLRVTPCVPSPGVAWCGDEPPESAW

SEQ ID NO: 92505 - protein, 40 aa, Setaria italica
  Transcript Sequence Number=SeqID_26531
PSMSCCSIWIYYSVIDISQQQLLIHFLEKFRIVIASYCVI

SEQ ID NO: 92506 - protein, 172 aa, Setaria italica
  Transcript Sequence Number=SeqID_26532
  Gene Ontology: Mol. function=electron carrier activity; Cellular component=extracellular region; Biological process=response to oxidative stress
  Homolog annotation: Hit_ID=O65029; Match level="QueryCoverage=100%, HitCoverage=55%, E-value=2e-60, Identity=68%"; Hit description =Peroxidase FLXPER4 (Fragment)
  Pfam annotation: Domain name=peroxidase; Domain location=1-172; Score= 190.5; E_value=4.7e-54; Accession=PF00141.15; Description=Peroxidase
LDDTSTFTGEKNAGPNANSVRGFEVIDAIKAQVEAACNATVSCADILALAARDAVNLLGGPTWTVYLGRRDALTASQSDANANLPGPGSSLATLVAMFGNKGLSPRDMTALSGAHTVGQARCATFRDRIYNDANINATFASLRQQTCPQAAGGASDAALAPIDAQTPEAFDN

SEQ ID NO: 92507 - protein, 52 aa, Setaria italica
  Transcript Sequence Number=SeqID_26533
NSEVILSPKRNYNKKTIDQNETMKTESVLATGSYLKTIHSSSLIYDPNFWNT

SEQ ID NO: 92508 - protein, 138 aa, Setaria italica
  misc_feature (70)..(70): Xaa can be any naturally occurring amino acid
  Transcript Sequence Number=SeqID_26534
  Gene Ontology: Cellular component=integral to membrane; Biological process=protein insertion into membrane
  Homolog annotation: Hit_ID=Q10AQ3; Match level="QueryCoverage=76%, HitCoverage=25%, E-value=8e-15, Identity=47%"; Hit description =ARTEMIS protein, chloroplast, putative, expressed
MQCIYIVISPCAFFVFRFRKLKEEESRRKEVPGQAKQSEQSSTESNVLDGAQNSGSSSGDNKDEQQPYFXLLINIIQESHENGSIVANSNGGLDHSRNERTLNGTSEKEAVDGHSSVSKPTSPDAPKLMDQENGNDVV

SEQ ID NO: 92509 - protein, 360 aa, Setaria italica
  Transcript Sequence Number=SeqID_26535
  Gene Ontology: Mol. function=nucleotide binding; Cellular component =integral to membrane; Biological process=protein insertion into membrane
  Homolog annotation: Hit_ID=Q75LC5; Match level="QueryCoverage=91%, HitCoverage=67%, E-value=1e-146, Identity=77%"; Hit description =ARTEMIS protein, chloroplast, putative, expressed
  Pfam annotation: Domain name=60KD_IMP; Domain location=1-197; Score =260.9; E_value=3e-75; Accession=PF02096.12; Description=60Kd inner membrane protein
KQVESALAMRSLQPQVKAIQERYAGDQERIQLETARLYKLSGVDPLAGCLPTLVTIPVWIGLYRALSNVANEGLLTEGFFWIPSLAGPTTIGARQNGQGISWLFPFTDGHPPLGWSDTLAYLVLPVLLVISQYISAQVMQPPQSNDPNQQGAQAVTKFLPLLIGYFALSVPSGLSLYWLTNNILSTAQQVWLQKLGGAKNPVKEYIEKLSREELTNVRKNESAVQSEPLPNLSKPQPSQEPKTTGPQRGERFRKLKEEESRRKEVPGQAKQSEQSSTESNVLDGAQNSGSSSGDNKDEQESHENGSIVANSNGGLDHSRNERTLNGTSEKEAVDGHSSVSKPTSPDAPKLMDQENGNDVV

SEQ ID NO: 92510 - protein, 53 aa, Setaria italica
  Transcript Sequence Number=SeqID_26536
VANSNGGLDHSRNERTLNGTSEKEAVDGHSSVSKPTSPDAPKLMDQENGNDVV

SEQ ID NO: 92511 - protein, 92 aa, Setaria italica
  Transcript Sequence Number=SeqID_26537
  Subcellular localization annotation: CTP_CleavageSite=66; ConfidenceScore=5.02e-01
GDVMNVQAISKMLPSHVTFSSVISSSLARQAKSYTKKRLDLDHKMFAQLHQLYVEFTSKAILRVCTAGTLDPSVTIWYSTEVQSVKTTKVCG

SEQ ID NO: 92512 - protein, 103 aa, Setaria italica
  Transcript Sequence Number=SeqID_26538
  Gene Ontology: Mol. function=transition metal ion binding; Cellular component=nucleus; Biological process=transcription initiation from RNA polymerase II promoter
  Homolog annotation: Hit_ID=Q9SK39; Match level="QueryCoverage=94%, HitCoverage=97%, E-value=4e-34, Identity=68%"; Hit description =Putative steroid-binding protein 3
  Pfam annotation: Domain name=Cyt-b5; Domain location=4-101; Score =61.2; E_value=3.9e-15; Accession=PF00173.20; Description=Cytochrome b5-like HemeSteroid binding doma
MATELTAAQLRAYDGTDPSKPIYVSIRGKVYDVTSGRSFYGPGGAYAIFAGREASRALGKMSKDEADVSGDLSGLTEKELGVLADWETKFQAKYPIVARLTDA

SEQ ID NO: 92513 - protein, 117 aa, Setaria italica
  Transcript Sequence Number=SeqID_26539
  Gene Ontology: Mol. function=hydrolase activity, acting on acid anhydrides, in phosphorus-containing anhydrides; Cellular component =vacuole
  Homolog annotation: Hit_ID=B9S370; Match level="QueryCoverage=93%, HitCoverage=8%, E-value=5e-18, Identity=38%"; Hit description =Helicase, putative
DGPDPSPASELPFRISFSGHGGHLRLDPTPQPSSAIPDFVPPPAYPPGSPSSVKEYLEANYLNPELHLPTAADAGRVWDLDWFALAKPPLAETRPRTMLAPAWEPPFRRGRGTSQSA

SEQ ID NO: 92514 - protein, 136 aa, Setaria italica
  Transcript Sequence Number=SeqID_26540
  Gene Ontology: Mol. function=protein binding; Cellular component =nucleus; Biological process=regulation of transcription, DNA -dependent
  Homolog annotation: Hit_ID=Q8H2X8; Match level="QueryCoverage=100%, HitCoverage=21%, E-value=3e-45, Identity=69%"; Hit description =Protein SHORT-ROOT 1
STRRTALRFQELSPWASFGHVAANGAILEAFLEAAAAAASSSSSSSSSQPPRLHILDLSNTFCTQWPTLLEALATRSSDDTPHLSITTVVPAAAPSSAAAQRVMREIAQRLEKFARLMGVPFSFRAVHHAGDLAEL

SEQ ID NO: 92515 - protein, 146 aa, Setaria italica
  Transcript Sequence Number=SeqID_26541
  Gene Ontology: Mol. function=structural molecule activity; Cellular component=nuclear envelope; Biological process=intracellular protein transmembrane transport
  Homolog annotation: Hit_ID=B6TJY3; Match level="QueryCoverage=100%, HitCoverage=45%, E-value=2e-71, Identity=89%"; Hit description=Seh1 -like protein
  Pfam annotation: Domain name=WD40; Domain location=2-38; Score=7.9; E_ value=4.6; Accession=PF00400.24; Description=WD domain, G-beta repeat
  Pfam annotation: Domain name=WD40; Domain location=41-81; Score=24.5; E_value=0.00045; Accession=PF00400.24; Description=WD domain, G-beta repeat
  Pfam module annotation: Pfam domain module=WD40::WD40; Domain location=2-38::41-81
MAERQVAELGPGAACCGWNHCGRRLAAGAVDGSVSVYDSNPSPSSKWQAHEQAIVNVVWLPPEYGDAVACVCADGTLSLWEEGAEDDQLPTWRKCKVFEGGNCCILNVHFGLHLGSLKMVTPYSDGQVKIYELLDSLELDKWQLQA

SEQ ID NO: 92516 - protein, 51 aa, Setaria italica
  Transcript Sequence Number=SeqID_26542
CSRSVLHEPAVNVFMKLYGSTYYKVHSGYYFSYFITFYLLSHVRFGSEGIS

SEQ ID NO: 92517 - protein, 77 aa, Setaria italica
  Transcript Sequence Number=SeqID_26543
IRKHLFFFTVNERNGDKLQGNYYLLLNEVYSFQFPQFIAYLSRPSYKLKVSNISALHNQQHVHKQYDGGAVSTYAIK

SEQ ID NO: 92518 - protein, 82 aa, Setaria italica
  misc_feature (24)..(24): Xaa can be any naturally occurring amino acid
  Transcript Sequence Number=SeqID_26544
  Homolog annotation: Hit_ID=Q6ETL2; Match level="QueryCoverage=100%, HitCoverage=19%, E-value=1e-39, Identity=90%"; Hit description=Tubby- like protein 4
YNHMTKRYELDFRERAGRMGYRVXTSVKNFQMTLEENGRQTVLQLGRVGKSKYIMDFRYPLTGYQAFCICLASIDSKLCCTL

SEQ ID NO: 92519 - protein, 315 aa, Setaria italica
  Transcript Sequence Number=SeqID_26545
  Gene Ontology: Mol. function=chlorophyllase activity; Cellular component=vacuole; Biological process=chlorophyll catabolic process
  Homolog annotation: Hit_ID=C1JZ61; Match level="QueryCoverage=84%, HitCoverage=78%, E-value=1e-77, Identity=53%"; Hit description =Chlorophyllase 1
  Pfam annotation: Domain name=Chlorophyllase; Domain location=15-314; Score=466.9; E_value=2.8e-137; Accession=PF07224.3; Description =Chlorophyllase
MATSVEIMNPSTEVLETAATSVFQPGKLAIEVIPVDHDTNPTPPIPILIASPKDAGTYPVAMLLHGFCLQNHFYKQVLKHIASFGFIMVAPQFHISILAKGDTEDIAAAAEVTDWLAKGLPSILPKGVEPNLSKLALAGHSRGGHTAFSLVLGHGKTNLKFSALIGLDPVAGTGKSSQISPKILTYEPSSFDIAMPVLVIGTGLGEEKKNILFPPCAPKDVNHREFYHECRPPCYYFVTKDYGHLDMLDDDAPKFMTCMCKDGKNCKDLMRRTVAGIMVAFLKAVLNEEDGDLRVIMKDPKLTPTTVDPVEHRLA

SEQ ID NO: 92520 - protein, 82 aa, Setaria italica
  Transcript Sequence Number=SeqID_26546
ARNNLTESIFPSFVKKVYKICAELEQLARPGTAQSPRRHTQTGHAMSDAYMAQRWAPWSLAMLTLTADHARAEASARTDEAA

SEQ ID NO: 92521 - protein, 90 aa, Setaria italica
  Transcript Sequence Number=SeqID_26547
  Gene Ontology: Mol. function=protein dimerization activity; Cellular component=nucleus; Biological process=regulation of transcription, DNA-dependent
  Homolog annotation: Hit_ID=B9RJD3; Match level="QueryCoverage=84%, HitCoverage=20%, E-value=4e-21, Identity=67%"; Hit description =Transcription factor TGA7, putative
QTLVDALLTVDAPDDGGGYAARQMASAVGKLDDLVSFVDQADHLRQQTLRNMNKILTLPQAARGLLALADYCQQLRALSSLWAARPREPA

SEQ ID NO: 92522 - protein, 133 aa, Setaria italica
  misc_feature (33)..(33): Xaa can be any naturally occurring amino acid
  misc_feature (50)..(50): Xaa can be any naturally occurring amino acid
  Transcript Sequence Number=SeqID_26548
  Gene Ontology: Cellular component=mitochondrion
  Homolog annotation: Hit_ID=B9R7P1; Match level="QueryCoverage=100%, HitCoverage=60%, E-value=5e-30, Identity=37%"; Hit description =Pentatricopeptide repeat-containing protein, putative
  Pfam annotation: Domain name=PPR; Domain location=54-88; Score=42.7; E_value=1.5e-09; Accession=PF01535.12; Description=PPR repeat
  Pfam annotation: Domain name=PPR; Domain location=89-123; Score=40.7; E_value=5.8e-09; Accession=PF01535.12; Description=PPR repeat
  Pfam module annotation: Pfam domain module=PPR::PPR; Domain location =54-88::89-123
ALRLWFLMLKRVVAPNEISCSTLFDGFIKAGKXTEKALNLWKETLARGLXKNITTFNTVINGLCKTGRMLEAEELLGWMKESRCPPDSITYRTIVSGYCKTGDMVGAIRIMKEMETLGFVPSIELFNSLITGL

SEQ ID NO: 92523 - protein, 107 aa, Setaria italica
  misc_feature (64)..(64): Xaa can be any naturally occurring amino acid
  Transcript Sequence Number=SeqID_26549
  Gene Ontology: Mol. function=transporter activity; Cellular component= integral to membrane; Biological process=transport
  Homolog annotation: Hit_ID=Q9ZR95; Match level="QueryCoverage=72%, HitCoverage=31%, E-value=2e-21, Identity=70%"; Hit description=Gamma- type tonoplast intrinsic protein
  Pfam annotation: Domain name=MIP; Domain location=1-107; Score=-54.1; E_value=3.2e-06; Accession=PF00230.12; Description=Major intrinsic protein
LVLLITPCSPLAGKLSPGGSTPTGLIAAAIAHAFALFVAVSVGANISGGHVNPAVTFGAFVGGXITLFRGILYWIAQLLGSTVACFLLRFSTGGLPTGTFGLTGISV

SEQ ID NO: 92524 - protein, 151 aa, Setaria italica
  Transcript Sequence Number=SeqID_26550
  Gene Ontology: Mol. function=calcium ion binding; Cellular component =contractile vacuole
  Homolog annotation: Hit_ID=Q6F334; Match level="QueryCoverage=100%, HitCoverage=100%, E-value=2e-53, Identity=72%"; Hit description =Probable calcium-binding protein CML9
  Pfam annotation: Domain name=efhand; Domain location=12-40; Score =29.7; E_value=1.1e-05; Accession=PF00036.24; Description=EF hand
  Pfam annotation: Domain name=efhand; Domain location=122-150; Score =14.5; E_value=0.43; Accession=PF00036.24; Description=EF hand
  Pfam annotation: Domain name=efhand; Domain location=86-114; Score =13.8; E_value=0.68; Accession=PF00036.24; Description=EF hand
  Pfam module annotation: Pfam domain module=efhand::efhand::efhand; Domain location=12-40::122-150::86-114
MAGKLTPEQADECKEIFALFDADEDGRIATGELVTALRSLGQNVDEAEARRFLEDAGVPAGAGAIDLAAFLAVAERKAGARVTAGRLEECFDVFDDARSGSIPAEQLRQVMVSHGDRLTEEEADAMLREADPRGEGRVEYKEYVKVLLRDK

SEQ ID NO: 92525 - protein, 59 aa, Setaria italica
  Transcript Sequence Number=SeqID_26551
  Homolog annotation: Hit_ID=B6TL27; Match level="QueryCoverage=100%, HitCoverage=28%, E-value=7e-17, Identity=79%"; Hit description=ABA -induced protein
MAGKAADTGSHDDATKGQSSSSTADVYSGELTPLQRHVAFFDRDKDGVIYPSETYQGFR

SEQ ID NO: 92526 - protein, 109 aa, Setaria italica
  Transcript Sequence Number=SeqID_26552
  Homolog annotation: Hit_ID=Q6Q7Y1; Match level="QueryCoverage=46%, HitCoverage=24%, E-value=6e-17, Identity=84%"; Hit description =Putative ABA-induced protein
MGNESGAAAVPLLRKPRPERSLARRHVLRGASFALVTTALLFVLGRPGINDDAVKEQGSSSVAGVYGGELTPLQGHVAFFDRDKDGVIYPAETYQGFRAIGAGVALSAV

SEQ ID NO: 92527 - protein, 60 aa, Setaria italica
  Transcript Sequence Number=SeqID_26553
  Gene Ontology: Mol. function=calcium ion binding
  Homolog annotation: Hit_ID=B6TL27; Match level="QueryCoverage=83%, HitCoverage=23%, E-value=2e-21, Identity=96%"; Hit description=ABA -induced protein
  Pfam annotation: Domain name=Caleosin; Domain location=1-48; Score= -72.8; E_value=0.011; Accession=PF05042.5; Description=Caleosin related protein
EPKDFKGWLGGLTEWKVLYSLCKDKDGFLHKDTVRAVYDGSLFERLEQERKAKKEFTKKK

SEQ ID NO: 92528 - protein, 205 aa, Setaria italica
  Transcript Sequence Number=SeqID_26554
  Gene Ontology: Mol. function=calcium ion binding
  Homolog annotation: Hit_ID=B6U5V4; Match level="QueryCoverage=92%, HitCoverage=92%, E-value=7e-85, Identity=79%"; Hit description=ABA -induced protein
  Pfam annotation: Domain name=Caleosin; Domain location=19-194; Score =371.7; E_value=1.3e-108; Accession=PF05042.5; Description=Caleosin related protein
MAAEPADTGSSKGSSMADVYSGELTPLQRHVAFFDRDKDGVIYPSETYQGFRAIGAGVALSAVSAVFINGGLGPKTIPENDKAPAFKLPIYVKNIHKGKHGSDSGVYDANGRFVPEKFEEIFKKHAHTRPDALTGKELQELLQANREPKDFKGWLGGFTEWKVLYSLCKDKDGFLHKDTVRAVYDGSLFERLEKERKSKESTKKK

SEQ ID NO: 92529 - protein, 110 aa, Setaria italica
  Transcript Sequence Number=SeqID_26555
MAAYPRPRARHLLLLLHAHLCLASLRAASALYFSYNFSIPGDLDRANLRYINDSSRAGDRVDLTIGNKNNSTGRVFYPEPVRLWDRRTNERVSFNVSFSFFIGSSPPNPN

SEQ ID NO: 92530 - protein, 76 aa, Setaria italica
  Transcript Sequence Number=SeqID_26556
FSNRYNSIREQGHPRISKLWTVLIRWALERRMGTAPNSSSRNHLIGTLSTQYHKPCRAIKFPQSDKPQPGSHMLWD

SEQ ID NO: 92531 - protein, 52 aa, Setaria italica
  Transcript Sequence Number=SeqID_26557
  Gene Ontology: Mol. function=transferase activity, transferring glycosyl groups; Cellular component=integral to membrane; Biological process=protein amino acid glycosylation
  Homolog annotation: Hit_ID=B6UBH3; Match level="QueryCoverage=88%, HitCoverage=12%, E-value=3e-22, Identity=97%"; Hit description=Beta -1,3-galactosyltransferase 6
MFSNEDVTIGSWMLAMNVNHENTHALCEPDCTESSIAVWDIPKCSGDFLSYF

SEQ ID NO: 92532 - protein, 192 aa, Setaria italica
  Transcript Sequence Number=SeqID_26558
  Gene Ontology: Mol. function=transferase activity, transferring glycosyl groups; Cellular component=integral to membrane; Biological process=protein amino acid glycosylation
  Homolog annotation: Hit_ID=B6UBH3; Match level="QueryCoverage=99%, HitCoverage=52%, E-value=1e-101, Identity=91%"; Hit description=Beta- 1,3-galactosyltransferase 6
  Pfam annotation: Domain name=Galactosyl_T; Domain location=1-137; Score=-15.1; E_value=1e-05; Accession=PF01762.13; Description =Galactosyltransferase
LEEEYSRLPYKTLAFFKAAYALYDSDFYVKADDDIYLRPDRLSLLLAKERSHPQTYIGCMKKGPVFTDPKLKWYEPQSFLLGSEYFLHAYGPIYALSADVVASLVALRNNSFRMFSNEDVTIGSWMLAMNVNHENTHALCEPDCTESSIAVWDIPKCSGLCHPEVKMLELHKRKECVGGPTVAAEVSESEDR

SEQ ID NO: 92533 - protein, 80 aa, Setaria italica
  Transcript Sequence Number=SeqID_26559
  Gene Ontology: Mol. function=ATPase activity, coupled to transmembrane movement of ions, phosphorylative mechanism; Cellular component=integral to membrane; Biological process=phospholipid transport
  Homolog annotation: Hit_ID=B9RL26; Match level="QueryCoverage=98%, HitCoverage=6%, E-value=2e-19, Identity=61%"; Hit description =Phospholipid-transporting atpase, putative
MLDEKRQAKFQCRALNINEDLGQIKYVFSDKTGTLTENRMEFRCASVHGADFSATDGGDGIVGDEHSVIGEDGMILRTKT

SEQ ID NO: 92534 - protein, 157 aa, Setaria italica
  misc_feature (157)..(157): Xaa can be any naturally occurring amino acid
  Transcript Sequence Number=SeqID_26560
  Homolog annotation: Hit_ID=B6SW35; Match level="QueryCoverage=99%, HitCoverage=27%, E-value=6e-70, Identity=83%"; Hit description =Ternary complex factor MIP1
SVRVSPSANNLARALKPCHTSPLSFVEEGKCMDSGIVSLADILGTRVADHVPQTPNKISEDMIKCIAAIYIRLRDVPTVQHAFFPSPCSSFSSASGLSSKYTADIWSPRCRKESFIEAWQENALGNGESRELGLQYDSVVEVSALCKGDQRSADVKX

SEQ ID NO: 92535 - protein, 62 aa, Setaria italica
  Transcript Sequence Number=SeqID_26561
ITRHCQPLLSLSAGELSVDGDRAGLLIRHLSFTDGDWSQDAGRAPLFPFHGIFAGAGKAAGP

SEQ ID NO: 92536 - protein, 181 aa, Setaria italica
  Transcript Sequence Number=SeqID_26562
MIAESQRELLQAREMIDEAERSLSSSLEEGSFGDVSSGDIDEDSERLESVKAAAVSSIVGVLASLPVSFYEVQDLPQLFLRSSVIFISCALFGVTFRYAVRRDLDNIQLKTGAPAAFAFVRGLALLESGRTLELSTDTLISVVIDGAVSVVENIFIFLPAAVALDYCFKMRFLSPFPRRKQ

SEQ ID NO: 92537 - protein, 104 aa, Setaria italica
  Transcript Sequence Number=SeqID_26563
  Subcellular localization annotation: CTP_CleavageSite=57; ConfidenceScore=5.61e-01
TTRTWTPPWPSLLVTAQQQAATKPQTPRTAAARPRISPRRGVQNHGLPHAAPSRAPAAAAENGAYSRSMSLLPSPDPRRRRSAQLVVEADGLGTGGGHASREVR

SEQ ID NO: 92538 - protein, 166 aa, Setaria italica
  misc_feature (87)..(87): Xaa can be any naturally occurring amino acid
  Transcript Sequence Number=SeqID_26564
  Homolog annotation: Hit_ID=B6TIQ8; Match level="QueryCoverage=100%, HitCoverage=50%, E-value=1e-53, Identity=66%"; Hit description =ATP/GTP binding protein
MARPRGKKRTAAEAAATDSSKPEAAAKEPAKRGRAKRVKAPAEPTEYFPEKRNLEDLWLSAFPVGTEWENIDKIKEFNWNFENLEKXLEEGGELYGKTVYLFGSTEPQLLYVNGESKIVLIPVIIAVDCPFPPSDKIGINSVQRENEEIVPMKAMKMAWVPYVPLE

SEQ ID NO: 92539 - protein, 106 aa, Setaria italica
  Transcript Sequence Number=SeqID_26565
  Gene Ontology: Mol. function=calcium ion binding
  Pfam annotation: Domain name=efhand; Domain location=78-106; Score =30.1; E_value=9.2e-06; Accession=PF00036.24; Description=EF hand
LGQGLALGGLEDGGGGDLMLGFDDFVRIVESKGGEEEEREDLRRAFEAFEAVKGSGRITPRGLQRVLSQLGDEPSVAECEAMIRAYDDDGDGELDFHDFHRMMSQD

SEQ ID NO: 92540 - protein, 125 aa, Setaria italica
  Transcript Sequence Number=SeqID_26566
  Subcellular localization annotation: CTP_CleavageSite=62; ConfidenceScore=5.70e-01
APSTLLPTAAAALPLPYSPHLACTARLVFSNSASAQARSSVSVRPSLHCLQPPPLPHRAFKSAAAPSAEPLPRSCIARGSAALVASVPSAVFLGSLIYFRCCSASVGVSLWSGAAVNCFRALICR

SEQ ID NO: 92541 - protein, 61 aa, Setaria italica
  misc_feature (11)..(11): Xaa can be any naturally occurring amino acid
  Transcript Sequence Number=SeqID_26567
RPWPGGRMRQXRERMFREEVDRRRRQLRELCRAVRVDTFAELQELLCAMVLAECVYKRPVS

SEQ ID NO: 92542 - protein, 85 aa, Setaria italica
  Transcript Sequence Number=SeqID_26568
  Gene Ontology: Mol. function=transferase activity, transferring groups other than amino-acyl groups
  Homolog annotation: Hit_ID=Q7Y009; Match level="QueryCoverage=98%, HitCoverage=20%, E-value=2e-17, Identity=48%"; Hit description =Putative hydroxycinnamoyl transferase
TVHFSEEFVARLKAHVGARCSMFQCLLAHAWKKATAARRLAPEELTQIRVAVNCRSRAKPPVPTDFFGNMVLWAFPRMRAGELLS

SEQ ID NO: 92543 - protein, 163 aa, Setaria italica
  Transcript Sequence Number=SeqID_26569
  Subcellular localization annotation: CTP_CleavageSite=61; ConfidenceScore=5.50e-01
MTSSLSLYGNSGCIGNLSKSQSLQDSKLKGSLRKRSRNSSIGNRRRWQPGLEAMENNVSISVSLEGNISSIPNSIINDSKMSTDNGLDTSFINHAAVAWAEMRRQWVGHQAEVPKKAPREPVISWCTTYDDLLSTSERFPQPIPLSEMVDFLVDIWHEEGLYD

SEQ ID NO: 92544 - protein, 168 aa, Setaria italica
  misc_feature (117)..(117): Xaa can be any naturally occurring amino acid
  Transcript Sequence Number=SeqID_26570
  Gene Ontology: Mol. function=protein binding; Cellular component =nucleus; Biological process=DNA integration
  Homolog annotation: Hit_ID=Q6K7D3; Match level="QueryCoverage=95%, HitCoverage=12%, E-value=2e-62, Identity=73%"; Hit description =Putative BRUSHY1
  Pfam annotation: Domain name=TPR_1; Domain location=7-40; Score=21.9; E_value=0.0027; Accession=PF00515.20; Description=Tetratricopeptide repeat
  Pfam annotation: Domain name=TPR_2; Domain location=7-39; Score=22.8; E_value=0.0014; Accession=PF07719.9; Description=Tetratricopeptide repeat
  Pfam module annotation: Pfam domain module=TPR_1::TPR_2; Domain location=7-40::7-39
PTKVEGPKGFINLGELHSRLQRYEEAKLCYNKALRIATCLEDEDALMEQINQNIETVTKAAEVLEELKKDEQKLKKLVRDTSNARGTSKERKFLLEQHAWLDNLIEKARMICAWQKXRNSQKGKKRVATELHDKEKLSDSLLSVGESYQKLRNFSKARKWYMKSWNMY

SEQ ID NO: 92545 - protein, 88 aa, Setaria italica
  Transcript Sequence Number=SeqID_26571
  Gene Ontology: Mol. function=nucleotidyltransferase activity; Biological process=RNA processing
  Homolog annotation: Hit_ID=B9RA84; Match level="QueryCoverage=70%, HitCoverage=11%, E-value=2e-11, Identity=51%"; Hit description =Poly(A) polymerase, putative
  Subcellular localization annotation: CTP_CleavageSite=50; ConfidenceScore=5.22e-01
PGWFNFGISLKVLFLALILQSSFSFQQVRTVIPAGTSFQEDCARILRAIRIAARLGFSFPKETAYYVRTLACSVARLDKGRILMEMNY

SEQ ID NO: 92546 - protein, 91 aa, Setaria italica
  Transcript Sequence Number=SeqID_26572
  Gene Ontology: Mol. function=nucleotidyltransferase activity; Biological process=RNA processing
  Homolog annotation: Hit_ID=B9RA84; Match level="QueryCoverage=87%, HitCoverage=15%, E-value=1e-15, Identity=55%"; Hit description =Poly(A) polymerase, putative
AFYLGGDMSLAVDIGKSIDRQHDTSYRELLEPKVWADKHLVDEVQSFAALMKRVLTEMTDEYFVANAMAKIPQAPSSDLVSTTDLCLPFLA

SEQ ID NO: 92547 - protein, 502 aa, Setaria italica
  misc_feature (22)..(22): Xaa can be any naturally occurring amino acid
  misc_feature (384)..(384): Xaa can be any naturally occurring amino acid
  Transcript Sequence Number=SeqID_26573
  Gene Ontology: Mol. function=nucleotidyltransferase activity; Cellular component=chloroplast; Biological process=RNA processing
  Homolog annotation: Hit_ID=B9RA84; Match level="QueryCoverage=91%, HitCoverage=87%, E-value=1e-155, Identity=57%"; Hit description =Poly(A) polymerase, putative
  Pfam annotation: Domain name=PolyA_pol; Domain location=70-198; Score= 90.4; E_value=6.3e-24; Accession=PF01743.12; Description=Poly A polymerase family
  Subcellular localization annotation: CTP_CleavageSite=21; ConfidenceScore=5.05e-01
RAPSPSPSPSPTDSSTPSTAPXSAGGPGAEGLEGPEWKKVSAKRFGIKESMIPAEAWNVLHRLRSRGYDVYLVGGCVRDLIMKKTPKDFDIITTADLRQVKDTFSGSAVIVGRRFPICHVHENNSIVEVSSFNTCARGSSGSQIYNSKSQNCSKNDFVRWKNCQGRDFTINGLMFNPYSEKIYDYLGGIEDIKKAKVRTVIPAGTSFQEDCARILRAIRIAARLGFSFPKETAYYVRTLACSVARLDKGRILMEMNYMLAYGSAEASLRLLWRFGLLEHLLPFQAAYFSSTRFKRKDKGTNMLLVLFSKLDNFLAPNRPCHNSLWISLLAFHEALARQPCDPLVVATFALAFYLGGDMSLAVDIGKSIDRQHDTSYRELLEPKXWADKHLVDEVQSFAALMKRVLTEMTDEYFVANAMAKIPQAPSSDLVFIPLQAYLKVLKFIECVQYGKKERGYEPKRDGKINYHNLSYGTNAEIRNLFTLVVFDTLYPTNMEDQHDGSS

SEQ ID NO: 92548 - protein, 100 aa, Setaria italica
  misc_feature (9)..(9): Xaa can be any naturally occurring amino acid
  misc_feature (65)..(65): Xaa can be any naturally occurring amino acid
  misc_feature (82)..(82): Xaa can be any naturally occurring amino acid
  Transcript Sequence Number=SeqID_26574
  Gene Ontology: Mol. function=binding
  Homolog annotation: Hit_ID=Q71VM2; Match level="QueryCoverage=100%, HitCoverage=33%, E-value=1e-38, Identity=80%"; Hit description =Plakoglobin/armadillo/beta-catenin-like protein (Fragment)
VLLDLLRNXPYSRSKLQPDTLENIVTNIASQIDGEDRGGKAKKMLAEMVKVSMEQSLRHLQRRAXLRMKDDRQPFFCNGNRXSANNEISGDAGPGLDRTE

SEQ ID NO: 92549 - protein, 113 aa, Setaria italica
  Transcript Sequence Number=SeqID_26575
  Gene Ontology: Cellular component=integral to membrane
  Homolog annotation: Hit_ID=Q53LH2; Match level="QueryCoverage=65%, HitCoverage=15%, E-value=2e-28, Identity=83%"; Hit description=Amino acid carrier, putative, expressed
MSHAVSVAPLHCRSVEVELGAPGDHVQSRTEAEPPKPLVDDDGRPMRTGTLWTASAHIITAVIGSGVLSLAWGVAQLGWAAGPAVMALFAAVIYYTSTLLAECYRSGDPMFGP

SEQ ID NO: 92550 - protein, 69 aa, Setaria italica
  Transcript Sequence Number=SeqID_26576
ERHELVMSLLYCILYICLYVWLRLVTANTHVPMFFFLFISDQSNVSSILDDFVGLGVDDIAGEEGILAI

SEQ ID NO: 92551 - protein, 92 aa, Setaria italica
  Transcript Sequence Number=SeqID_26577
  Gene Ontology: Mol. function=protein dimerization activity
  Homolog annotation: Hit_ID=Q01MA5; Match level="QueryCoverage=52%, HitCoverage=7%, E-value=1e-09, Identity=58%"; Hit description =H0716A07.13 protein
MCLAIPATTVASESAFCSGGRIVHKCCSRLDPQAVEALICSKDWIRAARIDQSNVSSILDDFVGLGVDDIAGEEGAPADAGYQSGRVDLSDN

SEQ ID NO: 92552 - protein, 429 aa, Setaria italica
  Transcript Sequence Number=SeqID_26578
  Homolog annotation: Hit_ID=B9S651; Match level="QueryCoverage=99%, HitCoverage=18%, E-value=6e-88, Identity=43%"; Hit description=RNA binding protein, putative
YITEENELRLESSTMEFWNLSQVLDSSIGSYEVQTSRLLSPVSQGKGHLVASLTYLTEASGPAKVLKIVQEVNVCSKVKAFWDEGLESSNVIHLPWVPGVYQEIELKATGGCGKTLDDYKLFSSDEDVASVSDSRIVHAKKPGQAVIRVVSAFDFLNFDEIIVEVSIPSVLSILPVFPVEVPVGTRLHAAAALKTSNGHSFSRCDHLNAFIRWSVLSDNESFHILNTAEASSVEDIKHSAGSWGQNGNPCAWISLNASAAGRSTVVATFTFDSDSNIETLGPISLKATSKISAYYPLVVLQGGNGNQFGGYWFDLSGIHGRIEIMDNNSLKELYLVPGSAMDVFLFGGPERWDQVVDFVETVDVIGELKNHITSSTTVQKLSSGIYRVSCPSKVNYKLLFSRGNMIGKDHPVPAIAKSEFSVVCDFPSE

SEQ ID NO: 92553 - protein, 211 aa, Setaria italica
  Transcript Sequence Number=SeqID_26579
  Gene Ontology: Mol. function=triacylglycerol lipase activity; Biological process=lipid metabolic process
  Homolog annotation: Hit_ID=B9RWS5; Match level="QueryCoverage=96%, HitCoverage=19%, E-value=2e-43, Identity=44%"; Hit description =Triacylglycerol lipase, putative
  Pfam annotation: Domain name=C2; Domain location=68-149; Score=83.0; E_value=1e-21; Accession=PF00168.22; Description=C2 domain
AGEGLVAEEDGPRRPPFDLNLAVVLAGFAFEAYTSPPADVGWRETDAADCQTVFLSDVFLREVYDGQLVVKLKKGINLPAMDPWGTSDPYVILQLNGQTARSNIKWATKEPTWNESFTFNIRKSRENLLQVAAWDANLVTPHKRMGNAGLYLESLCDGNSHNVTVELEGLGGGGTIEIEVKYKSYDDIEREKQWWRIPFVSDFLVKSSLGS

SEQ ID NO: 92554 - protein, 48 aa, Setaria italica
  Transcript Sequence Number=SeqID_26580
GDTGQDEEGEGEEKLQLRHGCHDLEERRDKIRTHMMAGYSYELVSLVN

SEQ ID NO: 92555 - protein, 259 aa, Setaria italica
  misc_feature (56)..(56): Xaa can be any naturally occurring amino acid
  Transcript Sequence Number=SeqID_26581
  Gene Ontology: Mol. function=cation transmembrane transporter activity; Cellular component=integral to membrane; Biological process=nuclear mRNA splicing, via spliceosome
  Homolog annotation: Hit_ID=Q259F9; Match level="QueryCoverage=75%, HitCoverage=7%, E-value=1e-116, Identity=98%"; Hit description =H0124B04.17 protein
  Subcellular localization annotation: CTP_CleavageSite=60; ConfidenceScore=5.66e-01
SQTLRCAASAPPPNPGRFDQSPPASAPPHPAASGHRRSLRRKRRSRWSRGGGGGGXKMVSSSSPVVNVYPLANYTFGTKEPKMEKDTSVADRLARMKVNYMKEGMRTSVEAILLVQEHNHPHILLLQIGNTFCKLPGGRLKPGENEIEGLKRKLCSKLAVNSPSFPPNWQVGECVAVWWRPNFETVMYPYCPPHITKPKECKKLFIVHLSEREYFAVPRNLKLLAVPLFELYDNVQRYGPVISTIPQQLSRFQFNMVSS

SEQ ID NO: 92556 - protein, 122 aa, Setaria italica
  misc_feature (66)..(66): Xaa can be any naturally occurring amino acid
  misc_feature (76)..(76): Xaa can be any naturally occurring amino acid
  Transcript Sequence Number=SeqID_26582
  Gene Ontology: Mol. function=protein binding; Cellular component =peroxisome; Biological process=peroxisome organization and biogenesis
  Homolog annotation: Hit_ID=B6TC68; Match level="QueryCoverage=75%, HitCoverage=36%, E-value=8e-43, Identity=92%"; Hit description =Peroxisomal biogenesis factor 19
LLSKEILHEPMKDIVEKYPKWLEDNKGTISKEEYERYNNQLGLMVKLIEVYENDPENMTKIFDIMXNMQECGQPPXDLVQDIVPDLDLSKLGSCEFFIFFQQTILPLMSICMFMPIKVYNQK

SEQ ID NO: 92557 - protein, 230 aa, Setaria italica
  Transcript Sequence Number=SeqID_26583
  Gene Ontology: Mol. function=protein binding; Cellular component =peroxisome; Biological process=peroxisome organization and biogenesis
  Homolog annotation: Hit_ID=B6TC68; Match level="QueryCoverage=73%, HitCoverage=67%, E-value=2e-89, Identity=94%"; Hit description =Peroxisomal biogenesis factor 19
  Pfam annotation: Domain name=Pex19; Domain location=2-230; Score =153.8; E_value=5.1e-43; Accession=PF04614.4; Description=Pex19 protein family
  Subcellular localization annotation: CTP_CleavageSite=61; ConfidenceScore=5.35e-01
VFAQITDSASVSPCSSGSEASASASGSGAKGPVLGLGLGLPDPKAPKRRGAKPPPLPRGACASEALEKLTRETREAVRGLETATGGVPSLDDDAMMEEFVKQFEEFAGAQDMDSIVETMMQQLLSKEILHEPMKDIVEKYPKWLEDNKGTISKEEYERYNNQLGLMVKLIEVYENDPENMTKIFDIMQNMQECGQPPSDLVQDIVPDLDLSKLGQLSPEMLESAPNCCVM

SEQ ID NO: 92558 - protein, 86 aa, Setaria italica
  Transcript Sequence Number=SeqID_26584
  Gene Ontology: Mol. function=calcium ion binding; Cellular component =flagellin-based flagellum; Biological process=ciliary or flagellar motility
  Homolog annotation: Hit_ID=B6TJ23; Match level="QueryCoverage=86%, HitCoverage=41%, E-value=2e-29, Identity=87%"; Hit description =Caltractin
  Pfam annotation: Domain name=efhand; Domain location=16-44; Score =18.2; E_value=0.035; Accession=PF00036.24; Description=EF hand
  Pfam annotation: Domain name=efhand; Domain location=52-80; Score =40.1; E_value=8.5e-09; Accession=PF00036.24; Description=EF hand
  Pfam module annotation: Pfam domain module=efhand::efhand; Domain location=16-44::52-80
ETEQRIGTKTGTTRDELFKAFRIIDQDRNGKISDIDIQRLAIETGEHFTIDEVREMIEAADENGDGEIDLEEFMKMMKRTNLVSGF

SEQ ID NO: 92559 - protein, 75 aa, Setaria italica
  Transcript Sequence Number=SeqID_26585
  Gene Ontology: Mol. function=calcium ion binding; Cellular component =flagellin-based flagellum; Biological process=ciliary or flagellar motility
  Homolog annotation: Hit_ID=B6TJ23; Match level="QueryCoverage=97%, HitCoverage=40%, E-value=2e-28, Identity=82%"; Hit description =Caltractin
  Pfam annotation: Domain name=efhand; Domain location=36-64; Score =37.8; E_value=4.4e-08; Accession=PF00036.24; Description=EF hand
MASTYKAADEPPASNSSGYRKDKVRRKKLTAQKRKEIKEAFDLFDIDGSGTIDARELNVAMRALGFEMTPEVLPV

SEQ ID NO: 92560 - protein, 57 aa, Setaria italica
  Transcript Sequence Number=SeqID_26586
  Gene Ontology: Mol. function=calcium ion binding; Cellular component =flagellin-based flagellum; Biological process=ciliary or flagellar motility
  Homolog annotation: Hit_ID=B6TJ23; Match level="QueryCoverage=91%, HitCoverage=29%, E-value=2e-18, Identity=88%"; Hit description =Caltractin
  Pfam annotation: Domain name=efhand; Domain location=23-51; Score =40.1; E_value=8.5e-09; Accession=PF00036.24; Description=EF hand
VFFRTFDIQRLAIETGEHFTIDEVREMIEAADENGDGEIDLEEFMKMMKRTNLVSGF

SEQ ID NO: 92561 - protein, 179 aa, Setaria italica
  Transcript Sequence Number=SeqID_26587
  Gene Ontology: Mol. function=calcium ion binding; Cellular component =flagellin-based flagellum; Biological process=ciliary or flagellar motility
  Homolog annotation: Hit_ID=B6TJ23; Match level="QueryCoverage=100%, HitCoverage=100%, E-value=1e-86, Identity=88%"; Hit description =Caltractin
  Pfam annotation: Domain name=efhand; Domain location=109-137; Score =18.2; E_value=0.035; Accession=PF00036.24; Description=EF hand
  Pfam annotation: Domain name=efhand; Domain location=145-173; Score =40.1; E_value=8.5e-09; Accession=PF00036.24; Description=EF hand
  Pfam annotation: Domain name=efhand; Domain location=36-64; Score =37.8; E_value=4.4e-08; Accession=PF00036.24; Description=EF hand
  Pfam annotation: Domain name=efhand; Domain location=72-100; Score =42.2; E_value=2e-09; Accession=PF00036.24; Description=EF hand
  Pfam module annotation: Pfam domain module=efhand::efhand::efhand::efh and; Domain location=109-137::145-173::36-64::72-100
MASTYKAADEPPASNSSGYRKDKVRRKKLTAQKRKEIKEAFDLFDIDGSGTIDARELNVAMRALGFEMTPEQINQMIAEVDKDGSGTIDFDEFVHMMTDKMGERDARDELFKAFRIIDQDRNGKISDIDIQRLAIETGEHFTIDEVREMIEAADENGDGEIDLEEFMKMMKRTNLVSGF

SEQ ID NO: 92562 - protein, 120 aa, Setaria italica
  misc_feature (11)..(11): Xaa can be any naturally occurring amino acid
  misc_feature (31)..(31): Xaa can be any naturally occurring amino acid
  Transcript Sequence Number=SeqID_26588
ISNTTVVESKXPKDRSLEEKPVKLTTKMEDXGIQGNLDDFDEDIDFDDIYGESHSKKAGPPRRNKKFLTNNVDGIGQSGNSLDQDSDRVRYNRLLEKASAKLAKETKKNNTNVHAGHTTS

SEQ ID NO: 92563 - protein, 48 aa, Setaria italica
  Transcript Sequence Number=SeqID_26589
  Subcellular localization annotation: CTP_CleavageSite=43; ConfidenceScore=5.02e-01
FQNSTNMLNNVCISFSGQASMTTLQDAQRTSNGSASSQARGLSADYYS

SEQ ID NO: 92564 - protein, 225 aa, Setaria italica
  Transcript Sequence Number=SeqID_26590
  Gene Ontology: Mol. function=DNA-directed DNA polymerase activity; Cellular component=nucleus; Biological process=nucleobase, nucleoside, nucleotide and nucleic acid metabolic process
  Homolog annotation: Hit_ID=Q9LRE6; Match level="QueryCoverage=100%, HitCoverage=20%, E-value=1e-126, Identity=93%"; Hit description=DNA polymerase delta catalytic subunit
SRLARWKRPALPADLATGCSRTVAFQQLEIDYVIGESHKELLPNSSGPAAILRIFGVTREGHSICCQVHGFEPYFYIGCPSGMGPDDISRFHQTLEGRMKESNRSSNVPRFVKRVELVQKQTIMHYQTQQSQPFLKIVVALPTMVASCRGILERGITIEGLGSKSFLTYESNILFALRFMIDCNIVGGNWIEVPAGKYRKAARVMSYCQLELDCLYSDLVSHAAE

SEQ ID NO: 92565 - protein, 129 aa, Setaria italica
  Transcript Sequence Number=SeqID_26591
TGNKFLVPMVDVWTGPEELELAWGQANNFEFNVLDIRQTTSPKSSRVEVPLVTLLGHYPLTGSDSRGDIHVDSTAWGHIISNEELLEDFQEYPTPRMARLGDGTNVPIVGFGKMKTEAFNIPHVEFAPD

SEQ ID NO: 92566 - protein, 612 aa, Setaria italica
  Transcript Sequence Number=SeqID_26592
  Gene Ontology: Mol. function=DNA (cytosine-5-)-methyltransferase activity; Cellular component=chromatin; Biological process =regulation of transcription, DNA-dependent
  Homolog annotation: Hit_ID=Q9ARI6; Match level="QueryCoverage=100%, HitCoverage=66%, E-value=0.0, Identity=88%"; Hit description=DNA (cytosine-5)-methyltransferase 2
  Pfam annotation: Domain name=Chromo; Domain location=143-197; Score =70.2; E_value=7.4e-18; Accession=PF00385.16; Description='chromo' (CHRromatin Organisation MOdifier)
  Pfam annotation: Domain name=DNA_methylase; Domain location=42-569; Score=34.3; E_value=2.3e-14; Accession=PF00145.9; Description=C-5 cytosine-specific DNA methylase
  Pfam module annotation: Pfam domain module=Chromo::DNA_methylase; Domain location=143-197::42-569
VAYSTFANIPSENGASGSETASGISSDDMDLETSSGAPVRTATLLDLYSGCGGMSTGLCLGAALAGLKLETRWAVDLNSYACQSLKYNHPQTEVRNEKADEFLALLKEWAVLCDKYVHKDVGSDSAGSEDQEDDGSPLDKDEFVVEKLIGICYGGSGRENGLYFKVQWAGYGPEEDTWEPIDNLSDCPLKIKEFVQEGYRRKILPLPGDVDVICGGPPCQGISGFNRFRNRNEPLKDEKNKQMVTFMDIVAYLKPKYVLMENVVDILKFADGYLGRYALSCLVAMNYQARLGMMVAGCYGLPQFRMRVFLWGALSSMVLPKYPLPTHDVVVRGGAPNAFSQSIVAYDETQRPSLKKALLLGDAISDLPQVENYQPHDVMEYTSSPKTEFQRYIRLGRKDMLDWSFGEEAGPDEGKLLDHQPLRLNNDDYERVKQIPVKKGANFRDLKGVKVGANNIVEWDPEIERVYLSSGKPLVPDYAMSFIKGRSPKPFGRLWWDETVPTVVTRAEPHNQIILHPTQARVLTVRENARLQGFPDYYRLFGPIKEKYIQVGNAVAVPVARALGYCLGQAFLGESEGSQPLYELPASFTSVARVAQVGASSVSTPAGEVVEQ

SEQ ID NO: 92567 - protein, 181 aa, Setaria italica
  Transcript Sequence Number=SeqID_26593
  Gene Ontology: Mol. function=triacylglycerol lipase activity; Biological process=lipid metabolic process
  Homolog annotation: Hit_ID=B9SKY0; Match level="QueryCoverage=91%, HitCoverage=44%, E-value=5e-40, Identity=49%"; Hit description =Triacylglycerol lipase, putative
SLFVGFCSSVPLRYVGALAALKTAVEKFGSANVCVTGHSLGAGFALQVCKELAKQGVYVECHLFNPPSVSLAMGVRSMSEKASYLWKKVKASLPMKEEATTPLESAKEEASDKKRLRTEKKWVPHLYVNNSDYICCYYNAPSCPSTTADDASDEQQQQHKASEIAGDVVAKLFVTSKRLPY

SEQ ID NO: 92568 - protein, 155 aa, Setaria italica
  Transcript Sequence Number=SeqID_26594
  Homolog annotation: Hit_ID=B9RUS0; Match level="QueryCoverage=75%, HitCoverage=2%, E-value=9e-30, Identity=50%"; Hit description =Vacuolar protein sorting-associated protein, putative
RKEEILDICVSDLYESENLLFCSQIDGTSSSCHGLWFCLSIEAKEIGKDVHMDPVYDWSIIIKSPLCLAYYLPISAHYTVSSSHHDDEDSSCSRGALNPGEAVKVHNVDPRNPLYLSLIPHGGWEQMHEPVLISHPTQATPKFINLRSSLSRRIV

SEQ ID NO: 92569 - protein, 242 aa, Setaria italica
  misc_feature (150)..(150): Xaa can be any naturally occurring amino acid
  Transcript Sequence Number=SeqID_26595
  Gene Ontology: Biological process=protein localization
  Homolog annotation: Hit_ID=B9RUS0; Match level="QueryCoverage=94%, HitCoverage=5%, E-value=1e-51, Identity=47%"; Hit description =Vacuolar protein sorting-associated protein, putative
DNTKKGDVACVLCVDLENPVGSYTSFREHGLKFSIVETSDIKILKFTDSLRKEEVYGSPGSELIDHQASALKENEIEPDAKPLELIVELGVVGISLIDHKPRELLYLHLQKVFISYMTGYDSGTTSRFKLILGQLQLDNRHCRQWQLIIXLQLSTMPVILATESRPDLNRPVFKANIAVGNVTSNGIQVYPHVYIRVINEAWRLNIHEPIIWALVDFYSNLRFVSASSSTTVTEVDPEIRIE

SEQ ID NO: 92570 - protein, 631 aa, Setaria italica
  misc_feature (11)..(11): Xaa can be any naturally occurring amino acid
  Transcript Sequence Number=SeqID_26596
  Gene Ontology: Biological process=protein localization
  Homolog annotation: Hit_ID=B9RUS0; Match level="QueryCoverage=96%, HitCoverage=13%, E-value=1e-153, Identity=47%"; Hit description =Vacuolar protein sorting-associated protein, putative
  Pfam annotation: Domain name=DUF1162; Domain location=32-335; Score= -60.5; E_value=0.00039; Accession=PF06650.4; Description=Protein of unknown function (DUF1162)
MHEPVLISHPXPSFFINLRSSLSRRIVQIVLEQSSDNDYLMARVIRIYVPYWISFARLPPLTLRLIDTSGKKEKKRLLARSHLERSEKHLYDIKHDELVEGYTIASGLNFKGLGLLSSVGGHGGQFGAVKELSPLGDMDGTVDISAYDDDGKCMHILLCSKPSSYQAVPTKVINVRPYITFTNRLGQDLYIKLSAGDEPKVLQAYDWRVSFMYSEGDTDKLQVRLADTDWCQPLEIVKEDTIVIAMRKQDGTMKFVKAEIRGYEEGSRFLIVFRLGPAYGPIRIENRTSSTTISTRQSGLGEDTWIQVKPLSTRKYSLDDPYGQKAIDVSIQKGDVACVLCVDLENPVGSYTSFREHGLKFSIVETSDIKILKFTDSLRKEEVYGSPGSELIDHQASALKENEIEPDAKPLELIVELGVVGISLIDHKPRELLYLHLQKVFISYMTGYDSGTTSRFKLILGQLQLDNQLPLSTMPVILATESRPDLNRPVFKANIAVGNVTSNGIQVYPHVYIRVINEAWRLNIHEPIIWALVDFYSNLRFVSASSSTTVTEVDPEIRIELVDISEIRLKISLETAPTQRPRGVLGVWSPVLSAVGNAFKIQVHLRKVMHRSRYMRKSSIIPAIMNRIKRD

SEQ ID NO: 92571 - protein, 241 aa, Setaria italica
  Transcript Sequence Number=SeqID_26597
  Gene Ontology: Mol. function=isoleucine-tRNA ligase activity; Cellular component=cytoplasm; Biological process=tRNA aminoacylation for protein translation
  Homolog annotation: Hit_ID=Q9FI67; Match level="QueryCoverage=100%, HitCoverage=24%, E-value=1e-107, Identity=79%"; Hit description =Isoleucyl-tRNA synthetase
  Pfam annotation: Domain name=tRNA-synt_1; Domain location=38-241; Score=-302.1; E_value=1.2e-06; Accession=PF00133.14; Description =tRNA synthetases class I (I, L, M and V)
  Pfam annotation: Domain name=tRNA-synt_1g; Domain location=68-222; Score=-285.4; E_value=0.017; Accession=PF09334.3; Description=tRNA synthetases class I (M)
  Pfam module annotation: Pfam domain module=tRNA-synt_1::tRNA-synt_1g; Domain location=38-241::68-222
AKKAEQGAKQEDGKYKHTVDLPKTTFGLRANSVVREPELQKLWEENQVLKRVSERNTGTTFVLHDGPPYANGDLHMGHALNKILKDIINRYKLLQNHKVSFVPGWDCHGLPIELKVLKSMDKETLAALTPIKLRQKAAKFAKATVDAQMKSFKRYGIWADWDNPYLTLSPEYEAAQLEVFGQMVMKGYIYRGRKPVHWSPSSRTALAEAELEYSENHISRSIYAAFKITNPSKSGMLDEFL

SEQ ID NO: 92572 - protein, 92 aa, Setaria italica
  Transcript Sequence Number=SeqID_26598
  Gene Ontology: Mol. function=nucleotide binding; Biological process =defense response
  Homolog annotation: Hit_ID=Q6EST1; Match level="QueryCoverage=84%, HitCoverage=8%, E-value=3e-11, Identity=48%"; Hit description =Putative MLA1
LFRKLVRKVKMVSQYRRIAMEIEELKFLVIEQSDRAKRYAIHRYLAASPDPVVLDPRTPALIAEATDLVGIDGPREEIEMVQQLEPVQEKQH

SEQ ID NO: 92573 - protein, 243 aa, Setaria italica
  Transcript Sequence Number=SeqID_26599
  Gene Ontology: Mol. function=transferase activity, transferring glycosyl groups; Biological process=metabolic process
  Homolog annotation: Hit_ID=B6SU66; Match level="QueryCoverage=91%, HitCoverage=44%, E-value=3e-96, Identity=78%"; Hit description =Limonoid UDP-glucosyltransferase
RHLETAGRLALADLLRRQAEAGRPVACVVGNPFLPWATDVAADAGITTAVLWVQSCAVFSIYYHFVHGLAEFPREDDLDARFALPGLPGLSLADVPSFLLPSHPYRILGDTIQDQFRNMGRASWVFVNSFAELERDVVAALPSVTPRPPELIPVGPLVELGGPDDDDAVAVRGDLIKAADDCVAWLDAQAPRSVVYASLGSIVMLSAEAVAEMAHGLASTGRPFLWVVRPDTQPLLPEGFLDA

SEQ ID NO: 92574 - protein, 214 aa, Setaria italica
  misc_feature (192)..(192): Xaa can be any naturally occurring amino acid
  Transcript Sequence Number=SeqID_26600
  Gene Ontology: Cellular component=chloroplast
  Homolog annotation: Hit_ID=B6TVM7; Match level="QueryCoverage=98%, HitCoverage=82%, E-value=2e-46, Identity=43%"; Hit description=4 -methyl-5-thiazole monophosphate biosynthesis protein
  Pfam annotation: Domain name=DJ-1_PfpI; Domain location=1-134; Score =102.2; E_value=1.8e-27; Accession=PF01965.16; Description=DJ-1PfpI family
SVEDGLEVEASCGSRIVADTHIASCADQVFDLVALPGGMPGSVRLRDSDILQRIMVRQAEEKRLYGAICAAPAVVLMPWGLHKRKKITCHPSFIGYLPTFRAVESNVQVSGELTTSRGPGTSFQFALSFVEQMFGPHAAEDVDRVLMTQIDGDLERSTEVNELEWSVDHNPHVLIPIANGSEEMEIIILVDXLRRAKINVVLASVEKSPNIVGS

SEQ ID NO: 92575 - protein, 69 aa, Setaria italica
  Transcript Sequence Number=SeqID_26601
  Subcellular localization annotation: CTP_CleavageSite=47; ConfidenceScore=5.65e-01
SSSFSPAFSSRQQLPPSSSNSNPTPTHWSSSPASSSSDILIQLIDPRSALREKSSRGRDLEREKEPDGH

SEQ ID NO: 92576 - protein, 79 aa, Setaria italica
  Transcript Sequence Number=SeqID_26602
RGVISNLIQTTSCYANSSISSCPETNTVEIKVTVANNSFILLVHHSSYWYSLHVCISADGTSSLVNLRSATIIVTHSFL

SEQ ID NO: 92577 - protein, 169 aa, Setaria italica
  Transcript Sequence Number=SeqID_26603
  Homolog annotation: Hit_ID=B4FMC9; Match level="QueryCoverage=84%, HitCoverage=83%, E-value=9e-65, Identity=82%"; Hit description=GPI -anchored protein
  Subcellular localization annotation: CTP_CleavageSite=37; ConfidenceScore=5.13e-01
MAVACGRLLLFLLSAAALAGVASAAGPFLSDGVFQVSAGSTGRSLLQARKDCPVNFEFQNYTIITSKCKGPKFPAKQCCAALKEFACPFYMYLNDDSSSCATTMFTYINLYGKYPPGLFSSECKEGKLGLSCADVPQRDITTANGGQHAQSSLLAWITVLSVVVALLFH

SEQ ID NO: 92578 - protein, 149 aa, Setaria italica
  Transcript Sequence Number=SeqID_26604
  Gene Ontology: Mol. function=protein tyrosine kinase activity; Biological process=protein amino acid phosphorylation
  Homolog annotation: Hit_ID=B6T5E9; Match level="QueryCoverage=42%, HitCoverage=16%, E-value=2e-26, Identity=90%"; Hit description =BRASSINOSTEROID INSENSITIVE 1-associated receptor kinase 1
  Subcellular localization annotation: CTP_CleavageSite=82; ConfidenceScore=5.42e-01
WSPFTSRLGSALPLLPLAQVPHPTGHHLPPRPTPQLLPSRRVQVPHSAPPPPPPFARAGAAPPAGMHPKLSRAARRLLCCARAASREDLSDEGSGSLRWVFSLRELRSATNSFNYDNKIGQGPLGSVYWGQVWDGSQIAVKRLMNTKNG

SEQ ID NO: 92579 - protein, 125 aa, Setaria italica
  misc_feature (16)..(16): Xaa can be any naturally occurring amino acid
  Transcript Sequence Number=SeqID_26605
  Homolog annotation: Hit_ID=B6UBY6; Match level="QueryCoverage=57%, HitCoverage=19%, E-value=2e-25, Identity=79%"; Hit description =Vegetative cell wall protein gp1
  Pfam annotation: Domain name=DUF588; Domain location=23-124; Score= -5.8; E_value=0.00054; Accession=PF04535.4; Description=Domain of unknown function (DUF588)
  Subcellular localization annotation: CTP_CleavageSite=48; ConfidenceScore=5.22e-01
RQQHAAAENGGSVPPXVAAVAAVGERRPLSVTLRLATAALSLAAFSVIASARTSGWAGDSYARHQQYRYAVAVNVIVCAYSIAQSFGEIRRLISPTFIFRSRPSYYCSLFLDQASAVRRPHSFLN

SEQ ID NO: 92580 - protein, 136 aa, Setaria italica
  Transcript Sequence Number=SeqID_26606
  Gene Ontology: Mol. function=identical protein binding; Cellular component=cytoplasm
  Homolog annotation: Hit_ID=B6T319; Match level="QueryCoverage=98%, HitCoverage=76%, E-value=7e-64, Identity=88%"; Hit description=RS21 -C6 protein
  Pfam annotation: Domain name=MazG; Domain location=18-98; Score=18.0; E_value=3.8e-05; Accession=PF03819.9; Description=MazG nucleotide pyrophosphohydrolase domain
LRKRMADFARERDWEQFHSPRNLLLALVGEMGELSEIFQWKGEVPKGLPGWDEAEKEHLGEELADVLLYLVRLSDMCGVDLGKAALRKMEINARKYPVGQCKGSSKKHTHYGSTNSVTASARDNVNTMNKEDNNGV

SEQ ID NO: 92581 - protein, 290 aa, Setaria italica
  Transcript Sequence Number=SeqID_26607
  Gene Ontology: Mol. function=bile acid:sodium symporter activity; Cellular component=membrane; Biological process=sodium ion transport
  Homolog annotation: Hit_ID=B6TKE8; Match level="QueryCoverage=99%, HitCoverage=70%, E-value=1e-146, Identity=89%"; Hit description=Bile acid sodium symporter
  Pfam annotation: Domain name=SBF; Domain location=56-241; Score =196.4; E_value=7.8e-56; Accession=PF01758.8; Description=Sodium Bile acid symporter family
SANLLYPPPLPEEGKVDLLKILRSANTVIPHIVLGSTILALVYPPSFTWFTTRYYAPALGFLMFSVGVNSSVKDFVEAIKRPDAIAAGYIGQFVIKPLFGFLFGTLAVAVLNFPTALGAGIMLVSCVSGAQLSNYATFLTDPHMAPLSIVMTALSTATAVFVTPTLSYFLIGQKLPVDVKGMMSSIVQIVVAPIAAGLLLNRFLPRLCAAIQPFLPPLSVFVTALCVGSPLAINIKAVLSPFGLAIVLLLFAFHTSSFLSGYHLAGTWFHKSADVKALQRTISFETGMQS

SEQ ID NO: 92582 - protein, 83 aa, Setaria italica
  Transcript Sequence Number=SeqID_26608
LESEDYSHSSGDTSAQDQEFQFPRAPSEKSWEVANDEDQLSNPWSPPRSAVTTLEELMVLSRRLRCGQGLPVDVGKKSLSSVE

SEQ ID NO: 92583 - protein, 101 aa, Setaria italica
  Transcript Sequence Number=SeqID_26609
  Pfam annotation: Domain name=DUF630; Domain location=1-60; Score =116.3; E_value=1e-31; Accession=PF04783.4; Description=Protein of unknown function (DUF630)
MGCGQSKIDQEEAVCRCRDRKRLMADAVVARNAFAAAHTGYTVRLKSTGGALSDFAHGEAPDPSLVASDSHHAVAAAAAAAASVSAPPGPSTASVITAPPP

SEQ ID NO: 92584 - protein, 56 aa, Setaria italica
  Transcript Sequence Number=SeqID_26610
CRCRYLSSSVIYYKHVWPCCSFRYFVWLLSSGLICSTSVAFWPCNFFGYFTIYEAS

SEQ ID NO: 92585 - protein, 621 aa, Setaria italica
  Transcript Sequence Number=SeqID_26611
  Gene Ontology: Mol. function=arginine decarboxylase activity; Biological process=putrescine biosynthetic process
  Homolog annotation: Hit_ID=Q9SNN0; Match level="QueryCoverage=100%, HitCoverage=88%, E-value=0.0, Identity=84%"; Hit description =Arginine decarboxylase
  Pfam annotation: Domain name=Orn_Arg_deC_N; Domain location=36-316; Score=281.8; E_value=1.5e-81; Accession=PF02784.8; Description =Pyridoxal-dependent decarboxylase, pyridoxal binding domain
  Pfam annotation: Domain name=Orn_DAP_Arg_deC; Domain location=319 -516; Score=137.3; E_value=5e-38; Accession=PF00278.14; Description =Pyridoxal-dependent decarboxylase, C-terminal sheet domain
  Pfam module annotation: Pfam domain module=Orn_Arg_deC_N::Orn_DAP_Arg_ deC; Domain location=36-316::319-516
LPGQEIDLAKVVAKAAGPRDGGGLGLPLPLLVRFPDVLRHRVETLNAAFDYAVRSTGYGSRYQGVYPVKCNQDRYVVEDIVEFGEPFRFGLEAGSKPELLLAMSCLAARGNPDALLVCNGYKDDGYVSLALTARTMGLNTVIVLEQEEELDIVLEASRRLGVRPVVGMRAKLRTKHAGHFGSTSGEKGKFGLNAAQILSVVTKLKAVGMLDCLQLLHFHIGSQIPTTALLSDGVGEAAQIYCELARLGAGMRVIDVGGGLGIDYDGTHSAQTDMSVAYSLEEYAVAVVAAVGRVCDRKGVQHPIICSESGRALVSHHSVLVFEAFSATAPGQLDAATAYLLDELTDDCRADYRNVMAAAVRGDYDTCGLYVDQLKRRSAEQFKEGVLGLEHLAAVDAFCEIVARGMGAPEAPRTYHINLSVFTSLPDMWAIGQQFPIIPIQRLQERPAVDGVLSDLTCDSDGKVCEFIGGRHSLPLHELPTHATRGYYLGMFLGGAYQEALGGLHNLFGGPSVVRVTQSDGPHCFAVTRAAAGPSCADVLRAMQHEPEVMFEVLKQRTDDATAASLARAFGAMPYLVFDPEAAVMSSGESSGMSSDSEGSAAGAAEEEDEEEWEFMRGLTV

SEQ ID NO: 92586 - protein, 92 aa, Setaria italica
  Transcript Sequence Number=SeqID_26612
  Gene Ontology: Mol. function=protein serine/threonine kinase activity; Biological process=protein amino acid phosphorylation
  Homolog annotation: Hit_ID=B6U286; Match level="QueryCoverage=100%, HitCoverage=15%, E-value=5e-33, Identity=72%"; Hit description =Nodulation receptor kinase
  Pfam annotation: Domain name=LRR_1; Domain location=34-56; Score =18.1; E_value=0.037; Accession=PF00560.25; Description=Leucine Rich Repeat
  Pfam annotation: Domain name=LRR_1; Domain location=58-78; Score=3.2; E_value=74; Accession=PF00560.25; Description=Leucine Rich Repeat
  Pfam module annotation: Pfam domain module=LRR_1::LRR_1; Domain location=34-56::58-78
SCEPKDGVRVVVKLNFSSKNLQGQIPATIGNLTDLTEIDLQDNNFTGSIPVSFSALKHLRNLSVKCNPFLSNQLPDGFSTGVDFRHGACAAE

SEQ ID NO: 92587 - protein, 181 aa, Setaria italica
  Transcript Sequence Number=SeqID_26613
  Gene Ontology: Mol. function=aspartic-type endopeptidase activity; Biological process=proteolysis
  Homolog annotation: Hit_ID=Q7XKB9; Match level="QueryCoverage=98%, HitCoverage=40%, E-value=2e-60, Identity=68%"; Hit description =OSJNBa0064G10.12 protein
DRVARDNARAEYLARRLSPTYLPTTDLGSEVVSGLDEGSGEYFVRVGVGSPPTEQYLVVDSGSDVIWVQCKPCSQCYAQADPLFDPASSTTFSAVSCGSAICRMLSSSGCGDSDRCQYEVSYGDGSYTNGVLALETLTVGGTAVEGVAIGCGHRNHGLFVGAAGLLGLGWGPMSLVGQLGG

SEQ ID NO: 92588 - protein, 121 aa, Setaria italica
  misc_feature (9)..(9): Xaa can be any naturally occurring amino acid
  misc_feature (37)..(37): Xaa can be any naturally occurring amino acid
  Transcript Sequence Number=SeqID_26614
  Gene Ontology: Mol. function=catalytic activity; Cellular component =protein serine/threonine phosphatase complex; Biological process =protein amino acid dephosphorylation
  Homolog annotation: Hit_ID=Q0J2R1; Match level="QueryCoverage=85%, HitCoverage=27%, E-value=4e-44, Identity=85%"; Hit description =Probable protein phosphatase 2C 67
GYVLTREHXKAIFPQERSRIQKAGGSVGSNGRLQGRXIEVSRAFGDRQFKKVGLISTPDVHSFELTKKDHFIILGCDGLWGVFGPSDAVEFVQNQLKVLSISVSANPKSRFSRFISPVFFS

SEQ ID NO: 92589 - protein, 149 aa, Setaria italica
  misc_feature (26)..(26): Xaa can be any naturally occurring amino acid
  Transcript Sequence Number=SeqID_26615
  Gene Ontology: Mol. function=catalytic activity; Cellular component =protein serine/threonine phosphatase complex; Biological process =protein amino acid dephosphorylation
  Homolog annotation: Hit_ID=Q0J2R1; Match level="QueryCoverage=99%, HitCoverage=40%, E-value=2e-73, Identity=91%"; Hit description =Probable protein phosphatase 2C 67
DYAQKHLHQNVIAAGLPRELMDVKAXKKAIIEGFRRTDESLLQESTKGNWQDGATAVCVWILGQMVVVANAGDAKAVLARSISTDGEGVVDETKSQLKAIVLTREHKAIFPQERSRIQKAGGSVGSNGRLQGRIEVSRAFGDRQFKKVC

SEQ ID NO: 92590 - protein, 89 aa, Setaria italica
  Transcript Sequence Number=SeqID_26616
  Gene Ontology: Mol. function=catalytic activity; Cellular component =protein serine/threonine phosphatase complex; Biological process =protein amino acid dephosphorylation
  Homolog annotation: Hit_ID=Q0J2R1; Match level="QueryCoverage=95%, HitCoverage=23%, E-value=6e-42, Identity=92%"; Hit description =Probable protein phosphatase 2C 67
VESTKFKKVGLISTPDVHSFELTKKDHFIILGCDGLWGVFGPSDAVEFVQNQLKETSSASLAVRRLVKEAVRERRCKDNCTAVLIVFKH

SEQ ID NO: 92591 - protein, 371 aa, Setaria italica
  misc_feature (97)..(97): Xaa can be any naturally occurring amino acid
  Transcript Sequence Number=SeqID_26617
RGAVLGAVFAAHYFGRRRWLLQFPVVQRPLFYGLKMGLLPSGKKSLKVSLQAFCLSFALILLLPWQFRNGGSIGSQILTQISIFIVTAGVSFCLEIXHHFVQVVHTRRCSFAPPQSTAAAETNPTEFILETLEQSDPRSLIQYLAYQDLCVVSECNLEPWRRAAFFEESGETYKRIVTACLKPLEGFSSKVAQALEYDPELISQQYVLINAFDDSQICTWCARTLAGLTARSRQEDRYGVAQLTGCNAAVMTTLLSALVAIEACLGKKTNPLPVHLGPESIRWAQFSTVRTGTGTAIASKQVGLHKKACAMADVLRTSVYQIVSAFIDDLRANAKPASLEKNWISEGRKPVYGSQAVLVQKLSLFIEYRAV

SEQ ID NO: 92592 - protein, 104 aa, Setaria italica
  Transcript Sequence Number=SeqID_26618
  Gene Ontology: Mol. function=drug transporter activity; Cellular component=membrane; Biological process=multidrug transport
  Homolog annotation: Hit_ID=Q10A00; Match level="QueryCoverage=100%, HitCoverage=21%, E-value=3e-38, Identity=67%"; Hit description=MATE efflux family protein, expressed
  Pfam annotation: Domain name=MatE; Domain location=1-104; Score= -14.7; E_value=0.013; Accession=PF01554.10; Description=MatE
CGQAFGAKQYSLLGIYKQRAILVLTLVSVVVAVIWSYTGQILLLFGQDPEIASGAGSYIRWMIPALFAYGPLQCHVRFLQTQNIVLPVMVSSGVTALNHLLVCW

SEQ ID NO: 92593 - protein, 114 aa, Setaria italica
  Transcript Sequence Number=SeqID_26619
FHDKYGSPIANIAVNGGFDREYGLEGTLELFQFFSEENCDYPSKAADRYPKTKDATYLENILEAANHQAPQKHLASDTKSEELPPPPPSLLPKHLRSQRSDGVRVESDVNPSST

SEQ ID NO: 92594 - protein, 153 aa, Setaria italica
  Transcript Sequence Number=SeqID_26620
  Homolog annotation: Hit_ID=Q8S811; Match level="QueryCoverage=82%, HitCoverage=62%, E-value=1e-15, Identity=36%"; Hit description=F-box domain containing protein, expressed
  Pfam annotation: Domain name=F-box; Domain location=28-75; Score =25.1; E_value=0.00028; Accession=PF00646.25; Description=F-box domain
MSLGVRFSVTRMSNKHMRPKALEVSTCDVISSLPDELLHHILSFTTAREAVQTCVLSMRWLHVWKPLRRLNIEGREFTSKIGFMKFIDNLLLHRGCIPLDNFQWTSSSSVSLDDDRANRCVCYALHCNVRELGIIEHHQLLNLDHSYFTSVHL

SEQ ID NO: 92595 - protein, 181 aa, Setaria italica
  Transcript Sequence Number=SeqID_26621
  Gene Ontology: Mol. function=hydro-lyase activity; Cellular component= cytoplasm; Biological process=fatty acid biosynthetic process
  Homolog annotation: Hit_ID=B6TG22; Match level="QueryCoverage=92%, HitCoverage=74%, E-value=8e-78, Identity=85%"; Hit description=Beta -hydroxyacyl-ACP dehydratase
  Pfam annotation: Domain name=FabA; Domain location=47-173; Score =194.0; E_value=4.1e-55; Accession=PF07977.5; Description=FabA-like domain
PARRLVLAARRAADGDSVETAPEAVPIEKRFPPFPSVMDINQIREILPHRFPFLLVDRVIEYKAGEYAVGIKNVTINDNFFPGHFPERPIMPGVLMVEAMAQVGGLVMLQPEVGGSRDNFFFAGIDKVRFRKPVIAGDTLIMRMTLTKYQKRFGLAKMEGKAYVGGDLVCEGEFLLVSATE

SEQ ID NO: 92596 - protein, 72 aa, Setaria italica
  Transcript Sequence Number=SeqID_26622
AFVHYIVSPFHIVQVKRNIARHTLKQGSPQLLLQESKGSPWTRKLLEICCRCKQRNSGHSALTCKSNDVIQL

SEQ ID NO: 92597 - protein, 90 aa, Setaria italica
  Transcript Sequence Number=SeqID_26623
MEGGGSTTRFYRGTTTTLATNPTSAANGAQKGDREAAVDAEIARVNKLPAHSSYAIHRMKVLNKLRHLLSIKRTTSQDEELELLFATLSI

SEQ ID NO: 92598 - protein, 113 aa, Setaria italica
  Transcript Sequence Number=SeqID_26624
APNPNPKTLTSLEPWWRKPLPPTITLTLLKLACSFGEEGGERVRRVGYLVCKKITRHQSIIEVPFLYEYLTYSVSLPLLVTEVCFRVYPAPSDSENHRLFTTKTSYSHKFCSV

SEQ ID NO: 92599 - protein, 151 aa, Setaria italica
  Transcript Sequence Number=SeqID_26625
  Gene Ontology: Mol. function=protein kinase activity; Biological process=protein amino acid phosphorylation
  Homolog annotation: Hit_ID=P17801; Match level="QueryCoverage=98%, HitCoverage=17%, E-value=2e-55, Identity=58%"; Hit description =Putative receptor protein kinase ZmPK1
  Pfam annotation: Domain name=PAN_1; Domain location=74-140; Score =5.2; E_value=0.06; Accession=PF00024.18; Description=PAN domain
  Pfam annotation: Domain name=PAN_2; Domain location=65-130; Score= -1.5; E_value=0.0022; Accession=PF08276.3; Description=PAN-like domain
  Pfam module annotation: Pfam domain module=PAN_1::PAN_2; Domain location=74-140::65-130
LNSSDGRWLVSWIAMSQPCNIHGFCGPNGICHYLPAPTCLCPPGYAMSNPGNWSQGCRPLVDINCTVEQVQPVKFLPLPGTDYWGSDQMHVDQVSLQACKNICRSDCTCKGFMYQQGSGSCYPKSFLFNGKAFTPPRKAYRIMYLKPPHEC

SEQ ID NO: 92600 - protein, 225 aa, Setaria italica
  Transcript Sequence Number=SeqID_26626
  Gene Ontology: Mol. function=kinase activity; Biological process =carbohydrate metabolic process
  Homolog annotation: Hit_ID=Q1M2Z4; Match level="QueryCoverage=55%, HitCoverage=60%, E-value=4e-25, Identity=54%"; Hit description=Ampk protein (Fragment)
FAASLNLEDGPAPSDSTSSDGDASENPLSQKLSSDELKSLLADSERSKLLRRLSEANQYNRFLKRQLQLKDDAVVKFKSELAALELELQALVGLAEEIANFDVPLGSRKINGKYIQSHLLSRLEAVHGKVMDQIKDVDSLKPQEISVYWVGMAENVQIMGSFDGWSQGETMSREYSGDYGRFSATLKLRPGRYEIKFLVDGEWRLSPEYPMAGEGLTQNNIIVVE

SEQ ID NO: 92601 - protein, 147 aa, Setaria italica
  Transcript Sequence Number=SeqID_26627
  Homolog annotation: Hit_ID=Q1M2Z4; Match level="QueryCoverage=94%, HitCoverage=72%, E-value=2e-14, Identity=37%"; Hit description=Ampk protein (Fragment)
  Subcellular localization annotation: CTP_CleavageSite=84; ConfidenceScore=5.07e-01
MECLTASFPRNVGKEHNFVCSSKLGSENQWVPRRICCYVPSSTNSSQQHKFTTTTYPMSPTIGRRSRWRSFAASLNLEDGPAPSDSTSSDGDASENPLSQKLSSDELKSLLADSERSKLLRRLSEANQYNRFLKRQVLFSVLLQIVW

SEQ ID NO: 92602 - protein, 62 aa, Setaria italica
  Transcript Sequence Number=SeqID_26628
VRSQTQVQAENWLILGLVCDVQTLVTVILDSSSEPRLKLSMRSASTRIRYSPGVMKSLLEDE

SEQ ID NO: 92603 - protein, 126 aa, Setaria italica
  misc_feature (14)..(14): Xaa can be any naturally occurring amino acid
  misc_feature (73)..(73): Xaa can be any naturally occurring amino acid
  misc_feature (99)..(99): Xaa can be any naturally occurring amino acid
  Transcript Sequence Number=SeqID_26629
  Subcellular localization annotation: CTP_CleavageSite=62; ConfidenceScore=5.92e-01
ENPPPPSSPPPPPXPAPAPPPPPPSSPTTPKTTTSTSSARTTTPGANSSGASSTRAPTTCPSATTPRPPPCPXPAPHPPPRPEVRLQRHNPEASRPPPXPPPPPGAGSPPPRPRPSPRCPRSRWPS

SEQ ID NO: 92604 - protein, 159 aa, Setaria italica
  Transcript Sequence Number=SeqID_26630
  Gene Ontology: Mol. function=transferase activity, transferring nitrogenous groups; Biological process=biosynthetic process
  Homolog annotation: Hit_ID=B6TNJ0; Match level="QueryCoverage=89%, HitCoverage=35%, E-value=5e-60, Identity=83%"; Hit description =Kynurenine--oxoglutarate transaminase 1
MERRLSAASRRSAPSPIQQLSHLAQRVGAVNLAEGFPDFPAPPRVKAAAAAAIAADLNQYRHVQGICDVLAETARRDHGLDADPLTDFVICCGQSEAFAAAIFATIDQGDEVLLFDPAYETYETCIELARGVPVYVRLDPPSWTLNEDKFLKSFTSRTK

SEQ ID NO: 92605 - protein, 384 aa, Setaria italica
  Transcript Sequence Number=SeqID_26631
  Gene Ontology: Mol. function=transferase activity, transferring nitrogenous groups; Biological process=biosynthetic process
  Homolog annotation: Hit_ID=B6TNJ0; Match level="QueryCoverage=89%, HitCoverage=85%, E-value=1e-152, Identity=79%"; Hit description =Kynurenine--oxoglutarate transaminase 1
  Pfam annotation: Domain name=Aminotran_1_2; Domain location=9-355; Score=71.6; E_value=3e-18; Accession=PF00155.13; Description =Aminotransferase class I and II
SREARGGDRGWFKSHEHHEKKKDHNAADLNQYRHVQGICDVLAETARRDHGLDADPLTDFVICCGQSEAFAAAIFARSAAGDEVLLFDPAYETYETCIELARGVPVYVRLDPPSWTLNEDKFLKSFTSRTKAVVLNSPHNPTGKVFSKEELLIIAQACQKMDCFAITDEVYEYITYDENKHISLASLPGMQERTIITSSLSKTYSVTGWRIGWACAPASIASAIRNIHIKLTDSAPAPFQEAALTALTSTPDFYSSLKKDYEVRRDFILQLLKDFGFHISFKPQGSVFVFAELPLSWQLSDIDFVTNLINDAGVAAVPGHGFFHDNCDRESYHNQYVRFAFCKSDDTLMAAALRMRKLADSKVKTWLTGSGSARQEDQTASASL

SEQ ID NO: 92606 - protein, 85 aa, Setaria italica
  Transcript Sequence Number=SeqID_26632
  Gene Ontology: Mol. function=transferase activity, transferring nitrogenous groups
  Homolog annotation: Hit_ID=B6TNJ0; Match level="QueryCoverage=80%, HitCoverage=17%, E-value=1e-15, Identity=55%"; Hit description =Kynurenine--oxoglutarate transaminase 1
MQIDFVTNLINDAGVAAVPGHGFFHDNCDRESYHNQYVRFAFCKSDDTLMAAALRMRKLADSKVKTWLTGSGSARQEDQTASASL

SEQ ID NO: 92607 - protein, 593 aa, Setaria italica
  Transcript Sequence Number=SeqID_26633
LQEVEAEVGGSGGTSGQNSTEPNPSKASLARVLFYDAEIGGPPMNFRDVFLYSQALEGITLSMILEAPKEEEVSLLLEIFGICLTGGKEVNNAIVSSIQDLAKSFSNYHDEVLVKREELLQFTQSAISGLKRNADIVRIDAEAVELWKKLDEKEASGVHSIDDPDKVAEKTATVESFKEALNEVRFCSRMEELLLKKKSINTGDSLEIHSQKVEKLKVLATSLANSSSKAEKRILDHRRQKEEALNFRAKKDNEVIAVEKDLTAEVSELEKQRDELEAQLKKVNISLNAAVGRLKQTREERDQFYEANNQMIFSLQAKENELSKSIDSCNMEAGVVKTWVNFLEDTWQLQSSYNEQKENTTNNELERCTSNFLKLTKHHLCNFKDLLSPSIERIRTYVDNLAVLNSREESIEHGEDDEISEKTSPQKSLEEEYLETEKKIVIAFSIVDRMKKMFYSEQGANSRQDDEEVRKLFSEIEKLREIFESVERPTLDIEVRKAKEPTKDKSESIRSTKDKSGSSHSPVHAPSSPKDVPVESPKSPVKPEQMLDPDSELAKLELEFGNVNKDHEEISGWDFDELEEELRADISKSSNPK

SEQ ID NO: 92608 - protein, 99 aa, Setaria italica
  misc_feature (95)..(96): Xaa can be any naturally occurring amino acid
  Transcript Sequence Number=SeqID_26634
RDAPSAGSRSAANIGGGSEQPYRSGGSYGSPNANQPYTGARANNEQPGYDATQSYRTSSAYNQQSHGGHLPNAHQQYNGAEANNTQSGYGKGQTXXHPN

SEQ ID NO: 92609 - protein, 79 aa, Setaria italica
  Transcript Sequence Number=SeqID_26635
CGFNYPLSAACCLNRICSALEQKWNIGWMEILRQNIFVLASSIVFIAFFIRTSISSCKHMSIGSQELHINFLNQVLSEF

SEQ ID NO: 92610 - protein, 105 aa, Setaria italica
  Transcript Sequence Number=SeqID_26636
  Gene Ontology: Mol. function=serine-type endopeptidase activity; Biological process=negative regulation of catalytic activity
  Homolog annotation: Hit_ID=C3VDI0; Match level="QueryCoverage=82%, HitCoverage=11%, E-value=2e-26, Identity=62%"; Hit description =Subtilisin-like serine protease
FRTTHSWDFLGLAENGQGTPASAWSSAKFGADTIIGNIDTGVWPQSQSFQDYGLGAPKDWRGICDKGCDPTFQCNNKLIGAMFFSAGLQAELSRPGDQGKLPSKE

SEQ ID NO: 92611 - protein, 130 aa, Setaria italica
  Transcript Sequence Number=SeqID_26637
  Gene Ontology: Mol. function=protein serine/threonine kinase activity; Biological process=protein amino acid phosphorylation
  Homolog annotation: Hit_ID=B9SM68; Match level="QueryCoverage=90%, HitCoverage=11%, E-value=4e-25, Identity=51%"; Hit description =Leucine-rich repeat receptor protein kinase EXS, putative
TTTTNQDLEQYPTNISYNNFSGAIPVTPFFKTLSSNSYIGNANLCESYDGHTCASDMVRRSALKTVKTVILVCAVLGSVTLLLVVVWILINRNRKLAGEKAMSLSGAGGDDFSNPWTFTPFQKLNFSIDN

SEQ ID NO: 92612 - protein, 125 aa, Setaria italica
  Transcript Sequence Number=SeqID_26638
  Gene Ontology: Mol. function=substrate-specific transmembrane transporter activity; Cellular component=integral to membrane; Biological process=transmembrane transport
  Homolog annotation: Hit_ID=Q7XMZ1; Match level="QueryCoverage=100%, HitCoverage=35%, E-value=2e-48, Identity=77%"; Hit description =OSJNBa0027G07.4 protein
SNAALMGAVINGAVNLVSLLLSTLVIDRYGRKVLFMVGGIQMVIAQVGMAWIMGAKIGRSGEAAMPHPYAVAVLVFTCLHTAGFGWSWGPLGWVIPSEIFPVDIRSAGQAMNVSIGLCLTFVQTQ

SEQ ID NO: 92613 - protein, 354 aa, Setaria italica
  Transcript Sequence Number=SeqID_26639
  Gene Ontology: Mol. function=protein dimerization activity; Cellular component=nucleus; Biological process=regulation of transcription, DNA-dependent
  Homolog annotation: Hit_ID=P23922; Match level="QueryCoverage=97%, HitCoverage=100%, E-value=1e-117, Identity=67%"; Hit description =Transcription factor HBP-1a
  Pfam annotation: Domain name=MFMR; Domain location=1-166; Score =213.1; E_value=7.3e-61; Accession=PF07777.3; Description=G-box binding protein MFMR
  Pfam annotation: Domain name=bZIP_1; Domain location=250-313; Score =88.3; E_value=2.6e-23; Accession=PF00170.13; Description=bZIP transcription factor
  Pfam annotation: Domain name=bZIP_2; Domain location=250-304; Score =34.3; E_value=4.9e-07; Accession=PF07716.7; Description=Basic region leucine zipper
  Pfam module annotation: Pfam domain module=MFMR::bZIP_1::bZIP_2; Domain location=1-166::250-313::250-304
MGSNEPSTPSKAPKASEQDQPPATTSGATASVYPEWPSFQAYSAMPPHGFFPPTVAANPQAHPYMWGAQPMVPPYGTPQSPYVMYPPGTVYAHPSTTPGMHPFSHYPMPTNGHAETPGAAPSAPEMNGKSEPGRTSAPSANGITSHSESGSESESEGSDANSQNDSHSKDNDGKEDGSSQNGISYSASQGMLNQSMSMIPIQPGAMVGVPGSTANLNIGMDYWAAPGSAAIPATQGKATAGSARGDQWDERELKKQKRKQSNRESARRSRLRKQAECEELGQRAESLRSENSSLRAELERIRKEYEQLLSQNASLKEKLGATGDSIPDMNEQNDGDGSGHQKQPDSDAQPGNES

SEQ ID NO: 92614 - protein, 51 aa, Setaria italica
  Transcript Sequence Number=SeqID_26640
CSSRHSIRRLNLVQYPGTQIISHFTPPVHLQNAQLVIHEYSKTSSMSHKGH

SEQ ID NO: 92615 - protein, 60 aa, Setaria italica
  misc_feature (1)..(2): Xaa can be any naturally occurring amino acid
  Transcript Sequence Number=SeqID_26641
XXFFFEHTTARYFPHFTKCRHCILQGACTILAMNKMYSYAYELRTETFTGNLQMVSDRWA

SEQ ID NO: 92616 - protein, 77 aa, Setaria italica
  Transcript Sequence Number=SeqID_26642
  Pfam annotation: Domain name=DUF789; Domain location=1-77; Score= -164.3; E_value=0.043; Accession=PF05623.4; Description=Protein of unknown function (DUF789)
RAARGWRTNGVDGDQDRPYFVLRDVWEAYSEWSAYGAGVPLMLDGCDGVVQYYVPYLSAIQLYGDPAVLRTSTSPRY

SEQ ID NO: 92617 - protein, 94 aa, Setaria italica
  Transcript Sequence Number=SeqID_26643
PTIPKNHSRSSHPISSLYMAERHCLTLTWQFKLYLNTHRSMHQSIKAVRPPPFLVRFTTKNQHLLTSPPSSSTQILLLPSSPPPRPPSPPLPLP

SEQ ID NO: 92618 - protein, 309 aa, Setaria italica
  misc_feature (127)..(127): Xaa can be any naturally occurring amino acid
  Transcript Sequence Number=SeqID_26644
  Homolog annotation: Hit_ID=Q9LR63; Match level="QueryCoverage=81%, HitCoverage=81%, E-value=8e-34, Identity=34%"; Hit description =F21B7.22
  Pfam annotation: Domain name=DUF789; Domain location=57-309; Score =398.0; E_value=1.6e-116; Accession=PF05623.4; Description=Protein of unknown function (DUF789)
MMGTAVELGRRQGDARFYDAARARRGNQRGLPKSRWSPADAAQEKVPSAAAAPGVSGNLERFVAAVTPSVPAQYPSKRAARGWRTNGVDGDQDRPYFVLRDVWEAYSEWSAYGAGVPLMLDGCDGVXQYYVPYLSAIQLYGDPAVLRTSTSPRHMMNDSDGDSHESSSDASSDCGHGRLKHLTREGFSSDDGESGDPHDRLLFQYLEFDSPFCREPLTDKVSSLSARFPGLKSLKSSDLSLRSWISVAWYPIYRIPIGPTLKDLDACFLTFHRLSTRVGDHVGAIQYAWGSSPNISLPVFGMASYKFSK

SEQ ID NO: 92619 - protein, 299 aa, Setaria italica
  Transcript Sequence Number=SeqID_26645
  Homolog annotation: Hit_ID=Q9LR63; Match level="QueryCoverage=89%, HitCoverage=84%, E-value=9e-33, Identity=33%"; Hit description =F21B7.22
  Pfam annotation: Domain name=DUF789; Domain location=1-291; Score =444.0; E_value=2.3e-130; Accession=PF05623.4; Description=Protein of unknown function (DUF789)
SVVLPFRSRSSVTPSKRAARGWRTNGVDGDQDRPYFVLRDVWEAYSEWSAYGAGVPLMLDGCDGVVQYYVPYLSAIQLYGDPAVLRTSTSPRHMMNDSDGDSHESSSDASSDCGHGRLKHLTREGFSSDDGESGDPHDRLLFQYLEFDSPFCREPLTDKVSSLSARFPGLKSLKSSDLSLRSWISVAWYPIYRIPTGPTIPTGPTLKDLDACFLTFHRLSTRVGDHVGAIQYAWGSSPNISLPVFGMASYKFSKSVWSSNDEDWQLASGLLQAAADWLRDSRASHPDYQFFVSRGAYNR

SEQ ID NO: 92620 - protein, 164 aa, Setaria italica
  Transcript Sequence Number=SeqID_26646
  Gene Ontology: Mol. function=nucleic acid binding
  Homolog annotation: Hit_ID=Q6K4H1; Match level="QueryCoverage=73%, HitCoverage=51%, E-value=8e-35, Identity=57%"; Hit description=Far -red impaired response protein-like
MVERKERGDDSHRMQSHDGCESHRWRWHVAYFMADHNHDLVVKPSLKKFLRSHKRIPQQEKEFITLLHGCNLSTGRIMQLMNEMYGSAQMVPYEGKDVSNFRSKIRRAKKYKDMQEAIDRFREIQQEDPNFFCKVKLDDENRVESSSCGSAVQCSCWPSNIQSP

SEQ ID NO: 92621 - protein, 89 aa, Setaria italica
  Transcript Sequence Number=SeqID_26647
AVTPHNLRRPVDLWVAVGRGRRPPWIRSITHAPHRVPAGLPSTELHSRWESRQRSAGRGHRIPLADGLVPRRGPVQSARMLEQVQRTDT

SEQ ID NO: 92622 - protein, 99 aa, Setaria italica
  Transcript Sequence Number=SeqID_26648
GESRRGCCSEDEEPAASSPNSTLSSLSGKRPAATRSGDLEGDHTPRAGGASDDEDSGAGGGSRKKLRLSKDQAAVLEESFKEHNTLNPLRTAPVSAIIG

SEQ ID NO: 92623 - protein, 157 aa, Setaria italica
  misc_feature (123)..(123): Xaa can be any naturally occurring amino acid
  misc_feature (134)..(134): Xaa can be any naturally occurring amino acid
  Transcript Sequence Number=SeqID_26649
  Gene Ontology: Mol. function=transcription regulator activity; Cellular component=nucleus; Biological process=regulation of transcription
  Homolog annotation: Hit_ID=Q2QLR0; Match level="QueryCoverage=77%, HitCoverage=32%, E-value=6e-25, Identity=51%"; Hit description=Helix- loop-helix DNA-binding domain containing protein
  Pfam annotation: Domain name=ACT; Domain location=86-151; Score=16.9; E_value=0.085; Accession=PF01842.17; Description=ACT domain
MLQMDKATILGDAVKYVRKLQEKVKTLEEDGAHSAGGSSSMVQSAVLVKKPCHLQPEDEAIMASGGGGGDGGQLPEIEARLSEKSVLVRIHCRNARGLLVRVISEVEKMHLSITHTNVMPFPXSTAIITITAKXVEEGFIATVDEIVRSINSVLHQH

SEQ ID NO: 92624 - protein, 98 aa, Setaria italica
  Transcript Sequence Number=SeqID_26650
AGLEENERSPMGIEEGNYWIPALLLAPLLVQEGHAHVLTPVDDSRSRPRSPHPSNVSRSVSLPFLRSLSSVLDILMQFLEKCNIMLSHALVLLIDCDK

SEQ ID NO: 92625 - protein, 77 aa, Setaria italica
  Transcript Sequence Number=SeqID_26651
  Gene Ontology: Cellular component=cytoplasm
  Homolog annotation: Hit_ID=Q10PL9; Match level="QueryCoverage=100%, HitCoverage=36%, E-value=6e-33, Identity=89%"; Hit description=Maf family protein, putative, expressed
ALRLILGSSSASRRQILSEMGYKFTLLSADIDEKEIRKEKPEELVVALAHAKADAILEKMKNNGMMKEIVDSQETTL

SEQ ID NO: 92626 - protein, 77 aa, Setaria italica
  Transcript Sequence Number=SeqID_26652
  Gene Ontology: Cellular component=cytoplasm
  Homolog annotation: Hit_ID=Q10PL9; Match level="QueryCoverage=68%, HitCoverage=25%, E-value=3e-21, Identity=88%"; Hit description=Maf family protein, putative, expressed
VRRYAGEDEEGDEDAILEKMKNNGMMKEIVDSQETTLMITADQVVVHDGVIREKPSTPEEARKFIKGLCYFVELKLF

SEQ ID NO: 92627 - protein, 247 aa, Setaria italica
  misc_feature (22)..(22): Xaa can be any naturally occurring amino acid
  Transcript Sequence Number=SeqID_26653
  Gene Ontology: Cellular component=cytoplasm
  Homolog annotation: Hit_ID=Q10PL9; Match level="QueryCoverage=100%, HitCoverage=100%, E-value=1e-103, Identity=78%"; Hit description=Maf family protein, putative, expressed
  Pfam annotation: Domain name=Maf; Domain location=60-245; Score=23.3; E_value=6.7e-11; Accession=PF02545.6; Description=Maf-like protein
MAASSALRLILGSSSASRRQTXILSEMGYKFTLLVGYLCPLWLTCYASVDSSPTVQYFSSTLVCLLRGLQSADIDEKEIRKEKPEELVVALAHAKADAILEKMKNNGMMKEIVDSQETTLMITADQVVVHDGVIREKPSTPEEARKFIKGYSESHAATIGSVLVTNVKTGARREGWDKAEVYFHKIPDEVVESLIEEGNVFYVAGGLLVEHPLTSPLVEAIVGTIDSVMGLPKALTEKLIKESLSEP

SEQ ID NO: 92628 - protein, 99 aa, Setaria italica
  Transcript Sequence Number=SeqID_26654
  Gene Ontology: Mol. function=carbonate dehydratase activity
  Homolog annotation: Hit_ID=B9STU6; Match level="QueryCoverage=98%, HitCoverage=4%, E-value=9e-25, Identity=58%"; Hit description =Mom(Plant), putative
VLKAKLARYVAFERKADSSKLLEYWVPAHLSPVQLEMYCYTLLSNSPALRSHSKTDNVGALRNILVSLRKCCDHPYLVDQMLQSSLTKGHHVTDILDIG

SEQ ID NO: 92629 - protein, 73 aa, Setaria italica
  Transcript Sequence Number=SeqID_26655
  Gene Ontology: Mol. function=serine-type endopeptidase activity; Cellular component=extracellular region; Biological process=negative regulation of catalytic activity
  Homolog annotation: Hit_ID=B3TZE7; Match level="QueryCoverage=100%, HitCoverage=13%, E-value=9e-13, Identity=50%"; Hit description =Subtilisin protease (Fragment)
VTSPAGVRVTVEPPTLQFSATQKTQEYAITFAAQQGSVTEKYTFGSIVWSDGKHKVTSPIAITWPASQQVAAM

SEQ ID NO: 92630 - protein, 148 aa, Setaria italica
  misc_feature (129)..(129): Xaa can be any naturally occurring amino acid
  Transcript Sequence Number=SeqID_26656
  Gene Ontology: Mol. function=binding; Cellular component=integral to membrane; Biological process=defense response
  Homolog annotation: Hit_ID=B9R7G8; Match level="QueryCoverage=100%, HitCoverage=11%, E-value=9e-69, Identity=81%"; Hit description =Ribonuclease p/mrp subunit, putative
PLQEVSSMLLRKLVAAGVGNRPVVFVTHSMGGLVVKQLLYQAKLNNYDNFLNNTVGLVFYSCPHFGSKLADMPWRMGLVFRPAPSIGELRSGSPRLVELNDFVRQRHNKGLLNVLSFSETQVTPIVEGXGGWALRMEIVPIESAYPWF

SEQ ID NO: 92631 - protein, 213 aa, Setaria italica
  misc_feature (69)..(69): Xaa can be any naturally occurring amino acid
  Transcript Sequence Number=SeqID_26657
  Gene Ontology: Mol. function=binding; Cellular component=integral to membrane; Biological process=defense response
  Homolog annotation: Hit_ID=B9R7G8; Match level="QueryCoverage=94%, HitCoverage=13%, E-value=1e-81, Identity=72%"; Hit description =Ribonuclease p/mrp subunit, putative
LSSMLLRKLVAAGVGNRPVVFVTHSMGGLVVKQLLYQAKLNNYDNFLNNTVGLVCICLLNFVIICVTEXDLTMSVPQVFYSCPHFGSKLADMPWRMGLVFRPAPSIGELRSGSPRLVELNDFVRQRHNKGLLNVLSFSETQVTPIVEGYGGWALRMEIVPIESAYPGFGELVVLPSTDHINSCKPVNKNDPSYAETLAFLEKNFKLRLKRVES

SEQ ID NO: 92632 - protein, 88 aa, Setaria italica
  Transcript Sequence Number=SeqID_26658
  Gene Ontology: Mol. function=protein serine/threonine kinase activity; Cellular component=plasma membrane; Biological process =protein amino acid phosphorylation
  Homolog annotation: Hit_ID=A6MZJ0; Match level="QueryCoverage=97%, HitCoverage=55%, E-value=3e-35, Identity=80%"; Hit description =Phytosulfokine receptor (Fragment)
NGHLYDTGKESMTRLEFKQRLSIAIGSAKGLNHLHTLAPPLIHRDFKTSNVLVDENFIAKVSDAGIDRLMRGLEGATPSNGSVYQDPQ

SEQ ID NO: 92633 - protein, 492 aa, Setaria italica
  misc_feature (289)..(289): Xaa can be any naturally occurring amino acid
  Transcript Sequence Number=SeqID_26659
  Homolog annotation: Hit_ID=B9SBF1; Match level="QueryCoverage=99%, HitCoverage=21%, E-value=3e-52, Identity=31%"; Hit description =Nucleotide binding protein, putative
FSFSWLYCDIKALLIMINPILAASVKGESFQVLLDGLVHSMRHRSHDVPLNTEGGMSSASVHKIQLEKSENSNLSIDEKWNLIGASLWIRLTSVMQLYLREFVEKERLEHETGGSDSEFKGHFSSVAAKFAMDSIHFVSSSLVKVHASFLRKNLPTHSHSSVLFWLESSQQWSDSNGYDQLSRIFQLANNENMEALFSNLWEISVNSVDICNAFVNEGVKCFSLSSINVTRSWKDIRGTGVECKVSSTQRSGEEHKHGLSSNNNDQGQGFTDGASSNGEVFPETKGKSXIVQKDFQSPRELLRRSGELLEAICLNSINEKQAAIATNRKGLVFFNWSEKKHCKNFAEYVWSGSDWPLDSWAGCESTPTPTFISSGAGLGRKKGSQPGSGGATIGLGSLAKPGRDLTGGGAFGIPGYAGIGASGFGWGEPEEFEDFVDPPATLGNIHSRALSRHPSLPLFLVGSSNTHVYLWEFGKDSAMATYGVLPAANHST

SEQ ID NO: 92634 - protein, 136 aa, Setaria italica
  misc_feature (128)..(128): Xaa can be any naturally occurring amino acid
  Transcript Sequence Number=SeqID_26660
  Gene Ontology: Mol. function=ubiquitin-protein ligase activity; Cellular component=ubiquitin ligase complex; Biological process =ubiquitin-dependent protein catabolic process
  Homolog annotation: Hit_ID=B9R8Q6; Match level="QueryCoverage=100%, HitCoverage=16%, E-value=8e-36, Identity=58%"; Hit description =Ubiquitin-protein ligase, putative
  Pfam annotation: Domain name=Arm; Domain location=55-96; Score=18.5; E_value=0.028; Accession=PF00514.15; Description=Armadillobeta -catenin-like repeat
  Pfam annotation: Domain name=Arm; Domain location=9-49; Score=14.8; E_ value=0.16; Accession=PF00514.15; Description=Armadillobeta-catenin -like repeat
  Pfam module annotation: Pfam domain module=Arm::Arm; Domain location =55-96::9-49
VHGGFCSLRESFCLAEGGCKAVERLVACLEHADAPVVEAALVALSTLLGDGVANTAEGVLVLGEAEGLRPVVELLVENRTEALQRRAVWAVERILRVQDIAEEVAADQTVASALVEAYRNGDARTRHXRAERALRH

SEQ ID NO: 92635 - protein, 93 aa, Setaria italica
  Transcript Sequence Number=SeqID_26661
HMKERLAGSGDGHSIGHGFTHVQPIIFARKEIEVSQVTDEEPNTNSTLGFGVFVSHSRKGREGNRLAYPSDARHRRRARRRPSQWRPLALCRR

SEQ ID NO: 92636 - protein, 64 aa, Setaria italica
  Transcript Sequence Number=SeqID_26662
  Subcellular localization annotation: CTP_CleavageSite=37; ConfidenceScore=5.61e-01
PNCTEPFLRLGFSSPNRASHRSSSPPPPPSPPPGSICASGKPYPRSPTPPRTSAEPAESVRYRR

SEQ ID NO: 92637 - protein, 148 aa, Setaria italica
  Transcript Sequence Number=SeqID_26663
  Homolog annotation: Hit_ID=B6CQU0; Match level="QueryCoverage=100%, HitCoverage=44%, E-value=3e-56, Identity=71%"; Hit description =Putative allergen Pru du 2.04
  Pfam annotation: Domain name=Thaumatin; Domain location=1-148; Score =84.4; E_value=4.2e-22; Accession=PF00314.9; Description=Thaumatin family
  Subcellular localization annotation: CTP_CleavageSite=27; ConfidenceScore=5.25e-01
GFQLAPGQSQTLSAPAGWSGKLWGRTLCSTDSTGKFTCVTGDCGSGRQDCAGGNAAPPATLAEFTLDGSGGMDFYDVSLVDGYNLPVLVAPQGAAPGGNCAPTGCEVDLNGACPADLRVTSAAAPAGVACKSACEAFGSAQYCCSGEY

SEQ ID NO: 92638 - protein, 64 aa, Setaria italica
  Transcript Sequence Number=SeqID_26664
GKMKLVWCPEVASKAYIDGVRALAGHDDLAGSAEVAELVAAMAGGWNAQLVVEAPDVPAQSSIS

SEQ ID NO: 92639 - protein, 128 aa, Setaria italica
  Transcript Sequence Number=SeqID_26665
  Gene Ontology: Mol. function=transferase activity, transferring glycosyl groups; Biological process=metabolic process
  Homolog annotation: Hit_ID=C4MF46; Match level="QueryCoverage=100%, HitCoverage=25%, E-value=7e-48, Identity=71%"; Hit description=UDP -glycosyltransferase
FVAPGHLIPVADMAALFAPRGVKCSILATPVNAAVIRSAVDRANDAFRSAGAPAIDLSTIPFPDVGLPPGVESVVGLSSEADRYMLLEAIKRLREPFGRFLADHRPDAAVADSFYPWAADAAAEHGVP

SEQ ID NO: 92640 - protein, 236 aa, Setaria italica
  Transcript Sequence Number=SeqID_26666
  Gene Ontology: Mol. function=protein binding; Biological process =protein amino acid phosphorylation
  Homolog annotation: Hit_ID=Q1ENU6; Match level="QueryCoverage=91%, HitCoverage=22%, E-value=3e-59, Identity=50%"; Hit description =Leucine-rich repeat-containing protein kinase family protein
  Pfam annotation: Domain name=LRR_1; Domain location=103-125; Score =7.1; E_value=13; Accession=PF00560.25; Description=Leucine Rich Repeat
  Pfam annotation: Domain name=LRR_1; Domain location=127-149; Score =11.0; E_value=2.4; Accession=PF00560.25; Description=Leucine Rich Repeat
  Pfam annotation: Domain name=LRR_1; Domain location=151-173; Score =12.4; E_value=1.3; Accession=PF00560.25; Description=Leucine Rich Repeat
  Pfam annotation: Domain name=LRR_1; Domain location=175-196; Score =3.0; E_value=83; Accession=PF00560.25; Description=Leucine Rich Repeat
  Pfam annotation: Domain name=LRR_1; Domain location=199-221; Score =1.8; E_value=1.4e+02; Accession=PF00560.25; Description=Leucine Rich Repeat
  Pfam annotation: Domain name=LRR_1; Domain location=56-78; Score=4.7; E_value=38; Accession=PF00560.25; Description=Leucine Rich Repeat
  Pfam annotation: Domain name=LRR_1; Domain location=80-102; Score =12.0; E_value=1.5; Accession=PF00560.25; Description=Leucine Rich Repeat
  Pfam module annotation: Pfam domain module=LRR_1::LRR_1::LRR_1::LRR _1::LRR_1::LRR_1::LRR_1; Domain location=103-125::127-149::151 -173::175-196::199-221::56-78::80-102
KRRLQKEISKPKLNKTDWDFNVDPCSASGNWVNSPTKFLISNVTCDCSFKNHMECHVISLQLRRQNLSGVLPEEVLNLTYLRHLDLPRNFIQGPIPASWASLPVFNLSLQGNRISGRLPKELGRMPMLKSIVLESNQIEGPIPPELGNIISLERFFISANNITGELPPTFSRLTNMTDFRIDGTSISGKIPSFIKNWQRVNRIDMQGTLMSGPIPQEISLLKNLTELRVTDLSGPS

SEQ ID NO: 92641 - protein, 296 aa, Setaria italica
  misc_feature (76)..(76): Xaa can be any naturally occurring amino acid
  misc_feature (82)..(84): Xaa can be any naturally occurring amino acid
  misc_feature (92)..(92): Xaa can be any naturally occurring amino acid
  misc_feature (103)..(103): Xaa can be any naturally occurring amino acid
  misc_feature (126)..(126): Xaa can be any naturally occurring amino acid
  misc_feature (283)..(283): Xaa can be any naturally occurring amino acid
  Transcript Sequence Number=SeqID_26667
  Gene Ontology: Mol. function=protein binding; Biological process =protein amino acid phosphorylation
  Homolog annotation: Hit_ID=B9SEU5; Match level="QueryCoverage=97%, HitCoverage=32%, E-value=7e-63, Identity=40%"; Hit description=ATP binding protein, putative
  Pfam annotation: Domain name=LRR_1; Domain location=137-158; Score =3.0; E_value=83; Accession=PF00560.25; Description=Leucine Rich Repeat
  Pfam annotation: Domain name=LRR_1; Domain location=161-183; Score =1.8; E_value=1.4e+02; Accession=PF00560.25; Description=Leucine Rich Repeat
  Pfam annotation: Domain name=LRR_1; Domain location=209-231; Score =11.1; E_value=2.2; Accession=PF00560.25; Description=Leucine Rich Repeat
  Pfam annotation: Domain name=LRR_1; Domain location=233-255; Score =17.1; E_value=0.076; Accession=PF00560.25; Description=Leucine Rich Repeat
  Pfam annotation: Domain name=LRR_1; Domain location=257-280; Score =12.0; E_value=1.5; Accession=PF00560.25; Description=Leucine Rich Repeat
  Pfam annotation: Domain name=LRR_1; Domain location=98-120; Score =9.3; E_value=5; Accession=PF00560.25; Description=Leucine Rich Repeat
  Pfam module annotation: Pfam domain module=LRR_1::LRR_1::LRR_1::LRR _1::LRR_1::LRR_1; Domain location=137-158::161-183::209-231::233 -255::257-280::98-120
IAFAFSVEALKGIATKLNKTDWDFNVDPCSASGNWVNSPTKFLISNVTCDCSFKNHMECHVISLQLRRQNLSGVLXLERKFXXXPFFIFLCXLGRMFTLKSIXAESNQIEGPIPPELGNIISLERXELPPTFSRLTNMTDFRIDGTSISGKIPSFIKNWQRVNRIDMQGTLMSGPIPQEISLLKNLTELRVTDLSGPSMKFPPLQNALHLKELVLRNCSIYGEIPSYLGLMQYLKVLDISFNKLTGQIPINFQGMTALQYLYLTSNMLTGDLPDWMLKNRASXNKKNMDISYNDFT

SEQ ID NO: 92642 - protein, 195 aa, Setaria italica
  Transcript Sequence Number=SeqID_26668
  Gene Ontology: Cellular component=plasma membrane
  Pfam annotation: Domain name=DUF1218; Domain location=59-157; Score =100.6; E_value=5.4e-27; Accession=PF06749.4; Description=Protein of unknown function (DUF1218)
MALSSPIRISLIVSFFGILAFVLGVIAENKKPAAGTPIQGKDVVICKFPSDPTIAMGSLSLVALVVAAIVGHVAIFFPYSGKSVPRGALFQSTSLTVFFVVAELVSALAIAMLLWATVTEGLHRSNTIHHDMTYQCPTAKTGLFGGAAFLALDAALFWLVCQMLALNARADYLDEDDNKGEYGQVYAAEVDGSKV

SEQ ID NO: 92643 - protein, 168 aa, Setaria italica
  misc_feature (45)..(45): Xaa can be any naturally occurring amino acid
  misc_feature (90)..(90): Xaa can be any naturally occurring amino acid
  Transcript Sequence Number=SeqID_26669
  Gene Ontology: Mol. function=transferase activity
  Homolog annotation: Hit_ID=A6N1S9; Match level="QueryCoverage=79%, HitCoverage=44%, E-value=3e-48, Identity=70%"; Hit description =Sterol glucosyltransferase-like protein (Fragment)
CARGVTTVVVWFQQEIVECPGYWPSGAHACGFWFLPMAWQFSCDXCMELSGNTNPSFGGVLCANHSSLEHFLIGNSYSSGPIFVGLSSIXMGFLRNPKAFLMVLKVAIELTDYRFILFSSGYQPLDSAIQGIASSITKSSEAETPCDDSTLLFNGRLFCFSGSIPYSW

SEQ ID NO: 92644 - protein, 175 aa, Setaria italica
  Transcript Sequence Number=SeqID_26670
  Gene Ontology: Mol. function=transferase activity
  Homolog annotation: Hit_ID=A6N1S9; Match level="QueryCoverage=89%, HitCoverage=51%, E-value=2e-67, Identity=76%"; Hit description =Sterol glucosyltransferase-like protein (Fragment)
ERQFKHNFPLLYKYFQEAPTNTVCWKDIIHWMWALFTESWGSWRENCLNLSAIPFTDPVTNLPLWHVREESPLLLYGFSKEIVECPGYWPSGAHACGFWFLPMAWQFSCDKCMELSGNTNPSFGGVLCANHSSLEHFLIGNSYSSGPIFVGLSSIGRCVSHLIQICVLFLLLVSC

SEQ ID NO: 92645 - protein, 84 aa, Setaria italica
  Transcript Sequence Number=SeqID_26671
  Subcellular localization annotation: CTP_CleavageSite=31; ConfidenceScore=5.04e-01
QQETSRPAGPFGFASKKPSRPLHLNSQPTHPASLAKDHARSREHEQEIEGRQSSGAERCQACWSSCWWGAAAWWCSSTALASSS

SEQ ID NO: 92646 - protein, 208 aa, Setaria italica
  misc_feature (18)..(18): Xaa can be any naturally occurring amino acid
  Transcript Sequence Number=SeqID_26672
  Gene Ontology: Mol. function=ATP-dependent helicase activity; Cellular component=intracellular; Biological process=cellular metabolic process
  Homolog annotation: Hit_ID=B1XQJ2; Match level="QueryCoverage=94%, HitCoverage=27%, E-value=2e-43, Identity=45%"; Hit description=ATP -dependent DNA helicase
  Pfam annotation: Domain name=Helicase_C; Domain location=6-82; Score =92.4; E_value=1.6e-24; Accession=PF00271.23; Description=Helicase conserved C-terminal domain
PRQVQVQPAAGIKSGIYXGKMGSRAREESHRSFIRDEVLVMVATIAFGMGIDKPDVRCVIHYGCPKSLESYYQESGRCGRDGLSSVCWLYYQRSDFTKADFYCAEAKNGTQRKAIMDSFMAAQKYCLLATCRRRFLLQYFGEELNSDCGNCDNCTAVKNVRDLSKETFLLLSCVKSCGGRWGLNLPIDVLRGSRAKKIVDNNYDKLQM

SEQ ID NO: 92647 - protein, 107 aa, Setaria italica
  Transcript Sequence Number=SeqID_26673
  Gene Ontology: Cellular component=GPI-anchor transamidase complex
  Homolog annotation: Hit_ID=B9S506; Match level="QueryCoverage=74%, HitCoverage=11%, E-value=3e-33, Identity=77%"; Hit description=GPI -anchor transamidase, putative
TTFRTAAAASAAAPEEEFTEELLLRPLPDRKALAHFYFRSSAPPAATVGRHHHLFPKAISQLVKKYHISELELSFTQGRWNYEQWGGFDPMSTSNAKPPGVELWAVF

SEQ ID NO: 92648 - protein, 288 aa, Setaria italica
  Transcript Sequence Number=SeqID_26674
  Gene Ontology: Mol. function=hydrolase activity, acting on glycosyl bonds; Biological process=cell wall organization and biogenesis
  Homolog annotation: Hit_ID=B6TPQ7; Match level="QueryCoverage=100%, HitCoverage=57%, E-value=1e-133, Identity=80%"; Hit description =Polygalacturonase
  Pfam annotation: Domain name=Glyco_hydro_28; Domain location=4-269; Score=187.4; E_value=4.1e-53; Accession=PF00295.9; Description =Glycosyl hydrolases family 28
  Subcellular localization annotation: CTP_CleavageSite=55; ConfidenceScore=5.48e-01
ELPCKVHKGQGGSSGHGTSCDSPVMLRFFTSNNVTVQGLKVQNSPEFHFRFDSCRGVHVSGLSISSPQGSPNTDGIHVENTQDVLITDTAVSNGDDCVSIGAGTLNVHIENVTCGLGHGISIGSLGKQGTRACVANITVRNAVIRHSDNGVRIKTWQGGSGSVSSVSFENVRMDAVRNPIIIDQYYCLSKSCENATTAVFVSGVSYAGIRGTYDARSAPIHFGCSDAVPCTNITLSDVELLPASGQTVDDPFCWNVYGNATTPTVPPVACLMDGVPGNYADHTSLKCY

SEQ ID NO: 92649 - protein, 183 aa, Setaria italica
  Transcript Sequence Number=SeqID_26675
  Gene Ontology: Mol. function=hydrolase activity; Biological process =lipid catabolic process
  Homolog annotation: Hit_ID=B9SQ95; Match level="QueryCoverage=86%, HitCoverage=40%, E-value=3e-38, Identity=53%"; Hit description =Patatin B2, putative
GVALGNPTAAAITHVLNNKREFPLAAGVEDLLVVSIGSGEAEPRGAASTSEIVRIAAEGVADMVDQAVAMAFGHNRTSNYIRIQATGTPRASRGGAAKGGCGVAEEMLAQKNVESVLFRGKKVAEQTNAEKLERFAHELVKERDRRRTSPVSPTVVKQQPSTPAAAPPASYSNLVSHMLTSIM

SEQ ID NO: 92650 - protein, 92 aa, Setaria italica
  misc_feature (87)..(88): Xaa can be any naturally occurring amino acid
  Transcript Sequence Number=SeqID_26676
QREEIRTLKDAVLFPDAEREPEPDRRLRDEISTLTGQIQCLAQELAQVKAEKHSARSCFEDDGYCSSPRTPGFNEETAFSLECSIGXXETPN

SEQ ID NO: 92651 - protein, 192 aa, Setaria italica
  Transcript Sequence Number=SeqID_26677
  Pfam annotation: Domain name=NdhL; Domain location=73-167; Score =97.5; E_value=4.7e-26; Accession=PF10716.1; Description=NADH dehydrogenase transmembrane subunit
  Subcellular localization annotation: CTP_CleavageSite=31; ConfidenceScore=5.61e-01
METTASWRLLSSASSSPPTAPQLPRRQATTLAASSPQRSAKFRLLCHLHDKAPCKLAASSPSVSQLQRLAAALHCGAAWAAVEAPAALATVTGEEDIDLLAILPPLAVFAFFYFLIAPPVIMNWMRLRWYKRDFVETYLQFMFTYLFFPALMVWAPFVNFRKFPRDATMKYPWSKPKEGTPLFKDRYPPIDS

SEQ ID NO: 92652 - protein, 83 aa, Setaria italica
  Transcript Sequence Number=SeqID_26678
  Gene Ontology: Mol. function=protein serine/threonine kinase activity; Biological process=protein amino acid phosphorylation
  Homolog annotation: Hit_ID=Q7XIS8; Match level="QueryCoverage=98%, HitCoverage=12%, E-value=2e-31, Identity=79%"; Hit description =Putative receptor-like protein kinase 4
KILVYEYMANKSLDLIIFDSKKGLSLDWPKRLNIIDGISQGLLYLHIHSRPCVVHRDLKASNILLDNEMNPKISDFGMARIFS

SEQ ID NO: 92653 - protein, 78 aa, Setaria italica
  Transcript Sequence Number=SeqID_26679
LASRRVALHASASRAGGDVWRYKKPPRPAGLSDQLLSPSVEREREMEQQQQLRDGDGGAAEGDIERLPADLLAHVLSL

SEQ ID NO: 92654 - protein, 82 aa, Setaria italica
  misc_feature (31)..(31): Xaa can be any naturally occurring amino acid
  Transcript Sequence Number=SeqID_26680
  Gene Ontology: Cellular component=outer membrane
  Homolog annotation: Hit_ID=B9SQQ8; Match level="QueryCoverage=90%, HitCoverage=14%, E-value=4e-13, Identity=54%"; Hit description =Sorting and assembly machinery (Sam50) protein, putative
VGIRVHDVIIKGNTKTRDELIEREFADPPRXRPTVQDLLRAASVATGRLHRLDVFDAVKITLDAGPPELPGTTNVVVERDLD

SEQ ID NO: 92655 - protein, 107 aa, Setaria italica
  Transcript Sequence Number=SeqID_26681
SGIAEAARRALEVLSHKERPRLQYTYHRFLPSRASGEARTFIATHDGVDMATDFLRKYLSATLTALNETNNHLFEIQRELHEVRWERDVLVASPPSLQHPRPQHLKA

SEQ ID NO: 92656 - protein, 100 aa, Setaria italica
  Transcript Sequence Number=SeqID_26682
  Subcellular localization annotation: CTP_CleavageSite=43; ConfidenceScore=5.63e-01
GGGTTRQRSPHPSLVVSSPPHAPARERAKSLRLHFHGQSLIVCSSRLQSRSVARSSPGLKGRACGERRCDYFLEQEDEQRGAGRKMMGGKRERDCKNPIG

SEQ ID NO: 92657 - protein, 65 aa, Setaria italica
  Transcript Sequence Number=SeqID_26683
KPSLLHTKINALITCNSTAVDKSWKCKGGLFQVSSNIAESLKLTKTECDLVIIAGCHTDQTKINS

SEQ ID NO: 92658 - protein, 437 aa, Setaria italica
  Transcript Sequence Number=SeqID_26684
  Gene Ontology: Mol. function=transferase activity; Cellular component= cytoplasm; Biological process=phosphorylation
  Homolog annotation: Hit_ID=B6TDC8; Match level="QueryCoverage=99%, HitCoverage=84%, E-value=0.0, Identity=77%"; Hit description =Phosphomevalonate kinase
  Pfam annotation: Domain name=GHMP_kinases_C; Domain location=321-404; Score=27.7; E_value=4.8e-05; Accession=PF08544.5; Description=GHMP kinases C terminal
  Pfam annotation: Domain name=GHMP_kinases_N; Domain location=87-183; Score=49.5; E_value=1.3e-11; Accession=PF00288.18; Description=GHMP kinases N terminal domain
  Pfam module annotation: Pfam domain module=GHMP_kinases_C::GHMP _kinases_N; Domain location=321-404::87-183
VNSTLQLTSARESANPFVEQAIQFSVAAAKATITDKERKDAQDKLLLQGLSITILGCNDFYSYRKQIEARGLPLTPEVLLSLPPFSSITFNSEVANGSMTGEKCKPEVAKTGLGSSAAMTTSVVAALLHYLGAVDLSRPGQPSSNRATGRDLDLVHAIAQSAHCIAQGKIGSGFDVSAAVYGGQRYIRFSPEILSSAQATGGTWLPDAVSDIVTRKWDHENTQFSLPPLLTLVLGEPGTGGTSTPSMVGSVKRWQKSDPEKSKDTWTKLGIANSALENQLRILKKLSEDHQEAYESVVRSCSHLAYGKWTEVATNQHQETIVRSLLAARDAFLEIRLHMREMGIAAGVPIEPESQTQLLDATMNMEGVLLAGVPGAGGFDAVFSVTLGDASNAVASAWSSAGVLPLLVREDHRGVSLEDADPRTREVSAAVSTIQIN

SEQ ID NO: 92659 - protein, 67 aa, Setaria italica
  Transcript Sequence Number=SeqID_26685
  Gene Ontology: Mol. function=inositol or phosphatidylinositol phosphatase activity
  Homolog annotation: Hit_ID=Q75LV1; Match level="QueryCoverage=76%, HitCoverage=15%, E-value=2e-15, Identity=80%"; Hit description =Putative inositol polyphosphate 5-phosphatase
SVAHEHKVEKRNSEFQHISRSLFSKYGKPYAQSADITVWLGDLNYRLEGISSIHLCLVSEAKQRSAS

SEQ ID NO: 92660 - protein, 57 aa, Setaria italica
  Transcript Sequence Number=SeqID_26686
  Gene Ontology: Mol. function=inositol or phosphatidylinositol phosphatase activity
  Homolog annotation: Hit_ID=Q75LV1; Match level="QueryCoverage=89%, HitCoverage=15%, E-value=5e-19, Identity=80%"; Hit description =Putative inositol polyphosphate 5-phosphatase
SSLLQVRVPSWTDRILFKVDHSSGLDAVLSSYESLDCVRSSDHKPVKAHLCLSAQRG

SEQ ID NO: 92661 - protein, 334 aa, Setaria italica
  Transcript Sequence Number=SeqID_26687
  Gene Ontology: Mol. function=inositol or phosphatidylinositol phosphatase activity; Cellular component=cytoplasm; Biological process=phosphoinositide dephosphorylation
  Homolog annotation: Hit_ID=Q75LV1; Match level="QueryCoverage=98%, HitCoverage=97%, E-value=1e-150, Identity=79%"; Hit description =Putative inositol polyphosphate 5-phosphatase
  Pfam annotation: Domain name=Exo_endo_phos; Domain location=52-327; Score=117.9; E_value=3.4e-32; Accession=PF03372.15; Description =EndonucleaseExonucleasephosphatase family
MGNCSSLTLPTWRSQLQNNSLVSTDEDGTHDGIKIIPIQKGCEFTTNSVLCVCIITWNMNGKMSVEDITKLVRSNRKFDLLVVGLQEAPKCDVSQVLQETMADTHILLGQKSMQSLQMLLFGSKSSEKYIGEMKVDKHAVGGFGGMIGRKKGAVAMYINFSGIRMVFVVCHLAAHEHKVEKRNSEFQHISRSLFSKYGKPYAQSADITVWLGDLNYRLEGISSIPARKMIEENRQSKLRGKDQLLQEAEKGEVFNGYYEGTLSFKPTYKYDVGSSIYDTSHKVRVPSWTDRILFKVDHSSGLDAVLSSYESLDCVRSSDHKPVKAHLCLSAQRG

SEQ ID NO: 92662 - protein, 100 aa, Setaria italica
  misc_feature (80)..(80): Xaa can be any naturally occurring amino acid
  Transcript Sequence Number=SeqID_26688
  Gene Ontology: Mol. function=catalytic activity; Biological process =metabolic process
  Homolog annotation: Hit_ID=Q2QY22; Match level="QueryCoverage=100%, HitCoverage=40%, E-value=2e-44, Identity=85%"; Hit description =Phosphoglycerate mutase family protein
  Pfam annotation: Domain name=PGAM; Domain location=2-100; Score=2.2; E_value=0.0012; Accession=PF00300.14; Description=Phosphoglycerate mutase family
SKEAKPAAVYSSDLKRAAETAQTIATACHVSNLVFDQSLRERHMGDLHGLKFDDAVSTKPEAYKAFSADDRNQEIPGGGXSLDQLSERCVSYLNTIADKH

SEQ ID NO: 92663 - protein, 85 aa, Setaria italica
  Transcript Sequence Number=SeqID_26689
DRHLLAPSRPTNSSCSQCECRSLRLLSAFNPFDLVVAVKILGYQHCAFFFTARDPRLGTHAWYDWRLKTLRNGLLRRSPFIKENR

SEQ ID NO: 92664 - protein, 683 aa, Setaria italica
  Transcript Sequence Number=SeqID_26690
  Gene Ontology: Mol. function=binding; Cellular component=incipient cellular bud site; Biological process=cellular morphogenesis during vegetative growth
  Homolog annotation: Hit_ID=C5FXL3; Match level="QueryCoverage=35%, HitCoverage=9%, E-value=7e-23, Identity=28%"; Hit description=TAO3p
MLETLSLREWAEDDTDGIGHYRASVVGNLPDSYQQFQYKLSSKLAKDHPELSEHLCEEIMQRQLDAVDIIAQHQVLTCMAPWIENLNFVRLKESGWSERLLKSLYYVTWKHGDQFPDEIEKLWSTVASNTRNIIPVLNFLITRGIEDCDANPSAEITGAFATYFSVAKRVSLYLARICPQQTIDHLVCELSQRMLEDNEEPVRPGKVDVSANVVLEFSQGPTASQVSTVIDSQPHMSPLLVRGSLDGAVRNVSGNLSWRTSAVTGRSVSGPLSPLAPEVSIPNPTAGRSGQLLPALMNMSGPLMGVRSSAGNLRSRHVSRDSGDYYFDTPNSTDDILHQGGSGVHGINANELQSALQGHQHLLSRADIALILLAEIAYENDEDFRENLPLLFHVTCVSMDSSEDIVLEHCQDLLVNLLYSLAGRHLELYEVESSERENKHHVVSLIKYIQSKRGSLMWENEDPTLVRTELPSASLLSALVQSMVSAIFFQGDLRETWGSEALKWAMECTSRHLACRSHQIYRALRPSVKSDSCVLLLRCIHRCLGNPVPAVLGFAMEILLTLQVMVENMEPEKVILYPQLFWGCVALMHTDFVHIYCQVLELFCRVIDRLTFRDRTTENVLLSSMPRDEFDISGYVTDLHRLESRTTSERLLSVTETGKVPAFEGVQPLVLKGLMSTVRNGSA

SEQ ID NO: 92665 - protein, 65 aa, Setaria italica
  Transcript Sequence Number=SeqID_26691
RRIMLTYPPLIKHTVARQLEMSYQLKCNSRGHMCIAKLFKQAFFHTYKEFFFVGGMNDRLKYMMV

SEQ ID NO: 92666 - protein, 62 aa, Setaria italica
  Transcript Sequence Number=SeqID_26692
VCHQIPIFLFQMIFNVYTSYNSWLHELFGIVKFQYRKYCGQRAIDLLPKSRSAGGQTSKCIC

SEQ ID NO: 92667 - protein, 102 aa, Setaria italica
  Transcript Sequence Number=SeqID_26693
  Gene Ontology: Mol. function=acyl-[acyl-carrier-protein] desaturase activity; Cellular component=chloroplast; Biological process=fatty acid metabolic process
  Homolog annotation: Hit_ID=B6UI69; Match level="QueryCoverage=97%, HitCoverage=26%, E-value=6e-30, Identity=67%"; Hit description=Acyl -desaturase
TRRNLMHDGRDMGLFEHFAAVAQRLGVYTARDYADIVEFVVKRWKLETLEGGLSGEGRRARDFVCGLAPRMRRAAERAEDRAKKDEPRKVKFSWIFDREVVV

SEQ ID NO: 92668 - protein, 116 aa, Setaria italica
  Transcript Sequence Number=SeqID_26694
  Gene Ontology: Mol. function=oxidoreductase activity; Cellular component=extracellular region; Biological process=oxidation reduction
  Homolog annotation: Hit_ID=Q8W0V5; Match level="QueryCoverage=75%, HitCoverage=15%, E-value=1e-33, Identity=73%"; Hit description =Laccase LAC2-1
  Pfam annotation: Domain name=Cu-oxidase_3; Domain location=39-116; Score=68.8; E_value=2.1e-17; Accession=PF07732.7; Description =Multicopper oxidase
  Subcellular localization annotation: CTP_CleavageSite=40; ConfidenceScore=5.49e-01
MKFRSSPAASAAIAIAVVFFLSAKAPPSANAAVVEHTFVVSQVKMTHLCNETLVTVVNGQFPGPAIEVTEGDSVAVHVVNKSPHNLTIHWHGVKQRMNCWADGVPMITQCPILPNQ

SEQ ID NO: 92669 - protein, 56 aa, Setaria italica
  Transcript Sequence Number=SeqID_26695
  Gene Ontology: Mol. function=pantoate-beta-alanine ligase activity; Cellular component=cytoplasm; Biological process=pantothenate biosynthetic process
  Homolog annotation: Hit_ID=O24210; Match level="QueryCoverage=100%, HitCoverage=17%, E-value=4e-18, Identity=83%"; Hit description =Pantoate--beta-alanine ligase
IVQTLEEAGGQVDYVEIVEQESLTPVERIDRPAVICVAAWFGKVRLIDNIEIQPPS

SEQ ID NO: 92670 - protein, 102 aa, Setaria italica
  Transcript Sequence Number=SeqID_26696
  Gene Ontology: Mol. function=protein serine/threonine kinase activity; Biological process=protein amino acid phosphorylation
  Homolog annotation: Hit_ID=B9RIV9; Match level="QueryCoverage=85%, HitCoverage=9%, E-value=9e-09, Identity=40%"; Hit description=ATP binding protein, putative
  Subcellular localization annotation: CTP_CleavageSite=69; ConfidenceScore=5.81e-01
FLSACSDIHIRSNVSCPVSPCGSPLLKSRSPQHTSGRMSPSPISSPRTTSGTSTPLSGGNGAIPFNHLRYATYSSEGFGTTSRGRDDLFPNRHKDPILGQFT

SEQ ID NO: 92671 - protein, 426 aa, Setaria italica
  Transcript Sequence Number=SeqID_26697
  Gene Ontology: Mol. function=protein serine/threonine kinase activity; Biological process=protein amino acid phosphorylation
  Homolog annotation: Hit_ID=B9RIV9; Match level="QueryCoverage=96%, HitCoverage=45%, E-value=1e-154, Identity=66%"; Hit description=ATP binding protein, putative
  Pfam annotation: Domain name=Pkinase; Domain location=13-268; Score =313.6; E_value=4.2e-91; Accession=PF00069.17; Description=Protein kinase domain
  Pfam annotation: Domain name=Pkinase_Tyr; Domain location=13-268; Score=123.3; E_value=7.6e-34; Accession=PF07714.9; Description =Protein tyrosine kinase
  Pfam module annotation: Pfam domain module=Pkinase::Pkinase_Tyr; Domain location=13-268::13-268
GRPENPSSPASRWKKGKLIGRGTFGHVYVGFNSDSGEMCAMKEVTQFLDDPKSKESAKQLGQEISLLSRLRHPNIVQYYGSERVDDKLYIYLEYVSGGSIHKLLQEYGQLGEPAIRSYTQQILSGLAYLHAKNTVHRDIKGANILVDPSGRVKLADFGMAKHINGQHPFSFKGSPYWMAPEVIKNSNGCNLAVDIWSLGCTVLEMATSKPPWSQYEGIAAVFKIGNSKELPPIPDHLSERCKDFIRKCLQRDPSQRPTSVELLQHPFIQNGISLEKSVAPNPLEHLAAISCRPKPKVAMQTRNTSLGLEGQTIYQRRGVKLSSKHSDIHIRSNVSCPVSPCGSPLLKSRSPQHTSGRMSPSPISSPRTTSGTSTPLSGGNGAIPFNHLRYATYSSEGFGTTSRGRDDLFPNRHKDPILGQFTQAHQ

SEQ ID NO: 92672 - protein, 119 aa, Setaria italica
  Transcript Sequence Number=SeqID_26698
  Gene Ontology: Mol. function=protein serine/threonine kinase activity; Biological process=protein amino acid phosphorylation
GGNGAIPFNHLRYATYSSEGFGTTSRGRDDLFPNRHKDPILGQFTQAHQVAQGPRERVVSEADILSPQFGKRLGNVFDLRERLSPSEHFTRHAFVDHVELNPSLDLTSGPLNLGLQHGK

SEQ ID NO: 92673 - protein, 70 aa, Setaria italica
  Transcript Sequence Number=SeqID_26699
RLILYVILSGSKVSTPDEFYYLQRQNGYTDHASHFLSRIPFLDNWIHSRVPLLTCPCAFAVGRFTLQVIP

SEQ ID NO: 92674 - protein, 216 aa, Setaria italica
  Transcript Sequence Number=SeqID_26700
  Gene Ontology: Mol. function=binding
  Homolog annotation: Hit_ID=B9RRH8; Match level="QueryCoverage=95%, HitCoverage=20%, E-value=1e-39, Identity=40%"; Hit description=TPR repeat-containing protein R13F6.10, putative
GILLLGREEDKLRLQGRLLAQASSYAAASEIYQKVLESCPDDWESFLHYIGCLLEHDVNLPKPCTGEHTCPSCSVDSALSNKTSLSQELVESRLTSALSFVQRLQENNSSDCVRGPHLANIEIERQRCLNGNSNNTKLMEALVKYFHRFGHLFCSASDVEIYLHMLSGNEISELLDKISGSFDASSVSVNTLGLTITLSRFKNFGNFIHKSTAELQ

SEQ ID NO: 92675 - protein, 678 aa, Setaria italica
  Transcript Sequence Number=SeqID_26701
  Gene Ontology: Mol. function=binding; Cellular component=lysosome; Biological process=phagocytosis, engulfment
  Homolog annotation: Hit_ID=B9RRH8; Match level="QueryCoverage=97%, HitCoverage=64%, E-value=1e-173, Identity=45%"; Hit description=TPR repeat-containing protein R13F6.10, putative
  Pfam annotation: Domain name=NatB_MDM20; Domain location=2-325; Score= 273.1; E_value=6.6e-79; Accession=PF09797.1; Description=N -acetyltransferase B complex (NatB) no
VIIEIERQRCLNGNSNNTKLMEALVKYFHRFGHLFCSASDVEIYLHMLSGNEISELLDKISGSFDASSVSVNTLGLTITLFKVQELLGTLFTKSTAELQGIAKIMVDTFYKNLSLSNDLDPQESMYGEELLSMASSILVQLYWRTRNLGYLLEAILVLEFGLTVRKYVWQYKIILVHLYSYLGALPLAHKWYITLEVKNILLESVSHHILPQMLNSPFLQHAADLVKDYLKFMDDHLKESADLTCLAYRHRTYSKVIEFVQFKDRLQRSMQYLSVKSDSVTLHLKQKAEFLDEVESILGNVSHGTKLVELSNEDSMKHLTFNEDLEARPWWTPTSSVNFLSEPFDEGSTPASYRTKMCKHKSDEKDGPKLKDAERKSLVPRLVYLSMHGCTTFLREGESNGASPDVTAAGEMKTLLEKYARSIGYSFDDALSIVLGMSTGKKAVKDFAPDIVSWMSFAAFINAWNLCSNESLIPGIDQNSSNSWQIVDSLFKTCIEQHLTDARQMLTSPGNNIPLLARMVTEPISWHLLVIQSCMRSMTPQGKKKKKGGPLERPNTPHLQAIQSSVNCMADTLRSIQTWLSDQVRPEEQALDALLSHLQGSSTDGPGQISRTLDESAAAANSEIGGRIAQSLEAWSSTSVVRRIVGAGDETVAELKKICALKLKVLSSASASLSSVLH

SEQ ID NO: 92676 - protein, 38 aa, Setaria italica
  Transcript Sequence Number=SeqID_26702
SVMHGSFSKNYSPTKQDLHSLTKQDLTVVPTERSGPAA

SEQ ID NO: 92677 - protein, 84 aa, Setaria italica
  Transcript Sequence Number=SeqID_26703
  Subcellular localization annotation: CTP_CleavageSite=35; ConfidenceScore=5.11e-01
LAQGSLLLSIASLGGAIRTHPQSPPGDNGQFHRSRESMETFPGKRGNRLELQRTRRHRIIIYNYMFHIFTNNCLSQTLVSMVLS

SEQ ID NO: 92678 - protein, 125 aa, Setaria italica
  Transcript Sequence Number=SeqID_26704
  Subcellular localization annotation: CTP_CleavageSite=38; ConfidenceScore=5.02e-01
AVPCPKASAPDAAYYLPGVRLEPPLTAPVTSGPVNCPRATAEETVEAVTVEGFARSRCGGAEGQQRRLAAGCSHAAAVSHARAYCCLDLSVRAVVSYFSDQRPCVGSDPLRKHCCSLCRRAKHCL

SEQ ID NO: 92679 - protein, 94 aa, Setaria italica
  Transcript Sequence Number=SeqID_26705
  Subcellular localization annotation: CTP_CleavageSite=42; ConfidenceScore=5.18e-01
MASKRGLLLVIGVAVAIVLASGAPPVQPPRIQADVVVMGFVPCNNGTSMRTGSAPGFAGPVVQLQCTDGADLAANATTDGKGRFRMAVNTTVAP

SEQ ID NO: 92680 - protein, 86 aa, Setaria italica
  Transcript Sequence Number=SeqID_26706
SEDRGRERQRKGSCRPCGCSGRGCRGLPMRRTEEEGARGMRGEERAAADTWRDVAPLAARARSISEATRRGLGPAAFALALICAPG

SEQ ID NO: 92681 - protein, 107 aa, Setaria italica
  Transcript Sequence Number=SeqID_26707
LERDDALDTVLEVPIPEEMFSGGGGGGSRGSRFGCTNAFVKAWTRSHAADRSGAGEPCSMSRGELQLMLGVIGAPLIPLPVHHAKQSPSSVLCEQLKADPIESSSAK

SEQ ID NO: 92682 - protein, 56 aa, Setaria italica
  Transcript Sequence Number=SeqID_26708
RPPVEDSQLPPPQLVDGSDQQQDRDGHRSNPSSAAHSGARHRHWRPSLHSIAEVSS

SEQ ID NO: 92683 - protein, 213 aa, Setaria italica
  Transcript Sequence Number=SeqID_26709
  Gene Ontology: Mol. function=hydrolase activity, acting on acid anhydrides, catalyzing transmembrane movement of substances; Cellular component=integral to membrane; Biological process=copper ion transport
  Homolog annotation: Hit_ID=Q6JAG3; Match level="QueryCoverage=99%, HitCoverage=23%, E-value=1e-113, Identity=91%"; Hit description =Putative copper-exporting ATPase
FLDERSLMIVKTSVQALPGVENIKFNTDLHKVTISYKPDQTGPRDLIEVIKSATSGLVNASIYLEADGRDQHRYGEIKRYRQSFLWSLIFTIPVFLTSMVFMYIPWLKAGLEKKVFNMMSTGELLRWILSTPVQFVIGRKFYAGAYRAMCRGSPNMDVLIALGTNTAYFYSVYSVLRAATSETYMSTDFFETSSMLISFILLGKYLEILAKGK

SEQ ID NO: 92684 - protein, 184 aa, Setaria italica
  misc_feature (121)..(121): Xaa can be any naturally occurring amino acid
  misc_feature (162)..(162): Xaa can be any naturally occurring amino acid
  misc_feature (169)..(169): Xaa can be any naturally occurring amino acid
  Transcript Sequence Number=SeqID_26710
  Gene Ontology: Mol. function=protein serine/threonine kinase activity; Cellular component=plasma membrane; Biological process =protein amino acid phosphorylation
  Homolog annotation: Hit_ID=UPI0000196AA8; Match level="QueryCoverage =94%, HitCoverage=44%, E-value=1e-83, Identity=85%"; Hit description =protein kinase family protein
  Pfam annotation: Domain name=Pkinase; Domain location=7-182; Score =2.5; E_value=1.2e-08; Accession=PF00069.17; Description=Protein kinase domain
  Pfam annotation: Domain name=Pkinase_Tyr; Domain location=5-183; Score=-36.3; E_value=2.6e-11; Accession=PF07714.9; Description =Protein tyrosine kinase
  Pfam module annotation: Pfam domain module=Pkinase::Pkinase_Tyr; Domain location=7-182::5-183
RPPKTTYVRTKGGYGIVYRGVLADGYQVAVKNLLNNRGQAEREFRVEVEAIGRVRHKNLVRLLGYCAEGAHRILVYEYVDNGNLEQWLHGDVGPVSPLTWDIRMNIVLGMAKGITYLHEGXEPKVVHRDIKSSNILLDRRWNPKVSDFGLAKLLGSDSNYVXTTRVMGXFGYVAPEYASTGMLN

SEQ ID NO: 92685 - protein, 359 aa, Setaria italica
  Transcript Sequence Number=SeqID_26711
  Gene Ontology: Mol. function=protein serine/threonine kinase activity; Cellular component=plasma membrane; Biological process =protein amino acid phosphorylation
  Homolog annotation: Hit_ID=Q4LB28; Match level="QueryCoverage=98%, HitCoverage=65%, E-value=1e-143, Identity=71%"; Hit description =B0222C05.2 protein
  Pfam annotation: Domain name=Pkinase; Domain location=29-300; Score =137.4; E_value=4.4e-38; Accession=PF00069.17; Description=Protein kinase domain
  Pfam annotation: Domain name=Pkinase_Tyr; Domain location=29-300; Score=108.2; E_value=2.8e-29; Accession=PF07714.9; Description =Protein tyrosine kinase
  Pfam module annotation: Pfam domain module=Pkinase::Pkinase_Tyr; Domain location=29-300::29-300
REAVGPEVSHLGWGHWYTLRDLEEATAAFAPEHVVGEGGYGIVYRGVLADGYQVAVKNLLNNRGQAEREFRVEVEAIGRVRHKNLVRLLGYCAEGAHRILVYEYVDNGNLEQWLHGDVGPVSPLTWDIRMNIVLGMAKGITYLHEGLEPKVVHRDIKSSNILLDRRWNPKVSDFGLAKLLGSDSNYVTTRVMGTFGYVAPEYASTGMLNERSDVYSFGILIMEIISGRSPVDYARPNGEVNLVEWLKNKVTNRDYEAILDPKLPEKPSSKALKKALLVALRCVDPDSQKRPKMGHVIHMLEVDDFPYREDRRTLRPGNGSPLERARTPGKPPVAGSCDSSCYEGNTTTASTPSRLVQDM

SEQ ID NO: 92686 - protein, 169 aa, Setaria italica
  Transcript Sequence Number=SeqID_26712
  Gene Ontology: Mol. function=transferase activity, transferring phosphorus-containing groups; Cellular component=membrane; Biological process=two-component signal transduction system (phosphorelay)
  Homolog annotation: Hit_ID=Q67WC2; Match level="QueryCoverage=100%, HitCoverage=15%, E-value=7e-70, Identity=79%"; Hit description =Putative histidine kinase 1
  Pfam annotation: Domain name=HisKA; Domain location=91-156; Score =83.8; E_value=6.3e-22; Accession=PF00512.17; Description=His Kinase A (phosphoacceptor) domain
VKREVMATGIATKREFAFNTPMFGAKTFVTYIEPVFSKGGETIGVNYVAMDITDQVKRREKMADIRVREAIQNAKETELSRSLHITEETMRAKQMLATMSHEIRSPLSGVLSMAEILATTKLDKEQHQLLEVMLSSGDLVLQLINDILDLSKVESGAMKLESTTFRPRE

SEQ ID NO: 92687 - protein, 70 aa, Setaria italica
  Transcript Sequence Number=SeqID_26713
FRLAVHRFHLDRILLHIHSTWAYTYAMHKDVRFTVHIYMMVVLEEEGTVSRRYCVLLLHITVVWYKHKDI

SEQ ID NO: 92688 - protein, 99 aa, Setaria italica
  Transcript Sequence Number=SeqID_26714
CAAGQIISGTLQECLLPTLCSFVFDSFVPLLEINLILLVILLEFAFLIFPFIISGSLFRLKLAVQNDCLMVMDWNLDASKYLQQPGGRGDRSHQATSSA

SEQ ID NO: 92689 - protein, 104 aa, Setaria italica
  Transcript Sequence Number=SeqID_26715
  Gene Ontology: Mol. function=RNA-directed DNA polymerase activity; Cellular component=chromatin; Biological process=RNA-dependent DNA replication
  Homolog annotation: Hit_ID=B3VTB4; Match level="QueryCoverage=79%, HitCoverage=66%, E-value=1e-18, Identity=55%"; Hit description =Putative retroelement protein
  Subcellular localization annotation: CTP_CleavageSite=50; ConfidenceScore=5.29e-01
WSIAVTHSVISALNLVPTTSDSRFSSWWKKALRLVPKNLSKGLNSLIILVARKIWKHRNSRVFDQARPSIPVLLRSVADECSLWGMAGASKLQELLAWSLSRAV

SEQ ID NO: 92690 - protein, 61 aa, Setaria italica
  Transcript Sequence Number=SeqID_26716
  Subcellular localization annotation: CTP_CleavageSite=55; ConfidenceScore=5.43e-01
KPKGSAGMDVVPPLCPSPAMQSARLAGRRRKGKQSAAGTAAGFEGCIPLRFSLGRAMKRWV

SEQ ID NO: 92691 - protein, 178 aa, Setaria italica
  Transcript Sequence Number=SeqID_26717
  Gene Ontology: Mol. function=heat shock protein binding; Biological process=protein folding
  Homolog annotation: Hit_ID=B6SLS6; Match level="QueryCoverage=100%, HitCoverage=52%, E-value=1e-73, Identity=75%"; Hit description =Chaperone protein dnaJ 10
  Pfam annotation: Domain name=DnaJ; Domain location=6-68; Score=113.0; E_value=1e-30; Accession=PF00226.23; Description=DnaJ domain
MVKDSAYYDVLEVSTDASVAQIKKAYYLKAKLVHPDKNPDNPDAAWRFQELGEAYQVLSDPVKKEAYDKYGKEGLPQDNMIDPTAVFGMLFGSDYFEDYVGQLALASVASVEIEEESTTPEARTRVQEKIKNLQTEREQTLIQSLKDRLQPYVDGRQEEFGDWANAEARRLSQAAFGE

SEQ ID NO: 92692 - protein, 77 aa, Setaria italica
  Transcript Sequence Number=SeqID_26718
FWFFKVDLKQCKKAGRGFNSLVVIGAWILWKMRNDIVFNGALPRMDQALLLAQDEADHWMLAGVKGLSCLAAARSDG

SEQ ID NO: 92693 - protein, 91 aa, Setaria italica
  Transcript Sequence Number=SeqID_26719
  Homolog annotation: Hit_ID=Q8S811; Match level="QueryCoverage=85%, HitCoverage=55%, E-value=3e-15, Identity=54%"; Hit description=F-box domain containing protein, expressed
  Pfam annotation: Domain name=F-box; Domain location=23-70; Score =31.2; E_value=4.1e-06; Accession=PF00646.25; Description=F-box domain
MADTIDHAGMSPGSPGRVPGADCWINALPDGVLLRAISFLDARQLVQTCVLSRRWRHLWRSVPRINATRHEFDGMAYSEEERDVLFKKFTS

SEQ ID NO: 92694 - protein, 134 aa, Setaria italica
  misc_feature (99)..(99): Xaa can be any naturally occurring amino acid
  misc_feature (110)..(110): Xaa can be any naturally occurring amino acid
  Transcript Sequence Number=SeqID_26720
  Gene Ontology: Mol. function=magnesium ion binding; Cellular component=chloroplast; Biological process=metabolic process
  Homolog annotation: Hit_ID=Q0JA81; Match level="QueryCoverage=77%, HitCoverage=11%, E-value=1e-41, Identity=75%"; Hit description=Ent -kaurene synthase-like 2
  Pfam annotation: Domain name=Terpene_synth_C; Domain location=34-134; Score=-30.9; E_value=8.6e-05; Accession=PF03936.8; Description =Terpene synthase family, metal binding domain
LDRLDHRRNIENFDATGHQMLKTSYLSCYNNNDILALGVRDFSSSQFTYQEELRHIDSWVKESRLDQLPFARQKLAYFYLSAAGTIFTPELSDARILWXKNGVLTTVVDXFFDVGGSTEELENLVTLVEMWDEH

SEQ ID NO: 92695 - protein, 209 aa, Setaria italica
  misc_feature (172)..(172): Xaa can be any naturally occurring amino acid
  Transcript Sequence Number=SeqID_26721
  Gene Ontology: Mol. function=binding; Cellular component=chloroplast
  Homolog annotation: Hit_ID=B9T3S4; Match level="QueryCoverage=100%, HitCoverage=62%, E-value=1e-33, Identity=33%"; Hit description =Pentatricopeptide repeat-containing protein, putative
  Pfam annotation: Domain name=PPR; Domain location=123-157; Score =39.6; E_value=1.2e-08; Accession=PF01535.12; Description=PPR repeat
  Pfam annotation: Domain name=PPR; Domain location=158-192; Score =36.2; E_value=1.4e-07; Accession=PF01535.12; Description=PPR repeat
  Pfam annotation: Domain name=PPR; Domain location=16-50; Score=52.4; E_value=1.7e-12; Accession=PF01535.12; Description=PPR repeat
  Pfam annotation: Domain name=PPR; Domain location=51-85; Score=32.1; E_value=2.2e-06; Accession=PF01535.12; Description=PPR repeat
  Pfam annotation: Domain name=PPR; Domain location=88-122; Score=33.5; E_value=8.4e-07; Accession=PF01535.12; Description=PPR repeat
  Pfam module annotation: Pfam domain module=PPR::PPR::PPR::PPR::PPR; Domain location=123-157::158-192::16-50::51-85::88-122
KVKDMMVERGLEPNAVTYNVLINSLCKEGSVREAMALKKEMVENGVAPDVVTYNTLIAGLSGVLEMDEAMGLLEEMIQGDVVVEPNVITFSSVLHGLCKIGRMFQAVKVREMMAERGCMCDLVTYNCLIGGFLRVHKVKMAMKLLNELASSGLEPDSFTYSILINGFSKMWXLDRAEKFLCTMRQHGIEPERVHYIPLLAAICQQGMME

SEQ ID NO: 92696 - protein, 226 aa, Setaria italica
  misc_feature (127)..(127): Xaa can be any naturally occurring amino acid
  Transcript Sequence Number=SeqID_26722
LNVQRVTEERDEVDIRREVQIEIYSTIVKNLLKGMAADSVDHLINTFIKDEVHASFLAKTLNSWKSTTEMPHSEGLIKEEIDRIVFGGLAVDLISVHNFRAIKSYGENSPRNNLGRFSMIDNIEQLXKVKMEINVTTEDEDADSDQHGVPVKQEVQSLGANCDRRNCKGSDQQPEMSTDKGDVPDSVKNDVEEQTEMSTDKGDVPDSVKNDVEEGLEDQRKEKTGE

SEQ ID NO: 92697 - protein, 175 aa, Setaria italica
  Transcript Sequence Number=SeqID_26723
  Gene Ontology: Mol. function=protein serine/threonine kinase activity; Biological process=protein amino acid phosphorylation
  Pfam annotation: Domain name=LRR_1; Domain location=147-169; Score =8.4; E_value=7.4; Accession=PF00560.25; Description=Leucine Rich Repeat
  Pfam annotation: Domain name=LRR_1; Domain location=42-64; Score =12.5; E_value=1.3; Accession=PF00560.25; Description=Leucine Rich Repeat
  Pfam annotation: Domain name=LRR_1; Domain location=66-88; Score =18.5; E_value=0.028; Accession=PF00560.25; Description=Leucine Rich Repeat
  Pfam annotation: Domain name=LRR_1; Domain location=90-112; Score =10.5; E_value=2.9; Accession=PF00560.25; Description=Leucine Rich Repeat
  Pfam module annotation: Pfam domain module=LRR_1::LRR_1::LRR_1::LRR _1; Domain location=147-169::42-64::66-88::90-112
FTNITDALQKLKSCKNLTSLLIGTNFKGETIPQDEAIDGFENLQVLTIDACPLVGKIPVWLSKLTKLEILDLSINQLTGSIPSWINGLKFLFFLDISSNKLTGDIPTTLMEMPMLQSEKNAAKLDPKLLELPVYWTQSRQYRVLNAFPSVLNLCNNRFTGIIPREIGHLKMLDVL

SEQ ID NO: 92698 - protein, 192 aa, Setaria italica
  misc_feature (151)..(151): Xaa can be any naturally occurring amino acid
  Transcript Sequence Number=SeqID_26724
  Gene Ontology: Mol. function=metal ion binding; Cellular component =integral to membrane
  Homolog annotation: Hit_ID=Q8H055; Match level="QueryCoverage=100%, HitCoverage=30%, E-value=5e-66, Identity=64%"; Hit description =Putative DHHC-type zinc finger protein
  Pfam annotation: Domain name=zf-DHHC; Domain location=46-110; Score =97.1; E_value=6.2e-26; Accession=PF01529.12; Description=DHHC zinc finger domain
SEKLSSMLERKDSPSWPRFSGILCLVCFPFSYLCKRCLHSDNEPSEQNICEEGMFFCSLCEAEVLKNSKHCRVCDKCVDGFDHHCRWLNNCIGKRNYKGFFVLMASAVILLVMQWLSGALVLILCIVKRGDFSRQIVTKLGSSFSTVAFLXVVATCTILAMVATIPLAQLLCFHILLIKKGISTYDYIIALR

SEQ ID NO: 92699 - protein, 313 aa, Setaria italica
  Transcript Sequence Number=SeqID_26725
  Gene Ontology: Mol. function=translation initiation factor activity; Cellular component=nucleus; Biological process=regulation of translational initiation
  Homolog annotation: Hit_ID=B9R879; Match level="QueryCoverage=100%, HitCoverage=55%, E-value=1e-77, Identity=51%"; Hit description =Translation initiation factor, putative
  Pfam annotation: Domain name=Gcd10p; Domain location=1-233; Score =112.9; E_value=1.1e-30; Accession=PF04189.5; Description=Gcd10p family
NNTAQNLSSDDIEAMKRDGATGDEIVEALIANSSTFGKKTAFSQEKYKLKKQKKYAPKVLLRRPSTRSICETYFKKSPGRIGFMRVDTLSLLLSMANIGAYSDVLVVDMVGGLIVGAVAERLGGTGYVCSTYLGSPSSIDIIRMYNLSSDMVSRIVQVPLSDLCSMQSSGNTPSVLNGSTEGEVVDSVVVQDEDARASLAQAVDTADEKAQLSTEQPTDMEVSKPLDGQDENSSLDCKDGDGDSVASKSKPGKAPSPEKMKYWKEHGFSSLIVAAPGHEVESLVADLLPLLSYSAPFAIYHQYLEPLAKCMHN

SEQ ID NO: 92700 - protein, 173 aa, Setaria italica
  Transcript Sequence Number=SeqID_26726
  Gene Ontology: Mol. function=ribulose-bisphosphate carboxylase activity; Cellular component=chloroplast ribulose bisphosphate carboxylase complex; Biological process=carbon utilization by fixation of carbon dioxide
  Homolog annotation: Hit_ID=Q0INY7; Match level="QueryCoverage=98%, HitCoverage=98%, E-value=5e-81, Identity=82%"; Hit description =Ribulose bisphosphate carboxylase small chain, chloroplastic
  Pfam annotation: Domain name=RuBisCO_small; Domain location=55-163; Score=256.0; E_value=9.1e-74; Accession=PF00101.12; Description =Ribulose bisphosphate carboxylase, small chain
  Subcellular localization annotation: CTP_CleavageSite=44; ConfidenceScore=5.73e-01
MAPTAMAATSVAPFQGLKSTAGLPVSRRSTSSGFGNVSNGGRIRCMQVWPIGGKKFETLSYLPPLSTDDLLKQIDYLIRKNWIPCLEFSKVGFVYRENNRSPGYYDGRYWTMWKLPMFGCTEATQVYAELEECKKAYPDAYIRILGFDNVRQVQCIMFIAYKPPGCEETGVAK

SEQ ID NO: 92701 - protein, 225 aa, Setaria italica
  misc_feature (41)..(41): Xaa can be any naturally occurring amino acid
  Transcript Sequence Number=SeqID_26727
  Gene Ontology: Mol. function=kinase activity
  Homolog annotation: Hit_ID=Q9LNC4; Match level="QueryCoverage=73%, HitCoverage=23%, E-value=4e-40, Identity=51%"; Hit description =F9P14.9 protein
  Pfam annotation: Domain name=Bromodomain; Domain location=63-148; Score=121.4; E_value=2.9e-33; Accession=PF00439.17; Description =Bromodomain
  Subcellular localization annotation: CTP_CleavageSite=48; ConfidenceScore=5.41e-01
SKRLSSLPAPAPSSALSASDPSTPLPPHPPASKHKSKKAGXAPHPHLSAEARRKLYAPVFKTCAAVLARLMKHKHSWVFNKPVDASALGLHDYHTIITKPMDLGTVKSKLAAGQYKSPREFAGDVRLTFQNAMTYNPKGQDVHFMAEQLLNMFEEKWPEIEAEVAQLSPQPPTPSSAAPRKPKEIDNSRVLERSDSTVHAAGMEATPKPHTGRPPVLKKPKARES

SEQ ID NO: 92702 - protein, 57 aa, Setaria italica
  Transcript Sequence Number=SeqID_26728
  Subcellular localization annotation: CTP_CleavageSite=51; ConfidenceScore=5.21e-01
EVVLPPLETQLHPPGGFRAVQPVSISLPASPGSFGVPTPTAVTADSGNLRRQAMANS

SEQ ID NO: 92703 - protein, 71 aa, Setaria italica
  Transcript Sequence Number=SeqID_26729
  Subcellular localization annotation: CTP_CleavageSite=36; ConfidenceScore=5.01e-01
PRSAAPPPPTPPSRRRWRRAPRTRPPAEPRPLARIQAALEHGGAGRRDLGFGVEAWSYSVISSYSKILVLR

SEQ ID NO: 92704 - protein, 152 aa, Setaria italica
  misc_feature (137)..(137): Xaa can be any naturally occurring amino acid
  Transcript Sequence Number=SeqID_26730
  Gene Ontology: Mol. function=transcription factor activity; Cellular component=transcription factor complex; Biological process =regulation of transcription, DNA-dependent
  Homolog annotation: Hit_ID=B6U2N4; Match level="QueryCoverage=96%, HitCoverage=30%, E-value=2e-55, Identity=74%"; Hit description=E2F -related protein
  Pfam annotation: Domain name=E2F_TDP; Domain location=80-145; Score =127.5; E_value=4.3e-35; Accession=PF02319.12; Description =Transcription factor E2Fdimerisation partner (TDP)
MPMPNSQPNEQKNGGENSQAEINMGETTQGHDKDTTSEPAKVIKRVKKLKVSKHSTGTADGSGAVEGDSGPSLHSIYHCRYDNSLSLLTKKFINLLQGAENGTLDLNKAAETLEVQKRRIYDITNVLEGVDLIEKGXKNMIRWKGFDMSKPK

SEQ ID NO: 92705 - protein, 33 aa, Setaria italica
  Transcript Sequence Number=SeqID_26731
LLFFKFPCGGLHVVDMLTEIFHSLSSGKLKSPQ

SEQ ID NO: 92706 - protein, 361 aa, Setaria italica
  Transcript Sequence Number=SeqID_26732
  Homolog annotation: Hit_ID=Q9ZPZ6; Match level="QueryCoverage=62%, HitCoverage=77%, E-value=2e-38, Identity=41%"; Hit description =T31J12.1 protein (Fragment)
PEPKAKPEAVTPSPSREPQAEPEPDAPAAAGNQELQPWEQHAAVINLPRYDYRASGSLLLRSHSGFLITCPIKREKSATKEAISILEEYIGHAKCHVSEQVEPCDVENALYCAFCSLASENLEAAVTGGNSISVAESTGSIGESSSPQSKMSENVDRASNLSLVKLSRSGLLFFKFPCGGLHVVDMLTEIFHSLSSGKLKSPQWCHRIFPVQETCVLSEKDLHATVSKLFLDFLRSKNNQDEPIKCFNVLQFAVAYNRRGIDETETKAQKNSNEGSNQQALMDREQCFKVVAAAVKSIAENSVVDLKSPEVAVLVEMLPVSGVPLGSSVAGVSVLPAELISTKPRLSVRSLASDAKATKKK

SEQ ID NO: 92707 - protein, 70 aa, Setaria italica
  Transcript Sequence Number=SeqID_26733
FVSDIRLILHYAKLNNFGTNCEVCIFTQRIPWIWLLGGRSLGCERGPFGWCTLRILHTSKSNGPSSKCIH

SEQ ID NO: 92708 - protein, 85 aa, Setaria italica
  Transcript Sequence Number=SeqID_26734
  Subcellular localization annotation: CTP_CleavageSite=63; ConfidenceScore=5.25e-01
ISDDMTLDRTTFFKFVRSFSIIFLGWGQTAQRFCSPFGEIRHVRFTSHLSQSSFLLLLFLFVPRYMKSTMAFFLIIMPPTQLKFK

SEQ ID NO: 92709 - protein, 162 aa, Setaria italica
  Transcript Sequence Number=SeqID_26735
  Gene Ontology: Cellular component=integral to membrane
  Homolog annotation: Hit_ID=Q6Z2C9; Match level="QueryCoverage=99%, HitCoverage=23%, E-value=1e-54, Identity=66%"; Hit description =Endosomal protein-like
TPGATELIKSRIDDTYQVNLLLDTLPVMRYVKSPIAPDTLLRSTGFPVGVRADDGEYYVYNHLKLTVLVNKQNGTTRVETLMATADGAELLSLNGGKDGGGGGYTVVGFEVVPCSVDHDAAAVRDKSMYDEIASKAAAGCDPSVVGMRVQGNRPLVFSYEVA

SEQ ID NO: 92710 - protein, 85 aa, Setaria italica
  Transcript Sequence Number=SeqID_26736
KLRQRDQQLITYTAKSAVYFPLDLSIIGYRILTGRTAGTGVELTGVWGQPPPYVPNQAMATLPTPAPVQSLRIQQRSPLSGLLAP

SEQ ID NO: 92711 - protein, 61 aa, Setaria italica
  Transcript Sequence Number=SeqID_26737
  Gene Ontology: Mol. function=metal ion binding
  Homolog annotation: Hit_ID=B6SPK3; Match level="QueryCoverage=75%, HitCoverage=9%, E-value=6e-10, Identity=63%"; Hit description=Zinc ion binding protein
PSQGRRLLTLQIINMGWLSKIFKGSVNRVSRGHYNGNSHEGYSTQHTKSYQGAHGNEDEDM

SEQ ID NO: 92712 - protein, 88 aa, Setaria italica
  Transcript Sequence Number=SeqID_26738
PFSEQFSIYITSLFSVLHCVLQLTQFHLRISESHFTAFLGDFILKILNLLHTISQFADAIEAPITLHTCWQKSGILENSNAARNCKAS

SEQ ID NO: 92713 - protein, 66 aa, Setaria italica
  Transcript Sequence Number=SeqID_26739
FYNMSMRYVVRYNLCSILFTVLTLVIYSSLETVNISFSPVNKDILVGLANSMLENNSGLLGVATSM

SEQ ID NO: 92714 - protein, 96 aa, Setaria italica
  Transcript Sequence Number=SeqID_26740
GVCGTGSFKDVDKEEGAGAGGKPDAAAKAKKAGGKAKGKDNPYASRGLDKFSTVLSELESKREKILRRAGPDADAGHLMVRFVQSGAKGWVPIVVK

SEQ ID NO: 92715 - protein, 118 aa, Setaria italica
  Transcript Sequence Number=SeqID_26741
FNQDEVCSASLLLCSNSILDGKQSEVSSCLVLQFQLYQLKVLHGNCGWMFVLLHLHLVLSYKLLTNQCLAVNLWSFTVLKQSALCFGTLQYNGARLPGNSTFKLRSMACKALVNQKEL

SEQ ID NO: 92716 - protein, 151 aa, Setaria italica
  Transcript Sequence Number=SeqID_26742
  Gene Ontology: Cellular component=plasma membrane; Biological process= response to desiccation
  Homolog annotation: Hit_ID=B6UH99; Match level="QueryCoverage=100%, HitCoverage=100%, E-value=1e-69, Identity=84%"; Hit description=Late embryogenesis abundant protein Lea14-A
  Pfam annotation: Domain name=LEA_2; Domain location=2-151; Score =301.4; E_value=2e-87; Accession=PF03168.5; Description=Late embryogenesis abundant protein
MAKLVDKAKGFVADKVAKVEKPEAELADLSVGHVGRDGATLAGRIDVRNPYSHAIPVCEISYSLRSAGREVASGKMPDPGSLIARDTTRLDVPVKVPYDFLVSLVRDAGRDWDIDYEMRVGLTVDLPVVGNLTLPLTKSGELKLPTLSTIF

SEQ ID NO: 92717 - protein, 59 aa, Setaria italica
  Transcript Sequence Number=SeqID_26743
FQKMMQTSWCNIGWQWCNIGLVSFSCLKELGIDNIFCICIIQIFNLTPSGIDSITSILS

SEQ ID NO: 92718 - protein, 130 aa, Setaria italica
  Transcript Sequence Number=SeqID_26744
  Gene Ontology: Mol. function=transferase activity, transferring glycosyl groups; Biological process=metabolic process
  Homolog annotation: Hit_ID=B6TCK9; Match level="QueryCoverage=96%, HitCoverage=25%, E-value=6e-57, Identity=83%"; Hit description =Anthocyanidin 5,3-O-glucosyltransferase
ARVVRALRNGVCVPGRPTPPVYPIGPLIVKGQDATAAGGEQRHACLAWLDSQPERSVVFLCFGSLGAVSAAQLKEIARGLESSGHRFLWVVRSPPDDPSKFFLSRPEPNLDALLPEGFLERTKDEGDGGQ

SEQ ID NO: 92719 - protein, 83 aa, Setaria italica
  misc_feature (42)..(42): Xaa can be any naturally occurring amino acid
  Transcript Sequence Number=SeqID_26745
  Subcellular localization annotation: CTP_CleavageSite=73; ConfidenceScore=5.40e-01
MDPPAGGSPDRRGSGPGAGAAPSGLRRYGLNFSASSLLQAPXAALLEYSGVVPSVPAPQAPHHPSAAPSSPSSASEVDGLLSA

SEQ ID NO: 92720 - protein, 85 aa, Setaria italica
  Transcript Sequence Number=SeqID_26746
WRYALPREHAIRTDDDDEPGRKPRMLIIARQSRRRFMNLPEIVALAEEVGFDVTTSDVMSPPKKTTTSGAGSGSAAAGDEGHARM

SEQ ID NO: 92721 - protein, 178 aa, Setaria italica
  Transcript Sequence Number=SeqID_26747
  Gene Ontology: Mol. function=transferase activity, transferring groups other than amino-acyl groups
  Homolog annotation: Hit_ID=B6THN1; Match level="QueryCoverage=98%, HitCoverage=76%, E-value=2e-50, Identity=58%"; Hit description=3-N -debenzoyl-2-deoxytaxol N-benzoyltransferase
AKVWQARTRSLRLPDPSVPVTLCFFANARHVLPKDDGAGAAGFYGNCFYPVTVTAEAGAVERADVAGVVGIVRDAKAQLATEFARWASGELAAEEDPYELWWRHEPLFVSDWRRLGFLEADYGWGTPLHVAPLAALQFMPVALIVAPPTPRRGVRITTQCVEEEHMPAFREEMKAPRE

SEQ ID NO: 92722 - protein, 58 aa, Setaria italica
  Transcript Sequence Number=SeqID_26748
TPLYHLEEELQTSTGRGTSSCPQDPSTWCRDGVTLLALAPPTSHQPSSKRVLLETNGE

SEQ ID NO: 92723 - protein, 208 aa, Setaria italica
  Transcript Sequence Number=SeqID_26749
  Pfam annotation: Domain name=DUF936; Domain location=3-203; Score= -251.5; E_value=0.055; Accession=PF06075.4; Description=Plant protein of unknown function (DUF936)
KWKTIAESMVTIEADVAFLEKSSHDWVHAALATDLGVLKLLNGATESISQMKIINRPKVPSVEPPRTSLSKKQSLGASAKVQSKVSPSSLASCTWNNTESMYETVELSKTLWREMHMWFLNFVDEALDVGFHLFEDQNVASRGKHSNSITMVLSQFKKISDWLDQVGKIAEEEGTKEKIECLKRKIYGFVISHMGSALESSVSVSSRS

SEQ ID NO: 92724 - protein, 231 aa, Setaria italica
  Transcript Sequence Number=SeqID_26750
  Gene Ontology: Mol. function=geranylgeranyl-diphosphate geranylgeranyltransferase activity; Cellular component=chloroplast; Biological process=carotenoid biosynthetic process
  Homolog annotation: Hit_ID=A9UKC3; Match level="QueryCoverage=100%, HitCoverage=52%, E-value=1e-121, Identity=90%"; Hit description =Chloroplast phytoene synthase 3
  Pfam annotation: Domain name=SQS_PSY; Domain location=1-215; Score =259.1; E_value=1.1e-74; Accession=PF00494.11; Description =Squalenephytoene synthase
FAGRPYDMLDAALSDTVANFPVDIQPFRDMIEGMRMDLRKSRYRTFDELYLYCYYVAGTVGLMSVPVMGISPESRAATETVCKGALALGLANQLTNILRDVGEDARRGRIYLPQDELEMAGLSEADIFNGRVTDGWKGFMRDQITRARSFFRQAEEGATELNQESRWPVWASLLLYRQILDEIEANDYDNFTKRAYVPKTKKLMALPKAYLRSLMPPSSLTQSQRHYSSLT

SEQ ID NO: 92725 - protein, 323 aa, Setaria italica
  Transcript Sequence Number=SeqID_26751
  Gene Ontology: Mol. function=binding; Cellular component =mitochondrial inner membrane; Biological process=transport
  Homolog annotation: Hit_ID=B6TV90; Match level="QueryCoverage=100%, HitCoverage=100%, E-value=0.0, Identity=96%"; Hit description =Mitochondrial aspartate-glutamate transporter AGC1
  Pfam annotation: Domain name=Mito_carr; Domain location=125-217; Score=80.7; E_value=5.3e-21; Accession=PF00153.19; Description =Mitochondrial carrier protein
  Pfam annotation: Domain name=Mito_carr; Domain location=232-321; Score=84.2; E_value=4.5e-22; Accession=PF00153.19; Description =Mitochondrial carrier protein
  Pfam annotation: Domain name=Mito_carr; Domain location=27-114; Score= 56.2; E_value=1.3e-13; Accession=PF00153.19; Description =Mitochondrial carrier protein
  Pfam module annotation: Pfam domain module=Mito_carr::Mito_carr::Mito_ carr; Domain location=125-217::232-321::27-114
MDTTTRAAKIPSLHQTEINWDNLDKTKLYVVGAGMFSGVTVALYPVSVVKTRMQVASGDAMRRNALATFKNILKVDGVPGLYRGFPTVIIGAVPTRIIFLTALETTKAASLKLVEPFKLSEPVQAAFANGLAGLSASTCSQAIFVPIDVISQKLMVQGYSGHARYKGGIDVARKVIKADGVKGLYRGFGLSVMTYAPSSAVWWASYGSSQRIIWSALGHWQNKEEAPSQLKIVGVQASGGIIAGAVTSFVTTPIDTIKTRLQVMDNENKPKAGQVVKKLIAEDGWKGLYRGLGPRFFSSSAWGTSMIVCYEYLKRLCAKVEEV

SEQ ID NO: 92726 - protein, 95 aa, Setaria italica
  Transcript Sequence Number=SeqID_26752
  Homolog annotation: Hit_ID=O65250; Match level="QueryCoverage=60%, HitCoverage=13%, E-value=7e-13, Identity=54%"; Hit description =F21E10.11 protein
  Subcellular localization annotation: CTP_CleavageSite=25; ConfidenceScore=5.08e-01
VVRKHRPAGHTHTVAVAVAPLFVLLAAAFSGSPVAVAADSSPGLVELTLVAGAQEKGAVCLDGSPPAYHLQRGSGSGSQSWIVFLQGGAWCSSNT

SEQ ID NO: 92727 - protein, 131 aa, Setaria italica
  Transcript Sequence Number=SeqID_26753
  Gene Ontology: Mol. function=hydrolase activity, acting on acid anhydrides, catalyzing transmembrane movement of substances; Cellular component=integral to membrane; Biological process=copper ion transport
  Homolog annotation: Hit_ID=Q6JAG2; Match level="QueryCoverage=82%, HitCoverage=10%, E-value=3e-47, Identity=84%"; Hit description =Putative copper-exporting ATPase
  Pfam annotation: Domain name=HMA; Domain location=27-91; Score=55.4; E_value=2.1e-13; Accession=PF00403.18; Description=Heavy-metal -associated domain
RGGGGGGGDLEAAAGAGNEEEEEKVAVFSVSGMTCAACAGSVEKAVKRLPGIHDAAVDVLGGRAQVVFYPAFVSENKITEAIEDVGFEAKLIDEDVMEKNILLCRLHIKGMACKYCTSTVEFVLQASPGVQ

SEQ ID NO: 92728 - protein, 35 aa, Setaria italica
  Transcript Sequence Number=SeqID_26754
RLGACEDDCWIWPSITQRAYQAAEIIAAANGINRR

SEQ ID NO: 92729 - protein, 256 aa, Setaria italica
  Transcript Sequence Number=SeqID_26755
  Homolog annotation: Hit_ID=B6TTB7; Match level="QueryCoverage=89%, HitCoverage=99%, E-value=1e-114, Identity=89%"; Hit description =Phosphoglycerate mutase family protein
  Pfam annotation: Domain name=PGAM; Domain location=36-205; Score =26.8; E_value=4.5e-06; Accession=PF00300.14; Description =Phosphoglycerate mutase family
  Subcellular localization annotation: CTP_CleavageSite=41; ConfidenceScore=5.47e-01
LLPAALSLQLAPSAAAPAPAAARGLFRMPPQRLANRYFLVRAGESVYEGQGLLRTNPVAKTSVDNGLSPVGLRQTARAALELQRLGACEDDCWIWPSITQRAYQAAEIIAAANGINRSRIVPEYSFLDARGLGAFEGKSLDTLPEVYASDNISPDMKPPPISDGTPNESVADVFVRVTQLMSILETQYSGETVVIVSPDSDNLSILQAGLIGLDLRRHSSLFFKPGEVRPVDPSSIPEYKQPASAVFKCTNPPSCK

SEQ ID NO: 92730 - protein, 196 aa, Setaria italica
  misc_feature (159)..(159): Xaa can be any naturally occurring amino acid
  Transcript Sequence Number=SeqID_26756
  Homolog annotation: Hit_ID=Q7XUR7; Match level="QueryCoverage=73%, HitCoverage=28%, E-value=1e-45, Identity=62%"; Hit description =OSJNBa0084K11.16 protein
TTEDLISSACSFASLTASVLHSFLEEHDNSIKGGSCSCLSADDSYCSVCLGVLLPAWHREEGVETSHGGFHIDSISSMISQVVQKESYLVDEFSLEISLPPVIAANERAVRLYMKQKFGNENWFKDKMFPQQIMSVKEALRLLMVPSLEKQMNAKHDNXRFRIRLTYTHDDASQKLHSLLPNEHGRKRKTRFKKWK

SEQ ID NO: 92731 - protein, 64 aa, Setaria italica
  Transcript Sequence Number=SeqID_26757
  Subcellular localization annotation: CTP_CleavageSite=47; ConfidenceScore=5.46e-01
LFLPPVLLSSPPLSCPSFPAATATWRAATPFDTSPPGPSPATSTLTRSSEDCQVYVRCLRIISR

SEQ ID NO: 92732 - protein, 135 aa, Setaria italica
  Transcript Sequence Number=SeqID_26758
  Gene Ontology: Mol. function=nucleic acid binding
  Homolog annotation: Hit_ID=B6U275; Match level="QueryCoverage=97%, HitCoverage=31%, E-value=3e-54, Identity=76%"; Hit description =Heterogeneous nuclear ribonucleoprotein 27C
  Pfam annotation: Domain name=RRM_1; Domain location=14-66; Score =16.8; E_value=0.0055; Accession=PF00076.14; Description=RNA recognition motif. (a.k.a. RRM, RBD, o
VNCKSQGTKKATRIFVARIPQSVDESMFRRHFEAFGEILDLYMPTSAESVDSIMQESHELDGTTVVVDRATPKDEDVRYPPSRASQSQGGYGAYNAYISAATRYAALGAPTLYDHPGSAYGRGYYGSSQAVGKKE

SEQ ID NO: 92733 - protein, 371 aa, Setaria italica
  misc_feature (21)..(21): Xaa can be any naturally occurring amino acid
  Transcript Sequence Number=SeqID_26759
  Gene Ontology: Mol. function=nucleic acid binding; Cellular component= ribonucleoprotein complex
  Homolog annotation: Hit_ID=Q94CQ1; Match level="QueryCoverage=90%, HitCoverage=63%, E-value=1e-167, Identity=87%"; Hit description =Putative RNA-binding like protein
  Pfam annotation: Domain name=RRM_1; Domain location=103-171; Score =51.9; E_value=2.4e-12; Accession=PF00076.14; Description=RNA recognition motif. (a.k.a. RRM, RBD, o
  Pfam annotation: Domain name=RRM_1; Domain location=13-82; Score =50.1; E_value=8.4e-12; Accession=PF00076.14; Description=RNA recognition motif. (a.k.a. RRM, RBD, o
  Pfam annotation: Domain name=RRM_1; Domain location=240-308; Score =69.0; E_value=1.8e-17; Accession=PF00076.14; Description=RNA recognition motif. (a.k.a. RRM, RBD, o
  Pfam module annotation: Pfam domain module=RRM_1::RRM_1::RRM_1; Domain location=103-171::13-82::240-308
YSSVASVIMATKLVVLGIPWXDVDTEGLREYMAKFGTLDDCVVMKERSSGRSRGFGYVTFSSADDAKNVLESEHVLGTRTLEVKIATPKEEMKSQGTKKATRIFVARIPQSVDESMFRRHFEAFGEILDLYMPKEHGSKGHRGIGFITFQSAESVDSIMQESHELDGTTVVVDRATPKDEDVRYPPSRASQSQGGYGAYNAYISAATRYAALGAPTLYDHPGSAYGRGYYGSSQAVGKKIFVGRLPQEANTDDLRHYFGRFGRIVDAYIPKDPKRSGHRGFGFVTFADEGVAERVARRSHEILGHEVAIDTAAPLENDSTGGAYIDPMDLYGAYGSMRSFGRFCGSLDYNYGYGPSSGSSRSRGDWRYRPY

SEQ ID NO: 92734 - protein, 80 aa, Setaria italica
  Transcript Sequence Number=SeqID_26760
LRNSCWKHCEKPSKLSGGKPEPEVDSGRHLPHPEAGASSAWGASGAVVGADGLARGGARAVRRLQRYHEELGLLLLIPNP

SEQ ID NO: 92735 - protein, 103 aa, Setaria italica
  Transcript Sequence Number=SeqID_26761
LVRSIRKCPASCREGNRNRKWIQEGTYPIRRRGQAALGARAAPSLERTAWLGEGHEQCGGFRGGFLESRFLKNCLLYSKIRFLITLWTSNLKVMLIFLSHQYY

SEQ ID NO: 92736 - protein, 144 aa, Setaria italica
  Transcript Sequence Number=SeqID_26762
  Gene Ontology: Mol. function=transferase activity; Cellular component= cellular_component; Biological process=metabolic process
  Homolog annotation: Hit_ID=A4FVI3; Match level="QueryCoverage=90%, HitCoverage=91%, E-value=1e-12, Identity=28%"; Hit description =Oraov1 protein
  Pfam annotation: Domain name=DUF1715; Domain location=12-124; Score =182.0; E_value=1.7e-51; Accession=PF08215.4; Description=Eukaryotic domain of unknown function (DUF17
  Pfam annotation: Domain name=Yae1_N; Domain location=2-71; Score= -8.4; E_value=0.0062; Accession=PF09811.1; Description=Essential protein Yae1, N terminal
  Pfam module annotation: Pfam domain module=DUF1715::Yae1_N; Domain location=12-124::2-71
MDQQPQSDADFLEPSVLLDETHYQEGYKNGYHDGLSSGKEEGRQVGLKMGFQVGEELGFYQGCLDVWASATRIDQNVFSARVRKNIEQLAALVSSYPLSDPENEQVQDVMEKIRLKFRVITATLGAKLEYEGRPASSKQDVEDL

SEQ ID NO: 92737 - protein, 132 aa, Setaria italica
  Transcript Sequence Number=SeqID_26763
  Subcellular localization annotation: CTP_CleavageSite=62; ConfidenceScore=5.40e-01
RCGVRGTSSRGTGSRRRPKHAAQTRIRQSSMYSDHPRRSRRNPGRARPPTNLLVEEDVTEVSSNEIGPTIPDTSKFEALSLNDSPSTLDSTDGYDHYCFFHSNHGPFVVITSRHPWMWFAQIAVLIQELDHS

SEQ ID NO: 92738 - protein, 71 aa, Setaria italica
  Transcript Sequence Number=SeqID_26764
  Gene Ontology: Mol. function=microtubule motor activity; Cellular component=microtubule associated complex; Biological process =microtubule-based movement
  Homolog annotation: Hit_ID=Q6F2U4; Match level="QueryCoverage=80%, HitCoverage=12%, E-value=1e-15, Identity=70%"; Hit description =Putative kinesin heavy chain (Fragment)
ELKKQLEKLRKKHEMELETMKVHLAESRLPESALGGFYHHDNKETPEYSCDAASTQDDDQSWRAAFASAYE

SEQ ID NO: 92739 - protein, 74 aa, Setaria italica
  Transcript Sequence Number=SeqID_26765
  Gene Ontology: Mol. function=hydrolase activity; Biological process =lipid catabolic process
  Homolog annotation: Hit_ID=B6TD55; Match level="QueryCoverage=100%, HitCoverage=17%, E-value=9e-32, Identity=78%"; Hit description =Patatin class 1
VTKDIVLGNDDFFPVKPVDYGKFMVVSIGCGSNRNRKYSAKAAAKWGIFNWLIKDGTAPIIDMFNSASGDMVDI

SEQ ID NO: 92740 - protein, 42 aa, Setaria italica
  Transcript Sequence Number=SeqID_26766
  Pfam annotation: Domain name=DDA1; Domain location=3-42; Score=26.7; E_value=2e-06; Accession=PF10172.1; Description=Det1 complexing ubiquitin ligase
MGSPLGGWPSYNPRNFSQLVPADPSSQPSNVTPATYIATHRT

SEQ ID NO: 92741 - protein, 419 aa, Setaria italica
  misc_feature (226)..(226): Xaa can be any naturally occurring amino acid
  Transcript Sequence Number=SeqID_26767
  Gene Ontology: Mol. function=ARF guanyl-nucleotide exchange factor activity; Cellular component=intracellular; Biological process =regulation of ARF protein signal transduction
  Homolog annotation: Hit_ID=B9S916; Match level="QueryCoverage=96%, HitCoverage=27%, E-value=1e-169, Identity=71%"; Hit description =Pattern formation protein, putative
PDDEDTAVFCLELLIAITLNNRDRIVLLWQGVYEHIANIVQSTVMPCALVEKAIFGLLRICQRLLPYKENLADELLRSLQLVLKLDARVGDAYSENITQEVARLVKANAAHIKSPMGWRTVLMLLSMTARHPDASEVGFEAIMFIMTEGAHLSLANYGFCIDASRQFAESRVGLADRSIRALDLMSDSVRSLALWSQEIKGAGEEGEKRLEAIREMWLKLLQSLKXLSLDQREEVRNHALALLQRCLTATEEICLQSATWSHAFDLVIFALLDDLLEISQNHSQKDYRNMEGSLVLAMKLVAKVYLQLLPDLFGLSSFCKLWLGVLSRMEKYIKIKVRGKRSDKLQEVIPDLLKNILLVMKNKGILAKRSTIGGDSLWELTWLHANNISTSLLPEVFPSQEYEQQSSAGSPRGPNSVEA

SEQ ID NO: 92742 - protein, 114 aa, Setaria italica
  misc_feature (109)..(109): Xaa can be any naturally occurring amino acid
  Transcript Sequence Number=SeqID_26768
  Gene Ontology: Mol. function=voltage-gated potassium channel activity; Cellular component=integral to membrane; Biological process=potassium ion transport
  Homolog annotation: Hit_ID=Q5EEQ2; Match level="QueryCoverage=89%, HitCoverage=13%, E-value=8e-50, Identity=88%"; Hit description =Potassium outward rectifying channel (Fragment)
RRRRRPLGGEGAAEGFFHDLVIHPDNRWYRLWTKFILVWAVYSSFFTPLEFGFFRGLPRKLFFLDIAGQIAFLIDIIVKFFVAYRDPDTYRIIYDPTAIALRYCKSSFXFDLLG

SEQ ID NO: 92743 - protein, 85 aa, Setaria italica
  Transcript Sequence Number=SeqID_26769
RLHDCQLANVAKEGSGVVRLGVDDRRPAAMRVAHWPLCAPGGAGQDQTVTWCVGSWRSQEHARERYRSCSQLYLHATDEAADRRG

SEQ ID NO: 92744 - protein, 97 aa, Setaria italica
  Transcript Sequence Number=SeqID_26770
  Gene Ontology: Mol. function=transcription factor activity; Cellular component=nucleus; Biological process=regulation of transcription, DNA-dependent
  Homolog annotation: Hit_ID=A7XA61; Match level="QueryCoverage=36%, HitCoverage=10%, E-value=8e-11, Identity=85%"; Hit description=DRF -like transcription factor DRFL2a
  Subcellular localization annotation: CTP_CleavageSite=40; ConfidenceScore=5.74e-01
VAPPQNQSQSQSNATATTAATTPSTFSSASPDVKSEPGCSGSESSSSADGDVSSTGSSDVVPEMQLLDFSEAPWDESESFHLRKYPSLEIDWDSILS

SEQ ID NO: 92745 - protein, 122 aa, Setaria italica
  misc_feature (9)..(9): Xaa can be any naturally occurring amino acid
  Transcript Sequence Number=SeqID_26771
  Gene Ontology: Mol. function=transcription factor activity; Cellular component=nucleus; Biological process=regulation of transcription, DNA-dependent
  Homolog annotation: Hit_ID=B6TI37; Match level="QueryCoverage=67%, HitCoverage=26%, E-value=2e-32, Identity=82%"; Hit description=DRE binding factor
  Pfam annotation: Domain name=AP2; Domain location=1-45; Score=36.0; E_ value=1.5e-07; Accession=PF00847.12; Description=AP2 domain
RHWGKWVAXEIRLPRNRTRLWLGTFDTAEEAALAYDSAAFRLRGDSARLNFPELRRGGAHLGPPLHAAVDAKLHAICNGTDVAPPQNQSQSQSNATATTAATTPSTFSSDVVPEMQLLDFSE

SEQ ID NO: 92746 - protein, 129 aa, Setaria italica
  Transcript Sequence Number=SeqID_26772
MFSAIMAKKSYKQHSKSEKIQVGCMSGLVRMLDFRRSPKLLSDGRVKREPKGFEDVHENISSNDNKDHRVELIFAGRASIKTLMEEEMASSTQPLKQAQRNVTGICSEDIDLNLAASLMEIYRSCTESQ

SEQ ID NO: 92747 - protein, 67 aa, Setaria italica
  Transcript Sequence Number=SeqID_26773
YSRLQPEPVAVMAGWTPGIYSCGAFPSLIRIQIDDTLSRLRLYFFPLDRGEEEGSVAHAVKKATLDI

SEQ ID NO: 92748 - protein, 111 aa, Setaria italica
  Transcript Sequence Number=SeqID_26774
  Gene Ontology: Mol. function=transcription regulator activity; Cellular component=nucleus; Biological process=regulation of transcription
  Homolog annotation: Hit_ID=B6TXR4; Match level="QueryCoverage=98%, HitCoverage=29%, E-value=7e-24, Identity=60%"; Hit description=BHLH transcription factor
SPAGASEDPAAFDESALLASRLRHHQIGGDKPIMLHLSDLHGLAGGEDAGAAGFLPLPLFTDRAREDMDAAFKSPNAAGGEQALYNGFGAAGMHGAAAAVQPPFGQGGSMP

SEQ ID NO: 92749 - protein, 109 aa, Setaria italica
  Transcript Sequence Number=SeqID_26775
  Gene Ontology: Mol. function=hydrolase activity, acting on glycosyl bonds; Cellular component=extracellular region; Biological process =carbohydrate metabolic process
  Homolog annotation: Hit_ID=Q7XUR3; Match level="QueryCoverage=99%, HitCoverage=20%, E-value=4e-38, Identity=69%"; Hit description =Putative alpha-L-fucosidase 1
RSLTNYSVAASPWRGGAGDVVAELAAAARAEGVGLGLYLSPWDRHEPVYGDTVPYNEHYMGQMTELLTRYGEVEEVWLDGAKGDAKKMDYMFDAWFSLIHQLQQRVVIL

SEQ ID NO: 92750 - protein, 72 aa, Setaria italica
  Transcript Sequence Number=SeqID_26776
MADPQPQAEALTEPARINGAAAEATLSGGELACRPAAAGGGGREGQERRLELESEVLGCRVEGRKLRVATFA

SEQ ID NO: 92751 - protein, 92 aa, Setaria italica
  Transcript Sequence Number=SeqID_26777
  Homolog annotation: Hit_ID=Q5BQ30; Match level="QueryCoverage=90%, HitCoverage=96%, E-value=5e-21, Identity=66%"; Hit description =Thionin-like peptide
MEGKRTTALMVIMCLVILSLNVNPATAAQCSCCVSARAKACCFACITAGGSDSLCKNTCCFPCVLSDSVASKMVEMEVLAKMEEADKPKMIA

SEQ ID NO: 92752 - protein, 92 aa, Setaria italica
  Transcript Sequence Number=SeqID_26778
  Homolog annotation: Hit_ID=Q5BQ30; Match level="QueryCoverage=90%, HitCoverage=96%, E-value=6e-20, Identity=64%"; Hit description =Thionin-like peptide
MEGKRTTALMVIMCLVILSLNANSATAAECGCCSAARAKACCFGCIAVGGTDAVCKNTCCFPCFLDDSVASKMVEMEVLAKMEEADKPKMIA

SEQ ID NO: 92753 - protein, 59 aa, Setaria italica
  Transcript Sequence Number=SeqID_26779
RSLSSHTVTAERLCPRQVGLAGNRLTCQPPDSLCCYCGGVSSLTHTHTCPAPSPASLVH

SEQ ID NO: 92754 - protein, 71 aa, Setaria italica
  Transcript Sequence Number=SeqID_26780
IFARCHQISRENCHRCRQFLLSKFWWGCSCGHHLVHRLHFPTGSPASSVSSLLTLTHVVKAHGHGCWGAKL

SEQ ID NO: 92755 - protein, 155 aa, Setaria italica
  Transcript Sequence Number=SeqID_26781
KKIRQRLMALKHEFIEPPIGESTGITHRAALGAAKAKLSRWLQDLQKLRQARKEGTASIGLIVGDMTKYLEGKDLELHASRQVGLLGFIASALPASHTSKPGACQVTVYLLRLLRVLLSLPANRTYFLVQNLLPPIIPMLSASLENYIKVAASNS

SEQ ID NO: 92756 - protein, 114 aa, Setaria italica
  Transcript Sequence Number=SeqID_26782
  Gene Ontology: Mol. function=oxidoreductase activity; Biological process=oxidation reduction
  Homolog annotation: Hit_ID=B6TXT0; Match level="QueryCoverage=99%, HitCoverage=40%, E-value=2e-44, Identity=74%"; Hit description =Tropinone reductase 2
GGLVSYPALSVYSATKAAMNQLTRSLAVEWAQDKVRVNCVAPGGVRTDIVASSGLKLDPEVERKMWEAEMARVPMRRIGEPEEITSLVAFLCMPAASYITGQVICADGGRTIAA

SEQ ID NO: 92757 - protein, 108 aa, Setaria italica
  Transcript Sequence Number=SeqID_26783
RLSSRKRNSTQAKFSQFGILMAPSVSGDSASYPQLLCIFYDHAIFLRHKFQPPTCQGWPMVMAHLELLIPSANLEKQVSFLAISASLIVPANMAPRSQILPYGLSQAY

SEQ ID NO: 92758 - protein, 74 aa, Setaria italica
  Transcript Sequence Number=SeqID_26784
WSRRSRASRLARDTCCVGGGGGVTCAREAAGWAPLELRTHVSAAVGGGAVRAPWSSRASGISPCVWRSYRGRGG

SEQ ID NO: 92759 - protein, 56 aa, Setaria italica
  Transcript Sequence Number=SeqID_26785
  Subcellular localization annotation: CTP_CleavageSite=26; ConfidenceScore=5.05e-01
LMTSVPNFSKHSNTGELGQKCINHSNSSHLQPNNMIKTRKHRTSTCFFCEILNFSL

SEQ ID NO: 92760 - protein, 136 aa, Setaria italica
  Transcript Sequence Number=SeqID_26786
  Gene Ontology: Mol. function=transcription regulator activity; Cellular component=nucleus; Biological process=regulation of transcription
  Homolog annotation: Hit_ID=B6TIA0; Match level="QueryCoverage=86%, HitCoverage=32%, E-value=3e-46, Identity=82%"; Hit description=DNA binding protein
  Pfam annotation: Domain name=HLH; Domain location=41-90; Score=43.5; E_value=8.6e-10; Accession=PF00010.18; Description=Helix-loop-helix DNA-binding domain
LYYGGGGSPTFVFGGGAGESSEMAIIRGVGGPHHRSKLHGAPSKNLMAERRRRKRLNDRLSMLRSIVPKISKMDRTSILGDTIDYVKELTERIKVLEEEIGASPEDLNLLNTLKDSSNSSNEMMVRNSTKFDVENR

SEQ ID NO: 92761 - protein, 51 aa, Setaria italica
  Transcript Sequence Number=SeqID_26787
  Gene Ontology: Mol. function=aspartic-type endopeptidase activity; Cellular component=chromatin; Biological process=chromatin assembly or disassembly
  Homolog annotation: Hit_ID=A5JSC4; Match level="QueryCoverage=100%, HitCoverage=3%, E-value=8e-18, Identity=76%"; Hit description =Polyprotein
KGKLAPRYVGPYEIVEICGPVAYRIQLPEQLSAIHDVFHVSQLKKCVRVPA

SEQ ID NO: 92762 - protein, 330 aa, Setaria italica
  Transcript Sequence Number=SeqID_26788
  Gene Ontology: Cellular component=endoplasmic reticulum
  Homolog annotation: Hit_ID=Q6DR04; Match level="QueryCoverage=65%, HitCoverage=50%, E-value=9e-52, Identity=47%"; Hit description =Reticulon-like protein B17
  Pfam annotation: Domain name=Reticulon; Domain location=99-261; Score= 116.7; E_value=7.5e-32; Accession=PF02453.9; Description=Reticulon
  Subcellular localization annotation: CTP_CleavageSite=33; ConfidenceScore=5.01e-01
WSSGAAGRQCAAPALASPRNTRRARRRLEKDVEAEEDAARRARRRKSTRAAPKAAVAVDKAAAVNEEDTSLALVPACPDATRGTDFVEQSGWEGLCERIAELVMWRNVAKSALWFGFGSMFFFSCSFSREITFSPISALCHLGVMILGLAFFKDSVPQRPQVERGRSFQLTEEDVLRASRAVLPIANSMISTAQVIFSGEPSMTLKVLPVLLFGAKYGSLVTVWRLLAAGFFTSFTVPKLYSSYSSQIHRRVEILRDRAQESWKSCPRKKLVAATAVTMCWNLFSVKTRVMAAFVSLVILRYNQKYRKVDINTDVEICQDNEGQQMETDE

SEQ ID NO: 92763 - protein, 91 aa, Setaria italica
  Transcript Sequence Number=SeqID_26789
ALARSSLDWPEMPDRDFNFHHIGHTYNGPPPAQQGNKHEEAHHHQPVAHYSEYSTYTAAAYPYRPPPPAYPPRNKPPPVYGYPQPPQPGWG

SEQ ID NO: 92764 - protein, 119 aa, Setaria italica
  misc_feature (14)..(14): Xaa can be any naturally occurring amino acid
  Transcript Sequence Number=SeqID_26790
  Gene Ontology: Mol. function=transcription repressor activity; Cellular component=cytoplasm; Biological process=regulation of nitrogen utilization
  Homolog annotation: Hit_ID=P52580; Match level="QueryCoverage=96%, HitCoverage=37%, E-value=3e-42, Identity=68%"; Hit description =Isoflavone reductase homolog IRL
TRRSIAAYTVLAAXDPRAENRTLHIRPPANTLSHNELLPMWEGKTGRAFERVHVAEDAVLKENPEASFPLNFILSIGHATHIQGEQSKLEVDPSSGVDASELYPDVKYTTVDDYLNRLL

SEQ ID NO: 92765 - protein, 146 aa, Setaria italica
  Transcript Sequence Number=SeqID_26791
  Gene Ontology: Mol. function=diphthine synthase activity; Cellular component=cytoplasm; Biological process=peptidyl-diphthamide biosynthetic process from peptidyl-histidine
  Homolog annotation: Hit_ID=B4F8L2; Match level="QueryCoverage=97%, HitCoverage=52%, E-value=2e-76, Identity=95%"; Hit description =Diphthine synthase
  Pfam annotation: Domain name=TP_methylase; Domain location=1-145; Score=-28.2; E_value=0.0013; Accession=PF00590.12; Description =Tetrapyrrole (CorrinPorphyrin) Methylases
TTTTNLEKLYGKEITVADREMVEERVDQVLLEAADADVAFLVVGDPFGATTHTDLVVRAKKMGVEVKVIHNASVMNAIGVCGLQLYRYGETISIPFFTEEWRPDSFYEKIQNNSRLGLHTLCLLDIRVKEPTWESLARGKKVYEPP

SEQ ID NO: 92766 - protein, 120 aa, Setaria italica
  Transcript Sequence Number=SeqID_26792
  Gene Ontology: Mol. function=nucleoside-triphosphatase activity; Cellular component=intracellular; Biological process=regulation of transcription, DNA-dependent
KDLVKLYSWEQAPYSTASIESFKRTRQKIFKLLQQFNKILRKPVIDLLNEVTARKVPCWLDPHLPESQFPVDTENFNKRFLWYSKWASETSLSLQALQNTNGTTVGIPTVKEYSDTVQNV

SEQ ID NO: 92767 - protein, 136 aa, Setaria italica
  Transcript Sequence Number=SeqID_26793
  Gene Ontology: Mol. function=binding; Cellular component=nucleus
  Homolog annotation: Hit_ID=Q8LNU5; Match level="QueryCoverage=99%, HitCoverage=17%, E-value=2e-59, Identity=77%"; Hit description =Nucleolar complex protein 2 homolog
SKDEPKQSAKPITMERVDSWCAGVENDKIGSIRSILQAFRQACHYGEDQGDNSAPKFSVMSGSVLDKVMHFVLKHMDRVLRKLLGAPSSGGKKETISELMLSKTWKRHGNLMRIYLANALHMITEMTDEQMSLFTI

SEQ ID NO: 92768 - protein, 59 aa, Setaria italica
  Transcript Sequence Number=SeqID_26794
SIFVVLSLKRATCQIRFGYIPASVILFILLMWILCHPVPEPYSVHILSSQYLGPFPSVD

SEQ ID NO: 92769 - protein, 88 aa, Setaria italica
  Transcript Sequence Number=SeqID_26795
SVAPPVTVRPGRCILETAVGRTGRESERCALLWRLAQLMSTLWRIRGSCGHCSSCRTATHRYSGPFMLGAPLPFRLDKAAAHLWRGTN

SEQ ID NO: 92770 - protein, 56 aa, Setaria italica
  Transcript Sequence Number=SeqID_26796
  Gene Ontology: Mol. function=transferase activity, transferring groups other than amino-acyl groups
  Homolog annotation: Hit_ID=B9SNQ7; Match level="QueryCoverage=78%, HitCoverage=9%, E-value=2e-11, Identity=70%"; Hit description =Anthocyanin 5-aromatic acyltransferase, putative
GRPRKVEIASVERTGAVALAESGRDGDGGIEVGLALPRAEMEAFRTFCLDLFASLC

SEQ ID NO: 92771 - protein, 37 aa, Setaria italica
  Transcript Sequence Number=SeqID_26797
PSISLIHELNIHELLQYYHGTALFLCYFVLASDKDVK

SEQ ID NO: 92772 - protein, 604 aa, Setaria italica
  misc_feature (116)..(116): Xaa can be any naturally occurring amino acid
  misc_feature (417)..(417): Xaa can be any naturally occurring amino acid
  misc_feature (591)..(591): Xaa can be any naturally occurring amino acid
  Transcript Sequence Number=SeqID_26798
  Gene Ontology: Mol. function=transporter activity; Cellular component= membrane; Biological process=oligopeptide transport
  Homolog annotation: Hit_ID=B9S2D6; Match level="QueryCoverage=95%, HitCoverage=91%, E-value=1e-159, Identity=48%"; Hit description =Nitrate transporter, putative
  Pfam annotation: Domain name=7TM_GPCR_Str; Domain location=47-277; Score=-165.2; E_value=0.0073; Accession=PF10326.1; Description =Serpentine type 7TM GPCR chemorecepto
  Pfam annotation: Domain name=MFS_1; Domain location=44-523; Score= -8.6; E_value=0.054; Accession=PF07690.8; Description=Major Facilitator Superfamily
  Pfam annotation: Domain name=PTR2; Domain location=106-515; Score =226.5; E_value=6.7e-65; Accession=PF00854.13; Description=POT family
  Pfam module annotation: Pfam domain module=7TM_GPCR_Str::MFS_1::PTR2; Domain location=47-277::44-523::106-515
METGTEMAAEQEGGALPRQNGRASEPAAATRKKKPQGWKCMPFIIANETFEKAASFGVAANLTTYLVKRFNIGQLQATNVTNIFFATLNFTPLLGAFISDSYLGRFKTLACGCFAXLLGILGVTLTASLPALKPELCNQTSQLGGHCNSPSTLQLGVLYLSLGLLTIGGGAIRPCSLPFGVDQFDQTDEKSRKGLNSYYNWYYSTSTAALVFSMTVLIYIQTNISWAIGFGIPTFFMFSAIIIFFAGARLYVHVPPEGSIFSGIAQVFVASFKKRRLNLSCSHDINKPELMLYNPPTRGNRIFRLPLTSQFRFLNKGAIMRDDDINDDGSARNSWELCSIQQIEEVKCLIRIAPICFSGILCFVAMAQQFTFIILQAFTMDSHLGPHFEIPAGSVVSISLIALTVFIPIYDQLMVPXARKLTGLEGGITLLQRQGVGLVISPISMVVAGLVEHKRRDSALSNGGMSPMTVLWLAPQLVLMGIAEAFIAVGQIEFYNKQFPEHMQTLAGSLLFCAIAAANYLSTALVNITRKVTARHGHTSWLTDNINNGKLDYYYYFIAILGVLNLFYFLTCSHYYQYKAMSLHVDESIKXMTKEEAATEIEIV

SEQ ID NO: 92773 - protein, 81 aa, Setaria italica
  Transcript Sequence Number=SeqID_26799
  Gene Ontology: Mol. function=nucleic acid binding
  Homolog annotation: Hit_ID=B9SH52; Match level="QueryCoverage=83%, HitCoverage=53%, E-value=7e-24, Identity=73%"; Hit description =Glycine-rich RNA-binding protein, putative
  Pfam annotation: Domain name=RRM_1; Domain location=1-59; Score=19.2; E_value=0.0033; Accession=PF00076.14; Description=RNA recognition motif. (a.k.a. RRM, RBD, o
MVDAMETCIGPWIATVRIIYDKNSGRPRGFGFVHFSNDHEAKCAKDAMDGKVMLGRPLRISFALEKVRGAPVIVPRLSTVK

SEQ ID NO: 92774 - protein, 73 aa, Setaria italica
  Transcript Sequence Number=SeqID_26800
  Gene Ontology: Mol. function=acid-amino acid ligase activity; Cellular component=intracellular; Biological process=ubiquitin -dependent protein catabolic process
  Homolog annotation: Hit_ID=B9S9V5; Match level="QueryCoverage=100%, HitCoverage=1%, E-value=3e-15, Identity=54%"; Hit description=E3 ubiquitin protein ligase upl2, putative
SKVDDGQELEGDALSERSALLSKLAFVLKLMSEILLMYVHAVGIILRRDTEISQSRSCDQGAGHSGLLHHIFY

SEQ ID NO: 92775 - protein, 117 aa, Setaria italica
  misc_feature (8)..(8): Xaa can be any naturally occurring amino acid
  misc_feature (87)..(87): Xaa can be any naturally occurring amino acid
  Transcript Sequence Number=SeqID_26801
  Gene Ontology: Mol. function=transferase activity, transferring glycosyl groups; Cellular component=integral to membrane
  Homolog annotation: Hit_ID=Q67WK4; Match level="QueryCoverage=100%, HitCoverage=22%, E-value=3e-35, Identity=66%"; Hit description =Glycosyl transferase protein A-like
APMYLPAXFRVWFARRPPPLGAHVELLSASDFPFLNATYSPVLRQIEDGNRDVALLDYLRFYLPEMFPALRRVVLLEDDVVVQRDLXAGLWRVDTGAAVNAALHTCFGGFRRYGKYL

SEQ ID NO: 92776 - protein, 211 aa, Setaria italica
  Transcript Sequence Number=SeqID_26802
  Gene Ontology: Mol. function=transcription regulator activity; Cellular component=nucleus; Biological process=regulation of transcription
  Homolog annotation: Hit_ID=B6UFP4; Match level="QueryCoverage=94%, HitCoverage=48%, E-value=3e-50, Identity=56%"; Hit description=DNA binding protein
  Pfam annotation: Domain name=HLH; Domain location=40-90; Score=35.7; E_value=1.9e-07; Accession=PF00010.18; Description=Helix-loop-helix DNA-binding domain
EKNGLAAATAAAGKRKRKGSKEPDEEGEGYIHVRARKGQATNRHSLAERLRREKISERMKLLQDLVPGCSKVTGKAVMLDEIINYVQSLQRQVEFLSMKLAAVNPQLGLNIEGLLSKDLIRYPSAPSSAPIGFSVAQSGMVQEGVHSVASSNGFRTVMQDQLNERDSFREHVSQMPRAFDGWFHNAGQTAYRAVIDPEHLSIRPDQDGFHL

SEQ ID NO: 92777 - protein, 120 aa, Setaria italica
  misc_feature (105)..(105): Xaa can be any naturally occurring amino acid
  Transcript Sequence Number=SeqID_26803
  Gene Ontology: Cellular component=extracellular region; Biological process=plant-type cell wall organization and biogenesis
  Homolog annotation: Hit_ID=Q6QFA8; Match level="QueryCoverage=100%, HitCoverage=47%, E-value=1e-52, Identity=82%"; Hit description =Expansin EXPA5
  Pfam annotation: Domain name=Pollen_allerg_1; Domain location=27-104; Score=152.7; E_value=1.1e-42; Accession=PF01357.13; Description =Pollen allergen
WETIAVYRAGIVPVNYRRVPCRRSGGVRFTVNGHSYFELVTVANVGGSGVVAQAWIKGSRTDWMPMSRNWGANWQSNAFLNGQSLSFRLRADDGRVVTAVDVAPXGWWFGGTYTSNAQFY

SEQ ID NO: 92778 - protein, 195 aa, Setaria italica
  misc_feature (51)..(51): Xaa can be any naturally occurring amino acid
  Transcript Sequence Number=SeqID_26804
  Gene Ontology: Mol. function=inositol or phosphatidylinositol phosphatase activity
  Homolog annotation: Hit_ID=B9S7E6; Match level="QueryCoverage=96%, HitCoverage=42%, E-value=1e-59, Identity=64%"; Hit description=Type I inositol polyphosphate 5-phosphatase, putative
RASTWDIYVLGFQEIVPLNARNVLGPTKNGISAKWNSLIGEALNKKEKKRXGAKLTQESTNSSALEGTVQGEGFRCIRSKQMVGIFTSVWVRRSLKQFIHHLDVSCIGSGIMGCLGNKGSVSIRFVLHQTSFCFVCCHLASGGKEGDVLLRNLDVTDILSRTWFPGGSTQELPEKILDHDQVVLLGDLNYRISLE

SEQ ID NO: 92779 - protein, 65 aa, Setaria italica
  Transcript Sequence Number=SeqID_26805
NIQRPCSFRVCFCLTEKNSSRMDAQATYCKHSTEEDATERTKRGKSVRQFFWLLPPSSYTKLCPQ

SEQ ID NO: 92780 - protein, 169 aa, Setaria italica
  Transcript Sequence Number=SeqID_26806
  Gene Ontology: Mol. function=binding; Cellular component=nucleus; Biological process=mitotic chromosome condensation
  Homolog annotation: Hit_ID=B9H949; Match level="QueryCoverage=100%, HitCoverage=12%, E-value=3e-77, Identity=79%"; Hit description =Condensin complex components subunit
TDVENTILLLMRCRQFQIEGSEAALRKMLPLVFSQDKSIYEAVESAFITIYTRKSATETAKSLLNLAIDCSIGDLAALECLVSSLVSKAEISSSTVSALWDYFCFNISGVKPVQSRGALSILCMAAKSSPSILGTHLQDIIDIGFGRWAKEEPLLARTACLALQRLSEE

SEQ ID NO: 92781 - protein, 93 aa, Setaria italica
  Transcript Sequence Number=SeqID_26807
  Subcellular localization annotation: CTP_CleavageSite=65; ConfidenceScore=5.87e-01
APAPRPTPRRCSPRPSPLHPPQQPPRPPPRSSLGLSRPGPQGASRGGPNRMNLMMSGRAEVLRVCVASFPEILLFRCGGLIDFNSPSGRVHEI

SEQ ID NO: 92782 - protein, 98 aa, Setaria italica
  Transcript Sequence Number=SeqID_26808
  Gene Ontology: Mol. function=protein binding; Biological process =apoptosis
  Homolog annotation: Hit_ID=Q2R0G2; Match level="QueryCoverage=98%, HitCoverage=7%, E-value=2e-17, Identity=52%"; Hit description =Leucine Rich Repeat family protein, expressed
RYQVHFCSNLVGIRKVAAELVGGDQLPGGISAILKKCLWDSFATKMFLHALYANPHRSDAELERLMLGLRYSSSVSNARRMVQFCYEDLPRQYQSCLM

SEQ ID NO: 92783 - protein, 256 aa, Setaria italica
  misc_feature (88)..(88): Xaa can be any naturally occurring amino acid
  Transcript Sequence Number=SeqID_26809
  Gene Ontology: Mol. function=pyridoxal phosphate binding; Cellular component=cellular_component; Biological process=Mo-molybdopterin cofactor biosynthetic process
  Homolog annotation: Hit_ID=Q655R6; Match level="QueryCoverage=100%, HitCoverage=30%, E-value=1e-120, Identity=83%"; Hit description =Molybdenum cofactor sulfurase
RAADFKRLEGMVYLDHAGAALYSEAQMANVAKDLMSNVYGNPHSQSDSSMATSDLVTSVRHQVLKYFNASPRDYKCIFTSGATAALKXLVGECFPWSRESCYMYTMENHNSVLGIREYALSKGATVSAVDVEEVTDPSKNLGSDSLFNISKHSNQRRGDDVLLHNYQNGSLTAISGNNLNLFAFPSECNFSGHKFNLSLVKLIKERKFLSASQQQGRWMVLIDAAKGCTTEPPNLTVCPADFVVCSFYKIFGYPTG

SEQ ID NO: 92784 - protein, 109 aa, Setaria italica
  Transcript Sequence Number=SeqID_26810
  Gene Ontology: Mol. function=kinase activity
  Homolog annotation: Hit_ID=Q6UC87; Match level="QueryCoverage=66%, HitCoverage=20%, E-value=2e-12, Identity=52%"; Hit description =Putative calcium-dependent protein kinase CPK1 adapter protein 2
MEERAGPDRCHAPAGECEWREELRQQQSQVDALRERLVEVKVGMRCSEGDSRRELDHLCRRVKTIATLLAYLKSKARIMAIPHLAHTSCGTSPAGPGPGALGPIRQRHA

SEQ ID NO: 92785 - protein, 165 aa, Setaria italica
  Transcript Sequence Number=SeqID_26811
DLVGKRRKGKGDGDDKQLAVEEPNVGGGAAAADPAGGGAAVGAGASPWRKTTPPPAAGEAAVMGAESWPALEEARQKVAPESPAKAGAGNAVGGDLAKGPQGSPPPPPPSQVASRAHKFDGHGNPNRNHQAHHKNGPKRRFPAVNGAPSYPPAMQYHQHPGQPYF

SEQ ID NO: 92786 - protein, 284 aa, Setaria italica
  misc_feature (217)..(217): Xaa can be any naturally occurring amino acid
  Transcript Sequence Number=SeqID_26812
MGNIVNTLKRFSSNDATAIPAQGCSDLSIGTSTSRLDKCTYIGNGISATGETATASKRCSINGQKDFCEEVANEGMHMTAGSTLTNRCLGAIDLLSLPMVHTRPSGSEEGNKDGETSNGTVQTDARELGSVDHYEKSGLIYSQIAGHMFHSLEDESTETPRSLVLDISKDSLCKVSAEGNSFRNPNLADDVENSPATDAHRGKELILHRVSPTDGLXDRNACEELADAALNSCCECSAEVSLDGQRHEQRTQHKSLNYVVNAVLRFHWMGQSMNQRRSNEITKI

SEQ ID NO: 92787 - protein, 254 aa, Setaria italica
  Transcript Sequence Number=SeqID_26813
TLVVKLFNSLPLCASVAGLFDRNACEELADAALNSCCECSAEVSLDGQRHEQRTQHKSLNYDAVPIEVITASANLDVSNPKSSLKGQAKQKRTPSLKGRAKRKRTTEASSQMLVPNENTGISIPSDLICLEIEKQPTSPMVKRSSGDKVLQGTPRSRMTKTPVSYVHQSPLTGSKSKAPSISTPESVNVKRSRSGRLIVPRLDPGSQNIIYDPDGRICGITNFEAQFPKGISSEPPSKRRSRRFSADHKRLLRF

SEQ ID NO: 92788 - protein, 47 aa, Setaria italica
  Transcript Sequence Number=SeqID_26814
NLILFGPALQQLQRYSPSYIANRVCIFDKSDLSILVICYRCCLNKLT

SEQ ID NO: 92789 - protein, 105 aa, Setaria italica
  Transcript Sequence Number=SeqID_26815
  Gene Ontology: Mol. function=magnesium ion binding; Cellular component=integral to membrane; Biological process=photosynthesis, light harvesting
  Homolog annotation: Hit_ID=C1K5B8; Match level="QueryCoverage=86%, HitCoverage=31%, E-value=1e-40, Identity=91%"; Hit description =Chlorophyll a-b binding protein
  Subcellular localization annotation: CTP_CleavageSite=51; ConfidenceScore=5.84e-01
MSSLPPLVSPSPQDQQAAMVMASSSGLRSCSAVGVPSLLAPSSRSGRLPFCANATTSGRVTMSAEWMPGQPRPAHLDGSSPGDFGFDPLGLATVPENFERFKESE

SEQ ID NO: 92790 - protein, 161 aa, Setaria italica
  misc_feature (146)..(146): Xaa can be any naturally occurring amino acid
  Transcript Sequence Number=SeqID_26816
  Gene Ontology: Mol. function=microtubule motor activity; Cellular component=microtubule associated complex; Biological process =microtubule-based movement
  Homolog annotation: Hit_ID=Q10SR0; Match level="QueryCoverage=98%, HitCoverage=25%, E-value=2e-69, Identity=84%"; Hit description =Kinesin motor protein, putative, expressed
IPYRNSKLTHLLQDSLGGDSKALMFVQISPSDSDVSETLSSLNFASRVRRIELGPAKKQVDTVELQKTKQMLERTKQEVRLKDDSLRKLEENLQNFETKAKGKEQLCKNLQEKVKELEGQLDSKAHSQMTSEKQQRQLSGKLKEKXKKCVTVLQQKIVELE

SEQ ID NO: 92791 - protein, 104 aa, Setaria italica
  Transcript Sequence Number=SeqID_26817
MAPWSGLWGGKAGGDAYRGTPVVVKMENPNWSISEISSPEDDDEEILAAGARRKGGRTKNAKQIRWVLLLKAHRAAGCLASLASAAVALGGAARRKGWPAGRTD

SEQ ID NO: 92792 - protein, 183 aa, Setaria italica
  misc_feature (95)..(95): Xaa can be any naturally occurring amino acid
  Transcript Sequence Number=SeqID_26818
  Gene Ontology: Mol. function=cinnamyl-alcohol dehydrogenase activity; Biological process=oxidation reduction
  Homolog annotation: Hit_ID=A5A5Y7; Match level="QueryCoverage=100%, HitCoverage=64%, E-value=6e-59, Identity=65%"; Hit description =Cinnamyl alcohol dehydrogenase (Fragment)
  Pfam annotation: Domain name=ADH_N; Domain location=2-94; Score=49.8; E_value=1.1e-11; Accession=PF08240.4; Description=Alcohol dehydrogenase GroES-like doma
NEWGNAMYPVVPGHEVVGVVTDVGTGVTKFKAGDTVGVGYFVDSCGACESCGTGHENYCPNLVLASNGVDSDGATTKGGFSDVVVVSKDYVVRVXPESLPPDGAAPLLCAGVTVYSPMMQYGLNEPGKHLGVVGLGGLGHMAVKFGKAFGMTVTVISSSPGKREEALGRLGADAFLVSHDAAQ

SEQ ID NO: 92793 - protein, 273 aa, Setaria italica
  misc_feature (262)..(262): Xaa can be any naturally occurring amino acid
  Transcript Sequence Number=SeqID_26819
  Homolog annotation: Hit_ID=Q56X72; Match level="QueryCoverage=45%, HitCoverage=24%, E-value=5e-12, Identity=36%"; Hit description =Reticulon-like protein B21
AVTTTTTTTTAVVARRAVARVTSPREGAPAAAVGGGEVKEVVVVEVHKAAPEEEEAKGVSEEPVEEELDDGVDELDDEELETEEEEEKEMLDQDHMAIDDDETALHQVDDDDQDLEPPTKARIKPTLSVEDERAANPEPVKPPPEKKLASAIDLRAINPESMTPPSVEKKTTPIVVHRMTNFETAKPSPEKKSLPAIARRIPKQEPVSTPPVEEYEEIQGRPSQPSRSHERMQNIVNLVMWRDVSKSALVFGLGTFLLISSXYAKDLNFNTIT

SEQ ID NO: 92794 - protein, 185 aa, Setaria italica
  Transcript Sequence Number=SeqID_26820
  Gene Ontology: Mol. function=protein serine/threonine kinase activity; Biological process=protein amino acid phosphorylation
  Homolog annotation: Hit_ID=Q84ZH4; Match level="QueryCoverage=100%, HitCoverage=27%, E-value=6e-74, Identity=69%"; Hit description =Putative receptor kinase Lecrk
  Subcellular localization annotation: CTP_CleavageSite=71; ConfidenceScore=5.11e-01
AKPSKPLISTAYDLSSVLTDVARVGFSSATGSFNSRHYVLGWSFAMDGPAPAIDISKLPKLPRFGPKHRARLAEIVPPVATAGLILSVGAIVVLLVRRRLRYSEVQEDWEVEFGPHRFSYKDLFNATEGFKNKNLLGVGGFGRVYKGVLPGSKMEIAVKKVSHDSKQGMKEFIAEVVSIGRLQHR

SEQ ID NO: 92795 - protein, 114 aa, Setaria italica
  Transcript Sequence Number=SeqID_26821
  Subcellular localization annotation: CTP_CleavageSite=45; ConfidenceScore=5.88e-01
SPASSTSSSTSSSSSSSSRRSLSAQRTRASTPPPQHSTSPTTTASAAAAAAAATATATTMRSLSVSFQGESFFYKTSRAPRASSPSSPAARRGPTPERRKSVSSVPEAENARPQ

SEQ ID NO: 92796 - protein, 94 aa, Setaria italica
  Transcript Sequence Number=SeqID_26822
PDPPSRRLLPVQALLSRTEQSFFLPPFGRVVVVDYLRHHWWSVGPYSFVMDSIGFCMCIMLLLLLHVHAFMSDVPMAVRCIAFWRVSEILLVVC

SEQ ID NO: 92797 - protein, 244 aa, Setaria italica
  Transcript Sequence Number=SeqID_26823
  Gene Ontology: Mol. function=acyltransferase activity; Cellular component=integral to membrane; Biological process=phospholipid biosynthetic process
  Homolog annotation: Hit_ID=Q2QZN3; Match level="QueryCoverage=89%, HitCoverage=41%, E-value=1e-103, Identity=84%"; Hit description =Acyltransferase family protein, expressed
  Pfam annotation: Domain name=Acyltransferase; Domain location=10-128; Score=25.4; E_value=4.5e-06; Accession=PF01553.13; Description =Acyltransferase
TPILAATGMSWRLKGGRPALPSGGRGQLFACNHRTLIDPVYVSVALDRQVRAVSYSLSRLSELISPIGRTVRLTRDRRSDGAVMARLLAGGDLVVVCPEGTTCREPYLLRFSPLFTELSDDVVPVGVAVETSMFYATTAGGLKCFDPLYYMANPRMCYTVQFLEKVDTSPARTGAAPSTDVANLVQRRMGDALGYGCTMLTRKDKYLMLAGNDGVVRSTDDKSAAGAPAPAGKKKGDKSTEKSN

SEQ ID NO: 92798 - protein, 124 aa, Setaria italica
  Transcript Sequence Number=SeqID_26824
  Subcellular localization annotation: CTP_CleavageSite=25; ConfidenceScore=5.47e-01
GGAANRASSRKRWQAHGRGTAGSCKGAARRRWRPGWRHPSGAGARSSPPLLPAAAHTFPRSTASLASGVASASHPPNPRLPRPGSRCDSRQRMIWAVTTASEQSPGGRKGGKDGDDGGATQKTG

SEQ ID NO: 92799 - protein, 192 aa, Setaria italica
  Transcript Sequence Number=SeqID_26825
  Gene Ontology: Mol. function=transferase activity
  Homolog annotation: Hit_ID=B9SJZ3; Match level="QueryCoverage=90%, HitCoverage=74%, E-value=6e-40, Identity=33%"; Hit description =Pentatricopeptide repeat-containing protein, putative
  Pfam annotation: Domain name=PPR; Domain location=129-163; Score =44.6; E_value=3.9e-10; Accession=PF01535.12; Description=PPR repeat
  Pfam annotation: Domain name=PPR; Domain location=24-58; Score=37.5; E_value=5.4e-08; Accession=PF01535.12; Description=PPR repeat
  Pfam annotation: Domain name=PPR; Domain location=59-93; Score=47.0; E_value=7.2e-11; Accession=PF01535.12; Description=PPR repeat
  Pfam annotation: Domain name=PPR; Domain location=94-128; Score=45.6; E_value=2e-10; Accession=PF01535.12; Description=PPR repeat
  Pfam module annotation: Pfam domain module=PPR::PPR::PPR::PPR; Domain location=129-163::24-58::59-93::94-128
FFVFFFFTFLFLFLVTDGLQPDFITYTCLIHAHCERGLLREAIELLGNMISDQFSPSAVTYTFLIHAYCRRGNLYSAYGWFRKMLEEGVEPDEITYNVLIHALCRTGRTQLAYRHFHEMLERGLIPNRCTYTFLIYGNCREGNWEDAMRLYFEMHQNGIHPDDCTHNALFKGFDEGRMHHAIEYLENIVLGE

SEQ ID NO: 92800 - protein, 151 aa, Setaria italica
  misc_feature (88)..(88): Xaa can be any naturally occurring amino acid
  misc_feature (115)..(115): Xaa can be any naturally occurring amino acid
  misc_feature (122)..(122): Xaa can be any naturally occurring amino acid
  misc_feature (136)..(136): Xaa can be any naturally occurring amino acid
  Transcript Sequence Number=SeqID_26826
  Subcellular localization annotation: CTP_CleavageSite=76; ConfidenceScore=5.53e-01
MAADSSMGFHQGITASMYNHHMLSFQSNSDVGIGGGATGGMVMPPRSVSGSSSNAGLFLSSNTGGTGNASGVGPSRSSSGDGFRGTGXSPKYRFVTGSPWDWTDHELAILKEGLXRYAREPXIMRYIKIAAMLPNXTIRDVALRCWWCTGK

SEQ ID NO: 92801 - protein, 137 aa, Setaria italica
  Transcript Sequence Number=SeqID_26827
LLPPAAAPPALLLGCPPQIATPHESVAAAWLVTEVRRWQIFPSCFCRGCGAQFLRLNCGGATNEVWLAVAAKQTRPGSSTSAASGHRCKKISCGTVESDDIGIQARPLEAAVLEGDRRCCSGDHWCWSSPTQLQGDR

SEQ ID NO: 92802 - protein, 92 aa, Setaria italica
  Transcript Sequence Number=SeqID_26828
  Gene Ontology: Mol. function=transcription regulator activity; Cellular component=nucleus; Biological process=regulation of transcription
  Homolog annotation: Hit_ID=B9RZS9; Match level="QueryCoverage=44%, HitCoverage=18%, E-value=8e-10, Identity=70%"; Hit description =Transcription factor, putative
LVKAGGKIRRRHRRPNKSSKAASFSQEEEGRGKVQERLRVLGRLVPGCRKLPAPDLLEEAVDYVAALQMQVSTMRALADALAAAQLSDDAGA

SEQ ID NO: 92803 - protein, 69 aa, Setaria italica
  Transcript Sequence Number=SeqID_26829
AEAGSWFMEFLEAALETGLKKSKASATGDGRKQSSCSCPQSLMLRVINWVEMEQSGGDSSGRKPAHPRA

SEQ ID NO: 92804 - protein, 108 aa, Setaria italica
  Transcript Sequence Number=SeqID_26830
QKIKTIYNLKQMEHYARAGGVESQAETQHTPPRQAKEHGGDALSKQSFHFTNNTRNTSRSKNSGESSMIYSFCYKRKGAEEHGWPPERALIIHQGLAADVKASAFSFS

SEQ ID NO: 92805 - protein, 91 aa, Setaria italica
  Transcript Sequence Number=SeqID_26831
  Gene Ontology: Mol. function=oxidoreductase activity; Cellular component=extracellular region; Biological process=oxidation reduction
  Homolog annotation: Hit_ID=Q2QYS3; Match level="QueryCoverage=100%, HitCoverage=16%, E-value=2e-24, Identity=63%"; Hit description =Laccase-23
  Pfam annotation: Domain name=Cu-oxidase; Domain location=1-91; Score =50.9; E_value=4.9e-12; Accession=PF00394.14; Description=Multicopper oxidase
IPVVAGETSLLRIINAAMNTELFVSLAGHKMTVVAADAMYTKPFETTVILLGPGQTTDVLVTAHAAPGRYYLAARAYASAQGVPFDNTTAT

SEQ ID NO: 92806 - protein, 156 aa, Setaria italica
  Transcript Sequence Number=SeqID_26832
  Gene Ontology: Cellular component=plasma membrane
  Homolog annotation: Hit_ID=B9RS23; Match level="QueryCoverage=100%, HitCoverage=38%, E-value=1e-34, Identity=47%"; Hit description=Ice binding protein, putative
  Pfam annotation: Domain name=PH_2; Domain location=75-156; Score =87.5; E_value=4.9e-23; Accession=PF08458.2; Description=Plant pleckstrin homology-like region
IGASHDQILAAIHSAVNAQTSGDVMALTAGAATALRGAAMLRARLHKEIQATALPGDGREPERDISPLVFVSRGGELLKRTRQGILHWKLVTVYINSSFQVVLKMQSAHMAGTFIKTKKCVILDVCSEIPAWAGRELEDGSHKRGYFGIRTVERVI

SEQ ID NO: 92807 - protein, 122 aa, Setaria italica
  Transcript Sequence Number=SeqID_26833
  Subcellular localization annotation: CTP_CleavageSite=32; ConfidenceScore=5.48e-01
SRVPSEPWSCMLTACSHCLTPSRFLPPPSKAKAGARPPATATGQQRGAAGCAAANPSTYRSNAGCCAQRTRAETATAAVTATATRRFAAAALLGCALPPKKTMVVPLFICCGSPAACGFCPV

SEQ ID NO: 92808 - protein, 106 aa, Setaria italica
  Transcript Sequence Number=SeqID_26834
  Gene Ontology: Mol. function=hydrolase activity, hydrolyzing O -glycosyl compounds; Cellular component=cell wall; Biological process= carbohydrate metabolic process
  Homolog annotation: Hit_ID=C0IRI0; Match level="QueryCoverage=100%, HitCoverage=35%, E-value=3e-36, Identity=65%"; Hit description =Xyloglucan endotransglucosylase/hydrolase 7
  Pfam annotation: Domain name=Glyco_hydro_16; Domain location=1-92; Score=-11.8; E_value=4.8e-06; Accession=PF00722.13; Description =Glycosyl hydrolases family 16
LHTNIFANGSGGREVQYRLWFDPTQDFHTYSIVWNSDEILILVDNMAIRRFKNHWDAGVPFPVYQPMRLNGVLWDADGWATQGGRVKTDWTQAPFTAYFRNYRASG

SEQ ID NO: 92809 - protein, 783 aa, Setaria italica
  misc_feature (14)..(14): Xaa can be any naturally occurring amino acid
  misc_feature (581)..(581): Xaa can be any naturally occurring amino acid
  misc_feature (612)..(612): Xaa can be any naturally occurring amino acid
  Transcript Sequence Number=SeqID_26835
  Gene Ontology: Mol. function=hydrolase activity; Cellular component =chloroplast
  Homolog annotation: Hit_ID=Q6ER78; Match level="QueryCoverage=51%, HitCoverage=81%, E-value=0.0, Identity=90%"; Hit description =Putative metallo beta subunit lactamase
  Pfam annotation: Domain name=Lactamase_B; Domain location=7-213; Score=74.8; E_value=3e-19; Accession=PF00753.19; Description=Metallo- beta-lactamase superfamily
  Pfam annotation: Domain name=RMMBL; Domain location=344-384; Score =42.4; E_value=1.8e-09; Accession=PF07521.4; Description=RNA -metabolising metallo-beta-lactamase
  Pfam module annotation: Pfam domain module=Lactamase_B::RMMBL; Domain location=7-213::344-384
GGLGEIGMNCMLVXGNYDRYILIDAGVMFPDYDEFGVQKIIPDTTFIKKWSHKIEAVIITHGHEDHIGALPWVIPALDSTTPIFASSFTMELIKKRLKEFGIFLSSRLKVLRIKKRFQAGPFEVEPIRVTHSVPDCCGLVLRCGDGIIFHTGDWKIDESPVDGKIFDREALEELSKEGVTLMMSDSTNVLSPGRSISESVVAGSLLRHISEAKGRVITTQFASNIHRIGSVKAAADLTGRKMVFVGMSLRTYLEAAFKDGKAPLDPSTLVKVEDMDAYAPKDLLVVTTGSQGEPRAALNLASYGGSHALKLSKEDVLLYSAKVIPGNETRVMKMMNRLTDLGPKIIMGKDSGLHTSGHAYRDELEEVLRIVKPQHFLPVHGELLFLKEHELLGRSTGIRHTTVIKNGEMLGVSHLRNRRVLSSGFVSLGKEDFQLMYSDGDKAFGTSTDLCIDERLRIASDGIIFVSMEIIRPQKEHASTQSGLKGKFKITTRCLWLDNGRLLDALYKAAHAALSSCPVNCPLSHMERMVAEILRKMVRKYSGKRPDVIAVATENTTAGFSEHLEAKSSGNFGPSSATSHXAGVQLGVLKAVIKHIQITQTLRLKRPFLRLXSTTPDDATTSSNGEAFFSSDLHQPKTLEHFWESFKSPTAVKIARIVNGGNKQNLGKIGILGKDPTQSAPAPVKSSKKNKWKPEEIKSLIQMRGEMNEKFQSVKGRMVLWEEISGSLMNQGISRTPAQCKSLWTSLVQKYEESKKDEESMKTWPYFSDIDRILSCEGEMATK

SEQ ID NO: 92810 - protein, 56 aa, Setaria italica
  Transcript Sequence Number=SeqID_26836
QNHGFERNLNSGDALFFTLLLHTISHFPSLTWQHSLLQKFVVETKLKTFEEHDLEG

SEQ ID NO: 92811 - protein, 299 aa, Setaria italica
  Transcript Sequence Number=SeqID_26837
  Gene Ontology: Mol. function=carbohydrate binding; Biological process= carbohydrate metabolic process
  Homolog annotation: Hit_ID=B6SPF9; Match level="QueryCoverage=98%, HitCoverage=93%, E-value=1e-149, Identity=85%"; Hit description =Apospory-associated protein C
  Pfam annotation: Domain name=Aldose_epim; Domain location=1-277; Score=232.0; E_value=1.5e-66; Accession=PF01263.12; Description =Aldose 1-epimerase
MTLLVCKLFNSNNCYVYLYGGQVTFWKNNFGHQLLFVSNKATFKPPKAIRGGIQICFPQLGSHGALEQHGFARNQYWSVDESPPPFPVATSNCHIDLILKSSQEDLKIWPHSYEFRLRVALSPRGDLILTSRIKNVSSDGKPFQFTFAYHTYFSVSDISEVRVEGLETLDYLDNLQSKNRCTEQGDAVVFESEVDKIYLSAPPKIVIIDHEKKRTLVLRKEGLPDVVVWNPWDKKAKAMPDFGDDEYKNMLCVGAAAIEKPITLKPGKEWLGTQEISAVPSSYSSGQLDPEVIRRMHTI

SEQ ID NO: 92812 - protein, 296 aa, Setaria italica
  Transcript Sequence Number=SeqID_26838
  Gene Ontology: Mol. function=receptor activity; Cellular component =anchored to membrane; Biological process=cell wall catabolic process
  Homolog annotation: Hit_ID=Q8H8C7; Match level="QueryCoverage=93%, HitCoverage=77%, E-value=1e-101, Identity=66%"; Hit description =Chitin elicitor-binding protein
  Pfam annotation: Domain name=LysM; Domain location=118-159; Score =35.4; E_value=2.2e-07; Accession=PF01476.12; Description=LysM domain
  Pfam annotation: Domain name=LysM; Domain location=54-100; Score =37.4; E_value=5.8e-08; Accession=PF01476.12; Description=LysM domain
  Pfam module annotation: Pfam domain module=LysM::LysM; Domain location=118-159::54-100
PNTTTTLAELLGANNLAADTSPSAPIAAEAIVRIPFRCRCGSNMVGQSADGPIYVVQPQDGLDHIARDVFDAFVTYQEIATANSIPDPNKINVGQKVRIPLPCSCDPVDGVTVMHFAYSVAKGDETSGIAARFGVNQQALLNLNKLTDPLKQGQILDVPLPVCRSSISNTSADHSLLLPNGTYALTAQNCIKCSCNANNYEQLDCSPVQDRRCPALQPCDGGLKLGSTNGTGCESKMCAYTGYSNTTSLSIHTALVTANETACQQKGGAARSEFAGSMWRMSAISFHMVLILICFL

SEQ ID NO: 92813 - protein, 149 aa, Setaria italica
  Transcript Sequence Number=SeqID_26839
  Gene Ontology: Mol. function=catalytic activity; Cellular component =peroxisome; Biological process=metabolic process
  Homolog annotation: Hit_ID=Q69RG7; Match level="QueryCoverage=84%, HitCoverage=22%, E-value=2e-24, Identity=55%"; Hit description=4 -coumarate--CoA ligase-like 7
  Subcellular localization annotation: CTP_CleavageSite=51; ConfidenceScore=5.30e-01
LVLAPPSLDVPVVYLAVLSIGAIVSPVSPLSTAADVARAVGLCNPSVVFATAATVGKVPAARKMTVVLLDSPQFESFLHGHELAWADELPPPPVEVRQSDVAVISYSSGTTGRTKAVAQSHRRLMASSLHGPRGAAAGARRRARGDAPG

SEQ ID NO: 92814 - protein, 138 aa, Setaria italica
  Transcript Sequence Number=SeqID_26840
  Homolog annotation: Hit_ID=B9RDF9; Match level="QueryCoverage=97%, HitCoverage=4%, E-value=1e-34, Identity=53%"; Hit description =Nucleotide binding protein, putative
VKHAFEEDWSCIADLGESWKYRSRLWYGVGIPPKSDIFGGGGSGWESWKSVLEKDSNGIWIEFPLVKKSVAVLQALLLDESGLGGGLGIGGGSGPGMGVMTALYQLLDSDQPFLCMLRMVLVSMREDDKGEGDAFMKD

SEQ ID NO: 92815 - protein, 235 aa, Setaria italica
  Transcript Sequence Number=SeqID_26841
GLGLDNRCSFVASYLLDGEASEADGLISMSNFRVLCTFSRGVVTQAAMFAVNSTWSKKSIDHIAPSSVLSRLFGRGGDSWYFYGGDNTLISLDGSTGEFSSSVLPAIEDWDVLILGSRCFVTDGRDGKPRIFTVVKNTMKVFARLNGGEWTLDKRVLLSEATRRLKAYQPSSFSRSPSILTSGAGLVVLSPQYGGIWPFSIDLDTMDSAPVTRDMGKMVYRCELPWPPALHTCLS

SEQ ID NO: 92816 - protein, 89 aa, Setaria italica
  Transcript Sequence Number=SeqID_26842
  Gene Ontology: Mol. function=protein tyrosine kinase activity; Biological process=protein amino acid phosphorylation
  Homolog annotation: Hit_ID=B9S8A7; Match level="QueryCoverage=60%, HitCoverage=7%, E-value=4e-10, Identity=55%"; Hit description =Receptor kinase, putative
  Pfam annotation: Domain name=LRR_1; Domain location=29-52; Score=8.1; E_value=8.5; Accession=PF00560.25; Description=Leucine Rich Repeat
  Pfam annotation: Domain name=LRR_1; Domain location=5-27; Score=9.7; E_value=4.3; Accession=PF00560.25; Description=Leucine Rich Repeat
  Pfam module annotation: Pfam domain module=LRR_1::LRR_1; Domain location=29-52::5-27
RRLARVERLDLSGNAMQGRFPGDLPPLGGVRSLNVSYNRFSGVVDSGTVKKFGHSAFVHAGNASLVFSEHSTATAPPRRPSPSPPQREK

SEQ ID NO: 92817 - protein, 176 aa, Setaria italica
  misc_feature (5)..(5): Xaa can be any naturally occurring amino acid
  misc_feature (143)..(143): Xaa can be any naturally occurring amino acid
  Transcript Sequence Number=SeqID_26843
  Gene Ontology: Biological process=intracellular signaling cascade
  Homolog annotation: Hit_ID=Q9LDG2; Match level="QueryCoverage=59%, HitCoverage=22%, E-value=8e-33, Identity=60%"; Hit description =F28L1.1 protein
QDGYXGNEYSSSVQAAYAYQRGEQRESSDHSAGKNNSVAAPANPVKQDPNLIEEAVASKMDSSQIDAVHCDVYDGGWVFDETYPLYTSDSCPFIDEGFSCGANGRMDDNYMKWRWQPKNCNIPRFDARRMLEMLRGKRLSCFXGDSINRNQWESMMCLLRMAVSDPARIHETRGRK

SEQ ID NO: 92818 - protein, 366 aa, Setaria italica
  Transcript Sequence Number=SeqID_26844
  Gene Ontology: Mol. function=cysteine-type peptidase activity; Cellular component=nucleus; Biological process=proteolysis
  Homolog annotation: Hit_ID=B6TU07; Match level="QueryCoverage=98%, HitCoverage=63%, E-value=1e-134, Identity=65%"; Hit description =Cysteine-type peptidase
  Pfam annotation: Domain name=Peptidase_C48; Domain location=118-326; Score=121.6; E_value=2.6e-33; Accession=PF02902.11; Description=Ulp1 protease family, C-terminal catalytic domain
TIFTATNSFHEEMDVDTSSNVEKISPDDASNNNGHNGMCEAAPTPSRKRKGADPANFSMRLRSRKEEVVVLDGDAPHPDSVEETSNNWDAKKLYYPSREHPNSVEISSGDIRCLQPESLLSSPIMNFYIMHLQGPMLSIIRPRGDYHIFNTYFFRKLEAMTSKEDKTTYFLKLRRWWKGIDIFEKAYVLLPVHAETHWSLVIICMPAKEDQTGPIILHLDSLKFHSSRLIFNVISRFLKEEWNYLNENVSSAECPLQETVWKNFPRKIEKKAIEVPQQENDYDCGLFVLYYMQRFIQEAPERLQKKDLSMFGKRWFRPEEPSQLRGEIRRLLQKCREAEPKTYATELCVEAEPNDVTQPNVVGAPA

SEQ ID NO: 92819 - protein, 55 aa, Setaria italica
  Transcript Sequence Number=SeqID_26845
  Gene Ontology: Mol. function=kinase activity
  Homolog annotation: Hit_ID=B6TFQ2; Match level="QueryCoverage=100%, HitCoverage=18%, E-value=1e-19, Identity=87%"; Hit description =Guanylate kinase
MLLVRIATAREEVRRMQNFDYVVVNAEGKLEEAVKQVESIIDAEKAKIHKRPVNI

SEQ ID NO: 92820 - protein, 107 aa, Setaria italica
  Transcript Sequence Number=SeqID_26846
AAQTIKTYIYKKRAEIKECIAKHHPLHTRKNGPFTFVERDFSSEFDHLVQEFREKPTNQANKRGKRRHHRSTAFAKSSSSYKLCLLQRDRDKQLTSQVAGQLAPTNG

SEQ ID NO: 92821 - protein, 44 aa, Setaria italica
  Transcript Sequence Number=SeqID_26847
MTWCNSFNDVRAVENNLVTAAAVAAAKKQQQASSHVNLIRTCPS

SEQ ID NO: 92822 - protein, 793 aa, Setaria italica
  Transcript Sequence Number=SeqID_26848
  Homolog annotation: Hit_ID=Q2HTJ8; Match level="QueryCoverage=36%, HitCoverage=30%, E-value=1e-15, Identity=29%"; Hit description=(, related)
MGKRGHRRSASQDEDNVGCVWGLMRMLYFRRDPKFLLDTKQLSGRHAFREINERGHSTQRSRDFDEIEEDGIIEQCTSQKPTVKNLMEDELGKVVLKKIPNDERRLADLENGVSLDEKSEHTNKLTEISYHQTGVSAAFTPLVDSEVLNHAEEYDLESVLADFLGEIYSCHNECPHGDCKNKNELCPSLKSLIHKKVNDLNNLPRNIGRGQPQQSNDGKQSEQNNLFNTMAAQSKQFKDALEILGSNKELFLKLLQKPNPQIVDNIQKHQNSKVASGLEPSNIPGQTNFGGRGGSNQHLLATKEQAKERKYMFFWRKGKSNRSQMPEATNGPQTVSKIVILKPNPERGIHQKAIISARPLHQQSCASDAPECSGRETSKFSIKEVKKRFRIVTGESRTERNVPPAEELRRDPRRHKDSVIAIKKDFRHGPEGSLADASASGFKNGTIPFNSSKQKQQNGSISEINGRTVAPNGASIFYEQAKRHLSEMLNDNDRSVNHPAVQVSKSLEGILSLPHCNVSTPKSSPMEKGCLDLSPDETDVCLACKVEREECTQERCQSQDDLGSISCCTSATVDDQVTVQEGYCMNEAQNGLKDVSDEPDNMYIEGIDKLDCCENTCSMQSVPAEQSIDDEHQEILEESKQEKEHSKVTPDSPESIVEKLEQQEPETPEARASTKLISDGGSEQSEEKQGKPSPVSVLESFFEGFGSPDFINKKECELHEDLQRTLCFPDDESDVKVIWEDKNVRLDYIMLVLELSELCAEQNLEVWYLEDELISPCLFEELQNQGDQTNDLK

SEQ ID NO: 92823 - protein, 231 aa, Setaria italica
  misc_feature (24)..(24): Xaa can be any naturally occurring amino acid
  misc_feature (34)..(34): Xaa can be any naturally occurring amino acid
  Transcript Sequence Number=SeqID_26849
  Homolog annotation: Hit_ID=Q2HTJ8; Match level="QueryCoverage=69%, HitCoverage=17%, E-value=2e-11, Identity=30%"; Hit description=(, related)
PEARASTKLISDGGSEQSEESKEXPSPVSVLESXFEGFGSPDFINKKECELHEDLQRTLCFPDDESDVKVIWEDKNVRLDYIMLVLELSELCAEQNLEVWYLEDELISPCLFEELQNQGDQTNDLKLLFDCICEALTGIQERYFRLSSWLSFLRHDIRTPPIGENLIIEVDKYVSGYIQYSLPSTLEQIIKRDLDVQTWMNVRSKTEGIIMEIWEFVLDELIDETVFDLWI

SEQ ID NO: 92824 - protein, 447 aa, Setaria italica
  Transcript Sequence Number=SeqID_26850
  Gene Ontology: Mol. function=importin-alpha export receptor activity; Cellular component=nuclear pore; Biological process=protein import into nucleus, docking
  Homolog annotation: Hit_ID=Q9ZPY7; Match level="QueryCoverage=91%, HitCoverage=42%, E-value=1e-100, Identity=45%"; Hit description =Exportin-2
  Pfam annotation: Domain name=Cse1; Domain location=56-419; Score =716.2; E_value=2.6e-212; Accession=PF08506.2; Description=Cse1
  Pfam annotation: Domain name=Xpo1; Domain location=1-173; Score= -19.8; E_value=0.074; Accession=PF08389.4; Description=Exportin 1 -like protein
  Pfam module annotation: Pfam domain module=Cse1::Xpo1; Domain location=56-419::1-173
  Subcellular localization annotation: CTP_CleavageSite=31; ConfidenceScore=5.18e-01
PLIQAQLSEALAAAAASDFPARWESLLPSIVSSLGTAVNAGDVPATNSLLAAAASLFSRFRNAFDNNALRLDLKYCLDIFAAPLLEVFLFASRRLQAAATTANPLELRPVFECLRLCCEIFYSLNSIDLPEFFEDNMRQWMTEFRAFLTTSYPPPVEADGAPDALRAAVCDNLQLYMEKYEEEFRGYLKEFVEAVWGLLMAQTVSPSRAQLAVTAIRFLTTVAESVHHALFGSPEAMKQICDSVVVPNLRLRDEDEELFEGNWVEYVRRDSEGSDADTLRRAACRLLRGLAANYREQVAALVSAQVQQMLAAYAADRANNWKEKDAAIYLVIALMQKPGATGGGTPVVDMESFFTSVIVPELQAPDWQSEPMLKATVLRFLKEFRDQIPKATALALLPSVVRFLTHESNVVHSYAATFIENLLIIKDAVPVPGVNTVTRSPRYVAAE

SEQ ID NO: 92825 - protein, 470 aa, Setaria italica
  Transcript Sequence Number=SeqID_26851
  Gene Ontology: Mol. function=importin-alpha export receptor activity; Cellular component=nuclear pore; Biological process=protein import into nucleus, docking
  Homolog annotation: Hit_ID=B9SBF8; Match level="QueryCoverage=100%, HitCoverage=47%, E-value=1e-140, Identity=53%"; Hit description =Importin-alpha re-exporter, putative
  Pfam annotation: Domain name=CAS_CSE1; Domain location=17-461; Score =285.7; E_value=1e-82; Accession=PF03378.7; Description=CASCSE protein, C-terminus
LTHESNVVHSYAATFIENLLIIKDAVPVPGVNTVTRSPRYVAADINPFAPQIIQNLSTALSFPDSYENPYLMKCLMRVLGIANIAGQIVHEITTRLVGILMEVCNNPKNPDFNHYLFEALAAIIGRTGEQDPALLPAFEACLFPVLQRILVEDISEFWPYAFQIFAQLLNLSRPPLSQNYMQLFGVLLSNATWDRPPCVPALVRLLRAFLRKIPNELNQEGRLPNILAISRSLLSRSSTEDSAFYMLNTLVENVGLDIMNPYISEIWSALFTRLQSRQAVKFVNSLVVFMSLVLVKYGSGVLVSSVDAIQPNLFTQILQRFWIPNLKLIKGALEVKLTAVASTKLLCESAVLLDAAAAQLWGKLLDSIVTLLSRTNQDGAQQEQNDGADAVDIQKTSGYSVSFVRLQYAGKSEDDLLKEINDPKQFLVTSLATLSAQSPGRFGPVIEQHVDPANKSVLLQLCAAYNANVV

SEQ ID NO: 92826 - protein, 86 aa, Setaria italica
  Transcript Sequence Number=SeqID_26852
  Gene Ontology: Mol. function=electron carrier activity; Cellular component=integral to membrane; Biological process=oxidation reduction
  Homolog annotation: Hit_ID=B0L4E2; Match level="QueryCoverage=100%, HitCoverage=13%, E-value=6e-36, Identity=87%"; Hit description =Respiratory burst oxidase protein D variant beta
  Pfam annotation: Domain name=NADPH_Ox; Domain location=15-86; Score =106.8; E_value=7.2e-29; Accession=PF08414.2; Description=Respiratory burst NADPH oxidase
RRLASINRHGGGGRTLDRSKSAAAHALKGLKFISKAEGAKGWEAVEERFDKLAPNGLLHRSKFGQCIGMREPEFAGELFDALSRRR

SEQ ID NO: 92827 - protein, 296 aa, Setaria italica
  misc_feature (268)..(268): Xaa can be any naturally occurring amino acid
  Transcript Sequence Number=SeqID_26853
  Gene Ontology: Mol. function=protein serine/threonine kinase activity; Biological process=protein amino acid phosphorylation
CRERRPSMADIVERLVVLSKAVSAKVWNGLADGLAVVGNPCAVVDVQRTISKRAAASSRAESERESTSALAFDDDEKEEADADALEEDQVPLVGARKSPRPLKNGIVLSEAGARERRNLLELMARIDGVAGQRFGISRARTVRATGDLIEKDAVLLLRRNKTVRVIGSEALPKSEKVSHFDVKIKHKVGKEQEKAEEVQAKAGEVQEKKEKNQEIACGTQEGSKEIVGKANKLLEETEANLDKEERIQEKKGQSLEKAESVKGNEGKXQGTVEKIRESEGEIQNKVEKIHLKSGES

SEQ ID NO: 92828 - protein, 71 aa, Setaria italica
  misc_feature (23)..(23): Xaa can be any naturally occurring amino acid
  Transcript Sequence Number=SeqID_26854
  Gene Ontology: Mol. function=6-phosphofructokinase activity; Cellular component=6-phosphofructokinase complex; Biological process=glycolysis
  Homolog annotation: Hit_ID=Q6Z522; Match level="QueryCoverage=100%, HitCoverage=13%, E-value=5e-20, Identity=69%"; Hit description =Putative diphosphate-fructose-6-phosphate 1-phosphotransferase
  Subcellular localization annotation: CTP_CleavageSite=53; ConfidenceScore=5.13e-01
MAAALKSSSSFYSTQQHQWLLSXRDQSLHGSSHANAKQCKSKKITKLAPLCVKATSSKVELDFNDPSWKQK

SEQ ID NO: 92829 - protein, 57 aa, Setaria italica
  Transcript Sequence Number=SeqID_26855
  Gene Ontology: Cellular component=intracellular; Biological process =intracellular protein transport
  Homolog annotation: Hit_ID=B6U0L8; Match level="QueryCoverage=100%, HitCoverage=8%, E-value=5e-24, Identity=98%"; Hit description=VHS and GAT domain protein
MPQSVLVERATSESLIGPDWSLNLEICDILNHDPSQAKDVVKTIKKRIGHKNSKVQL

SEQ ID NO: 92830 - protein, 685 aa, Setaria italica
  Transcript Sequence Number=SeqID_26856
  Gene Ontology: Cellular component=intracellular; Biological process =intracellular protein transport
  Homolog annotation: Hit_ID=B6U0L8; Match level="QueryCoverage=100%, HitCoverage=100%, E-value=0.0, Identity=70%"; Hit description=VHS and GAT domain protein
  Pfam annotation: Domain name=ENTH; Domain location=2-113; Score= -33.1; E_value=0.029; Accession=PF01417.12; Description=ENTH domain
  Pfam annotation: Domain name=GAT; Domain location=181-279; Score =110.6; E_value=5.3e-30; Accession=PF03127.6; Description=GAT domain
  Pfam annotation: Domain name=VHS; Domain location=1-135; Score=142.1; E_value=1.7e-39; Accession=PF00790.11; Description=VHS domain
  Pfam module annotation: Pfam domain module=ENTH::GAT::VHS; Domain location=2-113::181-279::1-135
MPQSVLVERATSESLIGPDWSLNLEICDILNHDPSQAKDVVKTIKKRIGHKNSKVQLLALTLLETLIKNCGDFVHMQVAEKDILHEMVKIAKKKPDYHVKEKILILIDTWQEAFGGARARYPQYYAAYQEMLRAGAVFPQRPESSVPIYTPPQTQPLRNYPPPALRNTDYRQDAPESSSAPEVPTLSLTEIQNARGVMDVLSEMLNAIDPNNREGLRQEVIVDLVDQCRSYKRRVVQLVNSTSDEDLLSQGLSLNDDLQRVLAKHDAIAAGIAVRVEKPKALPARADSSPTNPEVTKETDQRPSKDSSSVTPFEQLALPAPPSSSGSKSHVEPAVKPNIDLLSGDDFFKPEPVHSQAIVPVSNQPAASASSSHSTLDLLDMFSDSNAINSTSQNPSMLPMPNTNPNPSAAQAYLAPQQPVPPQQPVPPQHPVPPQHPSPYSNGLNSNTLAPYDQGSNLTSASSWNGQFAHGAIPPQQSPNYGQDEQTSDLPPPPWEAQPAESEQFHASHPGGLSVPPQFGVSQPQPVQIAQPGQQVLPSQPMPTGQPGGQFQPGLGVQQQYVTPNTPYGGMFPPVQGNQPGMYPQQMAGDMYQQQMYGGQMASYGYGQQPGGYYVPNAGYAYTSANELPQRMNGLSMQDSGLYGTGSSLQQRNRPSRPEDSLFSDLVSIAKTKPSKTASNKPGDL

SEQ ID NO: 92831 - protein, 96 aa, Setaria italica
  Transcript Sequence Number=SeqID_26857
  Subcellular localization annotation: CTP_CleavageSite=56; ConfidenceScore=5.29e-01
MDTAAFLSLSPELRDALVKVAVFVFVQGLVYLILRSSSDVFSKDGRLRSLSFRPMRSMSVRRVLAPLSDVPVGTDEPSTSPSLSSAASRRRASRED

SEQ ID NO: 92832 - protein, 133 aa, Setaria italica
  Transcript Sequence Number=SeqID_26858
  Gene Ontology: Mol. function=transferase activity; Cellular component= integral to membrane; Biological process=cell wall organization and biogenesis
  Homolog annotation: Hit_ID=Q69L19; Match level="QueryCoverage=96%, HitCoverage=18%, E-value=2e-62, Identity=86%"; Hit description =Probable xyloglucan glycosyltransferase 2
FRRPNLTVPELHVPEVEEIQGWAHLAYLTWMSFRADYIRRPIEFLSKACILLFVVQSLDRLVLCLGCFWIKLKKIKPRIEGDPFKEGSGYLHPMVLVQIPMCNEKEVYEQSISAACQLDWPRDKFLIQVLAET

SEQ ID NO: 92833 - protein, 114 aa, Setaria italica
  Transcript Sequence Number=SeqID_26859
  Subcellular localization annotation: CTP_CleavageSite=71; ConfidenceScore=5.20e-01
SAAAHSSRCFGTYDGAWHFIAYKRGGAVRQQRLGRSSAAPAARRTWLRHSAAPAQLALLRVAPDAEERRSRAADVGPHTDEPTKVLNLRCSQDPAVVSSICSCCTLYAEAACSP

SEQ ID NO: 92834 - protein, 134 aa, Setaria italica
  Transcript Sequence Number=SeqID_26860
MAPSTTSSFLAVALVMAAVLLGGGADTCHAARLLADLPMPELPGLPTLPMPEVPGMPQVPIPEVPGVPKVPEVPGVPQVPIPEVPGVPKVPEVPGVPQVPIPEVPGVPKVPQVPGVPKVPELPAVPVPGVPAGP

SEQ ID NO: 92835 - protein, 100 aa, Setaria italica
  Transcript Sequence Number=SeqID_26861
RASIQMEWDDEERQRRLDDHEGHHGEREPDAGGRRSLSLDIDRKSVQKHRLPLSSSSWRAAAASFRESLSRSLSLNQSNYDQENDDEAELKWAAVERLPT

SEQ ID NO: 92836 - protein, 177 aa, Setaria italica
  Transcript Sequence Number=SeqID_26862
  Gene Ontology: Mol. function=catalytic activity; Cellular component =plasma membrane
  Homolog annotation: Hit_ID=Q2R637; Match level="QueryCoverage=98%, HitCoverage=38%, E-value=4e-65, Identity=72%"; Hit description =Probable protein phosphatase 2C 75
KSTRALGDFCLKDFGLICVPEVTYRQITEKDEFIVLATDGVWDVLTNQEVVDVVASCSDRSFAARSVVDLANQTWRFKYPTSKTDDCAMICLFLDKEDSSAGGLSGSSLTSKGIGSSQRAPVRSRKPRLSSKRVIPEDADDGSDSNISGDERSLESFTRLNTLLALPKFGDTSPTKK

SEQ ID NO: 92837 - protein, 184 aa, Setaria italica
  Transcript Sequence Number=SeqID_26863
  Gene Ontology: Cellular component=plasma membrane
  Homolog annotation: Hit_ID=B6TT59; Match level="QueryCoverage=88%, HitCoverage=87%, E-value=1e-50, Identity=66%"; Hit description=Fiber protein Fb34
  Pfam annotation: Domain name=DUF1218; Domain location=57-154; Score =171.2; E_value=2.9e-48; Accession=PF06749.4; Description=Protein of unknown function (DUF1218)
MASIIIIAVVFVLDVLAFVLAIGAERRRSYVTYVSVDTYGRAFCVYSSDASTVYGVSALLLLLAGQAVAMVATRCFCCGRALSPGRWRAWSGICFVVCWLTFVIAELCLLAGSVRNAYHTKYIPRPSDSPPACAMLRKGVFAAGAAFTFLTALFTELHYLFYARSRAIADVPPPIVGGIGMTRM

SEQ ID NO: 92838 - protein, 123 aa, Setaria italica
  Transcript Sequence Number=SeqID_26864
  Gene Ontology: Mol. function=zinc ion binding; Biological process =regulation of transcription
  Homolog annotation: Hit_ID=A5HWF5; Match level="QueryCoverage=47%, HitCoverage=16%, E-value=2e-10, Identity=64%"; Hit description=Dof zinc finger protein 6
GGIMDSFYAPLLSSSLVPGLEELHVKAEAAGAGDHQQKAAPGDQQSGSWELPTPSSSNVDASIIASDALMAAAASMNPAVSSTSTAATTAPSSFMYWGNGGIGGAAAAWPDLANCGSSIATLF

SEQ ID NO: 92839 - protein, 84 aa, Setaria italica
  Transcript Sequence Number=SeqID_26865
SRTRLYHTEHTSHTVTHSLNTHIHGPWFAKFSCTMKTHRPQFDQHLASMKVIFPITAKIARLTAQEWVFPHSWQTSISHWIMVS

SEQ ID NO: 92840 - protein, 105 aa, Setaria italica
  Transcript Sequence Number=SeqID_26866
GAAHAVHRRAQQEELPAAAAAGPARALLAVPSSGNNNNYLPRMRRPLICFLPLIVSSFSYVPSSWRLYSSSLQSAVLNFGGCRVLRVHPFRFSAELPQHCVLFFM

SEQ ID NO: 92841 - protein, 328 aa, Setaria italica
  Transcript Sequence Number=SeqID_26867
  Gene Ontology: Mol. function=cyclin-dependent protein kinase activity; Cellular component=nucleus; Biological process=protein amino acid phosphorylation
  Homolog annotation: Hit_ID=B6TPK0; Match level="QueryCoverage=99%, HitCoverage=68%, E-value=1e-143, Identity=77%"; Hit description =CAK1AT
  Pfam annotation: Domain name=Pkinase; Domain location=16-267; Score= -15.4; E_value=1.4e-07; Accession=PF00069.17; Description=Protein kinase domain
ANLLISEDGVLKVADFGQARILQQTAPTYQDMHPHEQTSRMGPWVSQPPAVLQGAEEESPCYESDIPAGQEPETLTAADYLHELDQLRAKSSDVDKMSLQDGDASCLATCSTGDIEDDPFRSSYSYDVEGIGEDSGAFTSCVGTRWFRAPELLYGSTNYGLEIDLWSLGCILAELLNLEPIFPGISDIDQISRIINVLGDISEETFPGCSNLPDYNKIFFNKVKKPMGLEACLPNKSPSEVSIIKQLICYDPAKRASAVDLLNDPYFTEEPLPVPIEGLQIPVSKDEDDDSSMEEWGNYKDGGSDSDFDEFGSMDVTKTDKGFSIRFS

SEQ ID NO: 92842 - protein, 82 aa, Setaria italica
  Transcript Sequence Number=SeqID_26868
  Homolog annotation: Hit_ID=A8I426; Match level="QueryCoverage=92%, HitCoverage=5%, E-value=4e-26, Identity=77%"; Hit description =Required to maintain repression 1
KSWEEKKHPLSKSGKKSSHTTMLKRQSLMKLLIDKMSRDKNGESFPFDLNPQLQFIFKEMHPLVFSFGDEDLVPADKPEQDG

SEQ ID NO: 92843 - protein, 57 aa, Setaria italica
  Transcript Sequence Number=SeqID_26869
FSIVMTMLYKFTLYFESYVFFTSKLYIPVPFIKVYPPSSGVATNLHLGIHLKNMVFT

SEQ ID NO: 92844 - protein, 153 aa, Setaria italica
  Transcript Sequence Number=SeqID_26870
  Gene Ontology: Mol. function=protein serine/threonine kinase activity; Cellular component=integral to membrane; Biological process=protein amino acid phosphorylation
  Homolog annotation: Hit_ID=Q2L3U3; Match level="QueryCoverage=97%, HitCoverage=54%, E-value=4e-69, Identity=46%"; Hit description =CLAVATA-like kinase
  Pfam annotation: Domain name=LRR_1; Domain location=101-122; Score =11.2; E_value=2.2; Accession=PF00560.25; Description=Leucine Rich Repeat
  Pfam annotation: Domain name=LRR_1; Domain location=29-51; Score =15.1; E_value=0.3; Accession=PF00560.25; Description=Leucine Rich Repeat
  Pfam annotation: Domain name=LRR_1; Domain location=5-27; Score=13.6; E_value=0.77; Accession=PF00560.25; Description=Leucine Rich Repeat
  Pfam annotation: Domain name=LRR_1; Domain location=53-76; Score=2.8; E_value=89; Accession=PF00560.25; Description=Leucine Rich Repeat
  Pfam annotation: Domain name=LRR_1; Domain location=78-99; Score =13.5; E_value=0.78; Accession=PF00560.25; Description=Leucine Rich Repeat
  Pfam module annotation: Pfam domain module=LRR_1::LRR_1::LRR_1::LRR _1::LRR_1; Domain location=101-122::29-51::5-27::53-76::78-99
GSMPELTKLYLGKNRLTGGIPPELGSCEKLQLLDLGGNAFSGGIPAELGALPSLEISLNLSSNRLSGEIPSQFAGLDKLGSLDLSHNELSGSLEPLAALQNLVTLNISYNAFSGELPNTPFFQKLPLSDLAGNRHLLVGDGSDGYSRRGPSRR

SEQ ID NO: 92845 - protein, 328 aa, Setaria italica
  misc_feature (44)..(44): Xaa can be any naturally occurring amino acid
  Transcript Sequence Number=SeqID_26871
  Homolog annotation: Hit_ID=UPI0001A7B041; Match level="QueryCoverage =100%, HitCoverage=15%, E-value=1e-103, Identity=58%"; Hit description=EMB2016 (embryo defective 2016)
LWELCAISRSDSGRQALLALGYFPEAISVLLKSLSSYKDLESVXRRNGGSPLGLAIFHSAAEILEVLVADSTASSLKSWIGFAVDLHKALHSSSPGSNRKDAPTRLLEWIDAGVVYQRNGARGLLRYSAILASGGDAHLSSGNVLVSDSMDVENVVADSNSNSDGQVIDNLLGKLVADKYFDGVALCSTSVVQLTTAFRILAFISDDKAVASSLFEEGAINVIYIVLMNCKSMLERLSNSYDYLVDEGAELSSTTELLLDRTHEQAIVDLMIPSLVLLINLLHTLRETKEQYRNKKLLSSLLQLHREVSPRLAECAADLSFMFPTFAV

SEQ ID NO: 92846 - protein, 92 aa, Setaria italica
  Transcript Sequence Number=SeqID_26872
MERRGKMTEITVAGPDVAPASGSVGVAIYEVNKQAGKEPSTPGTPSPATAWRGSDGRRAEGDNVGPLPGWKVDCLCGESSLPPAVKGGFLCF

SEQ ID NO: 92847 - protein, 102 aa, Setaria italica
  Transcript Sequence Number=SeqID_26873
  Gene Ontology: Mol. function=indole-3-glycerol-phosphate synthase activity; Cellular component=chloroplast; Biological process =tryptophan metabolic process
  Homolog annotation: Hit_ID=B6UGU8; Match level="QueryCoverage=90%, HitCoverage=23%, E-value=4e-37, Identity=76%"; Hit description =Indole-3-glycerol phosphate synthase
  Pfam annotation: Domain name=IGPS; Domain location=1-102; Score= -109.9; E_value=0.00048; Accession=PF00218.13; Description=Indole-3 -glycerol phosphate synthase
ILTDEKHFLGSFENLETIRNSGVNCPLLCKDFIIDIWQIYYARSKGADAILLIAAVLPDLDIKYMLRVCRSLGMTALVEVHDVKEVWERLQVRWHLNTIKEE

SEQ ID NO: 92848 - protein, 165 aa, Setaria italica
  misc_feature (85)..(85): Xaa can be any naturally occurring amino acid
  Transcript Sequence Number=SeqID_26874
  Gene Ontology: Mol. function=aspartic-type endopeptidase activity; Cellular component=cytoplasm; Biological process=protein modification process
  Homolog annotation: Hit_ID=B9SX98; Match level="QueryCoverage=60%, HitCoverage=24%, E-value=7e-43, Identity=81%"; Hit description=DNA -damage inducible protein ddi1, putative
  Pfam annotation: Domain name=Asp_protease; Domain location=6-82; Score=67.9; E_value=3.8e-17; Accession=PF09668.2; Description =Aspartyl protease
FAVCRYIITSSNALSSLLRLLDQRYRGVAVGVGQSEILGRIHVAPIKIGQQFYPCSFTVLDAPNMEFLFGLDMLRKHQCMIDLKXNVLRVGGGEVSVPFLQEKDIPAHIRDEEKLSKLASSLGQATGESSKAREGTPDLPQRTPPAGAPVANPPPGEVKITFCTC

SEQ ID NO: 92849 - protein, 148 aa, Setaria italica
  Transcript Sequence Number=SeqID_26875
  Gene Ontology: Mol. function=aspartic-type endopeptidase activity; Biological process=protein modification process
  Homolog annotation: Hit_ID=Q8LF25; Match level="QueryCoverage=100%, HitCoverage=37%, E-value=8e-47, Identity=60%"; Hit description=DNA -damage inducible protein DDI1-like
  Pfam annotation: Domain name=ubiquitin; Domain location=6-75; Score =64.0; E_value=5.6e-16; Accession=PF00240.15; Description=Ubiquitin family
MKVTVMTADEQILTLDVDPDESVENLKALLEVETRVPLRQQQLHFNGKEMQNSEKLSSVGVQDGDLVMMLPSNDRASQDVVKVNPDGSAANPQAFQQHVRGDSQLMAQLLQNDPQLAQAILGDDINELQNILRSRHQQRMELKRKQEE

SEQ ID NO: 92850 - protein, 320 aa, Setaria italica
  Transcript Sequence Number=SeqID_26876
  Gene Ontology: Mol. function=aspartic-type endopeptidase activity; Cellular component=cytoplasm; Biological process=protein modification process
  Homolog annotation: Hit_ID=B9SX98; Match level="QueryCoverage=96%, HitCoverage=74%, E-value=1e-130, Identity=75%"; Hit description=DNA -damage inducible protein ddi1, putative
  Pfam annotation: Domain name=Asp_protease; Domain location=82-205; Score=297.9; E_value=2.2e-86; Accession=PF09668.2; Description =Aspartyl protease
  Pfam annotation: Domain name=RVP_2; Domain location=97-217; Score= -60.2; E_value=0.056; Accession=PF08284.3; Description=Retroviral aspartyl protease
  Pfam annotation: Domain name=UBA; Domain location=281-317; Score =34.8; E_value=3.4e-07; Accession=PF00627.23; Description=UBATS-N domain
  Pfam module annotation: Pfam domain module=Asp_protease::RVP_2::UBA; Domain location=82-205::97-217::281-317
KTSLVRRTYLDDSQLMAQLLQNDPQLAQAILGDDINELQNILRSRHQQRMELKRKQEEELALLYADPFDVEAQKKIEAAIRQKGIDENWEAALEHNPEAFARVVMLYVDMEVNGVPLKAFVDSGAQSTIISKSCAERCGLLRLLDQRYRGVAVGVGQSEILGRIHVAPIKIGQQFYPCSFTVLDAPNMEFLFGLDMLRKHQCMIDLKDNVLRVGGGEVSVPFLQEKDIPAHIRDEEKLSKLASSLGQATGESSKAREGTPDLPQRTPPAGAPVANPPQGGDFEAKVTKLAELGFDRASVVQALKLFNGNEEQAAAFLFGG

SEQ ID NO: 92851 - protein, 117 aa, Setaria italica
  Transcript Sequence Number=SeqID_26877
  Gene Ontology: Mol. function=triacylglycerol lipase activity; Biological process=lipid metabolic process
  Homolog annotation: Hit_ID=Q53LH1; Match level="QueryCoverage=94%, HitCoverage=16%, E-value=1e-36, Identity=66%"; Hit description =Lipase family protein, expressed
  Pfam annotation: Domain name=Lipase_3; Domain location=1-94; Score =22.7; E_value=9.7e-06; Accession=PF01764.17; Description=Lipase (class 3)
MQMLLDQIRGKAVVFTGHSLGGAIAALAALHYLCISSSSSTWGSAPSVLCVTFGSPLLGNEALSRAILRERWGGNFCHVVSQHDVVPRLLFCPLDAVPAHVIVGMQLQQWPAARTRH

SEQ ID NO: 92852 - protein, 396 aa, Setaria italica
  misc_feature (10)..(10): Xaa can be any naturally occurring amino acid
  Transcript Sequence Number=SeqID_26878
  Pfam annotation: Domain name=MRP-S28; Domain location=261-386; Score =44.3; E_value=4.7e-10; Accession=PF10213.1; Description =Mitochondrial ribosomal subunit prote
  Subcellular localization annotation: CTP_CleavageSite=60; ConfidenceScore=5.55e-01
MRRFLAHLQXNPTSSSIPQPRKPSPTTTLPFLLPRRLLSEDASPPAAAPPPPPIAADVPNAELKKRLETYYGVDEEAVLPSVTEAVLERKLADVHSETDDDLIEELRSKPLPEVRDRDFESDFEEMHDTDEELNDLYNASEYVEKKIKSDEFFNMDDTKWDAMIKEATNKGHLTNMKDCEDILEDMLHWDKLLPDEIKQKVEAKFNELGDLCERGEMEPEQAYELFKDFEDKMVAECTELMAKEMPTEADELTETGIKKVELHDPPGEGPVLRWESRIVFAPSGDAYHPKNRKVKLSVTVKELGLSRHACRRLREIVGKRYNSGKDELTITSERFEHREENRKDCLRTLYTLIEDAMKADKLVEDARNAYVKGRLKTNPQFMERLKRKMEKLWAAA

SEQ ID NO: 92853 - protein, 134 aa, Setaria italica
  Transcript Sequence Number=SeqID_26879
  Subcellular localization annotation: CTP_CleavageSite=44; ConfidenceScore=5.45e-01
FNSLGGLALPPCIRLPSFHLLPPPISSTPSHATSPPCSGPCRPRSGSGRADGRAAFRGPTGDPRRRSSIGSRLRAPWYHGRRRFVRGSVEFLQAVTFSSPSSSPSSLGLHGHGMVQSSRTNNALVYFFIFPLFI

SEQ ID NO: 92854 - protein, 100 aa, Setaria italica
  Transcript Sequence Number=SeqID_26880
  Subcellular localization annotation: CTP_CleavageSite=50; ConfidenceScore=5.15e-01
PHTPAKNKEKNSRPPLSFRLKPFTSSHSQGGNSEPAFCQKRGRKRKKHMREREYKEMIDQCIGNIQYEMERDSDFKLDVQIMNCNGHAYQGRGILHGPPF

SEQ ID NO: 92855 - protein, 96 aa, Setaria italica
  Transcript Sequence Number=SeqID_26881
  Gene Ontology: Mol. function=structural constituent of cell wall
  Homolog annotation: Hit_ID=B6UBA8; Match level="QueryCoverage=100%, HitCoverage=29%, E-value=7e-42, Identity=80%"; Hit description =Transposon protein
LSFCECDIFPGTSCGDPRFTGGDGNTFYFHGKKDDNFCIVTDSDLHINAHFIGNHNPDLKRDFTWVQALGVTFGAGHRLYVGARRVVEWDEDEDHI

SEQ ID NO: 92856 - protein, 56 aa, Setaria italica
  Transcript Sequence Number=SeqID_26882
MAFHRTIARRLWAGKNAAASGAAIPKPPAAAPAPPARRPLPAVDDCPTLAFLRPRP

SEQ ID NO: 92857 - protein, 350 aa, Setaria italica
  Transcript Sequence Number=SeqID_26883
  Gene Ontology: Mol. function=protein serine/threonine kinase activity; Cellular component=plasma membrane; Biological process =protein amino acid phosphorylation
  Homolog annotation: Hit_ID=B9RAU4; Match level="QueryCoverage=100%, HitCoverage=100%, E-value=1e-157, Identity=74%"; Hit description =Protein kinase atn1, putative
  Pfam annotation: Domain name=Pkinase; Domain location=26-286; Score =214.9; E_value=2e-61; Accession=PF00069.17; Description=Protein kinase domain
  Pfam annotation: Domain name=Pkinase_Tyr; Domain location=26-286; Score=195.1; E_value=1.9e-55; Accession=PF07714.9; Description =Protein tyrosine kinase
  Pfam module annotation: Pfam domain module=Pkinase::Pkinase_Tyr; Domain location=26-286::26-286
MESGSSFYAGEGLSIDPKWLIDPKLLFVGPRIGEGAHAKVYEGKYKNQNVAIKVVHKGDTPEEMTKREGRFLREVTMLSRVQHKNLVKFIGACLEPVMVVVTELLVGGSLRKYLVSLRPRSLEPRVAVGFALDIARAMECLHAHGIIHRDLKPENLLLTADQRTVKLVDLGLAREETLTEMMTAETGTYRWMAPELYSTVTLRHGEKKHYNHKVDVYSFAIVLWELLHNRLPFEGMSNLQAAYAAAFKNIRPSADNLPQELSEILTSCWKEDPNDRPNFTQIVQMLLHYLSTLSPQETLAPRRTFSSENAILPPESPGTSSLMHSRGDDTPKGKKEDKPRGLFFCFSECY

SEQ ID NO: 92858 - protein, 100 aa, Setaria italica
  Transcript Sequence Number=SeqID_26884
PSAKPSFGDVYKMGEPLGHIFASRAADHRFTGQKEKKPKELRDNQRRKHRNRRTAHNLAAHVGLRRLHQTQGARLFVAAASPCFSAASEHPSFLCQPPWW

SEQ ID NO: 92859 - protein, 126 aa, Setaria italica
  misc_feature (6)..(6): Xaa can be any naturally occurring amino acid
  Transcript Sequence Number=SeqID_26885
  Gene Ontology: Mol. function=protein dimerization activity
  Homolog annotation: Hit_ID=P47917; Match level="QueryCoverage=100%, HitCoverage=34%, E-value=9e-39, Identity=63%"; Hit description=O -methyltransferase ZRP4
  Pfam annotation: Domain name=Methyltransf_2; Domain location=1-126; Score=26.2; E_value=5.6e-10; Accession=PF00891.10; Description=O -methyltransferase
DALVNXGMVSDSHFIMDIAFKECAGAFQGISSLVDVGGGLGAAAQAIAKAFPGVKCSVLDLDHVVAKAPSGTGVQYIAGDMFESVPPANAMFFKWVLHDWGDEDCVRILKNCRKAIPPREEGGKVI

SEQ ID NO: 92860 - protein, 60 aa, Setaria italica
  misc_feature (48)..(60): Xaa can be any naturally occurring amino acid
  Transcript Sequence Number=SeqID_26886
SGSSDPSIRIHKLLLCFVSTMPKTKNSAGIFHGPLCLQMKSFFKKKKXXXXXXXXXXXXX

SEQ ID NO: 92861 - protein, 54 aa, Setaria italica
  Transcript Sequence Number=SeqID_26887
ILNTLTVLKFVHTNSQIGGHRVDSNRNTRTFILSNSSWPSDLTTLFDLHQKLMQ

SEQ ID NO: 92862 - protein, 149 aa, Setaria italica
  Transcript Sequence Number=SeqID_26888
  Gene Ontology: Mol. function=electron carrier activity; Biological process=oxidation reduction
  Homolog annotation: Hit_ID=B6SSX8; Match level="QueryCoverage=100%, HitCoverage=28%, E-value=6e-43, Identity=57%"; Hit description =Flavonoid 3-monooxygenase
RMVLGKRLFDGGEGAAAAEGPVSSLGEFKWMMDELMFLNGVLNVGDWIPWLDCLDLQGYVGRMKRIGKRFSAFIDHVLDEHAGRRRREGGGFVARDMVDVLMELADDPASEIRIGRVGVKAFTQDLIVGGTESTATTVEWAISELLRKP

SEQ ID NO: 92863 - protein, 125 aa, Setaria italica
  Transcript Sequence Number=SeqID_26889
  Gene Ontology: Mol. function=protein binding; Cellular component =nucleus; Biological process=translation
  Homolog annotation: Hit_ID=Q01I09; Match level="QueryCoverage=84%, HitCoverage=28%, E-value=4e-48, Identity=83%"; Hit description =OSIGBa0132E09-OSIGBa0108L24.21 protein
  Pfam annotation: Domain name=eRF1_3; Domain location=34-123; Score =75.4; E_value=2e-19; Accession=PF03465.7; Description=eRF1 domain 3
ASHCPLHVHLFARHSLKEVLDTPGIMALIKDTKAAQEVRALQDFFNMLTNDSARACYGPKHVEIAQDRLAIQTLLITDTLFRNADIATRQKYVKLVEGVKKYGGTVHIFSSMHVSGDREFYALIL

SEQ ID NO: 92864 - protein, 375 aa, Setaria italica
  Transcript Sequence Number=SeqID_26890
  Gene Ontology: Mol. function=protein binding; Cellular component =nucleus; Biological process=translation
  Homolog annotation: Hit_ID=Q01I09; Match level="QueryCoverage=100%, HitCoverage=100%, E-value=0.0, Identity=89%"; Hit description =OSIGBa0132E09-OSIGBa0108L24.21 protein
  Pfam annotation: Domain name=eRF1_1; Domain location=1-128; Score =162.7; E_value=1.1e-45; Accession=PF03463.7; Description=eRF1 domain 1
  Pfam annotation: Domain name=eRF1_2; Domain location=133-265; Score =140.0; E_value=7.3e-39; Accession=PF03464.7; Description=eRF1 domain 2
  Pfam annotation: Domain name=eRF1_3; Domain location=268-367; Score =141.1; E_value=3.3e-39; Accession=PF03465.7; Description=eRF1 domain 3
  Pfam module annotation: Pfam domain module=eRF1_1::eRF1_2::eRF1_3; Domain location=1-128::133-265::268-367
MKLVHRDLVRNGPGSVKLVPEEEDDLWHAYNLIAIGDNLQAVTVRKVLREMASGGRDAERVKLKLEIVVESVDYDKEGSVLRVRGKNITENDHVKFHTLELELKRPFVLRKEIWDWLALETIQQACDPSASADLAVILMQEGLAHLFLIGKSITATRARIETSIPRKHGPAIAGYESALKKFFEHVLQALLKHIDFEVVQCVVIASPGFTKDQFRDYMFLEAARRDLRVIIENKQRLVLAHATSGYKHSLKEVLDTPGIMALIKDTKAAQEVRALQDFFNMLTNDSARACYGPKHVEIAQDRLAIQTLLITDTLFRNADIATRQKYVKLVEGVKKYGGTVHIFSSMHVSGDQLAQLTGIAAILRFPLPDLEDIEM

SEQ ID NO: 92865 - protein, 144 aa, Setaria italica
  Transcript Sequence Number=SeqID_26891
VSNDFADAASGAAADGDNSTKSSSSEGGEGNKSSANFGGWDELLNYDNVTTQEKSSSSSFSAGNADYSKRQRPAVTGEEDTDTAAAGRGAGQGLGAPPARMRMRRRRGMPRTTGLGSTRYKQAPILMRLLVAVFPFLGSWFRLL

SEQ ID NO: 92866 - protein, 61 aa, Setaria italica
  Transcript Sequence Number=SeqID_26892
AGHFLWCFRHKQEHGFASDTSCSRSYSISSPHLLVDFIVIWSGYMLSKKRSSGVQSWQLDW

SEQ ID NO: 92867 - protein, 224 aa, Setaria italica
  Transcript Sequence Number=SeqID_26893
  Gene Ontology: Cellular component=extracellular region; Biological process=sexual reproduction
  Homolog annotation: Hit_ID=C3SAC4; Match level="QueryCoverage=83%, HitCoverage=67%, E-value=8e-92, Identity=86%"; Hit description =Triticum beta-expansin
  Pfam annotation: Domain name=DPBB_1; Domain location=76-157; Score =120.1; E_value=7.4e-33; Accession=PF03330.10; Description=Rare lipoprotein A (RlpA)-like double
  Pfam annotation: Domain name=Pollen_allerg_1; Domain location=169 -224; Score=16.5; E_value=6.6e-05; Accession=PF01357.13; Description =Pollen allergen
  Pfam module annotation: Pfam domain module=DPBB_1::Pollen_allerg_1; Domain location=76-157::169-224
  Subcellular localization annotation: CTP_CleavageSite=19; ConfidenceScore=5.26e-01
MGVLSSISLLLLLQAAAAAASSVSYNDSSSSSSLMQMQWGNARATWYGQPNGAGPYDNGGACGFKKVNEYPFMSMTSCGNQPLFRDGKGCGSCYKIRCSKHPACSGRTETVVITDMNYFPVPAAPYHFDLSGTAFGKLAKPGRNDDLRRAGIIDIQFARVPCEFPGLKVGFHVEEGSTQVYFAVLVEYENGDGDVVQVDLMESSRRGGGGRWTAMRESWGSIWR

SEQ ID NO: 92868 - protein, 151 aa, Setaria italica
  Transcript Sequence Number=SeqID_26894
  Gene Ontology: Mol. function=protein serine/threonine kinase activity; Biological process=protein amino acid phosphorylation
  Homolog annotation: Hit_ID=Q9AXH6; Match level="QueryCoverage=85%, HitCoverage=17%, E-value=7e-38, Identity=58%"; Hit description=Wall -associated protein kinase
  Pfam annotation: Domain name=Pkinase_Tyr; Domain location=2-135; Score=-168.5; E_value=0.016; Accession=PF07714.9; Description =Protein tyrosine kinase
PKVSDFGSAKLVSVASRYSKWCVSGDMSYIDPIYIKSGRFTEKSDVYSFGVVLLELVTRKPAKYGDNSLYIDFIRSFKEEGNGRKLYDEEILSGDDDARSHHHMECLDRISRLAVRCLKEDVDERPTMAEVVEELKEVKAIASGGSSSVAS

SEQ ID NO: 92869 - protein, 89 aa, Setaria italica
  Transcript Sequence Number=SeqID_26895
  Subcellular localization annotation: CTP_CleavageSite=59; ConfidenceScore=5.47e-01
SSETRRRPSAAARESDAAASRAKPSPPPMSGPRPAPAASQNPSVPQAPPRPPPPPPPVSAAARAREEGELSSGADDDEALQTRRAASSI

SEQ ID NO: 92870 - protein, 276 aa, Setaria italica
  Transcript Sequence Number=SeqID_26896
  Gene Ontology: Mol. function=metal ion binding
  Homolog annotation: Hit_ID=B9S5Q7; Match level="QueryCoverage=97%, HitCoverage=70%, E-value=1e-72, Identity=49%"; Hit description =Ubiquitin-protein ligase, putative
  Pfam annotation: Domain name=zf-C3HC4; Domain location=224-263; Score= 13.4; E_value=0.003; Accession=PF00097.17; Description=Zinc finger, C3HC4 type (RING finger)
IGSVNKHTQMCLFTEWRGIFGWTFDLHALLFRSWKEQIVTYFRSVPFVLASSEIGNPIGMVYIDVEKAAQPLPLTTVFHKLIPIETTPYTLFQTIIGNGYPIALLDEEKILPIGKELTAIGLCRANDEGSVEISSCPELPFFLSELTKDEMQAQLASRARILFWGSVVLGTLSVCLVGHAIYRGWKRIKLRREARQAQQLFEEGEDAIQEDDSSDEEVGDGQLCVVCLRKRRKAAFIPCGHLVCCCKCALRMERETEPLCPMCRQDIRYMMRIYDS

SEQ ID NO: 92871 - protein, 174 aa, Setaria italica
  Transcript Sequence Number=SeqID_26897
  Gene Ontology: Mol. function=transcription factor binding; Cellular component=intracellular; Biological process=regulation of transcription, DNA-dependent
  Homolog annotation: Hit_ID=B6TV03; Match level="QueryCoverage=93%, HitCoverage=47%, E-value=5e-65, Identity=74%"; Hit description=RAB, member of RAS oncogene family-like 3
  Pfam annotation: Domain name=MMR_HSR1; Domain location=16-156; Score =5.0; E_value=0.00035; Accession=PF01926.15; Description=GTPase of unknown function
  Pfam annotation: Domain name=Miro; Domain location=17-156; Score =49.4; E_value=1.3e-11; Accession=PF08477.5; Description=Miro-like protein
  Pfam annotation: Domain name=Ras; Domain location=17-174; Score= -24.2; E_value=1.7e-07; Accession=PF00071.14; Description=Ras family
  Pfam module annotation: Pfam domain module=MMR_HSR1::Miro::Ras; Domain location=16-156::17-156::17-174
RRELPYKTGGPPCGQVRVLVVGDSGVGKSSLVHLLLNGSAVARPAQTIGCAVGVKHITYSSPGSSSNSIKADAERNFFVELWDVSGHERYKECRSLFYSQINGVIFVYDLSQRKTKTNLNKWAVEVAESGTFSAPLGSGGPGGLPVPYLVIANKVDIAPRDGRRVSSGNLVDVA

SEQ ID NO: 92872 - protein, 77 aa, Setaria italica
  Transcript Sequence Number=SeqID_26898
  Subcellular localization annotation: CTP_CleavageSite=59; ConfidenceScore=5.76e-01
MASIEVSKPSKRLSPKRSGSFKLSLPGLFCGQCKATSVSSPPDSPTGAGARSLSSSSASASASSSGTSRGRDRTAEN

SEQ ID NO: 92873 - protein, 153 aa, Setaria italica
  Transcript Sequence Number=SeqID_26899
QARMKSWVLQHWKQRTQHKIKPPPIQSKQIPPIHSNMAQVHKSTHFMDNSGMAQKQFYYPPFTSRAQIDDTESHEWSRHAFGSVQHFTEPVPRNGFRGLSLECQRVGSFFMSWLPKNYSPKNNQNNCNTIFHRHNKIWPEFLLSLNHPTKSAT

SEQ ID NO: 92874 - protein, 239 aa, Setaria italica
  Transcript Sequence Number=SeqID_26900
  Subcellular localization annotation: CTP_CleavageSite=49; ConfidenceScore=5.65e-01
MADSAALSSASSSLPRSLASRRPLSSPLHARSRPLRRGRSGSRSLHRLRARAGKDDPEDLYGPYPWDQSLDLTTGFDIQWVPEDRVTLFTSDGLVQIGGSLVPRRVSSSEKRQRKLKSTQKLRRFQESSYMDPNQSLCLGALFNIAATNGLDMGRRLCIFGFCRSIEMLSDVVEDTVLEHGGEVVTAEKASNDGLQEKLTMSVAVPLLWGVPPASETLHVAVRSGGGIVDKIYWQWDLF

SEQ ID NO: 92875 - protein, 52 aa, Setaria italica
  Transcript Sequence Number=SeqID_26901
LLSFIYRPYCSSRLCISREENRKGSKQLQHQKETAVYVCVLCVSTWATCEAL

SEQ ID NO: 92876 - protein, 118 aa, Setaria italica
  Transcript Sequence Number=SeqID_26902
  Gene Ontology: Mol. function=protein tyrosine kinase activity; Cellular component=plasma membrane; Biological process=protein amino acid phosphorylation
  Homolog annotation: Hit_ID=Q69IN5; Match level="QueryCoverage=100%, HitCoverage=31%, E-value=1e-50, Identity=78%"; Hit description =Putative Pto kinase interactor 1
  Pfam annotation: Domain name=Pkinase_Tyr; Domain location=3-113; Score=-152.0; E_value=0.0013; Accession=PF07714.9; Description =Protein tyrosine kinase
DDFGSTALIGEGSYGRVYYAVLDNGTKMAVKKLDSTENEPTTEFLTQVSLVSRLKHENFVDMLGYCTERNLRIVAYEFATMGSLHDVLHGRKGVQGAQPGPALDWMQRVKVAVDAAKG

SEQ ID NO: 92877 - protein, 217 aa, Setaria italica
  Transcript Sequence Number=SeqID_26903
  Gene Ontology: Mol. function=microtubule motor activity; Cellular component=microtubule associated complex; Biological process =microtubule-based movement
  Homolog annotation: Hit_ID=B9T3J4; Match level="QueryCoverage=95%, HitCoverage=19%, E-value=1e-38, Identity=38%"; Hit description =Bipolar kinesin KRP-130, putative
WEAYMQRTEEAFHQNVSSIEQKKCFLAENLEQCKTRVQSCSEQWSTAQNSVLALGRSHAEATNSVISDGTEESNQLNARFSSAVMAGFEDNDVSSKYLLCSIDDALKLDHGTCENVKSITMTSRAELHDLQHGHCEKTTVITGNANRCLGDDYTVDEVTCSTPRRREIKVPSSQSIGELVTPPLEDLVKTFWDSRALTKLELNGNGKQSTTPETQRA

SEQ ID NO: 92878 - protein, 71 aa, Setaria italica
  Transcript Sequence Number=SeqID_26904
NLCDAQPLHHSSYCNLTNEESFLNTEYINQMHMFALCSMFSSLFTSSSLKQPTNFPHLCIFLFTFLMPLLS

SEQ ID NO: 92879 - protein, 57 aa, Setaria italica
  Transcript Sequence Number=SeqID_26905
KKLKCQSVVWYRRIYITNTTFAAACAAALPLCRPFFCIHHIIQNVAELDYRHHNHSS

SEQ ID NO: 92880 - protein, 65 aa, Setaria italica
  Transcript Sequence Number=SeqID_26906
GRARRLGAFFRCGLLYIWSNKSAESNQFLSLSNPRRNPLNPINPFSDFIDSSSLLQFLALDFSYV

SEQ ID NO: 92881 - protein, 102 aa, Setaria italica
  Transcript Sequence Number=SeqID_26907
  Gene Ontology: Mol. function=protein serine/threonine kinase activity; Cellular component=integral to membrane; Biological process=protein amino acid phosphorylation
  Homolog annotation: Hit_ID=Q2L3U3; Match level="QueryCoverage=98%, HitCoverage=9%, E-value=4e-45, Identity=86%"; Hit description =CLAVATA-like kinase
CRAILHGDVKSMNVLFGPAYEPYPADFGLARVLSAASSKLDTGKQTRIAGSYGYMAPEYASMQRISEKSDVYSFGVVLLEILTGRHPLDPTLPGGAHLVQWV

SEQ ID NO: 92882 - protein, 240 aa, Setaria italica
  Transcript Sequence Number=SeqID_26908
  Gene Ontology: Mol. function=protein serine/threonine kinase activity; Cellular component=integral to membrane; Biological process=protein amino acid phosphorylation
  Homolog annotation: Hit_ID=Q2L3U3; Match level="QueryCoverage=84%, HitCoverage=18%, E-value=2e-75, Identity=71%"; Hit description =CLAVATA-like kinase
  Pfam annotation: Domain name=Pkinase; Domain location=1-191; Score= -67.1; E_value=0.00017; Accession=PF00069.17; Description=Protein kinase domain
  Pfam annotation: Domain name=Pkinase_Tyr; Domain location=1-191; Score=-125.7; E_value=2.3e-05; Accession=PF07714.9; Description =Protein tyrosine kinase
  Pfam module annotation: Pfam domain module=Pkinase::Pkinase_Tyr; Domain location=1-191::1-191
ASRRRRLGPRYEIALGVAHAVAYLHHDCLPAILHGDIKAMNVLLGPRNEPYLADFGLARVLSGAVASGSAKLDSSKPTRIAGSYGYIAPEYASMQRITEKSDVYSFGVVVLEILTGRHPLDPTLPGGAHLVQWVREHVHAKRDTAELLDPRLRGKPEAQVQEMLQVFSVAMLCIAHRADDRPAMKDVVALLKEVSRPAEGGEEGKEQPACNSASAAATTPPAVQAQRSPARSPLPKGGSS

SEQ ID NO: 92883 - protein, 161 aa, Setaria italica
  misc_feature (39)..(39): Xaa can be any naturally occurring amino acid
  Transcript Sequence Number=SeqID_26909
  Subcellular localization annotation: CTP_CleavageSite=6; ConfidenceScore=5.51e-01
GRRRWRAAGATVAIPNSSSSPSHGFGPPPSRVVARICPXEAPEAPSQVAARVSDAADSSPASASVSFIPINKEATPAAAGTLTLRKDCEYKLDYCYTKDDSYTLIFDNEVKHLLDDIFCGDGQSNACVITCGATAKTHLIMGSQDHDGLLNMAMKEILRRA

SEQ ID NO: 92884 - protein, 161 aa, Setaria italica
  misc_feature (83)..(83): Xaa can be any naturally occurring amino acid
  Transcript Sequence Number=SeqID_26910
  Gene Ontology: Mol. function=heat shock protein binding; Biological process=response to stress
  Homolog annotation: Hit_ID=Q1EPG9; Match level="QueryCoverage=81%, HitCoverage=46%, E-value=1e-37, Identity=46%"; Hit description=Heat shock protein DnaJ N-terminal domain-containing protein
SKRKAFDSVSDNGPVLNDDDAPGDNQYYTFMDPEFFDFDQLRGVNQFRANQIWAVYDDQDCMPRFYARITKVKTTPKFMLHFXWLELDPTNKAERAWSYGGLPVACGRFMHGQSETAKETAMFSRTISFEKSKTRNSYEIYPKKGEVWALFKGWDIGWSSE

SEQ ID NO: 92885 - protein, 68 aa, Setaria italica
  Transcript Sequence Number=SeqID_26911
  Gene Ontology: Mol. function=transferase activity, transferring glycosyl groups; Biological process=metabolic process
  Homolog annotation: Hit_ID=B6SXW3; Match level="QueryCoverage=100%, HitCoverage=13%, E-value=1e-27, Identity=86%"; Hit description =Cytokinin-O-glucosyltransferase 2
MGSIAADADRPHVVCVPLPAQGHVTPMLKLAKVLHRRGFHVTFVNSEFNHRRFLRSRGAGALDGLPGF

SEQ ID NO: 92886 - protein, 70 aa, Setaria italica
  Transcript Sequence Number=SeqID_26912
STGALAYYNMIWHPAIFTVYIMALCHVPIRQKDTLRCLRSVQRSHTRQTNGLKLTSLKNGLRSAKENVSA

SEQ ID NO: 92887 - protein, 279 aa, Setaria italica
  misc_feature (10)..(10): Xaa can be any naturally occurring amino acid
  Transcript Sequence Number=SeqID_26913
  Gene Ontology: Mol. function=catalytic activity
  Homolog annotation: Hit_ID=Q9LQ24; Match level="QueryCoverage=83%, HitCoverage=29%, E-value=1e-63, Identity=54%"; Hit description =F14M2.16 protein
  Pfam annotation: Domain name=DUF608; Domain location=1-226; Score =250.5; E_value=4.1e-72; Accession=PF04685.5; Description=Protein of unknown function, DUF608
GDGMIENDGXFPDQTYDAWTVQGVSAYCGCLWLAALQAAAALARSLGHVDYAERCMIRFAKAKSVFEARLWNGSYFNYDSGTSYSSRSIQADQLAGQWYTASSGLPPLFDEDRIKCTLQKIFDYNVMRVKGGRMGAVNGMHPNGKVDETCMQSREIWTGVTYSLAATMLLHGMEHQAFTTAEGIYIAGWSEEGYGYWFQTPEAWTVDGHYRSLIYMRPLAIWAMQCALSPPKSILEAPKVNTMDRAHMSPGTLQFLQDSVRKITPKNGCFGNTVFNWDC

SEQ ID NO: 92888 - protein, 736 aa, Setaria italica
  misc_feature (256)..(256): Xaa can be any naturally occurring amino acid
  Transcript Sequence Number=SeqID_26914
  Gene Ontology: Mol. function=unfolded protein binding; Cellular component=cell wall; Biological process=protein folding
  Homolog annotation: Hit_ID=B9T0C8; Match level="QueryCoverage=92%, HitCoverage=85%, E-value=0.0, Identity=79%"; Hit description=Heat shock protein, putative
  Pfam annotation: Domain name=HATPase_c; Domain location=37-198; Score= 48.9; E_value=1.9e-11; Accession=PF02518.18; Description=Histidine kinase-, DNA gyrase B-, and HSP90-like ATPase
  Pfam annotation: Domain name=HSP90; Domain location=206-718; Score =631.3; E_value=9.2e-187; Accession=PF00183.10; Description=Hsp90 protein
  Pfam module annotation: Pfam domain module=HATPase_c::HSP90; Domain location=37-198::206-718
SSAAAVDSTDMPPAEKHEYQAEVNRLMDLIVHSLYSNKEVFLRELVSNASDALDKLRYLSVTDPELLKDGPELDIRIQTDKDNGIVTITDSGIGMTKQELVDSLGTIASSGTAKFLKALKESQEAGMDSNLIGQFGVGFYSAFLVADKVVVSTKSPKSDKQYVWEGEADSSSYTVREEKDPEKLIPRGTRLTLYLKRDDKGFAHPERIQKLVKNYSQFVSFPIYTWQEKGFTKEVEVDEDPAETKKEGDAEAQTEXKKKTKTVLEKYWDWELTNETQPIWLRNPKEVSTEEYNEFFKKTFNEYLDPLASSHFTTEGEVEFRSILFVPATKKEDITDRKTKNIRLYVKRVFISDDFDGELFPRYLSFVKGVVDSNDLPLNVSREILQESRIVRIMRKRLVRKAFDMILGISCSENRDDYERFWENYGKFLKLGAMEDKENHKRIAPLLRFFSSQSNDELISLDEYVENMKPEQKDIFFVAADSLSSAKNAPFLEKLTEKEYEVLLLVDPMDEVAIQNLASYKDKKFVDISKEDLDLGDKNEEREKEIKQEFSQTCDWIKKRLGDKVARVDISNRLSSSPCVLVAAKFGWSANMERLMRAQSMGDTSSLDFMRSRKVFEINPEHEIIKGLNVACRSNPDDPEALKVLDVLFETAMISSGFTPDNPAELSGKIYDMMSSAIAGKWSSQSQAPFASAFPEHDAPHVEPSFPPHAAAPHVEPDTVEAEVVEPEPVESGQQK

SEQ ID NO: 92889 - protein, 158 aa, Setaria italica
  Transcript Sequence Number=SeqID_26915
  Subcellular localization annotation: CTP_CleavageSite=44; ConfidenceScore=5.22e-01
DGRRCGGGASKSPARFWSGMLCSLSDLRGQAFNGRGLMSVPLTYCMMQGGGMSDMASFALSGSLVLITCLGPDTVTARVKIFPEILRCCIHAALCLWWILQTASTTFRAFAVTLRERLFMQILDHIGMLGAIHTCWPCVPAHQYVLVLVIRLMILLKR

SEQ ID NO: 92890 - protein, 227 aa, Setaria italica
  misc_feature (144)..(144): Xaa can be any naturally occurring amino acid
  misc_feature (147)..(147): Xaa can be any naturally occurring amino acid
  misc_feature (154)..(154): Xaa can be any naturally occurring amino acid
  Transcript Sequence Number=SeqID_26916
  Gene Ontology: Mol. function=aspartic-type endopeptidase activity; Cellular component=chromatin; Biological process=RNA-dependent DNA replication
  Homolog annotation: Hit_ID=Q8SA93; Match level="QueryCoverage=96%, HitCoverage=8%, E-value=5e-58, Identity=48%"; Hit description =Putative polyprotein
LNIRGALGHVGLTEYLQLWDALASIVLNHADDLHHWKFEASGEFSTRSAYRSFFVGSITFEPRKQIWKSWAPGNCRMFIWLAIRNRCWTADRLEKRGLPHPEQCPLCDQEGETVQHILTSCVFARQFWFEILQPLNLSSLVPSXKDXSFAEWWXKSLRKVQKQHKKGFNSQVMLGAWIICKHRNACVFDGSDPNLQGALQAFRDESHLWQLAGTRGLSALDLRRIEV

SEQ ID NO: 92891 - protein, 224 aa, Setaria italica
  Transcript Sequence Number=SeqID_26917
  Gene Ontology: Mol. function=glycerophosphodiester phosphodiesterase activity; Biological process=glycerol metabolic process
  Pfam annotation: Domain name=GDPD; Domain location=1-204; Score=0.4; E_value=1.2e-05; Accession=PF03009.9; Description=Glycerophosphoryl diester phosphodiesterase family
DCVEVDVSRSSDGVLFALHDRDLQKMSGNSTAKVGHWSTDEIKALRFQLSKRVQNEEVPKAEDALAVISRSVRQVILDVKVGPPSFDKGLAEDVLSLLKRTNCKNCLVWAKTDNLARDIIKLSEDVVVGYIVMVDKSTGRKTEFVRLEGAKVAGVYHPLIHEKVVKVMRRHGKKVFAWTVDDNKSMEKMLHEHVDAIVTSNPSLLQQLMHETRTECLEDGFALP

SEQ ID NO: 92892 - protein, 236 aa, Setaria italica
  Transcript Sequence Number=SeqID_26918
  Gene Ontology: Mol. function=nucleic acid binding; Cellular component= ribosome; Biological process=mRNA processing
  Homolog annotation: Hit_ID=B6TDF7; Match level="QueryCoverage=87%, HitCoverage=82%, E-value=6e-69, Identity=66%"; Hit description =Plastid-specific 30S ribosomal protein 2
  Pfam annotation: Domain name=RRM_1; Domain location=162-232; Score =81.8; E_value=2.5e-21; Accession=PF00076.14; Description=RNA recognition motif. (a.k.a. RRM, RBD, o
  Pfam annotation: Domain name=RRM_1; Domain location=63-133; Score =106.7; E_value=8.1e-29; Accession=PF00076.14; Description=RNA recognition motif. (a.k.a. RRM, RBD, o
  Pfam module annotation: Pfam domain module=RRM_1::RRM_1; Domain location=162-232::63-133
  Subcellular localization annotation: CTP_CleavageSite=29; ConfidenceScore=5.67e-01
ITPPALHLRCRSPASASVSVSAPARLSFRAAAAPQAWRRGLALRVAASSAVLEAPAEVAARKLYVGNIPRTVTNDELRDMFAAHGTVERAEVMYDKYTNRSRRFGFVTMSTVEEANAAIEALNETEVGGRKIKVNVTESFLPNIDRSAPEPEPVFVDSQYKVYVGNLAKTVTTEVLKNFFAEKGQILSATVSHIPGTSKSKGYGFVTFSSEEEVEAAVATFNNAELEGQPIRVNRA

SEQ ID NO: 92893 - protein, 149 aa, Setaria italica
  Transcript Sequence Number=SeqID_26919
RAVSAGVRRGSAIVDDKSKAQSPSPSPAIEEPRLAAPAEPASPSGEPSTPSKVRFTVYYGVSGDADDGVVDGVRRCADDDDRVDGEVDAVLRRTASAPERRRAKALAAAAPWEEREMAVRRRGDLGWYRHLDMAALDGSVVKLWDGELT

SEQ ID NO: 92894 - protein, 102 aa, Setaria italica
  Transcript Sequence Number=SeqID_26920
  Subcellular localization annotation: CTP_CleavageSite=38; ConfidenceScore=5.08e-01
AMRRSRAEWQMQWRGPGTSTRRQARVKTATTTDISVLRAQGQRRRRRQGPHYAPCGRSGRELEAWRRPRRRRACWCGRDRGGARRGHRPHRNGWRRGGRRRR

SEQ ID NO: 92895 - protein, 205 aa, Setaria italica
  misc_feature (18)..(18): Xaa can be any naturally occurring amino acid
  Transcript Sequence Number=SeqID_26921
  Gene Ontology: Mol. function=GTP binding; Cellular component =intracellular
PRKTASTINRRKVVPGKXHRLKSRSLYEEDSRAGRRSTSKVSDIRGIKGRSPLSNNSGASKGKKFDASTEFRRTKRGGAKDVALDEEVEDNKKSDDSGHITEEEKPRPRLTRVLDQSGKKLKPAKKDVVPDAEEPSPPKKRKRMKLDPYDTSNKRIEDSPPVQDVSRAEKVMVKCAPEETEMSINAKFRAIQPAPSILSYVEDNL

SEQ ID NO: 92896 - protein, 77 aa, Setaria italica
  Transcript Sequence Number=SeqID_26922
MGHGSGPAAAVDQQGCRVLPVIEEEPEPEQAEGEGLPEEMTRLAERRKAIVARMRELLSRAAAAQSAHHKLRRSTVA

SEQ ID NO: 92897 - protein, 109 aa, Setaria italica
  Transcript Sequence Number=SeqID_26923
  Gene Ontology: Mol. function=electron carrier activity; Biological process=oxidation reduction
  Homolog annotation: Hit_ID=Q94HA5; Match level="QueryCoverage=97%, HitCoverage=14%, E-value=5e-41, Identity=71%"; Hit description =Cytochrome P450 family protein, expressed
YVKNMFGAGTETTSTTTEWAMALLLNHPETLMKAQAEIDAAVGTSRLVTADDVSRLTYLQCIINETFRLYPAVPLLLPHESSADCKVGGYDVPRGTMLLVNVYAIHTGP

SEQ ID NO: 92898 - protein, 102 aa, Setaria italica
  misc_feature (29)..(29): Xaa can be any naturally occurring amino acid
  Transcript Sequence Number=SeqID_26924
KERLEKQFRMSCVGCDLFVCYRSEEDLEXRPFIYVVDGALSSVAAETNPHDAPVPPCITQLEGGLVQVAIEVEDRAQRSAITSTYFNIVVSYFLRRQHAMFM

SEQ ID NO: 92899 - protein, 232 aa, Setaria italica
  Transcript Sequence Number=SeqID_26925
  Gene Ontology: Mol. function=ribonuclease activity
  Homolog annotation: Hit_ID=Q00VG4; Match level="QueryCoverage=95%, HitCoverage=21%, E-value=1e-21, Identity=30%"; Hit description =Exosomal 3'-5' exoribonuclease complex, subunit Rrp44/Dis3 (ISS)
  Pfam annotation: Domain name=DUF167; Domain location=140-216; Score =90.1; E_value=7.7e-24; Accession=PF02594.8; Description =Uncharacterized ACR, YggU family COG1872
MPKRTTHTYSSEDALPEGPESDLFVYYCKHCASHVLITDTQLQKMPKRKTDRAHVLDKTKHLSRLNVKESGKVMLKRGEGKLEKQFRMSCVGCDLFVCYRSEEDLEHAPFIYVVDGALSSVAAETNPHDAPVPPCITQLEGGLVQVAIEVEDRAQRSAITRVNADDVRVTVAAPAARGEANSELLEFMGKVLGLRLTQMTLQRGWNNKSKLLIVEDLSARQVYEKLLEAVQP

SEQ ID NO: 92900 - protein, 123 aa, Setaria italica
  misc_feature (23)..(23): Xaa can be any naturally occurring amino acid
  misc_feature (55)..(55): Xaa can be any naturally occurring amino acid
  Transcript Sequence Number=SeqID_26926
  Gene Ontology: Mol. function=oxidoreductase activity; Cellular component=cell wall; Biological process=DNA integration
  Homolog annotation: Hit_ID=Q2R3Y8; Match level="QueryCoverage=78%, HitCoverage=17%, E-value=2e-31, Identity=70%"; Hit description =Reticuline oxidase, putative
  Pfam annotation: Domain name=FAD_binding_4; Domain location=4-102; Score=-3.0; E_value=0.0024; Accession=PF01565.15; Description=FAD binding domain
MGRPLPATGSRRTATRLRGVRVXARGGSAWVDAGTTLGELYYAVGTANPGFLFPXGACATVGVSGFISGGGIGLMMRKYGVGGDNVLDARIVNAAGDVLDRAAMGEDLFWAIRGGGGESFGVV

SEQ ID NO: 92901 - protein, 109 aa, Setaria italica
  Transcript Sequence Number=SeqID_26927
IERPSREKPSNERKSERNRDARVRVSEAYLSNSPRRSLSFRPFLRPARQTACVCSAPRLGVSSDPVLCSSCCSGSVLFHISREVKKREGQELNNKPRNINTHTSALVPE

SEQ ID NO: 92902 - protein, 302 aa, Setaria italica
  misc_feature (74)..(74): Xaa can be any naturally occurring amino acid
  Transcript Sequence Number=SeqID_26928
  Gene Ontology: Cellular component=chloroplast envelope
GDGGHGDGGAPDDNRGEALFVLAQLGRKLESLPSDLAAAVDAGRVTGDIVRRFNDLEASALFRWLLQFRGFREXRLLADDLFFAKLAMELGVGVIAKTAAEYEKRRENFVKEIDIVIADVIMAIVADFMLVYLPAPTVSLQPPLARNAGAIANFFHNCPDNAFQIALAGRSFSLLQRLGAILRNGAKLFAVGTSASLIGTGVTNALIKARKAVDKDLEGEVEDIPVVSTSVAYGVYMAISSNLRYQILAGVIEQRMLEPLLHNQKLLLSAMCFAVRTGNTFLGSLLWVDYARLVGVQKVQEA

SEQ ID NO: 92903 - protein, 59 aa, Setaria italica
  misc_feature (25)..(25): Xaa can be any naturally occurring amino acid
  Transcript Sequence Number=SeqID_26929
MDTTCHIFYVCSSRTPYLDNLQDWXSPLKKRRGVFLFHPSTSEEILLCMLLGKKAQFVQ

SEQ ID NO: 92904 - protein, 155 aa, Setaria italica
  Transcript Sequence Number=SeqID_26930
  Gene Ontology: Mol. function=ATP binding; Cellular component =chloroplast; Biological process=carbon utilization by fixation of carbon dioxide
  Homolog annotation: Hit_ID=Q8RU45; Match level="QueryCoverage=100%, HitCoverage=39%, E-value=1e-74, Identity=78%"; Hit description =Putative rubisco activase
RFGNTQMTVNNQIVAGTLMNLADNPTRVSTGQKWRENDITNRVPIIVTGNDFSTLYAPLIRDGRMEKFYWQPDREDIINIVHGMYTKDGISIEEVSRIVDTFPNQALDFYGALRSRTYDRAVLEWVDQIGGHEKLGEKLLKQKRGEKLPTFIPPK

SEQ ID NO: 92905 - protein, 152 aa, Setaria italica
  misc_feature (141)..(141): Xaa can be any naturally occurring amino acid
  Transcript Sequence Number=SeqID_26931
  Gene Ontology: Mol. function=protein serine/threonine kinase activity; Cellular component=plasma membrane; Biological process =protein amino acid phosphorylation
  Homolog annotation: Hit_ID=Q9SA72; Match level="QueryCoverage=100%, HitCoverage=18%, E-value=6e-24, Identity=38%"; Hit description =T5I8.2 protein
VSRDGNLGHPTIRIGGMNGGMVKPKRSPKWVLIGAAAGLVIFISIAGAVYFCFYLRRKNNIPANMTKDNPPATPMATNARASPTLRTTGTFGSCRMGRQFSIAEIKAATMNFDESLVIGIGGFGKVYKGETENGTPVAIKXGHAQSQQGVKE

SEQ ID NO: 92906 - protein, 424 aa, Setaria italica
  Transcript Sequence Number=SeqID_26932
  Gene Ontology: Mol. function=protein serine/threonine kinase activity; Cellular component=integral to membrane; Biological process=protein amino acid phosphorylation
  Homolog annotation: Hit_ID=Q94IJ4; Match level="QueryCoverage=100%, HitCoverage=67%, E-value=0.0, Identity=81%"; Hit description=Somatic embryogenesis receptor-like kinase 2
  Pfam annotation: Domain name=Pkinase; Domain location=101-375; Score =138.8; E_value=1.8e-38; Accession=PF00069.17; Description=Protein kinase domain
  Pfam annotation: Domain name=Pkinase_Tyr; Domain location=101-375; Score=117.7; E_value=3.8e-32; Accession=PF07714.9; Description =Protein tyrosine kinase
  Pfam module annotation: Pfam domain module=Pkinase::Pkinase_Tyr; Domain location=101-375::101-375
  Subcellular localization annotation: CTP_CleavageSite=40; ConfidenceScore=5.73e-01
LCGPGTTKPFPGAPPFSPPPPFNPPTPTSPKGASSTGAIAGGAAAGAALLFAIPAIAFALWRRRKPEEHFFDVPAEEDPEVHLGQLKRFSLRELQVATDSFSNKNVLGRGGFGKVYKGRLTDGSLVAVKRLKEERTPGGELQFQTEVELISMAVHRNLLRLRGFCMTPTERLLVYPYMANGSVASRLRERGPNDPPLEWETRARIALGSARGLSYLHDHCDPKIIHRDVKAANILLDESFEAVVGDFGLAKLMDYKDTHVTTAVRGTIGHIAPEYLSTGKSSEKTDVFGYGIMLLELITGQRAFDLARLANDDDVMLLDWVKGLLKERKLEQLVDPDLQGGYEEHEVEALIQVALLCTQGSPMERPKMSEVVRMLEGDGLAERWEEWQKVEVIRQEAERAPRQHNDWIVDSTYNLNAVELSGPR

SEQ ID NO: 92907 - protein, 145 aa, Setaria italica
  misc_feature (141)..(141): Xaa can be any naturally occurring amino acid
  Transcript Sequence Number=SeqID_26933
GGFLGMRRRRWRSGGEGRMAGRRRRGGGGGAGAAWPASAAGGSTPLMPARLSLSWSLARRRGQINARLLLLARVRIELRGRAEEVGLGDAGLEGKGREGRGSATSSSSQEGRKRNNHGANDGDVEVSRSWLRQARIRRRWXRERE

SEQ ID NO: 92908 - protein, 36 aa, Setaria italica
  Transcript Sequence Number=SeqID_26934
MAELPLAAGLLDLRPGKLSPKPPPPPPLPLPARRRA

SEQ ID NO: 92909 - protein, 228 aa, Setaria italica
  Transcript Sequence Number=SeqID_26935
  Gene Ontology: Mol. function=N-acetyltransferase activity; Biological process=metabolic process
  Homolog annotation: Hit_ID=B9SE60; Match level="QueryCoverage=56%, HitCoverage=9%, E-value=3e-17, Identity=35%"; Hit description=DNA binding protein, putative
RLFKDAGWTIKPRKRNDRAKMASYFTAPNREAVHTSLTQAWKFCGNKLYEASADSERGRYPKEWSDVDAFWKDLTDTMAYVDRMLANQHNALTLLQRWQILDPFVAVVFISRKITALQQHKTLRAVNSSTFVLDGSTDMSSESKTMHKAGDLLANRMIQPTPLITDSDCSTLATESYNGHQYLQSCHDVEDSNNRDMNPKLCCNESLNYDASGQTEHHIHTGDDGRQT

SEQ ID NO: 92910 - protein, 185 aa, Setaria italica
  Transcript Sequence Number=SeqID_26936
  Homolog annotation: Hit_ID=Q56W45; Match level="QueryCoverage=75%, HitCoverage=19%, E-value=1e-40, Identity=59%"; Hit description=BZIP -like protein
  Pfam annotation: Domain name=DUF632; Domain location=67-185; Score =3.3; E_value=1.1e-08; Accession=PF04782.4; Description=Protein of unknown function (DUF632)
EYGNRRVTTDQESECGYVARSEYGGTAPSEYAAVPLSLRRDERSEAGDSSSTVTAATEMRMVVRHRTLAEIVAAIEEYFVRAADAGNDVSELLEASRAQLDRNFRQLKKTVYHSNSVLSALSSTWTSKPPLAVRYKLDTNALEMESTEGKSHGSTLERLLAWEKKLYEEVKARESVKIEHEKKAI

SEQ ID NO: 92911 - protein, 82 aa, Setaria italica
  Transcript Sequence Number=SeqID_26937
EDDPFHKDETLPPLDPPEHKEFTEATNGSATRRRSSAGRHRRRQGGVGAEEAAASQAPLLVLPSKPASRHLRGSAGRSLVSP

SEQ ID NO: 92912 - protein, 66 aa, Setaria italica
  Transcript Sequence Number=SeqID_26938
  Gene Ontology: Mol. function=2-polyprenyl-6-methoxy-1,4-benzoquinone methyltransferase activity; Cellular component=mitochondrial matrix; Biological process=ubiquinone biosynthetic process
  Homolog annotation: Hit_ID=Q5VMJ1; Match level="QueryCoverage=65%, HitCoverage=19%, E-value=1e-13, Identity=86%"; Hit description =Putative dihydroxypolyprenylbenzoate methyltransferase
WIWKRIITYTYLGAGWQPLARMGATVTAIDAVDKNIKIASIHAASDPTTASIEYCCTTAGASLPPS

SEQ ID NO: 92913 - protein, 194 aa, Setaria italica
  misc_feature (12)..(12): Xaa can be any naturally occurring amino acid
  Transcript Sequence Number=SeqID_26939
  Gene Ontology: Mol. function=2-polyprenyl-6-methoxy-1,4-benzoquinone methyltransferase activity; Cellular component=mitochondrial matrix; Biological process=ubiquinone biosynthetic process
  Homolog annotation: Hit_ID=Q5VMJ1; Match level="QueryCoverage=98%, HitCoverage=86%, E-value=7e-89, Identity=83%"; Hit description =Putative dihydroxypolyprenylbenzoate methyltransferase
  Pfam annotation: Domain name=Methyltransf_11; Domain location=36-133; Score=69.8; E_value=1e-17; Accession=PF08241.4; Description =Methyltransferase domain
  Pfam annotation: Domain name=Methyltransf_12; Domain location=36-131; Score=29.8; E_value=1.1e-05; Accession=PF08242.4; Description =Methyltransferase domain
  Pfam module annotation: Pfam domain module=Methyltransf _11::Methyltransf_12; Domain location=36-133::36-131
HLMNPTRLSFYXRPHFCRHFRRDSYSSKPLEGLKVIDVGCGGGILSEPLARMGATVTAIDAVDKNIKIASIHAASDPTTASIEYCCTTAEELVKEKRLFDAVISLEVIEHVANPLEFCESLSALTVPNGATVVSTINRSMRAYATAIVAAEYILRWLPKGTHEWSKLVTPKELALMLQKASVSVEERAGQVCNP

SEQ ID NO: 92914 - protein, 59 aa, Setaria italica
  Transcript Sequence Number=SeqID_26940
RREVQKSKKYKLLCVKNEIMSFHTKQLDGCIRMTGMVKKNHAGESSNLLVLGLYQNSIL

SEQ ID NO: 92915 - protein, 78 aa, Setaria italica
  misc_feature (7)..(7): Xaa can be any naturally occurring amino acid
  Transcript Sequence Number=SeqID_26941
  Gene Ontology: Mol. function=potassium ion transmembrane transporter activity; Cellular component=integral to membrane; Biological process=potassium ion transport
  Homolog annotation: Hit_ID=Q9AYN4; Match level="QueryCoverage=100%, HitCoverage=10%, E-value=2e-30, Identity=92%"; Hit description=High -affinity potassium transporter
MFWPTFXVAILAAIIASQAMLSGAFSILSKAISLGCFPRVRVIHTSKKYEGQVYIPEVNFMMGLASIIVTIAFRTTTS

SEQ ID NO: 92916 - protein, 78 aa, Setaria italica
  Transcript Sequence Number=SeqID_26942
  Gene Ontology: Mol. function=protein serine/threonine kinase activity; Cellular component=integral to membrane; Biological process=protein amino acid phosphorylation
  Homolog annotation: Hit_ID=Q65X94; Match level="QueryCoverage=100%, HitCoverage=8%, E-value=6e-31, Identity=76%"; Hit description =Putative receptor like protein kinase
VVLLELVTGKPAIVRDPEPTNIIDWARRRLARGNIEGVVDARMHGNYDVNSVWKVTDIALKCTMQASSQRPSMTEVVG

SEQ ID NO: 92917 - protein, 148 aa, Setaria italica
  Transcript Sequence Number=SeqID_26943
QKIEGFAEENKSKTESMLILVLLSIKELELVCAHSSKHINQFFTVKDPSVDLGIAWASMRAPNNTGCHKVLVMPCHLVGEWFPASNRDRPIGCSIRKFGYLNNGVSLSLRKQKVPQSLVPQKRNFVSFLTDLARSMQGRACGGCVRDW

SEQ ID NO: 92918 - protein, 126 aa, Setaria italica
  misc_feature (103)..(103): Xaa can be any naturally occurring amino acid
  Transcript Sequence Number=SeqID_26944
  Gene Ontology: Mol. function=protein serine/threonine kinase activity; Biological process=protein amino acid phosphorylation
  Homolog annotation: Hit_ID=Q2QMH1; Match level="QueryCoverage=88%, HitCoverage=18%, E-value=2e-14, Identity=47%"; Hit description =Serine/threonine-protein kinase Nek2
  Subcellular localization annotation: CTP_CleavageSite=37; ConfidenceScore=5.21e-01
GGYCKTVASRTSSIMRTPKTTPWKMMTTLKNRLEAPQASYDRTSHIEQFSTTPVDNRSARLARRASLPLPVFETPKRSSISILEQLESPDVSVNSPRIDRIAXFPLASYEDAPVPEQQTTPSVSLP

SEQ ID NO: 92919 - protein, 201 aa, Setaria italica
  misc_feature (80)..(80): Xaa can be any naturally occurring amino acid
  Transcript Sequence Number=SeqID_26945
  Gene Ontology: Mol. function=helicase activity; Cellular component =chloroplast
  Homolog annotation: Hit_ID=B9SZP7; Match level="QueryCoverage=93%, HitCoverage=35%, E-value=1e-27, Identity=37%"; Hit description =Pentatricopeptide repeat-containing protein, putative
  Pfam annotation: Domain name=PPR; Domain location=162-196; Score =17.1; E_value=0.074; Accession=PF01535.12; Description=PPR repeat
  Pfam annotation: Domain name=PPR; Domain location=17-51; Score=13.0; E_value=0.26; Accession=PF01535.12; Description=PPR repeat
  Pfam annotation: Domain name=PPR; Domain location=52-86; Score=24.3; E_value=0.00051; Accession=PF01535.12; Description=PPR repeat
  Pfam annotation: Domain name=PPR; Domain location=92-126; Score=32.6; E_value=1.6e-06; Accession=PF01535.12; Description=PPR repeat
  Pfam module annotation: Pfam domain module=PPR::PPR::PPR::PPR; Domain location=162-196::17-51::52-86::92-126
PPCLRSMSGSGASPTVPVIVTAVHKLAAYGNFEGARRLIDKMPDFGCVPNVVVYTALLDGMCSFGNVDGAVKLIEEMEGXSGLGPNCAPNVVTYTCLVKCLCGEGRVAEALGVPDRMSDRGVMPNRVFVRTLVEGVCTERRVADAYDVVERVVGDGGVSSGQCYNVLLICLWRVGMAAEAEGLAQRMMKKGVQLTPLCLGL

SEQ ID NO: 92920 - protein, 44 aa, Setaria italica
  Transcript Sequence Number=SeqID_26946
  Homolog annotation: Hit_ID=B6TAV6; Match level="QueryCoverage=100%, HitCoverage=14%, E-value=8e-09, Identity=75%"; Hit description=BHLH transcription factor GBOF-1
MANFSHLSHQHMEHGLANASHGTPSFLFCHGTAPADSSSLETSS

SEQ ID NO: 92921 - protein, 88 aa, Setaria italica
  Transcript Sequence Number=SeqID_26947
TGTQKGLAKLQLLNRCPLGLKYSPAHEERAQHRGRGSRWGRRHRQSLADASFPFQRDPTPTETPLSPATVAAAGSAPGSRGARGIARS

SEQ ID NO: 92922 - protein, 64 aa, Setaria italica
  Transcript Sequence Number=SeqID_26948
RRETTSSKASRTASGEGNRDKRRRRRQQQRRAHALLVSCPQEGEGTEAGSRSFEKGCSVEEERG

SEQ ID NO: 92923 - protein, 77 aa, Setaria italica
  Transcript Sequence Number=SeqID_26949
  Gene Ontology: Mol. function=translation elongation factor activity; Cellular component=cytoplasm; Biological process=translational elongation
  Homolog annotation: Hit_ID=B9FBM7; Match level="QueryCoverage=100%, HitCoverage=18%, E-value=6e-40, Identity=98%"; Hit description =Elongation factor 1-alpha
  Pfam annotation: Domain name=GTP_EFTU; Domain location=1-77; Score= -36.7; E_value=1.2e-06; Accession=PF00009.19; Description=Elongation factor Tu GTP binding domain
IDIALWKFETTKYYCTVIDAPGHRDFIKNMITGTSQADCAVLIIDSTTGGFEAGISKDGQTREHALLAFTLGVRQMI

SEQ ID NO: 92924 - protein, 52 aa, Setaria italica
  Transcript Sequence Number=SeqID_26950
AAARSSCSPQTSGAGHSSDEDSASVPYLGGIDLNLSLSPPSQPSSPVAAVAN

SEQ ID NO: 92925 - protein, 67 aa, Setaria italica
  Transcript Sequence Number=SeqID_26951
LYIIKNFTFTCSILAYKNTNDITMIFFDTGIKFTRSFYLESHFYNVPPQFQIISRFGFSRFIDITCT

SEQ ID NO: 92926 - protein, 250 aa, Setaria italica
  misc_feature (71)..(71): Xaa can be any naturally occurring amino acid
  Transcript Sequence Number=SeqID_26952
  Gene Ontology: Mol. function=mismatched DNA binding; Cellular component=MutLalpha complex; Biological process=mismatch repair
  Homolog annotation: Hit_ID=B9SAN7; Match level="QueryCoverage=95%, HitCoverage=23%, E-value=3e-85, Identity=66%"; Hit description=DNA mismatch repair protein pms2, putative
  Pfam annotation: Domain name=MutL_C; Domain location=16-201; Score =79.7; E_value=1.1e-20; Accession=PF08676.3; Description=MutL C terminal dimerisation domain
AATNELDRLFSKDELCHLEVVGQFNLGFIIGKLDQDLFIVDQHAADEKYNFEGLSQSTTLNIQPLLHIVFXVCHLRYTSFCWVFVIIFKCRPLRLDLSPEEEVIVSMNMNTIRTNGFVLEEDLHASPGNHYLLKAVPFSKNITFGVQDVKELISMLADSQGDCSIISSYKLDKTDSVCPSRVRAMLASRACRMSIMIGDPLTKAEMRKILKNLTGLRSPWNCPHGRPTMRHLVDLRAIKNKVSAGPDAGL

SEQ ID NO: 92927 - protein, 47 aa, Setaria italica
  Transcript Sequence Number=SeqID_26953
PQISDGCNFSCYFLAMSKAVLPCMLNKTSVMLNFSIVFQCLCSYIET

SEQ ID NO: 92928 - protein, 124 aa, Setaria italica
  Transcript Sequence Number=SeqID_26954
HAEKDLARLASSVRNAAKFPQLAGSSATLAEVEVSGVLAEAVAAIASASAAVFSAVESVSSAATTAVASSSKKPASLISLVTRSSKAAAASSDEDKEMAALDRLEGLDECIANMEAGSDKVFRS

SEQ ID NO: 92929 - protein, 387 aa, Setaria italica
  misc_feature (66)..(66): Xaa can be any naturally occurring amino acid
  misc_feature (253)..(253): Xaa can be any naturally occurring amino acid
  Transcript Sequence Number=SeqID_26955
  Gene Ontology: Mol. function=nucleic acid binding; Cellular component= nucleosome; Biological process=nucleosome assembly
  Homolog annotation: Hit_ID=Q7XJP0; Match level="QueryCoverage=98%, HitCoverage=22%, E-value=1e-105, Identity=53%"; Hit description =SNF2/SWI2 family global transcription factor
  Pfam annotation: Domain name=Helicase_C; Domain location=236-328; Score=20.0; E_value=0.00092; Accession=PF00271.23; Description =Helicase conserved C-terminal domain
  Pfam annotation: Domain name=zf-C3HC4; Domain location=112-160; Score= 9.1; E_value=0.0093; Accession=PF00097.17; Description=Zinc finger, C3HC4 type (RING finger)
  Pfam module annotation: Pfam domain module=Helicase_C::zf-C3HC4; Domain location=236-328::112-160
QNQLLRAHDEIKMSISRMQLKEKDGEPSAVNIVTREELIPYSVQFTSEKFMSLSSLARVRGQLRYXLKGLALCNKKTLNKHGESLPTSGAVDTATPCSVTGQTISDINNEPCPICQEKVFDQKMVFQCGHFVCCKCCLYMTEQAATQFGKAKKWIMCPTCRQRTDLENVAFVVEKHSDKAEKSTEDQESTISVQGSYGTKIEAVTRRILRITSTDGVAKVLVFSSWNDVLDVLEHSLAANKISYVRMKGGRKXSQAALSQFKGQLSNISVDKAKRTVSKMQPVQVLLMLIQHGANGLNLLEAQHVILVEPLLNPAAEAQAISRIHRVGQDKSTFVHRFIVKKTIEESIYKLNRSRAVCSTINRKSKNFKDEPVLTLKDVESLFPMTA

SEQ ID NO: 92930 - protein, 178 aa, Setaria italica
  misc_feature (13)..(13): Xaa can be any naturally occurring amino acid
  Transcript Sequence Number=SeqID_26956
  Gene Ontology: Mol. function=nucleic acid binding
  Homolog annotation: Hit_ID=B9S4G9; Match level="QueryCoverage=100%, HitCoverage=11%, E-value=5e-32, Identity=42%"; Hit description=Snf2 histone linker phd ring helicase, putative
TLRVIRNHSKTVXGRQYPTIAKKHLLLFEDMRKEFSQARFLSIAQNQLLRAHDEIKMSISRMQLKEKDGEPSAVNIVTREELIPYSVQFTSEKFMSLSSLARVRGQLRYLKGLALCNKKTLNKHGESLPTSGAVDTATPCSVTGQTISDINNEPCPICQEKVFDQKMVFQCGHFVCCK

SEQ ID NO: 92931 - protein, 72 aa, Setaria italica
  Transcript Sequence Number=SeqID_26957
EVRDRETAPAVAPTPREGGAAKAQGLARLSSLRRLWSRGRPDAAAASSRSCRQATAADGTEQERAMRLDTCM

SEQ ID NO: 92932 - protein, 171 aa, Setaria italica
  misc_feature (132)..(132): Xaa can be any naturally occurring amino acid
  Transcript Sequence Number=SeqID_26958
  Gene Ontology: Mol. function=transferase activity; Biological process= biosynthetic process
  Homolog annotation: Hit_ID=B9S1N4; Match level="QueryCoverage=97%, HitCoverage=34%, E-value=1e-57, Identity=65%"; Hit description =Glycosyltransferase, putative
GVDNLVVSWHGISLEALHSGIFQDLARGEDEPMSPALNQSLGQSVFRVLSEVRFFRSYAHQVAISDSTGEMLRDVYQIPSRRVHVILNGVDEAVFEPDPALGRAFREEAGVPRGADLVLGVSGRLVKDKGHXLLYEAFSKLVLRHPNVYLLIAGKGPWENRYMDLGRNAKV

SEQ ID NO: 92933 - protein, 156 aa, Setaria italica
  misc_feature (105)..(105): Xaa can be any naturally occurring amino acid
  Transcript Sequence Number=SeqID_26959
  Gene Ontology: Mol. function=protein serine/threonine kinase activity
  Homolog annotation: Hit_ID=Q9LX30; Match level="QueryCoverage=82%, HitCoverage=10%, E-value=1e-33, Identity=58%"; Hit description =Probable serine/threonine-protein kinase GCN2
  Pfam annotation: Domain name=RWD; Domain location=28-143; Score =103.4; E_value=7.8e-28; Accession=PF05773.14; Description=RWD domain
MGHSSRKKKKRGAAGRKAAKDHAGQLEGDQTALDEELTALTSIFGEDFKVKSESPQTRFNICIRPYSDGMGFEDLNVSAILDVTCFPGYPHKCPKLRIIPEKNLXSKEDANQLLSLLVDQANIYSREGRVMIFNLFEVAQEFLSEIAPAHVSTSNA

SEQ ID NO: 92934 - protein, 42 aa, Setaria italica
  Transcript Sequence Number=SeqID_26960
  Gene Ontology: Mol. function=phenylalanine ammonia-lyase activity; Cellular component=cytoplasm; Biological process=phenylpropanoid metabolic process
  Homolog annotation: Hit_ID=Q7F929; Match level="QueryCoverage=97%, HitCoverage=5%, E-value=8e-12, Identity=83%"; Hit description =Phenylalanine ammonia-lyase
MECENGRVAAANGDGLCMATPRADPLNWGKAAEELMGSHLDE

SEQ ID NO: 92935 - protein, 77 aa, Setaria italica
  Transcript Sequence Number=SeqID_26961
  Gene Ontology: Mol. function=metal ion binding
  Homolog annotation: Hit_ID=B6U4A7; Match level="QueryCoverage=98%, HitCoverage=46%, E-value=8e-11, Identity=64%"; Hit description=RING -H2 finger protein
MGISSMPAPKDSLMGFVLYNTAVSVAILAGLVRAALVFLGLAAPSPWEWEGLAADDHHHHHRPVVSITPTGPSLADR

SEQ ID NO: 92936 - protein, 160 aa, Setaria italica
  Transcript Sequence Number=SeqID_26962
  Gene Ontology: Mol. function=metal ion binding
  Homolog annotation: Hit_ID=Q8S7A7; Match level="QueryCoverage=88%, HitCoverage=24%, E-value=1e-39, Identity=63%"; Hit description =Putative DHHC-type zinc finger protein
ISSVTGFSTTSSFGPLQRGSWCTPPRLLLEDQYVSHPDMPQNSVGKKAKEDEATKRKSPVKISPWTLARLNAEEVSKAAAEAKKKSKVLQPITRRAEVAKHDKRRPDKSRVFLPEQSPDSRARTSASGTDSNYSDVAMVTPGSLAPLQHEARSAFNQALH

SEQ ID NO: 92937 - protein, 878 aa, Setaria italica
  misc_feature (340)..(340): Xaa can be any naturally occurring amino acid
  Transcript Sequence Number=SeqID_26963
  Gene Ontology: Mol. function=ATPase activity, coupled to transmembrane movement of ions, phosphorylative mechanism; Cellular component=integral to membrane; Biological process=phospholipid transport
  Homolog annotation: Hit_ID=Q10LU3; Match level="QueryCoverage=100%, HitCoverage=67%, E-value=0.0, Identity=88%"; Hit description =Phospholipid-translocating P-type ATPase, flippase family protein, expressed
  Pfam annotation: Domain name=Hydrolase; Domain location=104-606; Score=14.8; E_value=0.0024; Accession=PF00702.18; Description =haloacid dehalogenase-like hydrolase
GVWLFKNSKNLDALPYYRRKYFTFGRENRKDFKFYGIALEIFFSFLSSVIIFQIMIPISLYITMELVRVGQSYFMIGDTRMYDSNSGSRFQCRSLNINEDLGQIRYIFSDKTGTLTQNKMEFQQASIYGKNYGSSLQVTSDFSHEISTTESLRQSGRKPKINVDSALMALLNQPLIGEERLAAHDFFLTLAACNTVIPVSTETSHDLTNEVDEIGAIDYQGESPDEQALVTAASAYGYTLVERTTGHIVIDVLGERLRLDVLGLHEFDSVRKRMSVVVRFPDNNVKVLVKGADTSMLSILKVEIGDGLYDSLHAKIIEATKNHLSGYSSEGLRTLVIGSXKNLTDAEFIEWQESYEEASTSMHERSAKLRQTAGLVECNLTLLGATGIEDKLQDGVPEAIESLRQAGIKVWVLTGDKQETAISIGLSCRLLTPSMHSIIINGSSEFECKHLLADAKARFGIKSADFRRDSQGAEDLYNGDISKLRSSNGHMSESATPNFELTGVIAGDKSEYSEKVTNFDGTELALIIDGSSLVYILEKDLESELFDLATSCKVVICCRVAPLQKAGIVDLIKSRTSDMTLAIGDGANDVSMIQMADVGVGICGQEGRQAVMASDFAMGQFRFLKRLLLVHGHWNYQRIAYMILYNFYRNAVFVLMLFWYILYTAYSATLALTDWSSVFYSLIYTSVPTVVVGILDKDLSHNTLLYYPRLYEAGLRNEGYNLTLFWITMVDTLWQSLVLFYVPFFTYNISTMDIWSMGSLWTIAVVIIVNIHLAMDIRRWVLITHLAVWGSIAATFLCMVLIDSIPIFPNYGTIYNMAASRTYWLSVCLIIVLGLLPRFLCKVIYQTFWPSDIQIAREAELLKKLPQPLGSRPESDIS

SEQ ID NO: 92938 - protein, 361 aa, Setaria italica
  Transcript Sequence Number=SeqID_26964
  Homolog annotation: Hit_ID=B6UA78; Match level="QueryCoverage=100%, HitCoverage=69%, E-value=6e-52, Identity=41%"; Hit description=F-box domain containing protein
  Pfam annotation: Domain name=FBD; Domain location=302-351; Score =20.4; E_value=0.0006; Accession=PF08387.2; Description=FBD
AAVTRGAREVEVDLTPSQEDADPGSAAFLELPRDLFRARNSLERLALGRLSLRAVPLPAAGLAGLRSLSLSHADVTDEALRGVLANCGALESLSLRCCSLLTTVSVASERLRVLELLGCRSVRELRVAAPALESFALYGNVILSVTDWFDSVAVDFGAAPALRDVYLSQMDCCGSLDRNIDYYYPFVYHVPQARILTLCSVGLVVPIFSLDSDDDNHFDHFPYAHLNGDDSAYIDMPNLQELQLLMGSLEEEMSTQDPRFPERVYYFFNYTSLPVLERLFIRLASNPANGSSSEPDEDDDDAEIRFGPHEIVLGQLTFIKVVNFRGTWRERRLVAYLLKRAPILEQLVLVTVRGEGAPGDE

SEQ ID NO: 92939 - protein, 81 aa, Setaria italica
  Transcript Sequence Number=SeqID_26965
  Gene Ontology: Mol. function=galactosyltransferase activity; Cellular component=membrane; Biological process=protein amino acid glycosylation
  Homolog annotation: Hit_ID=B6UCA7; Match level="QueryCoverage=90%, HitCoverage=22%, E-value=3e-28, Identity=80%"; Hit description=Hypro1
LTYTLGPEDLMVGKWLNLAGRGRNRYDLKPRMYDLNWDMDNFRPDTVAVHMLKDNYRWAAAFRYFNVTAGIEPSDLYHQLP

SEQ ID NO: 92940 - protein, 58 aa, Setaria italica
  Transcript Sequence Number=SeqID_26966
  Gene Ontology: Mol. function=electron carrier activity; Biological process=oxidation reduction
  Homolog annotation: Hit_ID=B6SXJ1; Match level="QueryCoverage=100%, HitCoverage=11%, E-value=3e-13, Identity=62%"; Hit description =Flavonoid 3-monooxygenase
GLRMVQLVLANLLHGFTWRLPDGVVAEELSMEEKFGISVSRVDHLKAIPEAKLPDHLY

SEQ ID NO: 92941 - protein, 114 aa, Setaria italica
  Transcript Sequence Number=SeqID_26967
  Gene Ontology: Mol. function=1,3-beta-glucan synthase activity; Cellular component=1,3-beta-glucan synthase complex; Biological process=1,3-beta-glucan biosynthetic process
  Homolog annotation: Hit_ID=Q5JLH4; Match level="QueryCoverage=100%, HitCoverage=20%, E-value=3e-28, Identity=57%"; Hit description =Callose synthase 1 catalytic subunit-like protein
SEHDHLKNATIRSLLLEFILSLRFLIYQYGIVYHLHIVHENKSFMIYALSWLVIAVALVSLKVVSMGREKFVTRFQLVFRILKGIVFIVLIGLLVLLFVGFDLAIADVGASILA

SEQ ID NO: 92942 - protein, 75 aa, Setaria italica
  Transcript Sequence Number=SeqID_26968
MDSLLASYSSDDEADEEEEGEEADSGATAASAAASRKGAGGALSCMDGLDDALPIKRGLSNFFSGKSRSFANLQD

SEQ ID NO: 92943 - protein, 100 aa, Setaria italica
  Transcript Sequence Number=SeqID_26969
FISFKRVSLLEELANSLHFSNGITAGSTYHHGRRDDRSDPELLQRIHRPTMSSSSICIYIISFPCRSILQPLPAPPSSVPVAEGGRKGGSAVSEVDATRG

SEQ ID NO: 92944 - protein, 159 aa, Setaria italica
  Transcript Sequence Number=SeqID_26970
  Homolog annotation: Hit_ID=B6SUT2; Match level="QueryCoverage=50%, HitCoverage=31%, E-value=3e-13, Identity=50%"; Hit description=MTD1
ARGDKGGGCVGRRAGLFVLETVEEAAEEERSSIGAASEDEEEEGEEADSGATAASAAASRKGAGGALSCMDGLDDALPIKRGLSNFFSGKSRSFANLQDAASAVSSARDLAKPENPFNKRRRVLRCCSIRRVASTSLTALPPFLPPSATGTDDGGAGSG

SEQ ID NO: 92945 - protein, 76 aa, Setaria italica
  Transcript Sequence Number=SeqID_26971
  Gene Ontology: Mol. function=oxidoreductase activity, acting on single donors with incorporation of molecular oxygen, incorporation of two atoms of oxygen; Cellular component=cytoplasm; Biological process=fatty acid biosynthetic process
  Homolog annotation: Hit_ID=A1XCI7; Match level="QueryCoverage=100%, HitCoverage=8%, E-value=8e-24, Identity=73%"; Hit description =Lipoxygenase
TSSWTDDGEVLQLLDRFREELRRVEKQVAERNRDPRLKNRRGPAKVPYTLLFPDVGNVGGKEKGITGKGIPNSVSI

SEQ ID NO: 92946 - protein, 116 aa, Setaria italica
  Transcript Sequence Number=SeqID_26972
  Gene Ontology: Mol. function=oxidoreductase activity; Biological process=metabolic process
  Homolog annotation: Hit_ID=B6U036; Match level="QueryCoverage=87%, HitCoverage=37%, E-value=1e-41, Identity=82%"; Hit description =Alcohol dehydrogenases
TRQWIGRGAASPDWTPSSTATPTRLSAMELGKHKIRVNAACRGLHLQDKFPVSVGKEKAEKATAQVMPLRRWLDPDKDLASTVLYLVGDESRYMTGTTIYVDGAQSIVRPRMRSYM

SEQ ID NO: 92947 - protein, 134 aa, Setaria italica
  misc_feature (58)..(58): Xaa can be any naturally occurring amino acid
  Transcript Sequence Number=SeqID_26973
  Gene Ontology: Mol. function=oxidoreductase activity; Biological process=metabolic process
  Homolog annotation: Hit_ID=B6U036; Match level="QueryCoverage=82%, HitCoverage=40%, E-value=9e-44, Identity=78%"; Hit description =Alcohol dehydrogenases
RGSLAATAEEVRRCGGGGVAVVGLDFESCDEAAVDAAVDRAWRCFAGLDAFVNCYSYXEGEVQDCLSISEDEYKKTMKVNVTTPWFLMKAIAKRFRDTKSGGSVVFLTQIIGAERGLYPGAAAYGTSLGAVHQL

SEQ ID NO: 92948 - protein, 78 aa, Setaria italica
  Transcript Sequence Number=SeqID_26974
LFWVCELTLYSSENAQRNSGILRCMQTKSFKATDYRKVKDRLHFFHKREEDLALCLQYSKKVKHEMEKLIKLAKTKCT

SEQ ID NO: 92949 - protein, 154 aa, Setaria italica
  Transcript Sequence Number=SeqID_26975
SLSIVKICFALNKLRNLQELEIRGYPTVRRQERSWDGFQQLTSLKKFRMFMCTVIFATDLELFLPPSIEELEFSWCNITGIQLSRLLLNLGLLKNLKVDSCVGVTSLPVGLFTDEQNETEEGSWRIPPGCLTTMKSLQISFTRGKEDPSSVMLF

SEQ ID NO: 92950 - protein, 212 aa, Setaria italica
  Transcript Sequence Number=SeqID_26976
  Gene Ontology: Mol. function=phosphoric diester hydrolase activity; Cellular component=nucleus; Biological process=DNA repair
RKRLRAISESEDPLSILRDSSCSGNGGADAGVKELRQDGAGELCSDNPTNPVPGENLLQDDCKLDQDKLEHHPDVAKGCDVEAELCQGSKGCGNDNAEKTGWSSGNGEQHHNEGCYSDGSTFFLNRLVGHEPHSGVTLPQLLHPVENLVRVFIATFTSDISWFLDYCKIPQHLPVTVACHNKERCWSASSENRMAAPEASHPNLLLKPLTLS

SEQ ID NO: 92951 - protein, 56 aa, Setaria italica
  Transcript Sequence Number=SeqID_26977
LCMIVIYIENSMQMQAVFFLSKVAQCQKSILGPCLANCIDLSLNFLAGGYDFMLTF

SEQ ID NO: 92952 - protein, 41 aa, Setaria italica
  Transcript Sequence Number=SeqID_26978
LFNKIQVIRGTPYGRSADIWSLGCTVLEMFIRRPPYPDDNW

SEQ ID NO: 92953 - protein, 57 aa, Setaria italica
  Transcript Sequence Number=SeqID_26979
YWRNLEHDESLSLECVVLLCASKTEGFHGHKIQRCPFCCLFIRLMFLFYISLYCMRQ

SEQ ID NO: 92954 - protein, 166 aa, Setaria italica
  Transcript Sequence Number=SeqID_26980
  Gene Ontology: Mol. function=metal ion binding; Biological process =metal ion transport
  Homolog annotation: Hit_ID=B6TW07; Match level="QueryCoverage=42%, HitCoverage=48%, E-value=3e-14, Identity=61%"; Hit description=Metal ion binding protein
  Pfam annotation: Domain name=HMA; Domain location=3-71; Score=22.0; E_ value=0.0024; Accession=PF00403.18; Description=Heavy-metal -associated domain
KVVLFLGLHDNDAKEKRKVLKAVSALPGLDLISIDMKASKLTVVGMVEPIELVTKLRKLWHAEILSVGPAKEDKAAAAGDIDRREGAGGGGVEEGDYRKHRQEVTAEQVVERPADMRSPWPHAVVYPAPHPYPYHPHHQYVDGGHGAREDPRDYYVAGGLGARGKP

SEQ ID NO: 92955 - protein, 96 aa, Setaria italica
  Transcript Sequence Number=SeqID_26981
  Subcellular localization annotation: CTP_CleavageSite=84; ConfidenceScore=5.49e-01
SPRPGILVCIYRPAASRVAYPPSRSRLPTAAAGARSARPGARLAPPGTEGGVVVAVPPGRPRILGFRRRPLSLASEAETREKRRCGRGWGGRERET

SEQ ID NO: 92956 - protein, 136 aa, Setaria italica
  Transcript Sequence Number=SeqID_26982
  Gene Ontology: Mol. function=catalytic activity; Cellular component =membrane; Biological process=plant-type hypersensitive response
  Homolog annotation: Hit_ID=B6TB18; Match level="QueryCoverage=55%, HitCoverage=24%, E-value=3e-23, Identity=71%"; Hit description=Lipid phosphate phosphatase 3
ATLDAAGRYIHTKIPGRGEAPICGDIDEPLVSRRTDTMADQLGCTMRSHGMILARLHMYDWIILLLLAVIDGLLNIIEPFHRFVGKDMMTDLRYPLKGNTVPFWAVPVCLIILIFKYVLILLHLFKSSCLFLNLFF

SEQ ID NO: 92957 - protein, 306 aa, Setaria italica
  Transcript Sequence Number=SeqID_26983
  Gene Ontology: Mol. function=catalytic activity; Cellular component =membrane; Biological process=plant-type hypersensitive response
  Homolog annotation: Hit_ID=B6TB18; Match level="QueryCoverage=99%, HitCoverage=99%, E-value=1e-152, Identity=85%"; Hit description =Lipid phosphate phosphatase 3
  Pfam annotation: Domain name=PAP2; Domain location=97-247; Score =148.6; E_value=1.9e-41; Accession=PF01569.13; Description=PAP2 superfamily
MADQLGCTMRSHGMILARLHMYDWIILLLLAVIDGLLNIIEPFHRFVGKDMMTDLRYPLKGNTVPFWAVPIFGIILPWAIFFGIYFKKKNFYDLHHGILGILYSVLITAVITDAIKDGVGRPRPDFFWRCFPDGNDVYDNITTGVICHGEKSVIKEGHKSFPSGHSSWSFAGLGFLAWYLAGKITAFDRKGHVAKLCIVFLPLLTASLVAVSRVDDYWHHWQDVFAGAIIGLTVASFCYLQFFPYPFDADAFWPHAYMVQLAEERNSRNANSYSARPTEIETVNIPGQGGITLRDTLNDVESGRSS

SEQ ID NO: 92958 - protein, 235 aa, Setaria italica
  misc_feature (166)..(166): Xaa can be any naturally occurring amino acid
  Transcript Sequence Number=SeqID_26984
  Homolog annotation: Hit_ID=B6TBE4; Match level="QueryCoverage=97%, HitCoverage=55%, E-value=9e-29, Identity=36%"; Hit description=F-box domain containing protein
MAVLNPLARRSERFFDLAHEDTLQGHRGYPVVCYNACLLCSDEDPLSFRVVLLAHDESRVRATFFSSDTNEWSILPWVNVPASSSRKKFWLLDSSMQSKGFLYWVYKNRKYMITLNTVTMEFSVDELPQLLKNEHCSFVVGETSSGARCIVYAIDFCVGLLLRRTXIYGIIERWDLQWAARLDTQLDQVLGELISVYDELQVVAVRDGFAYLATSEKSDDTQTPSWFLFLLPLVL

SEQ ID NO: 92959 - protein, 97 aa, Setaria italica
  misc_feature (11)..(11): Xaa can be any naturally occurring amino acid
  Transcript Sequence Number=SeqID_26985
  Gene Ontology: Mol. function=ARF GTPase activator activity; Cellular component=Golgi apparatus; Biological process=regulation of ARF GTPase activity
  Homolog annotation: Hit_ID=Q5KQL0; Match level="QueryCoverage=98%, HitCoverage=25%, E-value=7e-49, Identity=89%"; Hit description =Putative zinc finger protein
  Pfam annotation: Domain name=ArfGap; Domain location=1-95; Score =103.5; E_value=7.4e-28; Accession=PF01412.10; Description=Putative GTPase activating protein for Arf
CQMCFDCNAKXTWASVTYGIFLCLDCSAVHRSLGVHITFVRSTNLDSWTPDQLKMMAFGGNNRAHAFFKQHGWTDGGKVEAKYTSRAAELYWQMWDR

SEQ ID NO: 92960 - protein, 76 aa, Setaria italica
  misc_feature (7)..(7): Xaa can be any naturally occurring amino acid
  Transcript Sequence Number=SeqID_26986
  Gene Ontology: Mol. function=ARF GTPase activator activity; Biological process=regulation of ARF GTPase activity
  Homolog annotation: Hit_ID=B6TII3; Match level="QueryCoverage=77%, HitCoverage=14%, E-value=6e-14, Identity=72%"; Hit description=ADP -ribosylation factor GTPase-activating protein 3
SSQFFGXTQNREEKEAQLSLQKFAGSSSISSADLFGRDMNNSDLDLSASDLINRISFQVAFVNLYLLSIGSWIRSF

SEQ ID NO: 92961 - protein, 452 aa, Setaria italica
  Transcript Sequence Number=SeqID_26987
  Gene Ontology: Mol. function=ARF GTPase activator activity; Cellular component=Golgi apparatus; Biological process=regulation of ARF GTPase activity
  Homolog annotation: Hit_ID=Q5KQL0; Match level="QueryCoverage=76%, HitCoverage=91%, E-value=1e-138, Identity=70%"; Hit description =Putative zinc finger protein
  Pfam annotation: Domain name=ArfGap; Domain location=54-170; Score =177.1; E_value=5.2e-50; Accession=PF01412.10; Description=Putative GTPase activating protein for Arf
  Subcellular localization annotation: CTP_CleavageSite=43; ConfidenceScore=5.45e-01
SSAFLLCPPPAPQISGAARADPNSSDRPTEFNRIHSPRRRRTAAMAFDSFTDKNAVFRRLKAKPENKMCFDCNAKNPTWASVTYGIFLCLDCSAVHRSLGVHITFVRSTNLDSWTPDQLKMMAFGGNNRAHAFFKQHGWTDGGKVEAKYTSRAAELYRQILSKEVAKSATNDNALPSSPVSSEPPKPSDDFPEFKLSDAPAENLNGKQEPKSPKAPPRSPKAPTYPTFASSVKKPIGAKKVGGKTGGLGVRKLTTKPNESLYEQKPEEPKPVVPALTTTSTTKSGPSLHSRFEYMENEPSADSKSGGSHVTGHVAPPKTSDFFQEYGMGNGFQKKSSNASKTQIQETDEARKKFSNAKAISSSQFFGTQNREEKEAQLSLQKFAGSSSISSADLFGRDMNNSDLDLSASDLINRISFQASQDLSSLKDIAGETGKKLTSLASNFISDLDRML

SEQ ID NO: 92962 - protein, 89 aa, Setaria italica
  misc_feature (65)..(65): Xaa can be any naturally occurring amino acid
  Transcript Sequence Number=SeqID_26988
  Gene Ontology: Mol. function=ubiquitin thiolesterase activity; Cellular component=nucleus; Biological process=ubiquitin-dependent protein catabolic process
  Homolog annotation: Hit_ID=Q2QQM3; Match level="QueryCoverage=100%, HitCoverage=9%, E-value=1e-34, Identity=73%"; Hit description =Ubiquitin-specific protease 12, putative, expressed
YDPSRGYLVNDTVVVEAEVAVRRMVDYWTYDSKKETGYVGLKNQGATCYMNSLLQTLYHIPYFRXGSIPLALQSLFYKLQYSDSSVATK

SEQ ID NO: 92963 - protein, 117 aa, Setaria italica
  misc_feature (71)..(71): Xaa can be any naturally occurring amino acid
  misc_feature (81)..(81): Xaa can be any naturally occurring amino acid
  Transcript Sequence Number=SeqID_26989
  Gene Ontology: Mol. function=protein dimerization activity
  Homolog annotation: Hit_ID=Q53M48; Match level="QueryCoverage=91%, HitCoverage=10%, E-value=2e-18, Identity=40%"; Hit description=HAT family dimerisation domain containing protein
DKSTLKETKWGETKWGSHHTTLNRIDTMWDTVLEVLVIVDEHGSRGSRASFSIETMESFEFVFILKMMLKXFVIIKDYHLXLQRKDQDSIQAVGLLVVVNERLKTLRDNGWEALFED

SEQ ID NO: 92964 - protein, 87 aa, Setaria italica
  Transcript Sequence Number=SeqID_26990
RGVGRDPRRQGFDPFYVCGFGKALFLDTHVYWAYIHVHTCLFLQKVNGRIHTVGTVHKQCPLCAFPVPAISFLFSPSCVCWCLGRKT

SEQ ID NO: 92965 - protein, 87 aa, Setaria italica
  Transcript Sequence Number=SeqID_26991
LRGSEGSRRRREVMSLSGRRKGAGDWAGTGTSPIAAGRAEAWGGGEADADWIVLRRSQSPNATRQSLSIGGDDDGGEKVEETKQVQF

SEQ ID NO: 92966 - protein, 106 aa, Setaria italica
  misc_feature (11)..(11): Xaa can be any naturally occurring amino acid
  Transcript Sequence Number=SeqID_26992
  Subcellular localization annotation: CTP_CleavageSite=14; ConfidenceScore=5.20e-01
GCATPLATAPXAPAAMSAASAPSANRNSRPHPHLPLLLVLHGASPGHPPPLRVLDDGGPCIAGAKQLAFYSGEAGRGRADSDDSRARGTAGGSRGGRRIWEFCSVY

SEQ ID NO: 92967 - protein, 59 aa, Setaria italica
  Transcript Sequence Number=SeqID_26993
ILVFYCINLVKLKIFYLSYNLESREHSRAHGLRTRPGPMPSGRDISNSQDNDRLGRTRR

SEQ ID NO: 92968 - protein, 140 aa, Setaria italica
  Transcript Sequence Number=SeqID_26994
  Gene Ontology: Mol. function=metal ion binding; Cellular component =integral to membrane
  Homolog annotation: Hit_ID=B6TIX4; Match level="QueryCoverage=86%, HitCoverage=27%, E-value=3e-64, Identity=93%"; Hit description =Palmitoyltransferase ZDHHC9
  Pfam annotation: Domain name=zf-DHHC; Domain location=5-64; Score =92.1; E_value=1.9e-24; Accession=PF01529.12; Description=DHHC zinc finger domain
LLRVLNYLLYYLVYCLYRPPRCSHCSICNNCVERFDHHCPWVGQCIGLRNYRFFYMFVFSTTLLCLYVFAFCWVYVIKIRNAEHLSIWKALAKTPASIVLIIYCFLCVWFVGGLSVFHLYLMSTNQTTYENFRYRYDRHF

SEQ ID NO: 92969 - protein, 439 aa, Setaria italica
  Transcript Sequence Number=SeqID_26995
  Gene Ontology: Mol. function=metal ion binding; Cellular component =plasma membrane; Biological process=multicellular organismal development
  Homolog annotation: Hit_ID=B6TIX4; Match level="QueryCoverage=95%, HitCoverage=97%, E-value=0.0, Identity=82%"; Hit description =Palmitoyltransferase ZDHHC9
  Pfam annotation: Domain name=zf-DHHC; Domain location=144-208; Score =120.7; E_value=4.9e-33; Accession=PF01529.12; Description=DHHC zinc finger domain
MYVPPLPGDAGGRGDAAAGEQPRVYQVWRGSNEFFLQGRFIFGPDVRSVFLTMFLIIAPVVAFCVFVARHLMNDFPDSWGISVMIVVVVFTVYDLTLLLCTSGRDPGIIPRNTHPPEPESIDGVNESGGQTPQQFRLPRTREVIVNGISVRVKYCDTCMLYRPPRCSHCSICNNCVERFDHHCPWVGQCIGLRNYRFFYMFVFSTTLLCLYVFAFCWVYVIKIRNAEHLSIWKALAKTPASIVLIIYCFLCVWFVGGLSVFHLYLMSTNQTTYENFRYRYDRRDNPYNRGILNNFLEIFCTAIPPSKNNFRARVTVEQGLQQTRSQSRGFMSPNMGKPIGDLEMGRKPVPWDEPRTAADIRDLEAGLGGMFEEKEGRIAHASPDMSRDELPVEFVDGRAGMHSRESSWVRRGTDEFEASMAAFGLEADGGNSVARTGTH

SEQ ID NO: 92970 - protein, 44 aa, Setaria italica
  Transcript Sequence Number=SeqID_26996
  Pfam annotation: Domain name=DVL; Domain location=23-41; Score=35.3; E_value=2.4e-07; Accession=PF08137.4; Description=DVL family
LVTRMKLVGSGSKRRGGLGRALKEHKARLYIIRRCVVMLLRWDD

SEQ ID NO: 92971 - protein, 72 aa, Setaria italica
  Transcript Sequence Number=SeqID_26997
  Homolog annotation: Hit_ID=B6SIX4; Match level="QueryCoverage=81%, HitCoverage=50%, E-value=7e-11, Identity=61%"; Hit description =Succinate dehydrogenase subunit 3
  Subcellular localization annotation: CTP_CleavageSite=55; ConfidenceScore=5.23e-01
MQSDFAPFLWFCLVEACSSFHKISHFKFTAFIFSGALGSSSSNLEQARGYTSSPLAALRPNMSAPGSRSLHT

SEQ ID NO: 92972 - protein, 117 aa, Setaria italica
  misc_feature (61)..(61): Xaa can be any naturally occurring amino acid
  Transcript Sequence Number=SeqID_26998
  Gene Ontology: Mol. function=succinate dehydrogenase activity; Cellular component=membrane
  Homolog annotation: Hit_ID=B6SIX4; Match level="QueryCoverage=100%, HitCoverage=100%, E-value=1e-51, Identity=87%"; Hit description =Succinate dehydrogenase subunit 3
  Subcellular localization annotation: CTP_CleavageSite=63; ConfidenceScore=5.22e-01
MEKYNNNTRFAPLRDAPFAVRGALGSSSSNLEQARGYTSSPLAALRPNMSAPGSRSLHTSXPLAAPVANRPLSPHLPLKKPQFSATFSISHRIFGVALGVAIISVPLATKFSLMFGV

SEQ ID NO: 92973 - protein, 76 aa, Setaria italica
  Transcript Sequence Number=SeqID_26999
QHMYRYVSGTDRMIIRSLGNSSEITRNMDIHTQSLATRNTHAETPPGPSNLQTNSSSISCMDLPAEAIWAVGRHLR

SEQ ID NO: 92974 - protein, 117 aa, Setaria italica
  Transcript Sequence Number=SeqID_27000
  Gene Ontology: Biological process=response to stress
RRVMVLADGRAEAAGALQWALSQAVRSNDTVVLLTVVKPVAQDAVSDSCVKMLGTKSQQHLEAFKTLCESTRPEVKVETCAVEAEERAPAVVEAARRWLQALWRRRWRGGSTGSGGT

SEQ ID NO: 92975 - protein, 35 aa, Setaria italica
  Transcript Sequence Number=SeqID_27001
VHDHREKPGYVACTIAAAIAAVAILFGITKGTHVW

SEQ ID NO: 92976 - protein, 124 aa, Setaria italica
  Transcript Sequence Number=SeqID_27002
  Gene Ontology: Cellular component=ribosome
  Homolog annotation: Hit_ID=B6T286; Match level="QueryCoverage=87%, HitCoverage=64%, E-value=3e-26, Identity=56%"; Hit description=60S ribosomal protein L18A
RPAPPPGFGGGGGGGGYHNQQQPYAPAEPYYAEGYQAVPGYGEVVEGRPVRMRRLPCCGLGLGWCLFITGFFLAAIPWYVGAFIMICVRVHDHREKPGYVACTIAAAIAAVAILFGITKGTHVW

SEQ ID NO: 92977 - protein, 94 aa, Setaria italica
  Transcript Sequence Number=SeqID_27003
PARPPGAPPSAAARIFPAAAAAWRKIGEQICPWNLRQRPRASWQQAPSYAAMGRLARCYAFGQEACAFAGGLPRKDDARSSSTSQEGTRDAGRV

SEQ ID NO: 92978 - protein, 146 aa, Setaria italica
  Transcript Sequence Number=SeqID_27004
KVKKKERTIQIKGEEYPWMQNRLPDISCGSPSRALSAPTPSNPLLELRLLNLPRHPHLVLLSLVPPLWSMLDPHANNPDLKLRRTCLSMEPAPASSSILATGSLVRYHGQAHALLRFWSRSLCIRRRPPSQGRRTLELNKPEGTRD

SEQ ID NO: 92979 - protein, 207 aa, Setaria italica
  Transcript Sequence Number=SeqID_27005
  Gene Ontology: Mol. function=structural constituent of ribosome; Cellular component=intracellular; Biological process=translation
  Homolog annotation: Hit_ID=B6TH56; Match level="QueryCoverage=100%, HitCoverage=100%, E-value=1e-104, Identity=87%"; Hit description=60S ribosomal protein L24
  Pfam annotation: Domain name=Ribosomal_L28; Domain location=45-106; Score=59.1; E_value=1.7e-14; Accession=PF00830.11; Description =Ribosomal L28 family
MSFRAQEMYKKVVRRVGAEGKLPAELMKSVKDMLPDSKVVMGRAKRGIFAGRHIQFGNKVSEDGGNKSRRTWKPNVQDKRLFSYIHDRHIRVKVTTHALRCIDKAGGIDEYLLKTPYNKMDTEMGIVWKAKIEKMYSEMAEMEVGFFPPEEEAKIEQGFDEVRAAKRDFRREARRALAKQRQLEVGKDQTTEVTDTKEELSDAAAKV

SEQ ID NO: 92980 - protein, 46 aa, Setaria italica
  Transcript Sequence Number=SeqID_27006
SMMEFLNLYVQVILLKWMSNFQNRITYSSTTHAIHNEYLNFFSFIF

SEQ ID NO: 92981 - protein, 90 aa, Setaria italica
  Transcript Sequence Number=SeqID_27007
  Gene Ontology: Mol. function=electron carrier activity; Cellular component=endoplasmic reticulum membrane; Biological process =oxidation reduction
  Homolog annotation: Hit_ID=Q2MJ03; Match level="QueryCoverage=97%, HitCoverage=17%, E-value=1e-23, Identity=58%"; Hit description =Cytochrome P450 monooxygenase CYP94C9
TRNAFDVASTLSARRATVPMQIIWRLKRFFNYGDERKLRDAVRLVDRLAEEVIRQRRKLGGAASGSDLLSRFMGSINDDKYLRDIVVSFM

SEQ ID NO: 92982 - protein, 147 aa, Setaria italica
  misc_feature (101)..(101): Xaa can be any naturally occurring amino acid
  Transcript Sequence Number=SeqID_27008
  Subcellular localization annotation: CTP_CleavageSite=72; ConfidenceScore=5.81e-01
PAPPASTPAAAWFDGLIASASPYRAQVSGFLSSLFPANSSSSVPPSGVAARRGGPRGGGFAASAPQAGGSISSAVRPGEQLGSGGGVPASSAGGAPSRGSXPAPGDATAAVPIGAPPDDDHVQVGAEAKHSTGTATAEAKGGGPGPG

SEQ ID NO: 92983 - protein, 51 aa, Setaria italica
  Transcript Sequence Number=SeqID_27009
TMYSQYPGSEISAICFIPPTDSNAIKEVQDLVSCMCSSDFRYYDMMPHQSI

SEQ ID NO: 92984 - protein, 248 aa, Setaria italica
  Transcript Sequence Number=SeqID_27010
  Homolog annotation: Hit_ID=B4FNT4; Match level="QueryCoverage=100%, HitCoverage=100%, E-value=1e-108, Identity=73%"; Hit description =Circadian clock coupling factor ZGT
MVLVVKQHRCTHSASCVCTKGHLSEDALFLVFRHMNWNPRLIAILSCVCKWFDEVAKQVLWKEFCHARAPKMMLDLHSGGSHIVDGNWKALGKLLIYCNGCTKGGLFNNIHVPGHFVFRTRFSRTAGKSFLPLPCKSDVLYVSDPCEHLDQGEEGDLGFFRGIFKSFATSRVKKMLIEKRARFHPRELCPYCKAKLWNMFQENMIPRSASARLGAYDDSVEYFVCLNGHVIGISTLLPLSDSEEAADE

SEQ ID NO: 92985 - protein, 148 aa, Setaria italica
  Transcript Sequence Number=SeqID_27011
  Homolog annotation: Hit_ID=Q7XTT5; Match level="QueryCoverage=99%, HitCoverage=18%, E-value=4e-52, Identity=71%"; Hit description =OSJNBa0058K23.19 protein
  Pfam annotation: Domain name=SAPS; Domain location=1-148; Score= -185.2; E_value=0.00073; Accession=PF04499.7; Description=SIT4 phosphatase-associated protein
TLAAKICSPSFVGRLFRHALEESRPKSVLVHSLSVCISLLDPKRLASASYQAFRSNLSHGTLVTASPETVDGMLESLGDLLKLLDITSSENVLPTTYGCLRPPLGKHRLKIVEFISVLLTIGSEIAEKELSSFSAIKHCIDLFFQYPY

SEQ ID NO: 92986 - protein, 685 aa, Setaria italica
  misc_feature (245)..(245): Xaa can be any naturally occurring amino acid
  misc_feature (318)..(318): Xaa can be any naturally occurring amino acid
  misc_feature (339)..(339): Xaa can be any naturally occurring amino acid
  Transcript Sequence Number=SeqID_27012
  Gene Ontology: Mol. function=protein phosphatase binding; Cellular component=cytoplasm; Biological process=regulation of phosphoprotein phosphatase activity
  Homolog annotation: Hit_ID=Q7XTT5; Match level="QueryCoverage=80%, HitCoverage=76%, E-value=0.0, Identity=63%"; Hit description =OSJNBa0058K23.19 protein
  Pfam annotation: Domain name=SAPS; Domain location=87-411; Score =308.0; E_value=2e-89; Accession=PF04499.7; Description=SIT4 phosphatase-associated protein
EIAVSSLRDKAQVEQLLRYIMEEVPEDSEKKRSFKFPFIACEIFTCEIDIILRTLVEDVELMDLLFSFVKPDHPHSTLLAGYFSKVVICLMLRKTAPLMNYVQEHPDIVVQLVDLIGITSIMEVLMRLIGADETIYSNFADTLQWLENTDVLEMIVDKFSSSDSPEVHANAAEILSAVTRCAPPALAAKICSPSFVGRLFRHALEESRPKSVLVHSLSVCISLLDPKRLASASYQAFRSNLSHGXGCLRPPLGKHRLKIVEFISVLLTIIGSEIAEKELISQSAIKHCIDLFFQYPYNNFLHHHVENIIVSCLEVKRXQLIDHVLNDCDLVGKVLAAEXSSLSVDSNGPTLPSEGKEPPRIGNIGHITRIANKLIQLGNSSSVIQNHLQENSEWAEWQTGVLVKRNEVENVYHWACGRPTSLHDRGRDSDDDDFRDRDYDVAALANNLSQAFRYGIYSNDDIEEAQGSHERDDEDVYFDDESAEVVISSLRLGDDQDSSSLFTNSNWFTFDGDRGINDRLAASVPSPSPNSEETTLSMEETDEVLIGEAPGTESQLESVSLENGPVEETKELAEDAERNDEKLLCTEEENVSQEAEASERPMDVQDGQTDTQVGSAAEASSTEGAADEPCSSSEPGNALPGALPQSADTENQSADPSGCSEIAHESGSPAEVDDGKTVEVATTNE

SEQ ID NO: 92987 - protein, 119 aa, Setaria italica
  Transcript Sequence Number=SeqID_27013
  Gene Ontology: Mol. function=transporter activity; Cellular component= plasma membrane; Biological process=oligopeptide transport
  Homolog annotation: Hit_ID=B6SXJ7; Match level="QueryCoverage=100%, HitCoverage=21%, E-value=7e-41, Identity=72%"; Hit description=POT family protein
GAGMATSLAAVSVAALVEARRLATARDHGLVDDPAATVPMTWAWLVPQYAMMGVADVLAVVGLQELFYDQMPHGLRSLGLALYLSVMGIGGFISSMLISLIDALTGRSGRDSWFADNLN

SEQ ID NO: 92988 - protein, 59 aa, Setaria italica
  Transcript Sequence Number=SeqID_27014
MWQYNSVLGHFPQEVTSSPMMGMGLGSGGVGDGCGLFYDTGFDDTANIGGMGFPQGWMG

SEQ ID NO: 92989 - protein, 190 aa, Setaria italica
  misc_feature (163)..(163): Xaa can be any naturally occurring amino acid
  Transcript Sequence Number=SeqID_27015
  Gene Ontology: Mol. function=protein serine/threonine kinase activity; Biological process=protein amino acid phosphorylation
  Homolog annotation: Hit_ID=B9RRA2; Match level="QueryCoverage=85%, HitCoverage=36%, E-value=9e-69, Identity=73%"; Hit description =Protein kinase APK1B, chloroplast, putative
  Pfam annotation: Domain name=Pkinase_Tyr; Domain location=68-190; Score=-112.1; E_value=2.8e-06; Accession=PF07714.9; Description =Protein tyrosine kinase
  Subcellular localization annotation: CTP_CleavageSite=45; ConfidenceScore=5.31e-01
RREEQAAKVAAAAGGSGSGSGKPRSLQSRLSFTELSGMVSPEDLSLSLVGSNLHVFSIAELRAVTRDFSMTNFIGEGGFGPVYKGYVDDKTKPGLRAQPVAVKLLDLEGGQGHTEWLTEVIFLGQLRHPHLAKLIGYCYEEEHRLLVYEFMTRGSLEKHLFKXYAASLPWSTRLKIAIGAAKGLAFLHEA

SEQ ID NO: 92990 - protein, 102 aa, Setaria italica
  misc_feature (13)..(13): Xaa can be any naturally occurring amino acid
  Transcript Sequence Number=SeqID_27016
HSGLLRGRQGGRXKGYALLPLLPTMAATEAGEVHLICEQNLYATLGYFFLRVNIRVLNQLHIRKSLLNLQTRVCKCFFTSWLMVFTQFFPNISCLHYLPSMW

SEQ ID NO: 92991 - protein, 75 aa, Setaria italica
  Transcript Sequence Number=SeqID_27017
WRQLIFGKNCVNTMSHEVKKHLQTRVCRLRGDFRIFFVACRVIRFNVYQCVLFKAVIGIGLCYLDCKLVLYDSLV

SEQ ID NO: 92992 - protein, 129 aa, Setaria italica
  Transcript Sequence Number=SeqID_27018
LRRHLRPLQRSRRLSPGGVVRAGPGAGAARQPSPGEARAQRGPLRPDGAVGRGRSSFSHRRSRAAIHLHRAGGSCGGGGRGWTGLKLDVLVFGCLQVVPFLMRLGKGSKVRGYCSGSWRRLLLARSGGA

SEQ ID NO: 92993 - protein, 101 aa, Setaria italica
  Transcript Sequence Number=SeqID_27019
  Gene Ontology: Mol. function=binding; Biological process=nuclear mRNA splicing, via spliceosome
PGEFTISLYEVLARVHGRNIVPQIGNIMTTIMRTLSSSGGSFPLHQACSKVVPAIARYGIDPSAPDGEKAGIIASLCKPLCGALMGNQDGAAPGAALCLKA

SEQ ID NO: 92994 - protein, 58 aa, Setaria italica
  Transcript Sequence Number=SeqID_27020
FFKFVTDASLPDQWFLHNLFQTLLLPDECKTQAGQQPKSPVRLTLKPDATKAKRLRRY

SEQ ID NO: 92995 - protein, 49 aa, Setaria italica
  Transcript Sequence Number=SeqID_27021
NCTGKLQLNFTTTVALCHWHQDLCLYPSFSQIGCRACDHRISFNLPLFY

SEQ ID NO: 92996 - protein, 135 aa, Setaria italica
  Transcript Sequence Number=SeqID_27022
  Gene Ontology: Cellular component=membrane
  Homolog annotation: Hit_ID=B6TIX8; Match level="QueryCoverage=98%, HitCoverage=36%, E-value=1e-34, Identity=57%"; Hit description =Nodulin-like protein
NSMPVVTFCLALLLRMEVVKLNASGIAKLAGVALCLAGVFAIAFYSGPALSPVNHQRAFHTHASVSGHANASSKTTWIEGTFLMVLANMAWSVSIVWQAALLKELPNKMLVATRLCVFSAVQSFIVAVAAEEGTS

SEQ ID NO: 92997 - protein, 538 aa, Setaria italica
  misc_feature (13)..(13): Xaa can be any naturally occurring amino acid
  Transcript Sequence Number=SeqID_27023
  Gene Ontology: Cellular component=integral to membrane
  Homolog annotation: Hit_ID=Q10HC5; Match level="QueryCoverage=96%, HitCoverage=76%, E-value=0.0, Identity=79%"; Hit description=CBS domain containing protein, expressed
  Pfam annotation: Domain name=CBS; Domain location=221-340; Score =95.3; E_value=2.1e-25; Accession=PF00571.20; Description=CBS domain
  Pfam annotation: Domain name=CorC_HlyC; Domain location=361-467; Score=74.9; E_value=3e-19; Accession=PF03471.9; Description =Transporter associated domain
  Pfam annotation: Domain name=DUF21; Domain location=22-202; Score =176.1; E_value=1e-49; Accession=PF01595.12; Description=Domain of unknown function DUF21
  Pfam module annotation: Pfam domain module=CBS::CorC_HlyC::DUF21; Domain location=221-340::361-467::22-202
GGVALRGGWPRVXLQVLQLIKEQGLVLAALLGLSAFFSMAETSITTLWPWKVRELAEKEPENGVFKMLRSDVTRFLTTILIGTTVVNIGATAIVTEAATAMFGEAGVSAATGVMTVAILLLTEITPKSVAVHNATEVARFVVRPVAWLSLILYPVGRIVTFLSMGMLKILGLKGRSEPYVTEDELKLMLRGAELSGAIAEDEQDMIENVLEIKDTHVREVMTPLVDVVAIDAVATLIDFKNLWEIHQYSRVPVFEERIDNIVGIAYAMDMLEYVEEVEKLKEITVKEIAHMPTYFVPDSMSVWNLLREFRIRQVHMAVVLNEYGGTIGIVTLEDVVEEIVGEIFDENDSKEEIQKKTGYIVRREDGTFDVDANTSIDQLSEELGIKIPEGHHYETVSGFVCASFGYIPEEGAKMLVILEKDYREENVEYQEEGSDRQDDREKTQAYELEILEGNARKVGKVLFKPISSECVDVDDKGVNRLISKKIIKRKKKDSGDPCNSDDDECPDITENGCPAEILSHSDDNSAELEDASSSSAKR

SEQ ID NO: 92998 - protein, 193 aa, Setaria italica
  misc_feature (11)..(11): Xaa can be any naturally occurring amino acid
  Transcript Sequence Number=SeqID_27024
  Gene Ontology: Mol. function=metal ion binding
  Homolog annotation: Hit_ID=B6SSY9; Match level="QueryCoverage=98%, HitCoverage=62%, E-value=2e-30, Identity=50%"; Hit description=Zinc finger, C3HC4 type family protein
  Pfam annotation: Domain name=zf-C3HC4; Domain location=142-186; Score= 32.4; E_value=1.8e-06; Accession=PF00097.17; Description=Zinc finger, C3HC4 type (RING finger)
SASDNGRLPDXVQQARERDSVQRLNSVDLSGRSRQKTCTSETIWAGAGLGSARSPADFSSDCILGTLTNCFQPGDCDSVAASKVEEGGTAEPDAINADERAPITVLLSEGQPVVPELERSACSGGAEEEKCDGRGCEAPAECSICLERCGGAGGGSDGLTQLRCRHVFHSACLERWLRSRGDCPYCRAAVLRS

SEQ ID NO: 92999 - protein, 107 aa, Setaria italica
  Transcript Sequence Number=SeqID_27025
  Subcellular localization annotation: CTP_CleavageSite=24; ConfidenceScore=5.47e-01
TRGSRMRRRNPTTTTNSNKGKEPVAAAGTSSCPPLGRATRKNSRKDSMAQDTRPISSSAPCHGAKKKRPPPSTPKLPEDFVKRQRAYFADVDAFELPEEEVSESELE

SEQ ID NO: 93000 - protein, 91 aa, Setaria italica
  misc_feature (81)..(81): Xaa can be any naturally occurring amino acid
  Transcript Sequence Number=SeqID_27026
  Gene Ontology: Cellular component=extracellular region; Biological process=cell wall organization and biogenesis
  Homolog annotation: Hit_ID=O24230; Match level="QueryCoverage=100%, HitCoverage=33%, E-value=1e-23, Identity=60%"; Hit description =Expansin-B2
  Pfam annotation: Domain name=DPBB_1; Domain location=31-91; Score =29.7; E_value=5e-06; Accession=PF03330.10; Description=Rare lipoprotein A (RlpA)-like double
WYGRHNGAGPDNNGGGCGYSNTNLYPFNSMTTCGNQPLFLDGKGCGACYQIKCTSKNNPACSGEPKQVIITDVNYDTKIAXLHFDLSGTAF

SEQ ID NO: 93001 - protein, 77 aa, Setaria italica
  Transcript Sequence Number=SeqID_27027
  Gene Ontology: Mol. function=transferase activity
  Homolog annotation: Hit_ID=B6U486; Match level="QueryCoverage=87%, HitCoverage=29%, E-value=8e-15, Identity=56%"; Hit description =Glutathione S-transferase GSTU6
LGNHLYGLWAQLAPPWDRVFRAKTDEERDEAMMQIFSAAGALEGGLRECSKGKDFFGGDSVGYVDIVVGSLVPWVKA

SEQ ID NO: 93002 - protein, 75 aa, Setaria italica
  Transcript Sequence Number=SeqID_27028
  Gene Ontology: Mol. function=electron carrier activity; Cellular component=endoplasmic reticulum; Biological process=oxidation reduction
  Homolog annotation: Hit_ID=Q10KX5; Match level="QueryCoverage=98%, HitCoverage=23%, E-value=5e-30, Identity=89%"; Hit description =Transposon protein, putative, unclassified, expressed
RKLASVHLLGARALADWACVRRDEAGHLLRGMAEAAAAGRPVVVPEVLVCALANIVGQITVSKRVFDAQGEESNR

SEQ ID NO: 93003 - protein, 72 aa, Setaria italica
  Transcript Sequence Number=SeqID_27029
  Gene Ontology: Mol. function=transferase activity, transferring glycosyl groups; Cellular component=1,3-beta-glucan synthase complex; Biological process=cell wall organization and biogenesis
  Homolog annotation: Hit_ID=Q9SHJ3; Match level="QueryCoverage=98%, HitCoverage=3%, E-value=2e-29, Identity=83%"; Hit description =Callose synthase 7
YDEEIYRIKLPGRPTDIGEGKPENQNHAIIFTRGEALQAIDMNQDNYIEEAFKMRNVLEEFESRKYGKRKPT

SEQ ID NO: 93004 - protein, 105 aa, Setaria italica
  Transcript Sequence Number=SeqID_27030
  Gene Ontology: Mol. function=sulfotransferase activity; Cellular component=integral to membrane
  Homolog annotation: Hit_ID=B6TRN9; Match level="QueryCoverage=90%, HitCoverage=26%, E-value=4e-16, Identity=48%"; Hit description =Flavonol 4-sulfotransferase
LELPDRTLYPVAELEALPSPRLLCTHVPPALLPPGTLPLGCRRLVYLCRDPKDVLVSTWHHVQNVRLQESSSSSVEFDKVFELFCEGVSMFGPIWEHCLGYWDLS

SEQ ID NO: 93005 - protein, 185 aa, Setaria italica
  misc_feature (10)..(10): Xaa can be any naturally occurring amino acid
  misc_feature (168)..(168): Xaa can be any naturally occurring amino acid
  Transcript Sequence Number=SeqID_27031
  Gene Ontology: Cellular component=membrane
  Homolog annotation: Hit_ID=O80599; Match level="QueryCoverage=96%, HitCoverage=41%, E-value=1e-52, Identity=50%"; Hit description =T27I1.10 protein
  Pfam annotation: Domain name=DUF221; Domain location=1-185; Score= -15.9; E_value=9.9e-09; Accession=PF02714.7; Description=Domain of unknown function DUF221
VIATLLGSIXFMFLFLVPVTFIQGLSQLEQLQQRLPFLRGILKKKYYMTQLVTGYLPSVILQIFLYTVAPIMMLFSTLEGPTSHSERKRSACCKVLYFTIWNIFFVTVLSGTVISQLSVLSSPKDIPIQLARAVPGQATFFITYVLTSGWASLSSELMQLFGLIWNFXRKYVLRMREDTELFPRF

SEQ ID NO: 93006 - protein, 61 aa, Setaria italica
  Transcript Sequence Number=SeqID_27032
CHVPNESFWSLVDYKFSELCTLQHKGLDKLNFVGRLVLAFSSIHPSVYHALFFVWLQGHSL

SEQ ID NO: 93007 - protein, 101 aa, Setaria italica
  Transcript Sequence Number=SeqID_27033
  Pfam annotation: Domain name=DUF1719; Domain location=1-101; Score= -68.0; E_value=0.0015; Accession=PF08224.3; Description=Domain of unknown function (DUF1719)
GLKKDESPCLSCSDVKRFEWFADCASKFVRDMESGCSLRQYTFCNPLVRHLLQGKMLEYEVVQRDLLRRFHIWPISLDSTPRASELAYRYDDRKMPHKSFQ

SEQ ID NO: 93008 - protein, 196 aa, Setaria italica
  misc_feature (127)..(127): Xaa can be any naturally occurring amino acid
  Transcript Sequence Number=SeqID_27034
  Gene Ontology: Mol. function=dihydrodipicolinate reductase activity; Cellular component=cytoplasm; Biological process=lysine biosynthetic process via diaminopimelate
  Homolog annotation: Hit_ID=B6TVJ6; Match level="QueryCoverage=79%, HitCoverage=28%, E-value=5e-31, Identity=51%"; Hit description =Dihydrodipicolinate reductase
  Pfam annotation: Domain name=DapB_N; Domain location=13-192; Score= -15.2; E_value=0.0007; Accession=PF01113.12; Description =Dihydrodipicolinate reductase, N-terminus
LRSEGKACRCYYVQVVIIGATKEIGRTAIAAVCKARGMELAGAIDSQCIGEDAGQVLTVHSMCLFPLHLSLHFHREAAACVLYLKLFVNAGIALQISGMEEPLELPVLNDLTMVLGSIAQVQTLPLXIPGCFFRASLANLRCLFFQSRATGVVVDFSEPSTVYDNVKQVCQLSTIKNKTQFHSTKVLQSPHIPSAA

SEQ ID NO: 93009 - protein, 179 aa, Setaria italica
  Transcript Sequence Number=SeqID_27035
  Gene Ontology: Mol. function=dihydrodipicolinate reductase activity; Cellular component=cytoplasm; Biological process=lysine biosynthetic process via diaminopimelate
  Homolog annotation: Hit_ID=B6TVJ6; Match level="QueryCoverage=100%, HitCoverage=60%, E-value=9e-78, Identity=80%"; Hit description =Dihydrodipicolinate reductase
  Pfam annotation: Domain name=DapB_N; Domain location=37-166; Score =62.8; E_value=1.3e-15; Accession=PF01113.12; Description =Dihydrodipicolinate reductase, N-terminus
VSLCHPVRITTCGKFVRRNAAKVFCSMETPPPSQSTIKVVIIGATKEIGRTAIAAVCKARGMELAGAIDSQCIGEDAGQISGMEEPLELPVLNDLTMVLGSIAQSRATGVVVDFSEPSTVYDNVKQAAAFGLSSVVYVPKIELDTVTELSAFCEKASMGCLVAPTLSIGSVLLQQAAIQ

SEQ ID NO: 93010 - protein, 64 aa, Setaria italica
  Transcript Sequence Number=SeqID_27036
PSTTEMVRTSWAKVHLCRYKCNNNSQHTCIPILLLKFLLTPDCHVAVRHFWATSSNHVESKDLH

SEQ ID NO: 93011 - protein, 136 aa, Setaria italica
  Transcript Sequence Number=SeqID_27037
  Gene Ontology: Mol. function=zinc ion binding; Cellular component =intracellular
  Homolog annotation: Hit_ID=B6TVG2; Match level="QueryCoverage=95%, HitCoverage=49%, E-value=8e-17, Identity=45%"; Hit description=Zinc -binding protein
LSCKVDHVMMQGGDLSNIVQYYGGVGGATTDPDHLAFPRFENLRVDGSDLDDDTDGGQVTPNSILEDPTQHYGNGGGGGGGSSDNGDTRVGNGGNARRGQAAKRKKGGGFFPQIVLSLGNRRKGAPHRSPSGLSTL

SEQ ID NO: 93012 - protein, 48 aa, Setaria italica
  Transcript Sequence Number=SeqID_27038
LWLPQEFSSGLGSRSEKRRLAPAVLVSGGKAKAERPPRDDGPKLTRVN

SEQ ID NO: 93013 - protein, 95 aa, Setaria italica
  Transcript Sequence Number=SeqID_27039
  Gene Ontology: Mol. function=transferase activity, transferring glycosyl groups; Biological process=metabolic process
  Homolog annotation: Hit_ID=B6SZW3; Match level="QueryCoverage=90%, HitCoverage=17%, E-value=2e-16, Identity=55%"; Hit description =Hydroquinone glucosyltransferase
TELPLPACTEELPPSPQNQVVLFASPGAGHLIPLVELARRLVVDHGLAVTVVTLTGMSNPATDAAVLSSLPASAATAVLPAVSLDDLPPDIGFGT

SEQ ID NO: 93014 - protein, 182 aa, Setaria italica
  Transcript Sequence Number=SeqID_27040
  Gene Ontology: Mol. function=3-hydroxyacyl-CoA dehydrogenase activity; Cellular component=cytoskeleton; Biological process=fatty acid metabolic process
  Homolog annotation: Hit_ID=B6SXV4; Match level="QueryCoverage=97%, HitCoverage=24%, E-value=3e-71, Identity=74%"; Hit description =Peroxisomal fatty acid beta-oxidation multifunctional protein
  Pfam annotation: Domain name=ECH; Domain location=19-182; Score =134.4; E_value=3.6e-37; Accession=PF00378.12; Description=Enoyl-CoA hydrataseisomerase family
MASRPTMRVTMEVGADGVALITICNPPVNALHPAIFDGLSEKYGEAMARDDVKAIVLTGDAGKFCGGFDINTFARIHQTGNMSLLPDSVKLASHMMEEGRKPSVAAIQGLALGGGLELTMACHARISTPQAQLGLPELTLGVIPGSGGTQRLPRLVGLPKAIEMMLQSKFITAKEGKERGLI

SEQ ID NO: 93015 - protein, 185 aa, Setaria italica
  Transcript Sequence Number=SeqID_27041
  Gene Ontology: Mol. function=nucleotide binding; Cellular component =intracellular
  Homolog annotation: Hit_ID=Q259E7; Match level="QueryCoverage=90%, HitCoverage=24%, E-value=6e-39, Identity=52%"; Hit description =H0402C08.12 protein
CVTDFNNISEAEAGAKRRNKYSGVSVLARSLFAPSSTKSEAIIFSDGSQDNRNATGNKQATMDALHKTYMPNKKRHINIVPFKSDTPSPDDMVTTGLKSSRNFRKVDTEVLIKDSVDVAGEKTMDSGILVTEKDTSMDPSASAELDELGGTSSSVPSSSQNITLVLDHELQHLSLESKPKSSKPK

SEQ ID NO: 93016 - protein, 130 aa, Setaria italica
  Transcript Sequence Number=SeqID_27042
  Homolog annotation: Hit_ID=Q9FWR3; Match level="QueryCoverage=97%, HitCoverage=5%, E-value=1e-20, Identity=38%"; Hit description =F17F16.1 protein
FSHDAEEKSQSCWNDFNVLNKLASRECKDWKCIPLLWYLTMVQLEPSKLPIAFSKAVLWGLSHISVLEPGLATESSVPVNVWLSSHVGEVSSTFTWQVPNGADDGGSGKDCINTLKVSLVLRSLIESYLK

SEQ ID NO: 93017 - protein, 133 aa, Setaria italica
  Transcript Sequence Number=SeqID_27043
  Gene Ontology: Mol. function=protein serine/threonine kinase activity; Cellular component=integral to membrane; Biological process=protein amino acid phosphorylation
  Homolog annotation: Hit_ID=Q84QV2; Match level="QueryCoverage=75%, HitCoverage=25%, E-value=8e-18, Identity=57%"; Hit description =Receptor-like protein kinase-like
  Pfam annotation: Domain name=LRRNT_2; Domain location=29-67; Score =19.4; E_value=0.0094; Accession=PF08263.4; Description=Leucine rich repeat N-terminal domain
MGREGFLLLPLLILLALAAPGPAAAATANTADAGVILELAKSLTNPPPSWTGTDVCGGATFQGITCDGAGRVTGINLAKQSLSGTLPASLSDLTELQWLLLQGNALEGAVPSLARMGSLETLALDGNAFTALP

SEQ ID NO: 93018 - protein, 83 aa, Setaria italica
  Transcript Sequence Number=SeqID_27044
LFLGLGWSKVPIYDAIWRFSPREVEGLSLLHYKIVTKCKAISEYFSFHMFFLQRCLRYICHLALLIFGFFWCYASTFVMEIPS

SEQ ID NO: 93019 - protein, 104 aa, Setaria italica
  Transcript Sequence Number=SeqID_27045
  Subcellular localization annotation: CTP_CleavageSite=90; ConfidenceScore=5.52e-01
QSRQPVHTQSRDSSVSLIHAAPLLHKSAVNNKHRKSPRMNNSSPAKATESSIPVGCSVAQKQLAKGLMSRPRLLFRIRISDWTTKFDNCRLCKDAQFLTTCLLY

SEQ ID NO: 93020 - protein, 74 aa, Setaria italica
  Transcript Sequence Number=SeqID_27046
RRHRARQTAESTLLTLKKEAIAALPEKLQAAAMVPDMTPFPANRYMATLTPPIEGYIEKVRDAAKKHSVKEKLR

SEQ ID NO: 93021 - protein, 269 aa, Setaria italica
  Transcript Sequence Number=SeqID_27047
  Subcellular localization annotation: CTP_CleavageSite=40; ConfidenceScore=5.10e-01
MASSARNIMFRRLKTLTISPALASGVTSQHHQLQQRAPVSGTAKGKAKLKAGQPLKRSSIGAKKGVPSTGGGGGGGGRGRREAMERITQISESCLNASTPLRHLSPKERLREAKREELGLISKERQRELDVAKAKAKAKAKSKGTGADDGDHVLMGPPGLDYISLGLVDEEAIPKYELTVEDGRRLAKEYSRVLMRRHRARQTAESTLLTLKKEAIAALPEKLQAAAMVPDMTPFPANRYMATLTPPIEGYIEKVRDAAKKHSVKEKLR

SEQ ID NO: 93022 - protein, 243 aa, Setaria italica
  misc_feature (19)..(19): Xaa can be any naturally occurring amino acid
  Transcript Sequence Number=SeqID_27048
  Gene Ontology: Mol. function=transferase activity, transferring glycosyl groups; Cellular component=integral to membrane; Biological process=cell wall organization and biogenesis
  Homolog annotation: Hit_ID=Q8LIY0; Match level="QueryCoverage=99%, HitCoverage=35%, E-value=1e-109, Identity=81%"; Hit description =Probable xyloglucan glycosyltransferase 1
LAVDVAAHLPGPWHLAVRXPDLLTVEGLFASGYASWVRIRLEYLAPALQFLANACVVLFLIQSADRLILCLGCLWIKLRGVKPVAKAGGKGSDDVESGAGEFPMVLVQIPMCNEKEVYQQSIGAVCSLDWPRSNFLVQVLDDSDDAATSALIKEEVEKWQREGVRILYRHLVIRDGYKAGNLKSAMNCSYVKDYEFVVIFDADFQPQPDFLKRTVPHFKGNEDVGLVQARWSFVNKDENLLTR

SEQ ID NO: 93023 - protein, 481 aa, Setaria italica
  Transcript Sequence Number=SeqID_27049
  Homolog annotation: Hit_ID=Q259G9; Match level="QueryCoverage=79%, HitCoverage=42%, E-value=2e-30, Identity=33%"; Hit description =H0103C06.5 protein
DRREDPLLLLGFRGISRSRTGDPSFAFWFWDSCDMPPEHGMPTGTADAVANRRPRRLFGRPSERKNPLNLQFERQVARLESRQQQQRCIVVTFIPINLCCFDFKSPSLTENGNNHPSSQPISPEDTSSLSPTSPSILFLPYPPDGSHRRWPGNSSRLLEDRSTTSNSTSNSDFLVNSFTKPSGNARHTSRRKSKKKSKKHRQRCRKPTDGPEAKCGETNSAAPAVDEGDCEDLTLSPKHVGDIHFEETFSPSSSVKEASEEAPESDNDNEYRCCSVGSVSSASYCDETEPSRSAISCPGLRGQCNSSNLRYLDSAQNSVFTGSAQETCYAGSSVNCNHDTKTLLILSNEREPGPCEATEFCSSSSGFDENWLEKPDYDSGICSQNGIGACSGVQAVHLCSDTSRDNDFCLVISRKRARKEKKMLLWKSYGERVSTFTHDRNEKYVGRASVPVTKEVRTDHRSHRQNHIGGIQPQHGTAINT

SEQ ID NO: 93024 - protein, 90 aa, Setaria italica
  Transcript Sequence Number=SeqID_27050
  Gene Ontology: Mol. function=DNA binding; Cellular component=nucleus; Biological process=nucleosome assembly
  Homolog annotation: Hit_ID=B9RY66; Match level="QueryCoverage=95%, HitCoverage=59%, E-value=8e-29, Identity=68%"; Hit description=Brg-1 associated factor, putative
  Pfam annotation: Domain name=SWIB; Domain location=12-89; Score =130.0; E_value=7.7e-36; Accession=PF02201.10; Description=SWIBMDM2 domain
AGAGRKRPASGITKPKPISPELREFVGGAAELPRTEAIKLVWAHIKGNNLQDPDNKKIIVCDDKLKKIFGGRDRVGFLEISGLLNPHFPK

SEQ ID NO: 93025 - protein, 62 aa, Setaria italica
  Transcript Sequence Number=SeqID_27051
MGDVKHIRLTVRGASQTKIQDSIHYNLVPAGGVDYHRYTKGSDGSSFTVEVGGRVDVARLYE

SEQ ID NO: 93026 - protein, 109 aa, Setaria italica
  Transcript Sequence Number=SeqID_27052
  Homolog annotation: Hit_ID=Q6ASY7; Match level="QueryCoverage=99%, HitCoverage=24%, E-value=4e-35, Identity=63%"; Hit description=WD domain, G-beta repeat containing protein
YYGRDDYRGKRLNGYRNYESLSRSHELLDSECKQVDKKSTFYDFCFNTRLARTMVVHFQLRDLVWATSKHDVYMSQNYSVMHWSSLLQRGEEVLNVIDHVFPKQKVRGA

SEQ ID NO: 93027 - protein, 319 aa, Setaria italica
  Transcript Sequence Number=SeqID_27053
  Homolog annotation: Hit_ID=C3SA93; Match level="QueryCoverage=98%, HitCoverage=77%, E-value=1e-137, Identity=75%"; Hit description=WD -40 repeat family
  Pfam annotation: Domain name=SGL; Domain location=85-297; Score= -114.8; E_value=0.061; Accession=PF08450.4; Description=SMP -30GluconolaconaseLRE-like region
  Pfam annotation: Domain name=WD40; Domain location=181-219; Score =37.1; E_value=7e-08; Accession=PF00400.24; Description=WD domain, G -beta repeat
  Pfam annotation: Domain name=WD40; Domain location=224-262; Score =13.0; E_value=1.2; Accession=PF00400.24; Description=WD domain, G -beta repeat
  Pfam annotation: Domain name=WD40; Domain location=95-136; Score=4.1; E_value=13; Accession=PF00400.24; Description=WD domain, G-beta repeat
  Pfam annotation: Domain name=eIF2A; Domain location=28-220; Score= -113.3; E_value=0.07; Accession=PF08662.3; Description=Eukaryotic translation initiation factor eIF
  Pfam module annotation: Pfam domain module=SGL::WD40::WD40::WD40::eIF2 A; Domain location=85-297::181-219::224-262::95-136::28-220
PCSENLQLRDLVWATSKHDVYMSQNYSVMHWSSLLQRGEEVLNVIDHVFPKQKVRGARPLFRMQICSMAVRDNLMVAGGFRGELVCKYIDQPGVAFCTNVTEDDDNITNTVDVYESPNGSTRVMAGNNDRVVRVFDTERFSVLSHFAFPWSVNDTLASPDGKLVAVLGDSSDCLIADLQSGKEIASLKGHLDYSFSSAWHPDGRVLATGNQDTTCRLWDVRNLSRSLAVLKGRIGAVRGLKFSSDGRFLAMAEAADFVHVYDSHAGYSEEQEIDIFGEIAGVSFSPDAEALFVGVADRTYGSLIEFGRRHRYDYLNSYL

SEQ ID NO: 93028 - protein, 131 aa, Setaria italica
  misc_feature (94)..(94): Xaa can be any naturally occurring amino acid
  Transcript Sequence Number=SeqID_27054
  Homolog annotation: Hit_ID=B9RJH4; Match level="QueryCoverage=60%, HitCoverage=17%, E-value=9e-22, Identity=62%"; Hit description=WD -repeat protein, putative
MEMDLVDDLELLDDYDDLEFDGFGVAAGDTSRQNKNKYDTTSAAEYRNGKDMQGIPWERLYYGRDDYRGKRLNGYRNYESLSRSHELLDSECKXVDKKSTFYDFCFNTRLARTMVVHFQDSTATLSFHQGP

SEQ ID NO: 93029 - protein, 185 aa, Setaria italica
  Transcript Sequence Number=SeqID_27055
  Homolog annotation: Hit_ID=Q6ASY7; Match level="QueryCoverage=98%, HitCoverage=40%, E-value=4e-57, Identity=62%"; Hit description=WD domain, G-beta repeat containing protein
MAHDLCDDLELVAADGEYDYFDDDFGDGFPTASGGESGLQHEQMDDTSASDYKEGKDIQGIPWERLNYSRDQYREMRLKEYKNYQNLTRSRSGLEQECKQVERKDTFYDFHSSTRSVKSTIVHFQLRNLLWAASKHDVYLVQNYSVMHWSPLFQRGREVLNVAGQLTPTEDVKGARPLSRVQIQV

SEQ ID NO: 93030 - protein, 73 aa, Setaria italica
  Transcript Sequence Number=SeqID_27056
CLAILRKRMCIKLGQECFFLPLQVLLVARCCCFYPCLFFHNALHFCISRVIYNKRGFSQTISLSMRVRRINSS

SEQ ID NO: 93031 - protein, 333 aa, Setaria italica
  Transcript Sequence Number=SeqID_27057
  Homolog annotation: Hit_ID=C3SA93; Match level="QueryCoverage=94%, HitCoverage=77%, E-value=1e-146, Identity=78%"; Hit description=WD -40 repeat family
  Pfam annotation: Domain name=WD40; Domain location=193-231; Score =35.7; E_value=1.8e-07; Accession=PF00400.24; Description=WD domain, G-beta repeat
  Pfam annotation: Domain name=WD40; Domain location=236-274; Score =21.3; E_value=0.0041; Accession=PF00400.24; Description=WD domain, G- beta repeat
  Pfam module annotation: Pfam domain module=WD40::WD40; Domain location=193-231::236-274
LSSLKHVFHLELLCVIILKLRNLLWAASKHDVYLVQNYSVMHWSPLFQRGREVLNVAGQLTPTEDVKGARPLSRVQISTMALKDNLMVAGGFQGELICKYVDKPGVAFCTNLTGNNYSITNAVDIFESPDGATRVMAANNDCVVRTFDTARYSLLTQFTFPWSVNNTSVSPNGKLMAVLGDSPDCLLADSQSGREIATLRGHLDYSFASAWHPDGRVLATGNQDATCRLWDVRNLSEPLAVLGGRIGAVRGLRFSPDGRFLAAAEAADFVHVYDAAAGYAGAEQEVDLFGEVAGAAFSPDGEALFVSVADRTYGGVLEFRRRRSYDYLDSFFF

SEQ ID NO: 93032 - protein, 96 aa, Setaria italica
  Transcript Sequence Number=SeqID_27058
VLALPSTCKTQFELIHLTSFPIMKHPIIPYSHPVVSVPAAQDAHHIHLLLFLMKHGTANVLISQDQLQICNPDSLHDLQSVLRSYTESSSTNSNII

SEQ ID NO: 93033 - protein, 85 aa, Setaria italica
  Transcript Sequence Number=SeqID_27059
LVGNYLKLLVPFNLLYMIIYDSCVFQLGPCFVYGNLILVHHTEAFAKKTHYLIVFLDGHKNGKFSLETFDKGLMEKCFWYFQCIE

SEQ ID NO: 93034 - protein, 525 aa, Setaria italica
  misc_feature (99)..(99): Xaa can be any naturally occurring amino acid
  Transcript Sequence Number=SeqID_27060
  Homolog annotation: Hit_ID=Q84NF5; Match level="QueryCoverage=36%, HitCoverage=47%, E-value=8e-17, Identity=32%"; Hit description=ABI3 -interacting protein 3
  Subcellular localization annotation: CTP_CleavageSite=79; ConfidenceScore=5.41e-01
MLRTQSPAVGQPFGQGSLDLETRGSKSGKSENTSSAADNTAVSENKNNGAVSTAMRPTTLQSLGDENMNSKQNGFGGVRKDAVQTGFASHGVDGSIGRXGIADRVGNSHGPVIQGGKDHKASDASTNHEKGRPFRQISQQNAGQGSYVPPGMGPQHPTGPDRLLPQHMMHPGHKHGFSENNRPPLQQPYGLFHSGMTPRPFGENQIQMPTSQPGSVGMIRPEPHMVGPLPGHHDAMLPPFVEHLGHPPVSGRAFHEEGFNSSGEHLRSHAAYPGRHDNVKDRLKQFPGPAHLDGQGIPSGPRPFESALGRPDGFLDSIPGRPPFPNQRSPFPVGLHDDFSRKPNATAGHPDFLSHGAEFDHHRADGMPIFRNPGPFAQGMSGGSHGPPHKVQLGSGNLPGNLQHSFGGPEYPPTRFNPGHMHPGDPNLVADYAQHGFPKELAHFGLGGPLRNGNVGWCRICMFNCGSAENLDLHVQTREHQQCAMDIVLKMKQDVAKRQKLSYGGPKSFHNKKVAGKGHFRGNRR

SEQ ID NO: 93035 - protein, 55 aa, Setaria italica
  Transcript Sequence Number=SeqID_27061
  Subcellular localization annotation: CTP_CleavageSite=41; ConfidenceScore=5.33e-01
MHATATKLPLVFVSALMLIISHASSLRFHYINSHNFTTKTSASSSSPSSSSSVAP

SEQ ID NO: 93036 - protein, 81 aa, Setaria italica
  Transcript Sequence Number=SeqID_27062
TQEGEAPISSETSTCVAPSLQPSDPTDGQWMQAGFLAQHVSMMTSCVSVTIVYLFSFFWNCLLIFIDCFNSCVEHVCACVL

SEQ ID NO: 93037 - protein, 48 aa, Setaria italica
  Transcript Sequence Number=SeqID_27063
IDVIVTTRNEDIARKVSTCPPYKLDALNDYTCWEIIKRYSMFEDQHYQ

SEQ ID NO: 93038 - protein, 128 aa, Setaria italica
  misc_feature (16)..(16): Xaa can be any naturally occurring amino acid
  misc_feature (29)..(29): Xaa can be any naturally occurring amino acid
  Transcript Sequence Number=SeqID_27064
  Gene Ontology: Cellular component=nucleus; Biological process =multicellular organismal development
  Homolog annotation: Hit_ID=Q27YF1; Match level="QueryCoverage=84%, HitCoverage=40%, E-value=8e-56, Identity=97%"; Hit description =Ramosa 2 (Fragment)
  Pfam annotation: Domain name=DUF260; Domain location=14-115; Score =221.0; E_value=3.1e-63; Accession=PF03195.6; Description=Protein of unknown function DUF260
GLVGGGRRPGAGAPCXAACKFLRRKCLPXCVFAPYFPPEEPQKFANVHKVFGASNVTKLLNELLPHQREDAVSSLAYEAEARVKDPVYGCVGAISVLQRQVHRLQKELDAAHAELLRYACGDVSGIPH

SEQ ID NO: 93039 - protein, 47 aa, Setaria italica
  Transcript Sequence Number=SeqID_27065
  Gene Ontology: Mol. function=amino acid transmembrane transporter activity; Cellular component=integral to membrane; Biological process=amino acid transport
  Homolog annotation: Hit_ID=Q75G90; Match level="QueryCoverage=100%, HitCoverage=9%, E-value=6e-17, Identity=82%"; Hit description=Amino acid permease family protein, putative, expressed
MKLRNTAITRANSACLPMGDRVAVKYNSVNEGEERKGGHGIPKVSMV

SEQ ID NO: 93040 - protein, 502 aa, Setaria italica
  Transcript Sequence Number=SeqID_27066
  Gene Ontology: Mol. function=unfolded protein binding; Cellular component=chloroplast; Biological process=cellular protein metabolic process
  Homolog annotation: Hit_ID=Q6ZFJ9; Match level="QueryCoverage=99%, HitCoverage=86%, E-value=0.0, Identity=82%"; Hit description=60 kDa chaperonin
  Pfam annotation: Domain name=Cpn60_TCP1; Domain location=57-502; Score=451.9; E_value=9.6e-133; Accession=PF00118.16; Description=TCP- 1cpn60 chaperonin family
  Subcellular localization annotation: CTP_CleavageSite=23; ConfidenceScore=5.24e-01
MASTFGATSTVGLMAAPTGKNVRLQRRANFRVKAAKELYFNKDGSAIKKLQTGVNKLADLVGVTLGPKGRNVVLESKYGSPKIVNDGVTVAREVELEDPVENIGAKLVRQAAAKTNDLAGDGTTTSVVLAQGLIAEGVKVVAAGANPVQITRGIEKTAKALVDELRKLSKEVEDSELADVAAVSAGNNYEIGNMIAEAMSKVGRKGVVTLEEGRSSENFLYVVEGMQFERGYISPYFVTDSEKMTAEYENCKLLLVDKKITNARDLINVLEEAIRGAYPILIIAEDIEQEALATLVVNKLRGSLKIAAIKAPGFGERKTQYLDDIAILTGATVIRDEVGLSLDKADKSVLGTAAKVVLTKESTTIVGDGTTQEEVTKRVAQIKNLIEVAEQEYEKEKLNERIAKLAGGVAVIQVGAQTETELKEKKLRVEDALNATKAAVEEGIVVGGGCTLLRLAAKVDAIKDTLENDEQKVGAEIVRRALSYPLKLIAKNAGVNGSLSCI

SEQ ID NO: 93041 - protein, 137 aa, Setaria italica
  Transcript Sequence Number=SeqID_27067
EEDCFINVEDAKQAGTMKTSTPRRQSSFPAPIVTRTVKEASRGAGEKAAEKQNQQAFMDQRQSEMMGSERSSSADPSDQHAESNGDAEMGPQGRSKKMNAEEPSSDGYQQDQVPKEQRLTIRKTSTNRNLERQTKGT

SEQ ID NO: 93042 - protein, 652 aa, Setaria italica
  Transcript Sequence Number=SeqID_27068
  Gene Ontology: Mol. function=helicase activity; Cellular component =nucleus; Biological process=termination of RNA polymerase II transcription
  Homolog annotation: Hit_ID=B9RJG9; Match level="QueryCoverage=99%, HitCoverage=48%, E-value=0.0, Identity=71%"; Hit description =Splicing endonuclease positive effector sen1, putative
TLVQGPPGTGKTHTVWGMLNVIHLVQYQHYYAALLKKLAPESYKQVSGSTSTSSETVAAGSIDELLQSMDQNLFRTLPKLCPKPRMLVCAPSNAATDELLARVLDRGFIDGEMKVYRPDVARVGVDSQSRAAQAVSVERRTDQLLMKGRDEVIGWLHQLKGREQQLSQEIAYLQRELNMVAAAGRSQGSVGVDPDVLAQRDRNRDILLQKLAASVESRDKVLVEMSRLLILESRFRVGSNFNMEDARASLEASFANEAEIVFTTVSSSGRKLFSRLTHGFDMVVIDEAAQASEVGVLPPLALGAARCVLVGDPQQLPATVISKAAGTLLYSRSLFERFQQAGCPTILLSVQYRMHPQIREFPSRYFYQGRLTDSESVVKLPDEAYYRDALMAPYIFYDMSHGRESHRGGSSSFQNIHEAQFALRLYEHLQKFLKANGGKKVSVGIITPYKLQLKCLQREFKEVMNTEEGKDIYINTVDAFQGQERDIIIMSCVRASNHGVGFVADIRRMNVALTRARRALWVVGNANALMQSEDWAALIADAKSRKCFMDLDSIPKDFLPMKVPSNTLGRNSSNNIRNMRTGGPRPRHLDMFPEPRAGMNIRPDEDERLSSVPRNGSYRNLDDFGRPGDRPRDNVQFGVPRRPNSSNGRREV

SEQ ID NO: 93043 - protein, 772 aa, Setaria italica
  misc_feature (340)..(340): Xaa can be any naturally occurring amino acid
  Transcript Sequence Number=SeqID_27069
  Homolog annotation: Hit_ID=B9RJG9; Match level="QueryCoverage=100%, HitCoverage=53%, E-value=0.0, Identity=48%"; Hit description =Splicing endonuclease positive effector sen1, putative
MGSRGRMLFDLNELPAEADEEAAAAVPQEAVAVIPQEAAVVVLQEAAVVVSQPQKSLPVPTTHAPTLFQPGEGSQSQGILNNNAFKHASIGSGFQPFVRNKDSNNTKESLKAEDNMNSSVASSSTVANNISDNATPKVEPCNQVSQAVEREEGEWSDADGVSENAGSSVSNKDESVGTASTHVKKESQDSEPHLIKSGDVTKDDTAAECSDAEMADAPKDQVLRGSTGSESMQNLECKGNQPGDDLDACNRSKDVKGVEANYALKFASNPAKRPKLNEHKEAMLGKKRARQTVFINVEDAKQAGTMKTSTPRRQSSFPAPIVTRTVKEASRGAGEKAAEXQNQQAFRDQRQSEMMGSERSSSADPSDQHAESNGDAEMGPQGRSKKMNAEEPSSDGYQQPVQRQASLKQSMDLKQPKGRPFSSQRTAVTGQNTADQKPASKRSIISKKPSFVNNTQYQDSSVERLIREVTNDKFWHNPEEAELECVPGSFESAEEYIRVFEPLLFEECRAQLYSSYEESLEAAGRDAHVAVRIKTVDRRERGWYDVIVLPMHEYKWNFKEGDVAILSFPRPGSAAQSGRSSRRAVGSNEDAESECGRLVGTVRRHMPIDTRDPIGAIIHFYVGDSFDFNNEANVLRKLQPRSTWYLTGLGSLATTQREYVALHAFRRLNVQMQNAILQPSPEHFPKYEEQPPAMPDCFTPNFADHLHRSFNGPQLSAIHWAATHTAAGTSNGVVKKQEPWPFTLVQGPPGTGKTHTVWGMLNVIHLVQYQHY

SEQ ID NO: 93044 - protein, 246 aa, Setaria italica
  Transcript Sequence Number=SeqID_27070
  Gene Ontology: Mol. function=binding
  Homolog annotation: Hit_ID=Q2QQL5; Match level="QueryCoverage=81%, HitCoverage=35%, E-value=3e-87, Identity=75%"; Hit description =Pentatricopeptide, putative
  Pfam annotation: Domain name=PPR; Domain location=107-140; Score=7.9; E_value=1; Accession=PF01535.12; Description=PPR repeat
  Pfam annotation: Domain name=PPR; Domain location=173-207; Score=4.1; E_value=2.9; Accession=PF01535.12; Description=PPR repeat
  Pfam annotation: Domain name=PPR; Domain location=36-70; Score=50.5; E_value=6.7e-12; Accession=PF01535.12; Description=PPR repeat
  Pfam annotation: Domain name=PPR; Domain location=71-105; Score=7.5; E_value=1.2; Accession=PF01535.12; Description=PPR repeat
  Pfam module annotation: Pfam domain module=PPR::PPR::PPR::PPR; Domain location=107-140::173-207::36-70::71-105
EMNCHVQNSLADMYAKCGSISQAYLLFLETHPRDAVSYNVMITALAHHGHGREALQLFNEMAEEGLHPDSVTFLGVLSACAHAGLVHDGKRYFESMRTSYAIEQSLDHYACMVDLYGRAGLIEEAYFLVQTMPMKPHAGVWGALLNACRKHCQLEVGKIAARELITIEPRNPGTYVLLANTLARDQQWDFVEMVRQSMRGKGIDKTAGCSWVEVDSVVHEFLMGDFRHPNSDEIYSILEHLYLQPA

SEQ ID NO: 93045 - protein, 45 aa, Setaria italica
  Transcript Sequence Number=SeqID_27071
  Gene Ontology: Cellular component=plasma membrane
  Homolog annotation: Hit_ID=Q9FM19; Match level="QueryCoverage=82%, HitCoverage=12%, E-value=7e-11, Identity=72%"; Hit description =Hypersensitive-induced response protein
MGKLPAAIGRFFCFVQVNQSTVGIKERFGKFEEVLNPGCHFMPWI

SEQ ID NO: 93046 - protein, 118 aa, Setaria italica
  Transcript Sequence Number=SeqID_27072
  Gene Ontology: Mol. function=protein serine/threonine kinase activity; Biological process=protein amino acid phosphorylation
  Homolog annotation: Hit_ID=B9RSY9; Match level="QueryCoverage=99%, HitCoverage=9%, E-value=4e-38, Identity=62%"; Hit description=ATP binding protein, putative
LNICSQGTEWTSRFASQDAIGHLCYIYKATGKQESTRLIAGSCLARLSRFSPSCIHLILEKISFKDIASTLIKGNPREQQISLNILNSALVNSQTVTNMNRYILSLSDDKQLVPGLIS

SEQ ID NO: 93047 - protein, 80 aa, Setaria italica
  Transcript Sequence Number=SeqID_27073
ICRCMYSNQTGSMNFFLYKRVILQPWKHSFLELLMLATWRLISFLQTQIVSLYHLLFLKPICSLDCWEWAWIIFSFLNLK

SEQ ID NO: 93048 - protein, 190 aa, Setaria italica
  Transcript Sequence Number=SeqID_27074
  Gene Ontology: Mol. function=transcription factor activity; Cellular component=nucleus; Biological process=regulation of transcription, DNA-dependent
  Homolog annotation: Hit_ID=B6SYP8; Match level="QueryCoverage=100%, HitCoverage=53%, E-value=4e-32, Identity=46%"; Hit description =Nuclear transcription factor Y subunit A-10
  Pfam annotation: Domain name=CBFB_NFYA; Domain location=41-97; Score =133.0; E_value=9.7e-37; Accession=PF02045.7; Description=CCAAT -binding transcription factor (CBF-BNF-YA) subunit B
GQSMVPSNYSSADQCYGMLTTYGMRSMSSGRLLLPLNAPADAPIYVNPKQYEGILRRRRARAKAERENRLAKGRKPYLHESRHLHAMRRARGSGGRFLNTKKEGAANANGSGRTAAAAPPARFATSPSSEPPRAPPGLGNVSNQRCHSRSSVSSLSGSEVSSIYDHHEDHASHHRQYGGGMVRAPPFFTP

SEQ ID NO: 93049 - protein, 154 aa, Setaria italica
  Transcript Sequence Number=SeqID_27075
  Gene Ontology: Mol. function=nucleoside-triphosphatase activity; Cellular component=cell wall
  Homolog annotation: Hit_ID=B6U2J1; Match level="QueryCoverage=94%, HitCoverage=22%, E-value=6e-55, Identity=75%"; Hit description =ATPase family AAA domain-containing protein 3
RRISSPPAPADGRGEEAAEEVPRVSTQHARTSAAGFDPAPLERGVRALDRLGQSTDPLVLFELMKKQEETRQQELAAKKVEEQRQLAQLEIEKKRIDYEETKKLDQQRAKMKAQSAQYEDDLKRKRLQAEHEAQRVRNQELVKMQEESAIRLEQ

SEQ ID NO: 93050 - protein, 67 aa, Setaria italica
  Transcript Sequence Number=SeqID_27076
RTTDVLHLGLLYAELPGCAVVQSRWARGATRLSGKSSLLSAVSPVGSSGGGSGGSQKDRQQPSKPEA

SEQ ID NO: 93051 - protein, 152 aa, Setaria italica
  Transcript Sequence Number=SeqID_27077
  Gene Ontology: Mol. function=protein serine/threonine kinase activity; Biological process=protein amino acid phosphorylation
  Homolog annotation: Hit_ID=Q6ZCR4; Match level="QueryCoverage=100%, HitCoverage=19%, E-value=1e-73, Identity=84%"; Hit description =Putative S-receptor kinase homolog 2
  Pfam annotation: Domain name=Pkinase; Domain location=1-152; Score= -66.5; E_value=0.00016; Accession=PF00069.17; Description=Protein kinase domain
  Pfam annotation: Domain name=Pkinase_Tyr; Domain location=2-152; Score=-174.9; E_value=0.043; Accession=PF07714.9; Description =Protein tyrosine kinase
  Pfam module annotation: Pfam domain module=Pkinase::Pkinase_Tyr; Domain location=1-152::2-152
EIDCPIIHCDIKPENILIDSNGVAKIADFGLAKLLIGNQTQTFTGVRGTRGYLAPEWSKNTAITVKVDVYSYGVMLLETISCKKSMELKLAGEECNISEWAYEYVISGNLKQVAAGECINEVELERMVRVGIWCTQNQPVTRPTMKSAVQMM

SEQ ID NO: 93052 - protein, 35 aa, Setaria italica
  Transcript Sequence Number=SeqID_27078
MSGGGGGGGGARGVAGPVPASARKLVQGLKEIVNP

SEQ ID NO: 93053 - protein, 81 aa, Setaria italica
  Transcript Sequence Number=SeqID_27079
  Gene Ontology: Mol. function=nucleotide binding; Cellular component =intrinsic to membrane; Biological process=defense response
  Homolog annotation: Hit_ID=Q2R8Y8; Match level="QueryCoverage=87%, HitCoverage=7%, E-value=6e-13, Identity=46%"; Hit description =Leucine Rich Repeat family protein, expressed
  Pfam annotation: Domain name=LRR_1; Domain location=11-32; Score =11.3; E_value=2.1; Accession=PF00560.25; Description=Leucine Rich Repeat
  Pfam annotation: Domain name=LRR_1; Domain location=34-56; Score =14.6; E_value=0.43; Accession=PF00560.25; Description=Leucine Rich Repeat
  Pfam annotation: Domain name=LRR_1; Domain location=58-80; Score =11.2; E_value=2.2; Accession=PF00560.25; Description=Leucine Rich Repeat
  Pfam module annotation: Pfam domain module=LRR_1::LRR_1::LRR_1; Domain location=11-32::34-56::58-80
CSNKQLRLQKYLCVLDLRDCWLQKLPDSFGQLRQLRYLNLSGSSKLVNLPDSFGNLLNLGHIDLSGCSQLLELPASFGNLT

SEQ ID NO: 93054 - protein, 217 aa, Setaria italica
  Transcript Sequence Number=SeqID_27080
  Gene Ontology: Mol. function=Rab GTPase activator activity; Cellular component=intracellular; Biological process=regulation of Rab GTPase activity
  Homolog annotation: Hit_ID=UPI000034ED46; Match level="QueryCoverage =81%, HitCoverage=41%, E-value=7e-58, Identity=61%"; Hit description =RabGAP/TBC domain-containing protein
  Subcellular localization annotation: CTP_CleavageSite=50; ConfidenceScore=5.26e-01
MWYLPSLMYQKMSTDIYTSFNVFWSKNLGSYLLNMQRGNFISTSTSIGVRAQLTTLSTIMKSVDPKLHEHLEHLDGGEYLFAFRMLMVLFRREFSFVDTMYLWELMWSMEYNPNLFSMLESDNGTTRATTNDESVLRQCGKFERKILQAAKKEEEIPLSVFVVASVLEARNKKLLGEAKGLDDVVKILNEITGSLDAKKACREALQIHEKYLNTVKA

SEQ ID NO: 93055 - protein, 228 aa, Setaria italica
  misc_feature (34)..(34): Xaa can be any naturally occurring amino acid
  Transcript Sequence Number=SeqID_27081
  Gene Ontology: Mol. function=ligase activity; Cellular component =chloroplast envelope; Biological process=response to auxin stimulus
  Homolog annotation: Hit_ID=Q60EJ6; Match level="QueryCoverage=100%, HitCoverage=36%, E-value=1e-106, Identity=83%"; Hit description =Probable indole-3-acetic acid-amido synthetase GH3.4
  Pfam annotation: Domain name=GH3; Domain location=3-228; Score=-61.6; E_value=9.5e-14; Accession=PF03321.5; Description=GH3 auxin -responsive promoter
APGAVEAFLRAAPLVTYEDILPDVLRIANGDTSXPILSGKPIREFLTSSGTSGGERKLMPSIADEMDRRSLMYTLLMPVMNQAVPGLDKGKCMYLYFVKAESRTPAGLPARPVLTSFYRSRHFLERPHDPYTVYTSPDEAVLCVDSYQSMYAHLLCGIVHRADVLRVGAVFASGFLRAIRFLEKHWPRLCRDIRSGTLDAEVTDRSVRAAVERVLRADPALADAVEAE

SEQ ID NO: 93056 - protein, 72 aa, Setaria italica
  misc_feature (27)..(27): Xaa can be any naturally occurring amino acid
  Transcript Sequence Number=SeqID_27082
  Gene Ontology: Mol. function=zinc ion binding; Cellular component =nucleus; Biological process=regulation of transcription
  Homolog annotation: Hit_ID=Q84T97; Match level="QueryCoverage=100%, HitCoverage=20%, E-value=5e-17, Identity=73%"; Hit description=Dof domain, zinc finger family protein, expressed
MPPPGALMAPRPDMETIAVAASGGGGXGGGPTGGSAVRPGSMTERARLAKIPQPEPGLKCPRCESTNTKFCY

SEQ ID NO: 93057 - protein, 79 aa, Setaria italica
  Transcript Sequence Number=SeqID_27083
PEMSLHEKYNQLVLSGESNKYKPMAATPKQSKFFQFTLHKVWYYVPSYKSINSDENSTSPSYHSSTLLLLRSYRALFFL

SEQ ID NO: 93058 - protein, 55 aa, Setaria italica
  Transcript Sequence Number=SeqID_27084
PPPSTMADEYLDDDEFDDYNPHPYAGGYDISATYGSPLPPSPATCYPVSSPAAVP

SEQ ID NO: 93059 - protein, 110 aa, Setaria italica
  Transcript Sequence Number=SeqID_27085
ASKGYQKICQDTKKKLRIQNRPGVYLQKLKAGRLWRMGVLGFPIAGGLGPGDSGGWRIEERMWKGKPNRRRSGPGDSGGWRIEERMWKGSRRCAHRRRGETEAGRNWEGK

SEQ ID NO: 93060 - protein, 129 aa, Setaria italica
  Transcript Sequence Number=SeqID_27086
  Gene Ontology: Mol. function=sequence-specific DNA binding; Cellular component=nucleus; Biological process=regulation of transcription, DNA-dependent
LTTPAAPHSLMHSTPYAAGYESKAVPAACSSGYLAYGAAPPSYYAKGSLALGHLFGGGLGVSSRPEQLYAAQSYLQRTSSLGGGGHGAVAPAVTDTLAKAITSDPSFQSALAAAITSVMGRGGAAAAQK

SEQ ID NO: 93061 - protein, 164 aa, Setaria italica
  Transcript Sequence Number=SeqID_27087
  Gene Ontology: Mol. function=structural molecule activity; Cellular component=COPI vesicle coat; Biological process=intracellular protein transport
  Homolog annotation: Hit_ID=Q9AUR8; Match level="QueryCoverage=85%, HitCoverage=11%, E-value=2e-67, Identity=83%"; Hit description =Coatomer subunit alpha-1
  Pfam annotation: Domain name=COPI_C; Domain location=1-161; Score= -22.3; E_value=1.3e-12; Accession=PF06957.3; Description=Coatomer (COPI) alpha subunit C-terminu
GLSFPEALRQFLNILHTIPVIVVDSRREVDEVKELIEIVKEYVLGLKMELKRKELRDDVTRQQELAAYFTNCKLQRVHMRLVLASAMALCFKQRNYATAAHFARMLLENSPQEAQAKKARQVMQACQDKNDSHQLNYDFRNPFVCSCWLSYYYCFLYSLFRLVP

SEQ ID NO: 93062 - protein, 56 aa, Setaria italica
  Transcript Sequence Number=SeqID_27088
  Gene Ontology: Mol. function=structural molecule activity; Cellular component=COPI vesicle coat; Biological process=intracellular protein transport
  Homolog annotation: Hit_ID=Q6RYF4; Match level="QueryCoverage=100%, HitCoverage=4%, E-value=2e-28, Identity=98%"; Hit description =Coatomer alpha subunit
MLTKFETKSNRVKGLAFHPRRPWILASLHSGVIQMWDYRMGTLLDRFDEHDGPVRG

SEQ ID NO: 93063 - protein, 329 aa, Setaria italica
  misc_feature (316)..(316): Xaa can be any naturally occurring amino acid
  Transcript Sequence Number=SeqID_27089
  Gene Ontology: Mol. function=structural molecule activity; Cellular component=COPI vesicle coat; Biological process=intracellular protein transport
  Homolog annotation: Hit_ID=Q6RYF4; Match level="QueryCoverage=92%, HitCoverage=25%, E-value=1e-127, Identity=76%"; Hit description =Coatomer alpha subunit
  Pfam annotation: Domain name=COPI_C; Domain location=156-328; Score= -32.7; E_value=3.7e-12; Accession=PF06957.3; Description=Coatomer (COPI) alpha subunit C-terminu
LVNLKVNLLNFRFNLRFWVICRSSCRQGNVGIVEYAYQRTKNFDRLAFLYLITGYLDKVGFMCKIAGQNNNFMGQFHNALYLGDVRKRVEILENAGQLALAYVTAVTHGLTEIADRLSAELGENVPSVSDGKTSSLLIPPAPLMSCGDWPLLRVMRGIFDAGLDATGRADQEEDYDDAGGDWGDEDLEIVDVNNVVENGDVVDHNEEEEVNEEEGGWDLEDLELPPEAETPKAVGVARSTLFVAPTPGMPVSQIWTQKSSLAGEHAAAGNFDTAMRLLSRQLGIKKFAPLKPLFLDALMGSHTFLRAFASAPVIPXVAVEKGWSESASL

SEQ ID NO: 93064 - protein, 945 aa, Setaria italica
  Transcript Sequence Number=SeqID_27090
  Gene Ontology: Mol. function=structural molecule activity; Cellular component=COPI vesicle coat; Biological process=intracellular protein transport
  Homolog annotation: Hit_ID=Q9AUR8; Match level="QueryCoverage=100%, HitCoverage=77%, E-value=0.0, Identity=88%"; Hit description =Coatomer subunit alpha-1
  Pfam annotation: Domain name=COPI_C; Domain location=815-945; Score= -152.8; E_value=9.4e-07; Accession=PF06957.3; Description=Coatomer (COPI) alpha subunit C-terminu
  Pfam annotation: Domain name=Coatomer_WDAD; Domain location=337-784; Score=894.9; E_value=4.3e-266; Accession=PF04053.6; Description =Coatomer WD associated region
  Pfam annotation: Domain name=WD40; Domain location=1-37; Score=3.9; E_ value=14; Accession=PF00400.24; Description=WD domain, G-beta repeat
  Pfam annotation: Domain name=WD40; Domain location=125-163; Score =52.0; E_value=2.2e-12; Accession=PF00400.24; Description=WD domain, G-beta repeat
  Pfam annotation: Domain name=WD40; Domain location=194-232; Score =39.2; E_value=1.6e-08; Accession=PF00400.24; Description=WD domain, G-beta repeat
  Pfam annotation: Domain name=WD40; Domain location=238-276; Score =36.6; E_value=1e-07; Accession=PF00400.24; Description=WD domain, G -beta repeat
  Pfam annotation: Domain name=WD40; Domain location=41-79; Score=40.5; E_value=6.6e-09; Accession=PF00400.24; Description=WD domain, G-beta repeat
  Pfam annotation: Domain name=WD40; Domain location=83-121; Score =47.5; E_value=5.1e-11; Accession=PF00400.24; Description=WD domain, G-beta repeat
  Pfam module annotation: Pfam domain module=COPI_C::Coatomer _WDAD::WD40::WD40::WD40::WD40::WD40::WD40; Domain location=815 -945::337-784::1-37::125-163::194-232::238-276::41-79::83-121
MLTKFETKSNRVKGLSFHPRRPWILASLHSGVIQMWDYRMGTLLDRFDEHDGPVRGVHFHATQPLFVSGGDDYKIKVWNYKTHRCLFTLHGHLDYIRTVQFHHEYPWIVSASDDQTIRIWNWQSRTCVAVLTGHNHYVMCASFHPKEDLVVSASLDQTVRVWDIGALRKKAVSPADDIMRLTQMNTDLFGGIDAVVKYVLEGHDRGVNWASFHPTLPLIVSGADDRQVKLWRMNDTKAWEVDTLRGHMNNVSCVMFHAKQDIIVSNSEDKSIRIWDATKRTGIQTFRREHDRFWILAAHPEMNLLAAGHDSGMIVFKLERERPAFCVSGDTVFYVKDRFLRFFEYSTQKEVQVAPIRRPGSVSLNQSPRTLSYSPTENAILICSDVDGGSYELYIVPKDSAGRSDYLQEAKKGAGGSAVFIARNRFAVLEKSSNQVLVKNLKNEIVKKTSLPIATDGIYYAGTGNILCKAEDRVAIFDLQQRLVLGELQTPAVKYVAWSTDMESVALLSKHAIIIANKKLVHRCTLHETIRVKSGAWDENGVFIYTTLNHIKYCLPNGDSGIIRTLDVPIYITRVVGNNIFCLDRDGKNKLIAVDASEYIFKLALLRKRYDHVMSMIKNSQLCGQAVISYLQQKGFPEVALHFVKDEKTRFNLALESGNIQIAVASAKELDDKDHWYRLGIEALRQGNVGIVEYAYQRTKNFDRLAFLYLITGYLDKVGFMCKIAGQNNNFMGQFHNALYLGDVRKRVEILENAGQLALAYVTAVTHGLTEIAERIAAELGENAPSLPEGKSHSLLIPPAPLTACGDWPLLRVMRGIFEGGLDATGRAELEEDDEAAGADWGDEDLDIIDASEVVANGGDSFVEAEEGEPNEEDGEEGGWDLEDLELPPETETPKAVGNARSAVFVAPTPGIPVSQIWTQRSSLAGEHAAAGNFDTAMRLLSRQL

SEQ ID NO: 93065 - protein, 380 aa, Setaria italica
  Transcript Sequence Number=SeqID_27091
  Gene Ontology: Mol. function=structural molecule activity; Cellular component=COPI vesicle coat; Biological process=intracellular protein transport
  Homolog annotation: Hit_ID=Q6RYF4; Match level="QueryCoverage=86%, HitCoverage=27%, E-value=1e-173, Identity=88%"; Hit description =Coatomer alpha subunit
  Pfam annotation: Domain name=COPI_C; Domain location=20-380; Score =791.2; E_value=6.9e-235; Accession=PF06957.3; Description=Coatomer (COPI) alpha subunit C-terminu
VIIIIFIFIVVTNCWLVVIGSIVRLYLLIEEEEVNEEEGGWDLEDLELPPEAETPKAVGVARSTLFVAPTPGMPVSQIWTQKSSLAGEHAAAGNFDTAMRLLSRQLGIKNFAPLKPLFLDALMGSHTFLRAFASAPVIPVAVEKGWSESASPNVRGPPALVFTFSQMDDKLKAAYKATTEGKFPEALRQFLSILHTIPLLVVDSRREVDEVKELIQIAREYVLGLKMEVKRKELKEDPIRQQELAAYFTNCNLQKVHTRLVLTSAMGLCFKGGNYATAANFARMLLENNPNEAQAKKARQVVQACGDRKDGRQLNYDFRNPFVVCGATFVPIYRGQKDVSCPYCGSRFMPSVEGELCSICELSVVGADASGLLCSPTQSR

SEQ ID NO: 93066 - protein, 380 aa, Setaria italica
  Transcript Sequence Number=SeqID_27092
  Gene Ontology: Mol. function=structural molecule activity; Cellular component=COPI vesicle coat; Biological process=intracellular protein transport
  Homolog annotation: Hit_ID=Q9AUR8; Match level="QueryCoverage=100%, HitCoverage=31%, E-value=1e-178, Identity=78%"; Hit description =Coatomer subunit alpha-1
  Pfam annotation: Domain name=COPI_C; Domain location=1-380; Score =891.2; E_value=5.3e-265; Accession=PF06957.3; Description=Coatomer (COPI) alpha subunit C-terminu
DWGDEDLDIIDASEVVANGGDSFVEAEEGEPNEEDGEEGGWDLEDLELPPETETPKAVGNARSAVFVAPTPGIPVSQIWTQRSSLAGEHAAAGNFDTAMRLLSRQLGIKNFTPLKPLFLDLHMGSHTYLRALAAAPVISVAVEKGWNESASPNVRGPPALVFSFSQLEDRLKAAYKATTEGKFPEALRQFLNILHTIPVIVVDSRREVDEVKELIEIVKEYVLGLKMELKRKELRDDVTRQQELAAYFTNCKLQRVHMRLVLASAMALCFKQRNYATAAHFARMLLENSPQEAQAKKARQVMQACQDKNDSHQLNYDFRNPFVVCGATYVPIYRGQKDVSCPYCGSRFVPSIEGQLCTICELATVGADASGLLCSPTQLR

SEQ ID NO: 93067 - protein, 429 aa, Setaria italica
  misc_feature (421)..(421): Xaa can be any naturally occurring amino acid
  Transcript Sequence Number=SeqID_27093
  Homolog annotation: Hit_ID=B8YIE8; Match level="QueryCoverage=99%, HitCoverage=24%, E-value=7e-95, Identity=48%"; Hit description=DNA glycosylase/lyase 701
PAQLATPDKYNSEHLWPNGLHGEESKTENGTEASQLQQLATTIFCNNHDNLEAVVPANTLETRIQHSDESTALLTERTADDNMHTYQPMQKRPKTQTNQSEHTPLSTPAAPKERTLNQIEMQIASAEKTEMFRNGETPAQKMKTRRKKHRPKVIRENKLAKVQKSDSTPDGESPNQKIKRSYVRKKRSLSSLEKCSAPASDQSISRGKGIAARRRTASVRRSLQFEPEEQGVQGDHSSMANLQHHNYEKPVHAQGCFCSESEVQIEHGLQADVENSPGGLAFGMSLRLNKLLDEYIHLPEVTPKPAEEVSNATSGSLSKELASEQDNVGRTCEPDDTSKSSLCIEERVVKTVIEGNKMDLELKYCDVDGFHSSARSIPEQMSKVSEVENHNNGESSLTGTRNSVILRTAAEMLAFCQAGRXKKKRSARV

SEQ ID NO: 93068 - protein, 202 aa, Setaria italica
  misc_feature (72)..(72): Xaa can be any naturally occurring amino acid
  misc_feature (173)..(173): Xaa can be any naturally occurring amino acid
  Transcript Sequence Number=SeqID_27094
  Gene Ontology: Mol. function=metallocarboxypeptidase activity; Cellular component=integral to membrane; Biological process =proteolysis
  Homolog annotation: Hit_ID=A1YKF5; Match level="QueryCoverage=90%, HitCoverage=42%, E-value=4e-87, Identity=84%"; Hit description=Zinc carboxy peptidase
  Pfam annotation: Domain name=Peptidase_M14; Domain location=29-201; Score=124.6; E_value=3.2e-34; Accession=PF00246.16; Description=Zinc carboxypeptidase
RGLFSRNLLQKKPHITEEMARGYMSNAELEIAVHAFGSRCSNISRIYSIGKSVNDFPLWVIEISDKPRQKEXAEPAFKFIGNVHGDEPVGREVLMHLANWLCDNYLKDPLATLIVENMHLHILPTMNPDGFALRWRGNANDIDLNRDFPDQFFSANNDINSRQPETRAIMNWXKQEHFTASASLHGGALVANYPWDGTRDTG

SEQ ID NO: 93069 - protein, 121 aa, Setaria italica
  Transcript Sequence Number=SeqID_27095
  Gene Ontology: Mol. function=chitinase activity; Cellular component =cell wall; Biological process=cell wall catabolic process
  Homolog annotation: Hit_ID=Q9ZSE7; Match level="QueryCoverage=85%, HitCoverage=36%, E-value=3e-45, Identity=86%"; Hit description =Chitinase
  Pfam annotation: Domain name=Glyco_hydro_19; Domain location=33-121; Score=7.7; E_value=3.4e-09; Accession=PF00182.11; Description =Chitinase class I
LIAVVAFVVASGSAGVAEARYGGPGQCSPVAALVSERLYNSLFLHKDDPACPAKGFYTYASFILAARTFPKFAATGDLNTRKREIAAFFAQISHETTGGWATAPDGEYSWGLCYKEEISPG

SEQ ID NO: 93070 - protein, 310 aa, Setaria italica
  Transcript Sequence Number=SeqID_27096
  Gene Ontology: Mol. function=phospholipase D activity; Cellular component=membrane; Biological process=phosphatidylcholine metabolic process
  Homolog annotation: Hit_ID=Q710M6; Match level="QueryCoverage=86%, HitCoverage=31%, E-value=1e-130, Identity=81%"; Hit description =Phospholipase D
  Pfam annotation: Domain name=C2; Domain location=54-158; Score=73.6; E_value=7.2e-19; Accession=PF00168.22; Description=C2 domain
SGGGMQVVPYGAAAGGSQHGGGMQVVPYGAGGGGSQHGGSVRASLKVVLLHGTLDIWVHDARHLPNKDMFSKKVGELLGPRITGAVGSKMSSASMTSDPYVTVQVSYATVARTYVIPNCENPVWSQNFIVPVGHEAAEVQFVVKDSDVFGAQIIGAVAIPAEKLLSGERIQGVYPVLEPNGKPCAPGAVLHLSIQFIPVARLTMYHHGVVAGPDSHGVPHTYFPLRRGMKVTLYQDAHVPDGCLPDIWLGNGLRYQHGQCWRDIYDAICQARKLIYIVGWSVFHTIHLVRDGTQAPSLGDLLKTKSQVKG

SEQ ID NO: 93071 - protein, 154 aa, Setaria italica
  Transcript Sequence Number=SeqID_27097
KDVCSTGMDVDQSFHAPANGALHVGGSSWASTRRTDKTNGKDNDANSLQVDLYMKQGHQTDLPEDMELKRRTMIDNGISTSGGLSLEENTHFEPRSTMCKEIKAIGVQTDSTSDSGHLECNKISVARISVNLRAIWGVPTNSLSRRNLISKIIV

SEQ ID NO: 93072 - protein, 302 aa, Setaria italica
  Transcript Sequence Number=SeqID_27098
  Gene Ontology: Mol. function=acyltransferase activity; Cellular component=endoplasmic reticulum membrane; Biological process =metabolic process
  Homolog annotation: Hit_ID=B6TWM4; Match level="QueryCoverage=97%, HitCoverage=78%, E-value=1e-137, Identity=80%"; Hit description=JD1
  Pfam annotation: Domain name=Acyltransferase; Domain location=77-206; Score=82.3; E_value=1.7e-21; Accession=PF01553.13; Description =Acyltransferase
PSVLLPLRFVAGMLVLLLYYLVCRVCTLCVESDRGRPRLAGWRRKAVLRSGCALSRAMLFVFGFYWIRETDKRLPSSVEDVNQELPEELGRPGAIVSNHVSYVDILYHMSASFPSFVAKESVSRLPLVGLISKCLGCIFVQRESKSSDSKGVSGAVTERVQEVCQDKNTPMMLLFPEGTTTNGDYLLPFKTGAFLASAPVQPVILRYPYRRFSPAWDSMDGARHVFLLLCQFVNYIEVVRLPVYYPSEQEKEDPKLYANNVRKLIAMEGNLILSNLGLADKRVYHAALNGRNQLGAQHQKDD

SEQ ID NO: 93073 - protein, 83 aa, Setaria italica
  Transcript Sequence Number=SeqID_27099
RLRITSLGMYLLKPSFILIVSQQTWLLYIPICICIIMLILYGYRTNLVHSTTQKSICLATTIAESTYELLQEFRLHEPATSVN

SEQ ID NO: 93074 - protein, 36 aa, Setaria italica
  Transcript Sequence Number=SeqID_27100
SQAYPKSNNLFVLSRNHSNNKYMKVAKRELADAITC

SEQ ID NO: 93075 - protein, 83 aa, Setaria italica
  Transcript Sequence Number=SeqID_27101
  Subcellular localization annotation: CTP_CleavageSite=20; ConfidenceScore=5.20e-01
PPAHAFPDSHQKHPSASLIPCAAIPPLRPSPWPPRLPPPPPPPPHPGPPAGGSALPGPPPPTPSNHHAGPSSSAAAGGTDAAL

SEQ ID NO: 93076 - protein, 103 aa, Setaria italica
  Transcript Sequence Number=SeqID_27102
  Gene Ontology: Cellular component=extracellular region; Biological process=plant-type cell wall organization and biogenesis
  Homolog annotation: Hit_ID=Q40637; Match level="QueryCoverage=100%, HitCoverage=40%, E-value=2e-34, Identity=65%"; Hit description =Expansin-A3
  Pfam annotation: Domain name=Pollen_allerg_1; Domain location=15-92; Score=135.0; E_value=2.3e-37; Accession=PF01357.13; Description =Pollen allergen
PVNYQRVSCKRSGGMRFTINGRDYFELVTVTNVGGSGVVSQMWIKGTNTNWLTMSRNWGMNWQSTAYLNGQSLSFMVKIDDGRVVTVWNVVPSNWYFGATYTT

SEQ ID NO: 93077 - protein, 46 aa, Setaria italica
  Transcript Sequence Number=SeqID_27103
VCELVVNLSCFVGSWSSLVLGSHCLYHACLLIKLAVFVPKACINQF

SEQ ID NO: 93078 - protein, 135 aa, Setaria italica
  Transcript Sequence Number=SeqID_27104
MGFLRRIAGLLGISRDDADHPDSSSSSAAAAEFPQDRAAAAAARAGALAPEGDGGVQGFRWYTRRLRIDEDGDVADEFLDEVIPESSINNDAGPVGRFQVKYNTKPTSLALKKQIVAIDGDIRHSLEHQGQLRWV

SEQ ID NO: 93079 - protein, 159 aa, Setaria italica
  Transcript Sequence Number=SeqID_27105
MGFLRRIAGLLGISRDDADHPDSSSSSAAAAEFPQDRAAAAAAAAAHGARRGFSVQVPVPVERQGPGPVLVPCPQGDCVVQGFRWYTRRLRIDEDGDVADEFLDEVIPESSINNDAGPVGRFQVKYNTKPTSLALKKQIVAIDGDIRHSLEHQGQLRWV

SEQ ID NO: 93080 - protein, 85 aa, Setaria italica
  Transcript Sequence Number=SeqID_27106
NNQRAKNPGTTIIAGKQCMLMLSHIHKTPFCWDDHLQQISSLLNYISKSSYRSYFGATTIDNTTSIMSTLIKKCQFISDVDALQF

SEQ ID NO: 93081 - protein, 78 aa, Setaria italica
  Transcript Sequence Number=SeqID_27107
IIGVRLWIWSPSGVIGEGGRSAARRPDGGSALRRLSVDGVLSFRLPLRLYSVYLEPVKCNHPQDIKPKAKDSIYLDLQ

SEQ ID NO: 93082 - protein, 93 aa, Setaria italica
  Transcript Sequence Number=SeqID_27108
LISTWMDGITFQFPSQTIQTRCWHCSQYDNLVRSYIHVLYFLILSFVRGFVYICIHLYVYTFGSRALIMDARLFLHGNLFNLLLTPAILYPCR

SEQ ID NO: 93083 - protein, 111 aa, Setaria italica
  Transcript Sequence Number=SeqID_27109
  Gene Ontology: Mol. function=actin binding; Cellular component =intracellular
  Homolog annotation: Hit_ID=Q337A5; Match level="QueryCoverage=98%, HitCoverage=72%, E-value=2e-52, Identity=92%"; Hit description=Actin- depolymerizing factor 10
  Pfam annotation: Domain name=Cofilin_ADF; Domain location=17-111; Score=67.2; E_value=6e-17; Accession=PF00241.12; Description =Cofilintropomyosin-type actin-binding pr
MEVLWGGGSPAWIDVPERSKSAFMELKRRKVHRYVIFKIDDRREEIVVEKTGSPGESYDDFTASLPADDCRYAVYDLDFVSDDNCRKSKIFFISWSPTDSRIRAKTIYAVS

SEQ ID NO: 93084 - protein, 42 aa, Setaria italica
  Transcript Sequence Number=SeqID_27110
PYTLPADISYENLSLLSCWLFSVVRKYLFFLSANRNYYPLVL

SEQ ID NO: 93085 - protein, 165 aa, Setaria italica
  Transcript Sequence Number=SeqID_27111
EPPEEEKDEDDHEQVDAHDEGRQRRAMRSPADARVLHRRRRRRGRGANKAAAPERGHGFCADVMVFDSRISREELPMVCIKPLNLKPLSKKMVAFCKPNRKKRSQVRKVVWEKNRKRDMKQRGKGSKEMPEREEEGGVMESGAEEGVYKEVEAGEVALAVGSWFG

SEQ ID NO: 93086 - protein, 59 aa, Setaria italica
  misc_feature (40)..(40): Xaa can be any naturally occurring amino acid
  Transcript Sequence Number=SeqID_27112
  Gene Ontology: Mol. function=metal ion binding; Cellular component =integral to membrane
  Homolog annotation: Hit_ID=B6THV3; Match level="QueryCoverage=91%, HitCoverage=14%, E-value=3e-23, Identity=94%"; Hit description =Protein binding protein
  Pfam annotation: Domain name=zf-C3HC4; Domain location=7-48; Score =36.1; E_value=1.4e-07; Accession=PF00097.17; Description=Zinc finger, C3HC4 type (RING finger)
LLFFQECCICLSSYEDGAELSALPCNHHFHWTCITKWLRXMHATCPLCKYNILKGSDSA

SEQ ID NO: 93087 - protein, 163 aa, Setaria italica
  misc_feature (23)..(23): Xaa can be any naturally occurring amino acid
  Transcript Sequence Number=SeqID_27113
  Gene Ontology: Mol. function=metal ion binding; Cellular component =integral to membrane
  Homolog annotation: Hit_ID=Q6Z748; Match level="QueryCoverage=78%, HitCoverage=71%, E-value=6e-67, Identity=94%"; Hit description=RING zinc finger protein-like
  Pfam annotation: Domain name=zf-C3HC4; Domain location=112-152; Score= 36.1; E_value=1.4e-07; Accession=PF00097.17; Description=Zinc finger, C3HC4 type (RING finger)
LTELPALLFDFCRLTVVFLAFDXFFAVFCVVVAFFIGIALCCCLPCVIAILYALAGQEGASDADISVLPRYRYSDPSENGEKGTDEGVMIPILNNSGTSTSERILLREDAECCICLSSYEDGAELSALPCNHHFHWTCITKWLRMHATCPLCKYNILKGSDSA

SEQ ID NO: 93088 - protein, 83 aa, Setaria italica
  misc_feature (30)..(30): Xaa can be any naturally occurring amino acid
  Transcript Sequence Number=SeqID_27114
LAEFLAARNASSGKNVTSEVCSGNDGAKNXSFERTSADKNSKNISQLLVKKALEVDADEGKHFSSVSIGANFAGSSSVPPGNA

SEQ ID NO: 93089 - protein, 417 aa, Setaria italica
  Transcript Sequence Number=SeqID_27115
  Gene Ontology: Mol. function=transferase activity, transferring groups other than amino-acyl groups; Biological process=paclitaxel biosynthetic process
  Homolog annotation: Hit_ID=A6Q0N8; Match level="QueryCoverage=99%, HitCoverage=95%, E-value=0.0, Identity=89%"; Hit description =Putative acyl transferase 3
  Pfam annotation: Domain name=Transferase; Domain location=4-415; Score=180.8; E_value=3.9e-51; Accession=PF02458.7; Description =Transferase family
MASFKVTRISEGPVKPASATPEETLPLAWVDRYPTHRGLVESMHIFRSGADAAPGVIREALGKALAFFYPLAGRIVEGAEPGCPAIRCTADGVYFAEAEADCSLEDVRFLERPLLLPKEDLVPYPGDDRWGVEPHNTIMMMQITKFTCGGFVMGLRFNHASADGMGAAQFINAIGDMARGLTEPKVKPVWDREKFPNPKIKPGPLPELPVLALDYIVLDFPTGYIDGLKKQYKEHSGKFCSGFDVLTAKLWQCRTRALNLEPNAEVKLCFFASVRHLLKLDRGYYGNSIFPVKMSAPAEKVLGSSIMEVVDMIRQAKDRMAVEFFQFAKEETDQDPFQMTFNYESTYVSDWSKLGFSEVDYGFGPPVFAGPLVNNDFIASVVILKAPLPLDGTRMLASCVTKEHSEEFIRGMKADLP

SEQ ID NO: 93090 - protein, 91 aa, Setaria italica
  Transcript Sequence Number=SeqID_27116
  Gene Ontology: Mol. function=gamma-glutamyltransferase activity; Cellular component=endoplasmic reticulum; Biological process =cellular response to nitrogen starvation
  Homolog annotation: Hit_ID=B6SSX2; Match level="QueryCoverage=73%, HitCoverage=11%, E-value=6e-29, Identity=91%"; Hit description=Gamma- glutamyltranspeptidase 1
DAAVATALCLVVVSAASSGVGGGAFMLVRLADGTAVVYDSRETAPLAASKDMYGGNATLKARGALSIAVPGEIAGLYEAWRRHGKLPWKRL

SEQ ID NO: 93091 - protein, 221 aa, Setaria italica
  misc_feature (215)..(215): Xaa can be any naturally occurring amino acid
  Transcript Sequence Number=SeqID_27117
  Gene Ontology: Mol. function=zinc ion binding; Cellular component =nucleus
  Homolog annotation: Hit_ID=Q2HSZ7; Match level="QueryCoverage=96%, HitCoverage=19%, E-value=3e-65, Identity=52%"; Hit description =Cyclin-like F-box; FAR1; Zinc finger, SWIM-type
  Pfam annotation: Domain name=MULE; Domain location=60-156; Score =125.0; E_value=2.5e-34; Accession=PF10551.1; Description=MULE transposase domain
EKLRFVEEGDVEALLVFFDKMQAQNSNFFYNWDMDDEGRLKNVCWVDARSRVAYQHFCDVICFDTVYLTYQFVIPLVAFLGINHHGQFVLLGCGLLGDESPETFAWLFKKWLKCMNDKAPEAIITTHSRPVVKAVSEVFPNTRHRYNLWHIMKELPEMSGRVEDKEAISLRMKKVVYDTITSADFEREWVEMINQYNLHDNRWLTTLFEERAKWXPAYVKD

SEQ ID NO: 93092 - protein, 107 aa, Setaria italica
  misc_feature (85)..(85): Xaa can be any naturally occurring amino acid
  Transcript Sequence Number=SeqID_27118
  Gene Ontology: Mol. function=protein serine/threonine kinase activity; Cellular component=integral to membrane; Biological process=protein amino acid phosphorylation
  Homolog annotation: Hit_ID=Q53MD2; Match level="QueryCoverage=100%, HitCoverage=10%, E-value=4e-43, Identity=75%"; Hit description =Leucine Rich Repeat family protein, expressed
WKGNAARVMAVEMAILGKVRHRNILKLHACLSRGDLHFIVYEYMPRGNLHQALRREAAAAAKGGGGGGRPELDWPRRRRVALGAXKGLMYLHHDCTPAVIHRDIKST

SEQ ID NO: 93093 - protein, 102 aa, Setaria italica
  Transcript Sequence Number=SeqID_27119
  Pfam annotation: Domain name=DUF702; Domain location=59-102; Score= -54.0; E_value=0.0016; Accession=PF05142.4; Description=Domain of unknown function (DUF702)
  Subcellular localization annotation: CTP_CleavageSite=96; ConfidenceScore=5.27e-01
GGGGIGFQLWHPHQQAAAAAPHTSQFFSSGVATGVVLGFSSHDGSGGIGGPGSGGAGGGRAGTSCQDCGNNAKKDCAHMRCRTCCRSRGFSSPPPRQEPPSG

SEQ ID NO: 93094 - protein, 303 aa, Setaria italica
  misc_feature (11)..(11): Xaa can be any naturally occurring amino acid
  misc_feature (28)..(28): Xaa can be any naturally occurring amino acid
  Transcript Sequence Number=SeqID_27120
  Gene Ontology: Mol. function=protein binding
  Homolog annotation: Hit_ID=Q7XLJ0; Match level="QueryCoverage=95%, HitCoverage=50%, E-value=1e-116, Identity=76%"; Hit description =OSJNBa0009K15.20 protein
DRGIEACLNYXIEAVPWNENEEEKLKRXFGRCTFDESVCKDVLARLQQQCRSSSEDLTVQLVESVTSGTNNGARKELQSLVSGLLSKSSVYHKDLSGLNKGSLYQICRSCLRSLVELFVEDSGPVEDAGQAITVSDSKPMIERVSKQTENLNWLFDILVNNDMAEEFVECWANQDELIRMHEEASPMFRYELSRISASVFIALGKGRIQCPSDMRSQLFYGWFRPMLMDFGWLQRCSKGLDVRILEEHLGQALLTLPLQHQQSLFEEWFRCFASRGTECPNLSRAFQVWWRRSFVRSSVEVRR

SEQ ID NO: 93095 - protein, 86 aa, Setaria italica
  Transcript Sequence Number=SeqID_27121
  Pfam annotation: Domain name=DUF789; Domain location=1-83; Score= -141.8; E_value=0.0022; Accession=PF05623.4; Description=Protein of unknown function (DUF789)
SLSTALDGMLTGRPETNNFHNNKIADVPGKITLPLIGLASYKLHGSMWMSNQHHEQQLTTSLLKAADDWLCQRQVDHPDYRFFLSH

SEQ ID NO: 93096 - protein, 157 aa, Setaria italica
  misc_feature (7)..(7): Xaa can be any naturally occurring amino acid
  Transcript Sequence Number=SeqID_27122
  Gene Ontology: Mol. function=phosphatase activity; Biological process= metabolic process
  Homolog annotation: Hit_ID=B9SN55; Match level="QueryCoverage=80%, HitCoverage=43%, E-value=2e-25, Identity=48%"; Hit description =Phosphoethanolamine/phosphocholine phosphatase, putative
  Pfam annotation: Domain name=Put_Phosphatase; Domain location=1-128; Score=-9.1; E_value=2.2e-09; Accession=PF06888.4; Description =Putative Phosphatase
GTDTNPXHVDGAGRLRIRPYHEFAAPAPGHGCALPSCPPNMCKGKVMERILQEEEEAAVAARRRRRAVVYLGDGRGDYCPSLKLREGDYVMPRAGYPVCDLIGGAPPAAAVREWDGFEDLARVLLGIVDDEIARAAVTTTTEQDGCRRYERRRRRRG

SEQ ID NO: 93097 - protein, 90 aa, Setaria italica
  Transcript Sequence Number=SeqID_27123
  Gene Ontology: Mol. function=peptidase activity; Biological process =lipid transport
  Homolog annotation: Hit_ID=Q01595; Match level="QueryCoverage=95%, HitCoverage=64%, E-value=6e-20, Identity=62%"; Hit description =Cortical cell-delineating protein
  Pfam annotation: Domain name=Tryp_alpha_amyl; Domain location=5-87; Score=54.1; E_value=5.4e-13; Accession=PF00234.14; Description =Protease inhibitorseed storageLTP f
PARRCPVDALQLQVCASILDGLVKVSLPEERERCCRLLDGLVDIDAAACLCTVLKANVLGIPLRVPINISLSLNRCGRRDCPPGLTCPRY

SEQ ID NO: 93098 - protein, 303 aa, Setaria italica
  Transcript Sequence Number=SeqID_27124
  Homolog annotation: Hit_ID=B6TBE4; Match level="QueryCoverage=96%, HitCoverage=71%, E-value=4e-43, Identity=38%"; Hit description=F-box domain containing protein
QDPELPAFPSFVPTRGTDRDQAAAVRGGDFFLTSLQERSGVHNGWDIHDCRGGYVLLANGDQETMAVVNPLVRRSERFLDFGHKDTLEGHRACGIVHRACLLCSDEDPTSFRVIIIAHDKSRVRATVFSSETGEWSVRRWVHIPARPRRGRGERWILNSNMQANGFLYWVSKNRKYMVTLDTATVDFSVNELPIFLQNRHCTFVVGEMKNGEACIVYAINFTVGVLFRRTESDGVDRWVLDRAELLETQLGRVLGEVMENYNEVEVVAVRDGFAYLATTESLNDSGTPSWSCKFVQTVSFFSP

SEQ ID NO: 93099 - protein, 58 aa, Setaria italica
  Transcript Sequence Number=SeqID_27125
  Gene Ontology: Mol. function=transferase activity, transferring glycosyl groups; Biological process=metabolic process
  Homolog annotation: Hit_ID=Q8LKT6; Match level="QueryCoverage=100%, HitCoverage=12%, E-value=7e-16, Identity=63%"; Hit description =Putative glucosyl transferase
GRPKVKWLVSDVYAWWSLNVAKRLGIRVASFWPGSAACLAINLKIPKLTEEGLLNNKG

SEQ ID NO: 93100 - protein, 309 aa, Setaria italica
  Transcript Sequence Number=SeqID_27126
  Gene Ontology: Mol. function=transferase activity, transferring glycosyl groups; Biological process=metabolic process
  Homolog annotation: Hit_ID=Q8LKT6; Match level="QueryCoverage=95%, HitCoverage=64%, E-value=1e-134, Identity=77%"; Hit description =Putative glucosyl transferase
MHSDLCWWHICTVAGWPERDETFQLAPGIPPLHTSQLPWNNVGAPEGQPIIFELFIRTDRLSALAEMVVCNSFHEAEAGAFKLLPHVLPIGPLSSDREFRKPVGQLLPEDTRCLRWLDAQPDGSVVYVAFGSFTVFDPCQFQELALGLELTGRPFLWVVRPNFTTGELSKAWFDEFLARVAGKGMVVSWCPQQQVLAHRAVACFVSHCGWNSTMEGVRNGLPFLCWPYFADQYLDRNYVTDVWRTGLAVSPDADGIVTKEELRSKVEQVVGDAEIKERARVFKDAARRCISEGGSSCENFNRFVNLLSE

SEQ ID NO: 93101 - protein, 278 aa, Setaria italica
  Transcript Sequence Number=SeqID_27127
  Gene Ontology: Mol. function=transferase activity, transferring glycosyl groups; Biological process=metabolic process
  Homolog annotation: Hit_ID=Q8LKT6; Match level="QueryCoverage=96%, HitCoverage=58%, E-value=1e-105, Identity=70%"; Hit description =Putative glucosyl transferase
MAMKAHVLVLPFPSQGHVTPLMELSHRLVDHGFEVTFVNTEVDHALVVAALRGGEATLLGGGGGIHLASIPDGLADDEDRKDLNKLIDTYTRHMPGHLERLVAEMEAAGRPKVKWLVPDVCMWWSFDVAKKFGIRVASFWPAAVACLAISLKIPKLTEEGLLNNKGWPERDETFQLAPGIPPLHTSQLPWNNVGAPEGQPIIFELFIRTDRLSALAEMVVCNSFHEAEAGAFKLLPHVLPIGPLSSDREFRKPVGQLLPEDTRCLRWLDAQARTDYRT

SEQ ID NO: 93102 - protein, 75 aa, Setaria italica
  Transcript Sequence Number=SeqID_27128
  Gene Ontology: Mol. function=transferase activity, transferring groups other than amino-acyl groups
  Homolog annotation: Hit_ID=Q01MP2; Match level="QueryCoverage=100%, HitCoverage=17%, E-value=5e-13, Identity=55%"; Hit description =H1005F08.2 protein
MKITVHTSKAVKPAYGGGIGGDATAVPLTVFDKANFDQHISGINFFRQPAPPNAALAAGLARALAEYREWAGRLG

SEQ ID NO: 93103 - protein, 96 aa, Setaria italica
  Transcript Sequence Number=SeqID_27129
  Gene Ontology: Mol. function=RNA binding; Cellular component =ribonucleoprotein complex; Biological process=nuclear mRNA splicing, via spliceosome
  Homolog annotation: Hit_ID=B6T3Z9; Match level="QueryCoverage=97%, HitCoverage=35%, E-value=5e-37, Identity=81%"; Hit description=Small nuclear ribonucleoprotein-associated protein B
  Pfam annotation: Domain name=LSM; Domain location=7-84; Score=69.7; E_ value=1.1e-17; Accession=PF01423.14; Description=LSM domain
MSNPKGSKMLQFINYRMRVTIQDGRQLVGKFMAFDRHMNLVLGDCEEFRRLPPSKSSKTTGDREERRTLGLLLLRGEEVVSMTVEGPPPPDESRAK

SEQ ID NO: 93104 - protein, 113 aa, Setaria italica
  Transcript Sequence Number=SeqID_27130
  Subcellular localization annotation: CTP_CleavageSite=44; ConfidenceScore=5.21e-01
QRESREQRVRATPLVARLLHGRSVVLTSPLSRPRRSRLTLSHSRQAARRRLVHLHVSDRLTAQRCLPCLARRDRSLQRKKKLAAAGCRIRPACREGAAAEDMGLLSHRVERSE

SEQ ID NO: 93105 - protein, 68 aa, Setaria italica
  Transcript Sequence Number=SeqID_27131
  Gene Ontology: Mol. function=nucleotide binding; Biological process =defense response
  Homolog annotation: Hit_ID=Q6AVJ8; Match level="QueryCoverage=100%, HitCoverage=7%, E-value=5e-17, Identity=56%"; Hit description=NB-ARC domain containing protein
SHGTWSTIGIDEDINKAVYLSYEDLPSHLKQCFVYCSLIPKDNLMSIGVIVQLWIAAGHVQCKAPEKL

SEQ ID NO: 93106 - protein, 222 aa, Setaria italica
  misc_feature (5)..(5): Xaa can be any naturally occurring amino acid
  misc_feature (58)..(58): Xaa can be any naturally occurring amino acid
  Transcript Sequence Number=SeqID_27132
  Homolog annotation: Hit_ID=B9SBM1; Match level="QueryCoverage=96%, HitCoverage=12%, E-value=2e-45, Identity=43%"; Hit description =Nuclear pore complex protein nup153, putative
CCMPXLFQLWSDESDSEGSTIKVDSIGWIRDDSIVIGCVRLNEDDNEEGYLVQVIRSXRNTFCESPGKPVVYTYVDFFNGVMDDVLPSGVGPNLLLGYLRRWDLMVASNKKSIDEHIALLKWPSTHDDEKTVKCLEMLEDKYSPRIDLQENGDDNVILGFGVENVSLFQKITVTVGPEQKEVAPQHILLCLTGEGKLILYYLARISDPSDLPHTALSTNEDF

SEQ ID NO: 93107 - protein, 114 aa, Setaria italica
  misc_feature (93)..(93): Xaa can be any naturally occurring amino acid
  Transcript Sequence Number=SeqID_27133
  Subcellular localization annotation: CTP_CleavageSite=33; ConfidenceScore=5.46e-01
MATPQPAASADGCATAPGAVDSRSGYCKETKTFCSLRPPVPLPPAGSPLSFTAFAFSLLPSPLPAHPALLDAATGETLSFPAFRSQVRALGGXLRSRGRVRRGDVAFVLAPARL

SEQ ID NO: 93108 - protein, 75 aa, Setaria italica
  Transcript Sequence Number=SeqID_27134
ALPSLRRLLAHRRLLSTAIATAATPEAVIYNIHNLSTDPSRALAFFRRSAAAGQPVGSAAYNLMLRTLASDPSSA

SEQ ID NO: 93109 - protein, 142 aa, Setaria italica
  misc_feature (127)..(127): Xaa can be any naturally occurring amino acid
  Transcript Sequence Number=SeqID_27135
  Gene Ontology: Mol. function=DNA binding; Cellular component=nucleus
  Homolog annotation: Hit_ID=B9RNW7; Match level="QueryCoverage=90%, HitCoverage=13%, E-value=1e-29, Identity=55%"; Hit description =Nucleic acid binding protein, putative
MADDGAPDAEERPQQLQDRLREVGERLQAPPDEAEDLLKLLIEVEECLLKVEQSPPESTSNAMRAATEALVKKELVGHTDPDVRLAVASCISEITRITAPDAPYDDDAMRDGNSLLIVGSFQNLDDXKSPLFGRRLSILDTV

SEQ ID NO: 93110 - protein, 78 aa, Setaria italica
  misc_feature (56)..(56): Xaa can be any naturally occurring amino acid
  misc_feature (60)..(60): Xaa can be any naturally occurring amino acid
  Transcript Sequence Number=SeqID_27136
MVSEVCVVFCIRVFNFSTSYFSSEHSNAVISCMETIMRLVIEESEDVQPQIASCLXQNVXRKEDKESSSPFFELAEKV

SEQ ID NO: 93111 - protein, 72 aa, Setaria italica
  Transcript Sequence Number=SeqID_27137
VKSKEASSKGKDSKDEGKSTEGNGRPGRFPFVSFAVSEVDKEKRKEKDGKTAETEQEASANASTGKKRRRKA

SEQ ID NO: 93112 - protein, 181 aa, Setaria italica
  Transcript Sequence Number=SeqID_27138
  Gene Ontology: Mol. function=DNA binding; Cellular component=nucleus
  Homolog annotation: Hit_ID=Q9SAI0; Match level="QueryCoverage=48%, HitCoverage=11%, E-value=3e-12, Identity=42%"; Hit description =F23A5.16 protein
FQVLEHSNAVISCMETIMRLVIEESEDVQPQIASCLLQNVRKEDKESSSLSFELAEKVIGACREKLKPVFLQSLKGTSLSEYSQIVALVCEEGSDDREENNADPSGKDTVDDGKLSERTISDELPQESSKAEQDISRPEQDGTSMNGNTAAAISSDATPADTDSIAAEPKRSRPLIQTKVI

SEQ ID NO: 93113 - protein, 740 aa, Setaria italica
  misc_feature (243)..(243): Xaa can be any naturally occurring amino acid
  Transcript Sequence Number=SeqID_27139
  Gene Ontology: Mol. function=DNA binding; Cellular component=nucleus
  Homolog annotation: Hit_ID=Q761Y0; Match level="QueryCoverage=65%, HitCoverage=89%, E-value=3e-88, Identity=47%"; Hit description=BRI1 -KD interacting protein 135 (Fragment)
  Pfam annotation: Domain name=LBR_tudor; Domain location=490-548; Score=11.5; E_value=0.035; Accession=PF09465.2; Description=Lamin-B receptor of TUDOR domain
PSPESTSNAMRAATEALVKKELVGHTDPDVRLAVASCISEITRITAPDAPYDDDAMRDVFSLIVGSFQNLDDTESPLFGRRLSILDTVAKVRSCVVMLDLECDDLINDMFHHFLRTVSSEHSNAVISCMETIMRLVIEESEDVQPQIASCLLQNVRKEDKESSSPSFELAEKVIGACREKLKPVFLQSLKGTSLSEYSQIVALVCEEGSDDREENNADPSGKDTVDDGKLSERTISDELPQVXPASSISIEMADIIPACFFAQESSKAEQDISRPEQDGTSMNGNTAAAISSDATPADTGADSIAAEPKKKSALDSDKSIKPNPSDKSEATEHSGSDTKKEDIVASGEEGTNGAADDTSKPADITPVKPRRGRPPGPKSLEKKAAGKNKPSRFSSDSAGKLTKRSAKDEVKSSVKKAGEAESSKKPQKSSSKQQKDETLSEEDPAKDLSLKEMISPKSSTKGPGRTKGQSTENSTPKRKQEQETEELPRSRKNKGLDGSLVGARIKVWWPDDKMFYNGVVESFDSGSKRHKVAYDDGDVEVLLLRDEKWDFISEDKGASVASQTPRGRKRKGDAVKEENTETPKSDAVDPPKKRGRPKGVRSTNGAPNDNSSATPSTKGKAASKDVKDTPETGPNLKNEVEKTSKDKASGSTEKTKDELPKDADDKSASKSKEASSKGKDSKDEGKSTEGKGRPGRKPKNTPAVSEVDKEKRKEKDGKTAETEQEASANASTGKKRRRKA

SEQ ID NO: 93114 - protein, 79 aa, Setaria italica
  Transcript Sequence Number=SeqID_27140
  Subcellular localization annotation: CTP_CleavageSite=49; ConfidenceScore=5.07e-01
GSTGWHHLVHVTTTSLRHGQNCYAVSPLLAKYRLACSLHQQGLTGSTADCSTNSSVRYSQMLRMSITQEPQLPRHGKFG

SEQ ID NO: 93115 - protein, 75 aa, Setaria italica
  Transcript Sequence Number=SeqID_27141
MNNGFAGILHRRNQPLMDDSAVSIGFSMTGYTSGSHGQSQITFGLDRLGSAMDNSYSHGQRGLRRSSHAPAQDDG

SEQ ID NO: 93116 - protein, 92 aa, Setaria italica
  Transcript Sequence Number=SeqID_27142
  Gene Ontology: Mol. function=hydrogen-translocating pyrophosphatase activity; Cellular component=membrane; Biological process=proton transport
  Homolog annotation: Hit_ID=Q7XAC0; Match level="QueryCoverage=100%, HitCoverage=11%, E-value=1e-45, Identity=98%"; Hit description=H+ -pyrophosphatase
LVSGVQIAISASNSGGAWDNAKKYIEAGASDHAKALGPKGSDAHKAAVIGDTIGDPLKDTSGPSLNILIKLMAVESLVFAPFFAAHGGLIFK

SEQ ID NO: 93117 - protein, 119 aa, Setaria italica
  Transcript Sequence Number=SeqID_27143
  Gene Ontology: Mol. function=metalloendopeptidase activity; Biological process=proteolysis
  Homolog annotation: Hit_ID=B9SMK4; Match level="QueryCoverage=95%, HitCoverage=14%, E-value=2e-46, Identity=75%"; Hit description =Oligopeptidase A, putative
EQPPLFDVDRRVAERTQVLAPLPEDRFLCSFSHIFAGGYAAGYYSYKWAEVLSADAFSAFEDAGLDNEKAIEETGRRFRDTVLALGGGKSPLEVFVSFRGREPSPEPLLRHNGLLPVAV

SEQ ID NO: 93118 - protein, 36 aa, Setaria italica
  Transcript Sequence Number=SeqID_27144
HQCNCIMNLNSSHTGQINGHPTPATGRQAVVFPIST

SEQ ID NO: 93119 - protein, 467 aa, Setaria italica
  Transcript Sequence Number=SeqID_27145
  Gene Ontology: Mol. function=metalloendopeptidase activity; Biological process=proteolysis
  Homolog annotation: Hit_ID=B9SMK4; Match level="QueryCoverage=99%, HitCoverage=59%, E-value=0.0, Identity=77%"; Hit description =Oligopeptidase A, putative
  Pfam annotation: Domain name=Peptidase_M3; Domain location=1-462; Score=589.6; E_value=3.3e-174; Accession=PF01432.12; Description =Peptidase family M3
VMQHARSRALREEVYRAYLTRASSGELDNTNIIAQILKLRQEKAKILGYKNYAEVSMAQKMATVERVEELLEKLRAASWDHAVKDMEDLKIFAKDSGSPEATDLTHWDLTFWSERLRESKYDINEEALRPYFALPKVMDGLFTLANKLFGVSVEPADGLAPVWHSDVKFYCVKDSSNSPVAYFYFDPYSRPSEKRGGAWMNVVFSRSRVLARNGLPARLPVAHMVCNQTPPVGDKPSLMTFREVETVFHEFGHALQHMLTKQDEGYVAGIRGVEWDAVELPSQFMENWCYHKDTLLSIAKHYETGETLPEEIYAKLVAAKNFRAGTFSLRQIRFASVDMELHTAYDPYGSESIYDVDRRVAERTQVLAPLPEDRFLCSFSHIFAGGYAAGYYSYKWAEVLSADAFSAFEDAGLDNEKAIEETGRRFRDTVLALGGGKSPLEVFVSFRGREPSPEPLLRHNGLLPVAV

SEQ ID NO: 93120 - protein, 402 aa, Setaria italica
  Transcript Sequence Number=SeqID_27146
  Gene Ontology: Mol. function=metalloendopeptidase activity; Biological process=proteolysis
  Homolog annotation: Hit_ID=A9YWR9; Match level="QueryCoverage=85%, HitCoverage=48%, E-value=1e-148, Identity=75%"; Hit description =Oligopeptidase A
  Subcellular localization annotation: CTP_CleavageSite=45; ConfidenceScore=5.73e-01
FTARLPLAASTRLPNPTTRLLLFAALPSSSPLRAFCPRARPAPATCAAFSSSTTMAATDNPLLVADFDFPPFDRVEPGHVRPGIRDLLTRLEAQLEELEKGVQPSWGKLVEPLERITDRLEVIWGMVDHLKAVKDSADLRAAVEEVQPDKVKFQLRLGQSKPIYEAFKAIRNSSDWESLSDARKRIVEAQIKEAVLSGVALEDEQREKFNQIEQELEKLSQKFSENVLDATKKFEKLITDKKEIDGLPATALGLAAQTAVSKGHENATAENGPWIITLDAPSYIAVMQHARSRALREEVYRAYLTRASSGELDNTNIIAQILKLRQEKAKILGYKNYAEVSMAQKMATVERVEELLEKLRAASWDHAVKDMEDLKIFAKDSGSPEATDLTHWDLTFWSERLR

SEQ ID NO: 93121 - protein, 73 aa, Setaria italica
  misc_feature (14)..(14): Xaa can be any naturally occurring amino acid
  Transcript Sequence Number=SeqID_27147
  Gene Ontology: Mol. function=hydrolase activity
  Homolog annotation: Hit_ID=B6TF86; Match level="QueryCoverage=65%, HitCoverage=25%, E-value=2e-18, Identity=91%"; Hit description =Hydroxyacylglutathione hydrolase 3
QIFTLPKDTLLYPXHDYKGFTVSTVEEEVAYNARLTKDKETFKTIMDSKPEPVLSKDDRCSCTRQFGLRHPEV

SEQ ID NO: 93122 - protein, 76 aa, Setaria italica
  Transcript Sequence Number=SeqID_27148
  Gene Ontology: Mol. function=hydrolase activity; Cellular component =mitochondrial matrix; Biological process=transcription
  Homolog annotation: Hit_ID=B6TF86; Match level="QueryCoverage=100%, HitCoverage=40%, E-value=5e-37, Identity=96%"; Hit description =Hydroxyacylglutathione hydrolase 3
QIFTLPKDTLLYPAHDYKGFTVSTVEEEVAYNARLTKDKETFKTIMDNLNLSYPKMIDVAVPANLVCGIQDPPPKI

SEQ ID NO: 93123 - protein, 89 aa, Setaria italica
  Transcript Sequence Number=SeqID_27149
  Subcellular localization annotation: CTP_CleavageSite=23; ConfidenceScore=5.16e-01
VKLGNRLKKVAAKMISGKCSEVRFKKRSASISTHVSSLMCPAELLVPHPEPAAQLMRTFMPPAATGAAARTHGIPNFQVIQRRGKGVGI

SEQ ID NO: 93124 - protein, 43 aa, Setaria italica
  Transcript Sequence Number=SeqID_27150
  Gene Ontology: Mol. function=oxidoreductase activity; Biological process=metabolic process
  Homolog annotation: Hit_ID=B6T753; Match level="QueryCoverage=100%, HitCoverage=12%, E-value=3e-16, Identity=90%"; Hit description =Dehydrogenase/reductase SDR family member 7
LVQYMPTIGYWLMDKIGAKRLDAAAKKGNTYSWNLIFGGKKSA

SEQ ID NO: 93125 - protein, 84 aa, Setaria italica
  Transcript Sequence Number=SeqID_27151
  Gene Ontology: Mol. function=oxidoreductase activity; Biological process=metabolic process
  Homolog annotation: Hit_ID=B6T753; Match level="QueryCoverage=95%, HitCoverage=24%, E-value=7e-34, Identity=85%"; Hit description =Dehydrogenase/reductase SDR family member 7
EFNTAGEESLKQVVHAAESLFSNAGIDYMIHNAAFERPKRGALEESEGGLKATFNVNVIGTINLTRLLAPYMLDRGMGHFVVVC

SEQ ID NO: 93126 - protein, 388 aa, Setaria italica
  Transcript Sequence Number=SeqID_27152
  Gene Ontology: Mol. function=oxidoreductase activity; Biological process=metabolic process
  Homolog annotation: Hit_ID=B6T753; Match level="QueryCoverage=78%, HitCoverage=93%, E-value=1e-158, Identity=89%"; Hit description =Dehydrogenase/reductase SDR family member 7
  Pfam annotation: Domain name=Epimerase; Domain location=107-336; Score=-52.2; E_value=0.0031; Accession=PF01370.13; Description=NAD dependent epimerasedehydratase family
  Pfam annotation: Domain name=KR; Domain location=106-295; Score= -39.4; E_value=0.00011; Accession=PF08659.2; Description=KR domain
  Pfam annotation: Domain name=NAD_binding_4; Domain location=109-347; Score=-99.7; E_value=0.018; Accession=PF07993.4; Description=Male sterility protein
  Pfam annotation: Domain name=adh_short; Domain location=105-278; Score=80.6; E_value=5.7e-21; Accession=PF00106.17; Description=short chain dehydrogenase
  Pfam module annotation: Pfam domain module=Epimerase::KR::NAD_binding_ 4::adh_short; Domain location=107-336::106-295::109-347::105-278
MQAAESLPMPALENSDSAACIDYMIHNAAFERPLRLLDPKFPRTSEEPKRIGQRHAGAKKMLLLFLLALLAGAAAFLLFKFATVVDGDLTLVSRGPPRRERVDGKVVWITGASRGIGEVLSMQFANLGAKLILSARNKDELERVKQNILSKNPDSRIEVLPMDLSAGEESLKQVVHAAESLFSNAGIDYMIHNAAFERPKRGALEESEGGLKATFNVNVIGTINLTRLLAPYMLDRGMGHFVVMSSAAGKVPAPGQAVYSASKHALNGYFTSLRSELCTKGIKVTVVCPGPIETPQSSAAASSVQRHSSEKRVSVERCAELTIVAATHGLKEAWISYQPVLTVMYLVQYMPTIGYWLMDKIGAKRLDAAAKKGNTYSWNLIFGGKKSA

SEQ ID NO: 93127 - protein, 71 aa, Setaria italica
  Transcript Sequence Number=SeqID_27153
  Homolog annotation: Hit_ID=B9SAF4; Match level="QueryCoverage=76%, HitCoverage=21%, E-value=4e-20, Identity=85%"; Hit description =Vacuolar sorting protein SNF8, putative
MRRRPGIAGLQNAAATRDQFRLVGENVAKVRTDVMKEQLATFRSQLEEFARKHKVICCVLQLLDANPGLIT

SEQ ID NO: 93128 - protein, 156 aa, Setaria italica
  Transcript Sequence Number=SeqID_27154
  Gene Ontology: Mol. function=catalytic activity; Cellular component =integral to membrane; Biological process=metabolic process
  Homolog annotation: Hit_ID=Q6RBX9; Match level="QueryCoverage=100%, HitCoverage=25%, E-value=4e-45, Identity=73%"; Hit description =Glossy1 protein
MGAAFLASWPWDNLGFYKYVLYGPLVGKAAASRAWEAASPDRWILLLLVLFGLRALTYQLWSSFSNMLFATRRRRIVRDGVDFEQIDKEWDWDNFLMLQVLMTATAFYAFPSLRHLPLWDARGFAVALLIHAAATEPLFYAAHRAFHASSRLYARH

SEQ ID NO: 93129 - protein, 85 aa, Setaria italica
  Transcript Sequence Number=SeqID_27155
  Subcellular localization annotation: CTP_CleavageSite=14; ConfidenceScore=5.09e-01
FLLFSVAACVWNPPVGHGMSVPARREKWARGFYPGFRFREAKELRSFLSLLLGRRLSERLAPKCTAGKLGGTIPCIWGMESCARF

SEQ ID NO: 93130 - protein, 201 aa, Setaria italica
  misc_feature (44)..(44): Xaa can be any naturally occurring amino acid
  Transcript Sequence Number=SeqID_27156
  Gene Ontology: Mol. function=transcription regulator activity; Cellular component=nucleus; Biological process=regulation of transcription
  Homolog annotation: Hit_ID=B9RYR7; Match level="QueryCoverage=62%, HitCoverage=15%, E-value=1e-17, Identity=38%"; Hit description=Bhlh transcription factor, putative
MAGALGALCRAGGWSYAAIWRSDRRDPRLLTIGECHCEDEARKXMEKMVNQVHVVGEGVIGRALISGEYQWICDDIPFSLSQISDADNLGLFQGYTWWQHQFLSGIKTIAVVPIPAFGVAQFGSMQKVSESLEFLDQVKGAAFLTESISWHPSARDVQKDVFTYNPQFQLNSSSITEGLVSIKAEARKRKAPGDTITVDSL

SEQ ID NO: 93131 - protein, 65 aa, Setaria italica
  Transcript Sequence Number=SeqID_27157
IFLCRSIWKMMLIHHMSSPLFVSSIYLMHFAFLLHLLRETYQSRFLVECVESICSVGTKIWDYSI

SEQ ID NO: 93132 - protein, 98 aa, Setaria italica
  misc_feature (82)..(82): Xaa can be any naturally occurring amino acid
  Transcript Sequence Number=SeqID_27158
  Homolog annotation: Hit_ID=B6U0W9; Match level="QueryCoverage=61%, HitCoverage=38%, E-value=1e-13, Identity=70%"; Hit description=Metal ion binding protein
TCKKCKTCVLGMLITMPGIKSLTYDDEKSTLTVVGEVDVVEIVAALRKAKHPAEVVSVTDEKKEKEAEEKKKKEEEEKKKKXEEEKKKKKCCCPLPCP

SEQ ID NO: 93133 - protein, 194 aa, Setaria italica
  Transcript Sequence Number=SeqID_27159
  Gene Ontology: Mol. function=catalytic activity; Biological process =biosynthetic process
  Homolog annotation: Hit_ID=B6U0C2; Match level="QueryCoverage=100%, HitCoverage=66%, E-value=9e-79, Identity=73%"; Hit description =Phenazine biosynthesis protein
  Pfam annotation: Domain name=PhzC-PhzF; Domain location=11-193; Score= 74.3; E_value=4.4e-19; Accession=PF02567.8; Description=Phenazine biosynthesis-like protein
MAKRPIQYVVVDAFTAEPFKGNPASVCVLDDAEQAADARWMQSVAAEFNLAETAFLLRDSSAAAAPRFQLRWFTPAAEVELCGHATLASAHFLFTSVLAEHETLIEFATKSGILTAEKVPAPASAAASGEGKLFIELDFPMIDLVDCHPAELPSIPETLNGVPVVSVHKSATVSDFIVELSSGKEVADIIPNIH

SEQ ID NO: 93134 - protein, 83 aa, Setaria italica
  misc_feature (34)..(34): Xaa can be any naturally occurring amino acid
  Transcript Sequence Number=SeqID_27160
  Gene Ontology: Mol. function=nucleic acid binding
  Subcellular localization annotation: CTP_CleavageSite=38; ConfidenceScore=5.09e-01
MAASYFNHSSSYPPPPPPPGTSPYGAYRHAYPRXPVPPTAYGSYYDRAEQVLPQRDELRTLFIAGLPADAKPREVYNLFRDFP

SEQ ID NO: 93135 - protein, 68 aa, Setaria italica
  Transcript Sequence Number=SeqID_27161
  Gene Ontology: Mol. function=3-beta-hydroxy-delta5-steroid dehydrogenase activity; Cellular component=integral to membrane; Biological process=steroid biosynthetic process
  Homolog annotation: Hit_ID=B9R8T2; Match level="QueryCoverage=100%, HitCoverage=14%, E-value=2e-25, Identity=77%"; Hit description =Hydroxysteroid dehydrogenase, putative
NVLDACHEHGVRRLVYVSTYNVVFGGKPIVNGNEALPYFPIEDHVDAYGRSKSVAEQLVLKSNGRPAK

SEQ ID NO: 93136 - protein, 479 aa, Setaria italica
  Transcript Sequence Number=SeqID_27162
  Gene Ontology: Mol. function=3-beta-hydroxy-delta5-steroid dehydrogenase activity; Cellular component=integral to membrane; Biological process=steroid biosynthetic process
  Homolog annotation: Hit_ID=B9R8T2; Match level="QueryCoverage=99%, HitCoverage=99%, E-value=0.0, Identity=69%"; Hit description =Hydroxysteroid dehydrogenase, putative
  Pfam annotation: Domain name=3Beta_HSD; Domain location=15-301; Score= 409.4; E_value=5.7e-120; Accession=PF01073.11; Description=3-beta hydroxysteroid dehydrogenaseisomerase family
  Pfam annotation: Domain name=Epimerase; Domain location=14-261; Score= 101.3; E_value=3.3e-27; Accession=PF01370.13; Description=NAD dependent epimerasedehydratase family
  Pfam annotation: Domain name=KR; Domain location=16-174; Score=-86.1; E_value=0.043; Accession=PF08659.2; Description=KR domain
  Pfam annotation: Domain name=NAD_binding_4; Domain location=16-239; Score=9.7; E_value=5.8e-10; Accession=PF07993.4; Description=Male sterility protein
  Pfam annotation: Domain name=Polysacc_synt_2; Domain location=16-258; Score=-155.2; E_value=0.00045; Accession=PF02719.7; Description =Polysaccharide biosynthesis protein
  Pfam annotation: Domain name=RmlD_sub_bind; Domain location=12-265; Score=-169.2; E_value=0.008; Accession=PF04321.9; Description=RmlD substrate binding domain
  Pfam annotation: Domain name=adh_short; Domain location=16-146; Score= -38.2; E_value=0.0045; Accession=PF00106.17; Description=short chain dehydrogenase
  Pfam module annotation: Pfam domain module=3Beta_HSD::Epimerase::KR::N AD_binding_4::Polysacc_synt_2::RmlD_sub_bind::adh_short; Domain location=15-301::14-261::16-174::16-239::16-258::12-265::16-146
MHLSANEGIEGVRFAVTGGQGFVGAALCLELLRRGAREVRSLDLRAASPWSRQLLDAGVRTFQGDIRKKDDVGRAFRGVDCVFHLASYGMSGKEMVQAGRADEVNINGTCNVLDACHEHGVRRLVYVSTYNVVFGGKPIVNGNEALPYFPIEDHVDAYGRSKSVAEQLVLKSNGRPAKGDKSTRLYTCAIRPAAIYGPGEERHLPRIMSMAKLGLAFFKIGGPDVKTDWVYIDNLVLALILASMGLLDDIPDRKGIPVAAGQAYFICDGSPCNTFEFIISPLFRSLGYAVPRVTLDTSVALSISKIFLFISTMFYPWLDSKWIPQPLILPAEVYKVGVTHYFSFLKAREELGYVPMVSPREGLAATISYWQERKRRELDGPTIFTWLAVTIGMLAIFSAACLAPIGPLKWVLDIHLFVFRSMLVIRLVFATAVVLHFGEGVYAWFLAKRVDPRNATGWFWQTFALGIFSLRYLLKRARG

SEQ ID NO: 93137 - protein, 133 aa, Setaria italica
  Transcript Sequence Number=SeqID_27163
  Gene Ontology: Mol. function=transferase activity, transferring glycosyl groups; Biological process=metabolic process
  Homolog annotation: Hit_ID=Q852C2; Match level="QueryCoverage=81%, HitCoverage=23%, E-value=2e-28, Identity=59%"; Hit description =Putative UDP-glucosyltransferase
MATAAAGGRRRRVLFFPLPYQGHINPMFQLAGLLHARGFAVTIFHTHFNAPDASAHRDYDFVPVPDGMPEGGHPLQDIAKRILDMNRACEAPFRERLAALLERREGDDVACLVADAHLLAMGGRGGGASGVAP

SEQ ID NO: 93138 - protein, 70 aa, Setaria italica
  Transcript Sequence Number=SeqID_27164
  Gene Ontology: Mol. function=electron carrier activity; Cellular component=extracellular region; Biological process=response to oxidative stress
  Homolog annotation: Hit_ID=Q43774; Match level="QueryCoverage=97%, HitCoverage=21%, E-value=1e-12, Identity=56%"; Hit description =Peroxidase
YYGNLTKDGLLHSDQVLTSRDDVKAFVEEYKSNQDTFFRDFASAMKRMSELGVLTGTNGQIRTDCSRVLN

SEQ ID NO: 93139 - protein, 69 aa, Setaria italica
  Transcript Sequence Number=SeqID_27165
  Gene Ontology: Mol. function=structural molecule activity; Cellular component=viral capsid; Biological process=oxidation reduction
  Homolog annotation: Hit_ID=A5X8Y8; Match level="QueryCoverage=100%, HitCoverage=11%, E-value=2e-24, Identity=72%"; Hit description=Low -phosphate root 1
  Subcellular localization annotation: CTP_CleavageSite=42; ConfidenceScore=5.08e-01
GDNPGVHPQWQPEYFGDAVTVNGKAWPFLPVARRRYRFRIINASNARFFNLSLSNGLPFHVIGSDASYL

SEQ ID NO: 93140 - protein, 93 aa, Setaria italica
  Transcript Sequence Number=SeqID_27166
  Homolog annotation: Hit_ID=Q8H0B8; Match level="QueryCoverage=96%, HitCoverage=52%, E-value=4e-33, Identity=77%"; Hit description=Cold regulated protein
  Pfam annotation: Domain name=PBP; Domain location=15-91; Score=-42.0; E_value=0.072; Accession=PF01161.12; Description=Phosphatidylethanolam ine-binding protein
MAQESLRLVSHPIAAHDGRLPRQYTLEGQGAKKDMSPPLEWYGVPDGTRSLALVVEDIDAPDPEGPIVPWTHWVVANIPPTTKGLPEGFSGKE

SEQ ID NO: 93141 - protein, 94 aa, Setaria italica
  Transcript Sequence Number=SeqID_27167
  Subcellular localization annotation: CTP_CleavageSite=54; ConfidenceScore=5.49e-01
SASCHDGGGGKRTITRRSSRLMRRLESQLTRALPGERPRRDASASSSSSASSVSSSRRGGPRARAHHCRPLLGGTPFVVCDECKEILQLPAALP

SEQ ID NO: 93142 - protein, 55 aa, Setaria italica
  Transcript Sequence Number=SeqID_27168
TALEPLYCPSIVTCCLPTYFFHQPVDHKSTIVTTNQESSAALPQGDAAVWTPFLI

SEQ ID NO: 93143 - protein, 87 aa, Setaria italica
  Transcript Sequence Number=SeqID_27169
  Gene Ontology: Mol. function=hydrolase activity, acting on glycosyl bonds; Cellular component=chloroplast; Biological process =polysaccharide catabolic process
  Homolog annotation: Hit_ID=Q6Z5B2; Match level="QueryCoverage=83%, HitCoverage=14%, E-value=6e-35, Identity=90%"; Hit description=Beta -amylase
HAPIYLLQISGIHWWYRVPNHAAELTAGYYNLDDRDGYRTIAHMLTRHYACMNFTCAEMRDNEQSSEAKSAPEELVQQVPRPLIVAS

SEQ ID NO: 93144 - protein, 233 aa, Setaria italica
  misc_feature (168)..(168): Xaa can be any naturally occurring amino acid
  Transcript Sequence Number=SeqID_27170
  Gene Ontology: Mol. function=hydrolase activity, acting on glycosyl bonds; Cellular component=chloroplast; Biological process =polysaccharide catabolic process
  Homolog annotation: Hit_ID=P55005; Match level="QueryCoverage=100%, HitCoverage=47%, E-value=1e-117, Identity=84%"; Hit description=Beta- amylase
  Pfam annotation: Domain name=Glyco_hydro_14; Domain location=2-233; Score=33.0; E_value=4.3e-18; Accession=PF01373.9; Description =Glycosyl hydrolase family 14
TEAGVDGVMIDVWWGLVERKAPGVYDWSAYKQVFKLVQEAGLKLQAIMSCHQCGGNVGDVVNIPIPQWVRDIGEANPDIFYTNRRGTRNIEYLTLGVDDQPIFQGRTAIQLYADYMKSFRENMAEFLDDGVIVDIEVGLGPAGEMRYPSYPQSQGWVFPGIGEFIVRXSPLEADFKAAAAEAGHPEWELPDDAGEYNDTPENTQFFAENGTYQTEKGKFFLTWYSNKLIKHGE

SEQ ID NO: 93145 - protein, 471 aa, Setaria italica
  Transcript Sequence Number=SeqID_27171
  Gene Ontology: Mol. function=hydrolase activity, acting on glycosyl bonds; Cellular component=chloroplast; Biological process =polysaccharide catabolic process
  Homolog annotation: Hit_ID=P55005; Match level="QueryCoverage=100%, HitCoverage=96%, E-value=0.0, Identity=89%"; Hit description=Beta -amylase
  Pfam annotation: Domain name=Glyco_hydro_14; Domain location=1-418; Score=435.0; E_value=1.1e-127; Accession=PF01373.9; Description =Glycosyl hydrolase family 14
LDIITVDNTFEKADETRAQLKKLTEAGVDGVMIDVWWGLVERKAPGVYDWSAYKQVFKLVQEAGLKLQAIMSCHQCGGNVGDVVNIPIPQWVRDIGEANPDIFYTNRRGTRNIEYLTLGVDDQPIFQGRTAIQLYADYMKSFRENMAEFLDDGVIVDIEVGLGPAGEMRYPSYPQSQGWVFPGIGEFICYDKYLEADFKAAAAEAGHPEWELPDDAGEYNDTPENTQFFAENGTYQTEKGKFFLTWYSNKLIKHGDNILDEANKVFLGCTVQLAIKISGIHWWYRVPNHAAELTAGYYNLDDRDGYRTIAHMLTRHYACMNFTCAEMRDNEQSSEAKSAPEELVQQVLSAGWREGRNVACENALGRYDATAYNTILRNARPQGINKNGPPEHKLYGFTYLRVSDELLQGQNYTTFKTFVRRMHANLDYNPQVDPVPPLKRSKPEIPIEEILEVAQPRLEPFPFNKNTDLPV

SEQ ID NO: 93146 - protein, 128 aa, Setaria italica
  misc_feature (19)..(19): Xaa can be any naturally occurring amino acid
  Transcript Sequence Number=SeqID_27172
  Gene Ontology: Mol. function=binding; Cellular component=small nucleolar ribonucleoprotein complex; Biological process=negative regulation of cell proliferation
  Homolog annotation: Hit_ID=UPI0001A7B11C; Match level="QueryCoverage =98%, HitCoverage=4%, E-value=7e-41, Identity=61%"; Hit description =binding
DVYRSLHAVKAEPSSGSSXFLDALMEWRELNTAEDFISFYEEMIPLVQTLPQIVLHREKLFSALLLRVNMSARLSLEPILMLITALSRDILEDFLPFLGRHANGILALLNDGGDRDPEVLEQVFTSWS

SEQ ID NO: 93147 - protein, 67 aa, Setaria italica
  Transcript Sequence Number=SeqID_27173
ICCFYIITRTIFFSRLCSWILLILMMVSYEKMPRYYVDLSYWLPSSYCSCLRPGSFNKLDCFLHGND

SEQ ID NO: 93148 - protein, 58 aa, Setaria italica
  Transcript Sequence Number=SeqID_27174
  Subcellular localization annotation: CTP_CleavageSite=23; ConfidenceScore=5.61e-01
PCPAASTPWPRPPPASLPCSPTSSTMRAESASLLPRGGRPATAPSARPELSARTLAAA

SEQ ID NO: 93149 - protein, 70 aa, Setaria italica
  Transcript Sequence Number=SeqID_27175
FIVLSSFEVFGLQQGLHYSCAAYLLVFIYSIKPAIELLYSIKPVIEKKTDVRDRQCVVTYGFIIHQILRL

SEQ ID NO: 93150 - protein, 33 aa, Setaria italica
  Transcript Sequence Number=SeqID_27176
EAKSNMLSCMLVRTAYVCICNLLNTKASRCTKP

SEQ ID NO: 93151 - protein, 131 aa, Setaria italica
  Transcript Sequence Number=SeqID_27177
NPPVLDLGLALRLRVLNPGFLLPLRYRAVSAAVSYRGHLLGSAKAWPGSGELAARDEVYADAEVWVDAGRVLDDVVDLIGDLATGSVPLEIVTEVVGSIRLFRFHIPVKGLISCSVNISPETQGIISQDCY

SEQ ID NO: 93152 - protein, 86 aa, Setaria italica
  Transcript Sequence Number=SeqID_27178
  Subcellular localization annotation: CTP_CleavageSite=29; ConfidenceScore=5.09e-01
KQGGGHGSAHEVRRSQPPHRHTYRSRSCVVAAGSTTAAAPARQLHCASLPCADLRQQNQRWPAALLLPPLGVKVPLPLYLSVSLSL

SEQ ID NO: 93153 - protein, 84 aa, Setaria italica
  Transcript Sequence Number=SeqID_27179
  Subcellular localization annotation: CTP_CleavageSite=30; ConfidenceScore=5.37e-01
RRRSPRPACRQPATQIRRAILAPLPTSLPLSSSSSSILSAGFAPAGFRLTAPSAGYGPQDAIFAPECLQSRKPWGCCEAPRICR

SEQ ID NO: 93154 - protein, 89 aa, Setaria italica
  Transcript Sequence Number=SeqID_27180
  Gene Ontology: Mol. function=protein binding
  Homolog annotation: Hit_ID=B6UGM8; Match level="QueryCoverage=82%, HitCoverage=31%, E-value=1e-36, Identity=98%"; Hit description =Growth-regulating factor
  Pfam annotation: Domain name=WRC; Domain location=30-75; Score=99.7; E_value=9.9e-27; Accession=PF08879.2; Description=WRC
SVAASSFGPQRFPSLVGLGSLCFDYRSSMEPEPGRCRRTDGKKWRCSRDVVPGHKYCERHVHRGRGRSRKPVEAASAAAPPPTAAAAAV

SEQ ID NO: 93155 - protein, 450 aa, Setaria italica
  Transcript Sequence Number=SeqID_27181
  Gene Ontology: Mol. function=serine-type endopeptidase activity; Cellular component=nucleus; Biological process=proteolysis
  Homolog annotation: Hit_ID=Q9FL12; Match level="QueryCoverage=99%, HitCoverage=75%, E-value=0.0, Identity=86%"; Hit description =Protease Do-like 9
  Pfam annotation: Domain name=Trypsin; Domain location=3-180; Score =61.0; E_value=4.6e-15; Accession=PF00089.18; Description=Trypsin
NFSLPWQRKRQYSSSSSGFIIGGRRVLTNAHSVEHYTQVKLKKRGSDTKYLATVLAIGTECDIALLTVSDDEFWEGVSPVEFGTLPALQDAVTVVGYPIGGDTISVTSGVVSRIEILSYVHGSTELLGLQIDAAINSGNSGGPAFNDRGKCVGIAFQSLKHEDAENIGYVIPTPVITHFIQDYEKSGEYTGFPILGIEWQKMENPDLRKSMGMKPDQKGVRVRRVEPTAPESGCLQPSDIILSFDGVDIANDGTVPFRHGERIGFSYLVSQKYTGEKALVKVLRNSKVHEFKIRLATHKRLVAAHVKGRPPSYYIVAGFVFAAVSVPYLRSEYGKDYEYDAPVKLLVKHLHAMAESPDEQLVVVSQVLVADINIGYEEIVNTQVLAFNGQPVKNLKNLVTMVENCKDEFLKFDLEYDQIVVLETKTAKAATQDILTTHCIPSAMSDDLKA

SEQ ID NO: 93156 - protein, 119 aa, Setaria italica
  Transcript Sequence Number=SeqID_27182
  Gene Ontology: Mol. function=aspartic-type endopeptidase activity; Biological process=DNA integration
  Homolog annotation: Hit_ID=Q710T7; Match level="QueryCoverage=82%, HitCoverage=7%, E-value=4e-10, Identity=36%"; Hit description=Gag -pol polyprotein
MAAPFPVSPATSAEPNPCNASEGGGDSSSENAGRSTWFIATAACHHMTNNRSLIPDLSPVSNKVVHSGNGLPMQVCGRGSVETAKVVLPDVWYVPELTENLVSVGQLTELNLSIVVWGR

SEQ ID NO: 93157 - protein, 588 aa, Setaria italica
  Transcript Sequence Number=SeqID_27183
  Gene Ontology: Mol. function=protein serine/threonine kinase activity; Cellular component=plasma membrane; Biological process =protein amino acid phosphorylation
  Homolog annotation: Hit_ID=B9SNG9; Match level="QueryCoverage=95%, HitCoverage=60%, E-value=1e-134, Identity=47%"; Hit description =Receptor protein kinase, putative
  Pfam annotation: Domain name=APH; Domain location=260-438; Score= -7.6; E_value=0.0065; Accession=PF01636.15; Description =Phosphotransferase enzyme family
  Pfam annotation: Domain name=LRR_1; Domain location=68-90; Score =21.0; E_value=0.0048; Accession=PF00560.25; Description=Leucine Rich Repeat
  Pfam annotation: Domain name=LRR_1; Domain location=92-113; Score =12.9; E_value=1; Accession=PF00560.25; Description=Leucine Rich Repeat
  Pfam annotation: Domain name=Pkinase; Domain location=257-532; Score =169.8; E_value=7.7e-48; Accession=PF00069.17; Description=Protein kinase domain
  Pfam annotation: Domain name=Pkinase_Tyr; Domain location=257-532; Score=126.4; E_value=8.9e-35; Accession=PF07714.9; Description =Protein tyrosine kinase
  Pfam annotation: Domain name=SKG6; Domain location=145-182; Score =15.7; E_value=0.012; Accession=PF08693.2; Description=Transmembrane alpha-helix domain
  Pfam module annotation: Pfam domain module=APH::LRR_1::LRR _1::Pkinase::Pkinase_Tyr::SKG6; Domain location=260-438::68-90::92 -113::257-532::257-532::145-182
VEPILLDVASGFGYPPQLSVWAGNSPCGGSGNGQWLGVICKNNDVIQINLPRKNLSGMISPAFANLTRLQKLDLSNNQLTGKIPDSLTTLATLNYLDVSNNRLTGQVPEFNQPDIKLMTAGNRWGESDGDSGGGGGSDGGSSPSNPGSRNSKSNAGMIIGILLAVILLVVCVGLFLHHRRKKNVDKFSPVSTKSPSGESEMMKIQVVGTNGNSNVSGSIPTEFFSHVSADSTNIADIFESHGMQLPMSVLLKATNNFDEDYILGRGGFGVVFKGTLNGNLVAVKRCDSGTMGTKGLQEFMAEIDVLRKVRHRHLVALLGYCTHGNERLLVYEYMSGGTLREHLCDLQQSGYTPLTWTQRMTIALDVARGIEYLHGLAQETFIHRDLKPSNILLDQDLRAKVSDFGLVKLAKDTDKSMMTRVAGTFGYLAPEYATTGKVTTKVDVYAYGVILMEMITGRKVLDDSLPEDETHLVTIFRRNMLDKDKFRKFVDPTLELSAESWSSLLEVADLARHCTAREPYQRPDMCHCVNRLSSLVDQWKPTNIVDEEEDEGTSEMGLHQQLERWRRDDFTISDSDSFSRYNMSRKYH

SEQ ID NO: 93158 - protein, 157 aa, Setaria italica
  Transcript Sequence Number=SeqID_27184
  Gene Ontology: Mol. function=oxidoreductase activity, acting on NADH or NADPH; Cellular component=mitochondrial inner membrane; Biological process=electron transport chain
  Homolog annotation: Hit_ID=B9SH11; Match level="QueryCoverage=98%, HitCoverage=98%, E-value=1e-58, Identity=72%"; Hit description=NADH -ubiquinone oxidoreductase 18 kDa subunit, mitochondrial, putative
  Pfam annotation: Domain name=ETC_C1_NDUFA4; Domain location=54-156; Score=191.5; E_value=2.3e-54; Accession=PF04800.4; Description=ETC complex I subunit conserved region
MAAPLRRSLPSLGRALLTPAPVRMLSAEASDALVEIKPGEIGMVSGIPEEHLRRKVVIYSPARTASQQGSGKVGRWKINFLSTQKWENPLMGWTSTGDPYANVGEAGLTFDSAESAKAFAEKHGWNYVVRKRHTPLLKPKAYAENFKWRGPPKPEQA

SEQ ID NO: 93159 - protein, 138 aa, Setaria italica
  Transcript Sequence Number=SeqID_27185
  Gene Ontology: Cellular component=exocyst; Biological process =exocytosis
  Homolog annotation: Hit_ID=B9RNN3; Match level="QueryCoverage=100%, HitCoverage=20%, E-value=6e-50, Identity=61%"; Hit description =Protein binding protein, putative
VEYCNRLLGDQYRPVLGQVITIHRSWRKEVFNDRMLVDAVVNIVKALEANFDVWSKAYDNAMLSYLFMMNTHWHIFRHLKATKLGEILGDVWLREHEQYKEYYLSMFIRESWGALAPLLNREGLILFSKGRATARDLV

SEQ ID NO: 93160 - protein, 176 aa, Setaria italica
  Transcript Sequence Number=SeqID_27186
  Gene Ontology: Mol. function=RNA-directed DNA polymerase activity; Cellular component=exocyst; Biological process=exocytosis
  Homolog annotation: Hit_ID=B9RNN3; Match level="QueryCoverage=98%, HitCoverage=25%, E-value=1e-61, Identity=60%"; Hit description =Protein binding protein, putative
  Pfam annotation: Domain name=Exo70; Domain location=1-141; Score= -121.7; E_value=0.1; Accession=PF03081.7; Description=Exo70 exocyst complex subunit
VYLKATKLGEILGDVWLREHEQYKEYYLSMFIRESWGALAPLLNREGLILFSKGRATARDLVKQRLKTFNSSFDEMHCRQSSWVIPDKDLREKTCNLVVQTIVPTYRSYLQNYGPLVEQEGNTGRYVRFTVDGMEKMLGALYMPRPRRSASIQIKHSSDKITSAMTGLHRSASAVK

SEQ ID NO: 93161 - protein, 88 aa, Setaria italica
  Transcript Sequence Number=SeqID_27187
  Subcellular localization annotation: CTP_CleavageSite=53; ConfidenceScore=5.09e-01
MEKPSREGASPGPSWAPSESTAFRVYAAAVGERAEASSSAPGIGVSARSSNLRAVRKRPFVARLTTDIVQTFEKCNPEFKYSESLNPK

SEQ ID NO: 93162 - protein, 69 aa, Setaria italica
  Transcript Sequence Number=SeqID_27188
DREEKHKKEQALESQTDQWIGVHALVVISFLDWVKQIWSVLSCHIGKLYYIEEHNYTNSNLGVLYFVIV

SEQ ID NO: 93163 - protein, 469 aa, Setaria italica
  Transcript Sequence Number=SeqID_27189
  Gene Ontology: Mol. function=protein kinase activity; Cellular component=integral to membrane; Biological process=protein amino acid phosphorylation
  Homolog annotation: Hit_ID=Q5GAP9; Match level="QueryCoverage=100%, HitCoverage=67%, E-value=0.0, Identity=77%"; Hit description=Leucine- rich repeat transmembrane protein kinase 1-like protein
  Pfam annotation: Domain name=Pkinase; Domain location=183-454; Score =79.9; E_value=9.4e-21; Accession=PF00069.17; Description=Protein kinase domain
  Pfam annotation: Domain name=Pkinase_Tyr; Domain location=183-454; Score=66.0; E_value=4.1e-18; Accession=PF07714.9; Description =Protein tyrosine kinase
  Pfam module annotation: Pfam domain module=Pkinase::Pkinase_Tyr; Domain location=183-454::183-454
  Subcellular localization annotation: CTP_CleavageSite=45; ConfidenceScore=5.35e-01
NNLQTSGNSFNDGPAPPPPPSPPSSYTPPPSWRPPVPSTDGNNIPAEDGGKGKHSKLGGGAVAGIVICLLVVGALVAFLLIKRKSWRLSRGQDPEQNEPLSPLASGLKQMKSIKSIKIISTIGKEELQKTVSMSLKPPTKIDLHKSFDETDTTSKSITRKVSLSSVTIPAYTVADLQVATGSFSPDSLIGEGSFGRVYRAKFSDQKVLAVKKIIFSAFSSHPSDLFTELVANISRLNHPHLAELAGYCSEHGQCLLAYEFYRNGSLHDFLHMKDEHSKPLSWNSRVKIALGSARALEYLHETCSPSMIHKNFKSSNILLDSELNPHVSDSGFADLTPNHEFQESDENSGYRAPEVTMSGQYSLKSDVYSFGVVMLELLTGRKPFDRTRPRPEQSLVRWATPQLHDIDALDQMVDPALQGLYPSKSLSRFADAIALCVQPEPEFRPPMSEVVQSLVRLVQRANMTRTHES

SEQ ID NO: 93164 - protein, 75 aa, Setaria italica
  misc_feature (23)..(23): Xaa can be any naturally occurring amino acid
  Transcript Sequence Number=SeqID_27190
DSSVSSSTKFVDLSSSRQDIFLXPLRGHDNSTKFEYGTHSCMLGMLRDQVWLLHLEVCMMEREYSRLANCTIFPT

SEQ ID NO: 93165 - protein, 216 aa, Setaria italica
  misc_feature (84)..(84): Xaa can be any naturally occurring amino acid
  Transcript Sequence Number=SeqID_27191
SQLGVFLASVCNILLVVSEGMNDLSMWDLMLTVDLLKHNIPDPSLLTSAASQDKENKNDDQSGSEDYISDLCFVHARLREQDFXSPSKLTLLRKALEKHFNSSSFRIGSSSATGQVSDSSVSSSTKFVDLSSSRQDIFLLPLRGHDNSTKFEYGTHSCMLGMLRDQILSWPARSFSKNLSERDWLRSSAKIWDMVKKSPVIADYCKALQSSGLFRK

SEQ ID NO: 93166 - protein, 209 aa, Setaria italica
  misc_feature (186)..(186): Xaa can be any naturally occurring amino acid
  Transcript Sequence Number=SeqID_27192
  Gene Ontology: Mol. function=O-methyltransferase activity; Biological process=lignin biosynthetic process
  Homolog annotation: Hit_ID=B6TGD3; Match level="QueryCoverage=91%, HitCoverage=76%, E-value=1e-91, Identity=90%"; Hit description =Caffeoyl-CoA O-methyltransferase 1
  Pfam annotation: Domain name=Methyltransf_3; Domain location=35-208; Score=272.3; E_value=1.1e-78; Accession=PF01596.9; Description=O -methyltransferase
MPATGAGEGGKAAAGSASLHSKTLLKSEPLYQYILESTVFPREPDFLRELRVATASHPMAVMAASPDEVQLFGLLLEMLGARNAIEVGVFTGYSLLATALALPDDGKIVAIDVTRESYDRVGSPVIEKAGVAHKIDFRVGLALPVLDQMVAEEGNKGAFDFAFVDADKVNFLNYHERLLQLVRVGXLIAYDNTLWGGSVAATPDEPLAA

SEQ ID NO: 93167 - protein, 77 aa, Setaria italica
  Transcript Sequence Number=SeqID_27193
RMQERGEDYTQSTEKIGKANRPKRIAAKGINPRMQMQRMARQRDLAAGTQARRSVGDVDERDHGVRDDILVCRPLQL

SEQ ID NO: 93168 - protein, 157 aa, Setaria italica
  Transcript Sequence Number=SeqID_27194
  Gene Ontology: Mol. function=binding
  Homolog annotation: Hit_ID=B9S6P3; Match level="QueryCoverage=100%, HitCoverage=4%, E-value=5e-59, Identity=72%"; Hit description =Inositol or phosphatidylinositol kinase, putative
LLGKLGGRNRRFLREPLALECKENPEHGLRLVLTFEPATPFLVPLDRCIHQAVGAVMQGSGMEAFYRKQALQFIRVCLDSLLNLRENVPGEGVSPGVLGTLLISSLDPSRRRNDASDMKGDLGVKTKTQLLAEKSVFKTLLVAVIAANADTCLHDEK

SEQ ID NO: 93169 - protein, 103 aa, Setaria italica
  misc_feature (13)..(13): Xaa can be any naturally occurring amino acid
  misc_feature (32)..(32): Xaa can be any naturally occurring amino acid
  Transcript Sequence Number=SeqID_27195
  Gene Ontology: Mol. function=acid phosphatase activity; Cellular component=plasma membrane
  Homolog annotation: Hit_ID=A1YKE7; Match level="QueryCoverage=100%, HitCoverage=41%, E-value=7e-42, Identity=78%"; Hit description=Acid phosphatase
  Pfam annotation: Domain name=Acid_phosphat_B; Domain location=1-103; Score=38.3; E_value=5.6e-10; Accession=PF03767.6; Description=HAD superfamily, subfamily IIIB (Acid
KLYKEVRELGFKXLLLTGRSEGHQAVTVDNLXEQGFHDWDKLILRAAADRKKTATTYKSEKRKEMEAEGYRILGNSGDQWSDLLGSSMSARSFKLPNPMYYIP

SEQ ID NO: 93170 - protein, 50 aa, Setaria italica
  Transcript Sequence Number=SeqID_27196
VLSPDWLAARNLAWTLLLFCSSSCQDSKLQPQPLDSLKLRTEPNELPRMD

SEQ ID NO: 93171 - protein, 137 aa, Setaria italica
  Transcript Sequence Number=SeqID_27197
  Homolog annotation: Hit_ID=B6U4F6; Match level="QueryCoverage=75%, HitCoverage=15%, E-value=2e-15, Identity=48%"; Hit description =Mitotic checkpoint protein
MLTKQETINDDDTSLKDMLSGLHGMDKIFIALDRTMDELSSRQKGERVLDERLSIERSKVQSLEQVIDQLRSQVALLQSKLHHGDNSSSSTKVPYAIDSLVVDTEAKPNLNETEDLLWAVEELKGQNWWCKETACFH

SEQ ID NO: 93172 - protein, 267 aa, Setaria italica
  Transcript Sequence Number=SeqID_27198
  Gene Ontology: Mol. function=iron-sulfur cluster binding; Cellular component=mitochondrion; Biological process=lipoate biosynthetic process
  Homolog annotation: Hit_ID=B6TN12; Match level="QueryCoverage=97%, HitCoverage=71%, E-value=1e-123, Identity=86%"; Hit description =Lipoic acid synthetase
  Pfam annotation: Domain name=Radical_SAM; Domain location=22-187; Score=89.7; E_value=1e-23; Accession=PF04055.13; Description=Radical SAM superfamily
ECWNGGGGAGGEGDGIATATIMLLGDTCTRGCRFCAVKTSNKPPPPDALEPLKTAMAVASWGVDYVVLTSVDRDDLPDGGSGHFAQTVSALKELKPGILVECLTSDFRGDMEAVSSLANSGLDVYAHNIETVKSLQRIVRDPRAGYDQSLAVLKHAKTSKVGMVTKSSIMLGLGETDEEVKQTMADLRAVDVDILTLGQYLQPTERHLTVREYVTPEKFDFWKEYGETLGFLYVASGPLVRSSYRAGELFVQNLVRRKKEKLASIAA

SEQ ID NO: 93173 - protein, 154 aa, Setaria italica
  misc_feature (128)..(128): Xaa can be any naturally occurring amino acid
  Transcript Sequence Number=SeqID_27199
  Gene Ontology: Mol. function=protein serine/threonine kinase activity; Biological process=protein amino acid phosphorylation
  Homolog annotation: Hit_ID=B9RAX9; Match level="QueryCoverage=94%, HitCoverage=12%, E-value=2e-46, Identity=61%"; Hit description =Receptor protein kinase, putative
  Pfam annotation: Domain name=Pkinase_Tyr; Domain location=33-154; Score=-165.4; E_value=0.0099; Accession=PF07714.9; Description =Protein tyrosine kinase
PGEDKDGGEMSPPWNVTLYQKLEIGVADVARSLTPANVIGQGWSGAVYRASLPSSGVTVAVKRFRSCDEASAEAFACEVGVLPRVRHRNIVRLLGWAANRRTRLLFYDYLPNGTLGGLLHGGSAGGTXVVEWEVRLAIAVGVAEGLAYLHHDCV

SEQ ID NO: 93174 - protein, 139 aa, Setaria italica
  Transcript Sequence Number=SeqID_27200
  Gene Ontology: Cellular component=vacuole
  Homolog annotation: Hit_ID=Q9ZV89; Match level="QueryCoverage=94%, HitCoverage=38%, E-value=9e-29, Identity=45%"; Hit description =F9K20.25
  Pfam annotation: Domain name=DUF231; Domain location=21-139; Score =101.9; E_value=2.2e-27; Accession=PF03005.7; Description=Arabidopsis proteins of unknown function
PAMLQRTLGADVLVFNTGHWWTHTGKLRAWDHLERNGKMVEMEGEEAFNIALRAWAKWVDHSIDPSRTRVFFRSVSPEHKSVNWCYNQTFPISAGTVAPGFPKSLVTIVERNIKSMRTPVTYLNITHLSELRIDAHPSV

SEQ ID NO: 93175 - protein, 86 aa, Setaria italica
  Transcript Sequence Number=SeqID_27201
  Gene Ontology: Mol. function=protein serine/threonine kinase activity
  Homolog annotation: Hit_ID=Q2QMQ1; Match level="QueryCoverage=97%, HitCoverage=13%, E-value=2e-16, Identity=58%"; Hit description =Protein kinase domain containing protein, expressed
AFHKDVRPAMCEVAAELHRIRDAAPDSDSDSGSGLRPMMDVQIDLSLDGAETVGKKVAVSPVSVQEVWVSDQSSPSTNGSMPRFVA

SEQ ID NO: 93176 - protein, 78 aa, Setaria italica
  Transcript Sequence Number=SeqID_27202
  Homolog annotation: Hit_ID=B6SJR4; Match level="QueryCoverage=73%, HitCoverage=14%, E-value=1e-23, Identity=94%"; Hit description =Protein kinase Kelch repeat:Kelch
  Pfam annotation: Domain name=F-box; Domain location=3-50; Score=26.1; E_value=0.00015; Accession=PF00646.25; Description=F-box domain
MGELIPGLPEEVARECLVRVGFDQLPVVRRISRQWKSEVESPDYHRLRRAEGLARPVLALAQAQPAAPADDAAPAAHK

SEQ ID NO: 93177 - protein, 249 aa, Setaria italica
  misc_feature (139)..(139): Xaa can be any naturally occurring amino acid
  Transcript Sequence Number=SeqID_27203
  Homolog annotation: Hit_ID=Q7XGA9; Match level="QueryCoverage=99%, HitCoverage=54%, E-value=1e-134, Identity=64%"; Hit description=(RAP Annotation release2) Protein prenyltransferase domain containing protein
  Pfam annotation: Domain name=PPR; Domain location=110-144; Score =17.6; E_value=0.054; Accession=PF01535.12; Description=PPR repeat
  Pfam annotation: Domain name=PPR; Domain location=146-180; Score =19.0; E_value=0.019; Accession=PF01535.12; Description=PPR repeat
  Pfam annotation: Domain name=PPR; Domain location=189-223; Score =16.9; E_value=0.084; Accession=PF01535.12; Description=PPR repeat
  Pfam annotation: Domain name=PPR; Domain location=40-74; Score=30.5; E_value=6.6e-06; Accession=PF01535.12; Description=PPR repeat
  Pfam annotation: Domain name=PPR; Domain location=75-109; Score=42.9; E_value=1.3e-09; Accession=PF01535.12; Description=PPR repeat
  Pfam module annotation: Pfam domain module=PPR::PPR::PPR::PPR::PPR; Domain location=110-144::146-180::189-223::40-74::75-109
NGLLDMKKIHHASFFSMCKKQKAVLEAVRFCTLIDNPKISTFNMLLSVCANSQDFDGALQVMELLKEAGLKPDCKLYTTLISTCAKCGKVDAMFEVFHEMVSAGIEPNVNTYSALIDGCARAGQVAKAFGAYGIMSSKXKVKPDRVVFNALISACGESGAVARAFDVLSEMMAESSESKGSGPILPDHVTVGALMKTCIQAGQADQAREVYKMLQEYNIKGTPEVYTIALRSCSLTGDLGFALKIYEDM

SEQ ID NO: 93178 - protein, 45 aa, Setaria italica
  Transcript Sequence Number=SeqID_27204
SSRLLTPHPPSRAAAGRPAGHPLIIYSSDLCNRHSPALKQLQLSS

SEQ ID NO: 93179 - protein, 377 aa, Setaria italica
  Transcript Sequence Number=SeqID_27205
  Gene Ontology: Mol. function=dopamine beta-monooxygenase activity; Cellular component=integral to membrane; Biological process =histidine catabolic process
  Homolog annotation: Hit_ID=B6T412; Match level="QueryCoverage=96%, HitCoverage=94%, E-value=1e-169, Identity=79%"; Hit description =Dopamine beta-monooxygenase
  Pfam annotation: Domain name=Cytochrom_B561; Domain location=189-373; Score=-71.5; E_value=0.074; Accession=PF03188.8; Description =Eukaryotic cytochrome b561
  Pfam annotation: Domain name=DOMON; Domain location=61-171; Score =41.4; E_value=3.5e-09; Accession=PF03351.9; Description=DOMON domain
  Pfam module annotation: Pfam domain module=Cytochrom_B561::DOMON; Domain location=189-373::61-171
  Subcellular localization annotation: CTP_CleavageSite=53; ConfidenceScore=5.39e-01
MAAPSARLLLLSLLGFCVALSHQESSSSSSTDSCGAAKLAVASLVPFDSTAFRCVAAWKQQDFVLRYKNTAPSEWSFVLSAPDKGSYVAVGFSGKGAMVGSSAVVGWASNGKGTVKQYYLDGKSPDDVAPNRGLLKLVKNKSVVVSHSGRLYVAFQLSTDYPQPYLIFAVGPDGNLPPSSTLRLPMHQNMASRAFNYTSGISSNAGGSGDNAAFPPEGKHGLLAMMGWGVLMPIGMITARYFRQLDPCWFYTHMAIQVSGFAIGIAAVVLGFRLNEDGLKNVDVHKALGIAILAMASLQVMAILARPDKTSKVRRFWNWYHHNIGRAAILLAIGNIFLGLSIAQETNAYIVSYGVFVAVWVVAVAAFEMKRCYADDD

SEQ ID NO: 93180 - protein, 120 aa, Setaria italica
  misc_feature (95)..(95): Xaa can be any naturally occurring amino acid
  misc_feature (110)..(110): Xaa can be any naturally occurring amino acid
  Transcript Sequence Number=SeqID_27206
  Homolog annotation: Hit_ID=A6MD06; Match level="QueryCoverage=79%, HitCoverage=17%, E-value=2e-21, Identity=55%"; Hit description=UBX domain-containing protein
RTTPPILSLLIPLRRVASGPFLSPLARPPQEAIDTFVSITGADEALAVRKLEEHGGDLNRAINSHFNEGDNTLNGINQNPIPASREDMMDLDGPXDNTFQRSLFPENFRXPFALMDPVFS

SEQ ID NO: 93181 - protein, 50 aa, Setaria italica
  Transcript Sequence Number=SeqID_27207
SKNNSLFEVEVERLKMELGALVGKEAVADAFDVQKEENMKESNDLKRKVE

SEQ ID NO: 93182 - protein, 44 aa, Setaria italica
  Transcript Sequence Number=SeqID_27208
FGEIRKAEGELEIMKAYLHDSEKLKDTNEIAGIFVNKIRDLAFR

SEQ ID NO: 93183 - protein, 164 aa, Setaria italica
  Transcript Sequence Number=SeqID_27209
  Homolog annotation: Hit_ID=B6T7L8; Match level="QueryCoverage=99%, HitCoverage=37%, E-value=7e-47, Identity=61%"; Hit description=F-box protein interaction domain containing protein
WGNIVSDIWVVDLTHQEDWIHLHTVALRIPVGMSPFFQLKRKIFFGNQNRLICIDLQDCTVSYINMPSGETLISCGMFVESFAPAVTGLVSSTASSYGNSSGVNEPSSADPGPSFRGAGSSSSSLGRGKSCGFTGWSSADLERSFKRTKRTMNMVWKISKHRAI

SEQ ID NO: 93184 - protein, 131 aa, Setaria italica
  Transcript Sequence Number=SeqID_27210
  Gene Ontology: Mol. function=protein serine/threonine kinase activity; Cellular component=myosin complex; Biological process =protein amino acid phosphorylation
  Homolog annotation: Hit_ID=Q5XPL8; Match level="QueryCoverage=90%, HitCoverage=12%, E-value=7e-60, Identity=90%"; Hit description=EDR1
  Pfam annotation: Domain name=Pkinase; Domain location=2-130; Score= -65.3; E_value=0.00013; Accession=PF00069.17; Description=Protein kinase domain
  Pfam annotation: Domain name=Pkinase_Tyr; Domain location=2-130; Score=-124.3; E_value=1.8e-05; Accession=PF07714.9; Description =Protein tyrosine kinase
  Pfam module annotation: Pfam domain module=Pkinase::Pkinase_Tyr; Domain location=2-130::2-130
MVLFQHGILSNCFFRGSLHKIIHRCEIDEKRRIKMALDVARGMNCLHTSVPTIVHRDLKSPNLLVDDNWTVKVCDFGLSRLKHSTFLSSKSTAGTPEWMAPEVLRNEQSNEKCDVYSFGVILWELSKRLTE

SEQ ID NO: 93185 - protein, 329 aa, Setaria italica
  Transcript Sequence Number=SeqID_27211
  Gene Ontology: Mol. function=protein serine/threonine kinase activity; Cellular component=myosin complex; Biological process =protein amino acid phosphorylation
  Homolog annotation: Hit_ID=Q5XPL8; Match level="QueryCoverage=98%, HitCoverage=33%, E-value=1e-168, Identity=87%"; Hit description=EDR1
  Pfam annotation: Domain name=APH; Domain location=52-274; Score= -19.2; E_value=0.058; Accession=PF01636.15; Description =Phosphotransferase enzyme family
  Pfam annotation: Domain name=Pkinase; Domain location=50-300; Score =233.5; E_value=5.4e-67; Accession=PF00069.17; Description=Protein kinase domain
  Pfam annotation: Domain name=Pkinase_Tyr; Domain location=50-300; Score=234.5; E_value=2.6e-67; Accession=PF07714.9; Description =Protein tyrosine kinase
  Pfam module annotation: Pfam domain module=APH::Pkinase::Pkinase_Tyr; Domain location=52-274::50-300::50-300
YPDLRKSPPDRFMGAPKQHSGAISPSQVGSSRVDIVLEDVSECEILWEDLVIGERIGLGSYGEVYHADWNGTEVAVKKFLDQDFYGDALDEFRCEVRIMRRLRHPNIVLFMGAVTRPPNLSIVSEYLPRGSLHKIIHRCEIDEKRRIKMALDVARGMNCLHTSVPTIVHRDLKSPNLLVDDNWTVKVCDFGLSRLKHSTFLSSKSTAGTPEWMAPEVLRNEQSNEKCDVYSFGVILWELATLRTPWQGMNPMQVVGAVGFQDRRLDIPKEVDPLVAKIIRDCWQKDPNLRPSFGQLTSYLKTLQRLVVPSHQEIPNPHTQQQIWVNHTP

SEQ ID NO: 93186 - protein, 62 aa, Setaria italica
  misc_feature (12)..(12): Xaa can be any naturally occurring amino acid
  Transcript Sequence Number=SeqID_27212
  Gene Ontology: Cellular component=integral to membrane
  Homolog annotation: Hit_ID=B6U3K5; Match level="QueryCoverage=75%, HitCoverage=33%, E-value=1e-14, Identity=83%"; Hit description=Erg28 like protein
MASEGKKKGVPXGWWLMLVGSLRLASVWFGFFKMWALRVAVFSQTEMYCTCIVTIGSLLFGC

SEQ ID NO: 93187 - protein, 118 aa, Setaria italica
  misc_feature (105)..(118): Xaa can be any naturally occurring amino acid
  Transcript Sequence Number=SeqID_27213
TFVPLVRDWNFKHCKRQQNLVARSCNNRFDDIQAHLGNAAAPVKLRHQLGGINKRDMCYRCICKLRACYFFCQFLLFFVLLMVQHAPGALLHSIKARPFWRSLDXXXXXXXXXXXXXX

SEQ ID NO: 93188 - protein, 178 aa, Setaria italica
  misc_feature (45)..(45): Xaa can be any naturally occurring amino acid
  misc_feature (71)..(71): Xaa can be any naturally occurring amino acid
  Transcript Sequence Number=SeqID_27214
VPYRYELAARGSSGEGGRFASLQAPPPPPLPKEKQSSSPAPCSPXMAADTSSQPPPPLSTPPPPGRHQHRXPPESPPRRITRSMLNHKPPTAAPPPPHNATPLKPKPEPPEEEDDSKPGPALRRFTRSLLLKDKDSNDDDLSGTTTASNASSSPSPNATTSISSSKRNTTNKIPTTSG

SEQ ID NO: 93189 - protein, 86 aa, Setaria italica
  Transcript Sequence Number=SeqID_27215
  Pfam annotation: Domain name=DUF617; Domain location=1-86; Score =42.1; E_value=1.7e-14; Accession=PF04759.5; Description=Protein of unknown function, DUF617
DPRSAPVLLVEMAAYSTGALVREMSSGLVRLALECEKTPLAAGEKRRGLLEEPTWRAYCNGRKCGFAVRRECGADEWRVLGAVEPV

SEQ ID NO: 93190 - protein, 135 aa, Setaria italica
  Transcript Sequence Number=SeqID_27216
  Gene Ontology: Mol. function=protein serine/threonine kinase activity; Biological process=protein amino acid phosphorylation
  Homolog annotation: Hit_ID=Q4PLL4; Match level="QueryCoverage=67%, HitCoverage=8%, E-value=2e-30, Identity=71%"; Hit description=SHR5 -receptor-like kinase (Fragment)
MRRRYSCSSRVLVCLVLVCSCFEASLVQAQQAASTDPIEVAALNTILGRWGKKATRSPAAWNISGEPCSGAAVDGTELDGNYKFNPGITCLCSFDNNTVCHITKLRVYALNVVGQIPSELQNLTYLTYLNLDQNY

SEQ ID NO: 93191 - protein, 82 aa, Setaria italica
  misc_feature (7)..(7): Xaa can be any naturally occurring amino acid
  Transcript Sequence Number=SeqID_27217
  Gene Ontology: Mol. function=metal ion binding
  Homolog annotation: Hit_ID=B6THV3; Match level="QueryCoverage=56%, HitCoverage=12%, E-value=5e-17, Identity=86%"; Hit description =Protein binding protein
PPGPARXRGSASDRESAGAGTDSSDTDGEDDEEAEERSSYTSRCESMNTMISFLWWIIGFYWIVSGGEVLELGAPRLYWLTV

SEQ ID NO: 93192 - protein, 85 aa, Setaria italica
  Transcript Sequence Number=SeqID_27218
  Gene Ontology: Mol. function=single-stranded DNA binding
  Pfam annotation: Domain name=SSB; Domain location=1-83; Score=2.0; E _value=0.016; Accession=PF00436.17; Description=Single-strand binding protein family
APVHLQRTPDGRFSAVSVLVQDRRIDFPSFWVPIVFKDDLAQVAASHLKENDLVYVSGQLTCDVPPLKLDDGQANIQVLAHLLSF

SEQ ID NO: 93193 - protein, 62 aa, Setaria italica
  misc_feature (36)..(36): Xaa can be any naturally occurring amino acid
  Transcript Sequence Number=SeqID_27219
  Gene Ontology: Mol. function=protein serine/threonine kinase activity; Biological process=protein amino acid phosphorylation
  Homolog annotation: Hit_ID=P17801; Match level="QueryCoverage=100%, HitCoverage=7%, E-value=1e-21, Identity=77%"; Hit description =Putative receptor protein kinase ZmPK1
AVKMLENVRQCEEEFQAELRIIGRINHMNLVRIWGXCSESCHRMLVTEYIENGSLANILSNE

SEQ ID NO: 93194 - protein, 109 aa, Setaria italica
  Transcript Sequence Number=SeqID_27220
  Subcellular localization annotation: CTP_CleavageSite=69; ConfidenceScore=5.09e-01
TLFLGLVNRVSSDGSTSTLISVHVKQHALQQKFYFQCKSPASSIIFYRIGIGNAAVVTQNSSFTNGNLEVQEGRSRSVCLQNFLPFCQYIYFICWMAASSTLIPSTTEQ

SEQ ID NO: 93195 - protein, 140 aa, Setaria italica
  Transcript Sequence Number=SeqID_27221
  Gene Ontology: Mol. function=protein dimerization activity
  Homolog annotation: Hit_ID=B6SVS7; Match level="QueryCoverage=99%, HitCoverage=23%, E-value=3e-74, Identity=88%"; Hit description =Protein dimerization
  Pfam annotation: Domain name=DUF659; Domain location=1-125; Score =229.0; E_value=1.2e-65; Accession=PF04937.7; Description=Protein of unknown function (DUF 659)
WVTTGCTILADSWTDNKLKALINFSVSSPLGTFFLKTVDASSHFKTHRGLYDLFDEVIREVGPENVVQIIADRNINYGSIDKLIMQNYNSIFWSPCASFCINSMLDDFSKIDWVNQCICQAQTVTRFIYNNKWVLDFTRN

SEQ ID NO: 93196 - protein, 556 aa, Setaria italica
  misc_feature (143)..(143): Xaa can be any naturally occurring amino acid
  Transcript Sequence Number=SeqID_27222
  Gene Ontology: Mol. function=protein dimerization activity
  Homolog annotation: Hit_ID=B6SVS7; Match level="QueryCoverage=75%, HitCoverage=72%, E-value=0.0, Identity=79%"; Hit description=Protein dimerization
  Pfam annotation: Domain name=DUF659; Domain location=52-199; Score =263.1; E_value=6.5e-76; Accession=PF04937.7; Description=Protein of unknown function (DUF 659)
  Pfam annotation: Domain name=hATC; Domain location=395-484; Score =18.0; E_value=0.00042; Accession=PF05699.6; Description=hAT family dimerisation domain
  Pfam module annotation: Pfam domain module=DUF659::hATC; Domain location=52-199::395-484
GAVNKSRAASELEAERCIAEVVFENKLDYSIADSVSYQHMLEVLGGVGFRGPSAEVLKDKWLHKLKSEILQKTKEIEKDWVTTGCTILADSWTDNKLKALINFSVSSPLGTFFLKTVDASSHFKTHRGLYDLFDEVIREVGPXNVVQINEYNSIDKLIMQNYNSIFWSPCASFCINSMLDDFSKIDWVNQCICQAQTVTRFIYNNKWVLDFTRKSMPGQELVCSGITKSVSDFLTLKSLLRHRSKLKQMFHCAEFSSSSYASRSIPCVEILNDDELWRAVEEIAAVSEPLLRVMRDVSGGKAAIGYIYESMTKVTDSIRTYYIMDEGKCKSFLDIVEQKWQAELHSPLHSAAAFLNPSIQYNPEVKFFSSIKEEFFHVLDKVLTNPDLRQDITSQLHAFRKAQGMFGSNIAKEARNNTSPGMWWEQYGDSAPSLQRAAVRVTSQVCSTLTFQRDWGMILQNHYEKRNKLDKEALADQAYVHYNLTLHSEPKTRKKLDGDPIALDGIDMTSPWVEDSDGPILTQWLDRFPSALDGGDLNTRQFGGSIFGPSDNLFGL

SEQ ID NO: 93197 - protein, 77 aa, Setaria italica
  misc_feature (65)..(65): Xaa can be any naturally occurring amino acid
  Transcript Sequence Number=SeqID_27223
  Homolog annotation: Hit_ID=B9RDF9; Match level="QueryCoverage=100%, HitCoverage=2%, E-value=2e-28, Identity=72%"; Hit description =Nucleotide binding protein, putative
FLACSHPDNRTTMTSIAEWPEWILEVLISNHEKGTKKNADGVSIGEIEDLIHNFLIIMLEHSMRXQKDGWKDVEATI

SEQ ID NO: 93198 - protein, 87 aa, Setaria italica
  misc_feature (66)..(66): Xaa can be any naturally occurring amino acid
  Transcript Sequence Number=SeqID_27224
  Gene Ontology: Mol. function=transferase activity, transferring groups other than amino-acyl groups
  Homolog annotation: Hit_ID=Q9FVY9; Match level="QueryCoverage=98%, HitCoverage=15%, E-value=3e-28, Identity=73%"; Hit description =Benzoyl-CoA:benzyl alcohol/phenylethanol benzoyltransferase, putative, expressed
MAESLKFTVRRKPAELVSPASPTPRELKRLSDIDDQDGLRFHIPVIQFHRRSALMGARDPAPVIRXAIARALVHYYPFAGRLRELEG

SEQ ID NO: 93199 - protein, 254 aa, Setaria italica
  Transcript Sequence Number=SeqID_27225
  Homolog annotation: Hit_ID=B6SYE3; Match level="QueryCoverage=97%, HitCoverage=46%, E-value=5e-66, Identity=51%"; Hit description=Zinc finger C-x8-C-x5-C-x3-H type family protein
LRKVGRPRVEVCTFLHDREGFGSAKAGLLAPAGSGNHRGSEEGSQVQHQSNLKVPQFKYAEGSSKHELYRSLVHVYGEDNERLAHLADKQNLTTPGVSQGLPGSIDDSFTKRPTAPINELVRSLVVHEKNHKPFMGHPIGLAAETRRYLDVNTLNSDHQFQSSGMSISSDTLQFREKLSAYGGTTDNLPNTHQKEHRSSHASYSSCNLTGFRNLGYATSEISLGSPSLRATSQLGIQSHHLFRTGIEKVISIDI

SEQ ID NO: 93200 - protein, 173 aa, Setaria italica
  Transcript Sequence Number=SeqID_27226
RVGLGLQPASHKPINDAPYHDALPKPSRLCQLVIFTASVIVPDDIPRRTSHYHAVLAAASRVATMPPPPLRHAAIVPRSHPRNRRSPNHDPTLVEVKRMAHHTMPKRPPPCRTHRQSVAAAPNIPNDRSTASDPIPSKTNSNMWGPRHIHHLTPLLGHITLSEREPRHFCRWT

SEQ ID NO: 93201 - protein, 109 aa, Setaria italica
  Transcript Sequence Number=SeqID_27227
  Gene Ontology: Mol. function=unfolded protein binding; Cellular component=chloroplast; Biological process=cellular protein metabolic process
  Homolog annotation: Hit_ID=Q10AA5; Match level="QueryCoverage=100%, HitCoverage=22%, E-value=2e-36, Identity=61%"; Hit description=60 kDa chaperonin
NATFAAISEGITPGGGVTYVHLSKHIPSIMDLVDDPEEKMGVNIVGKALLVPAMTIARNAGADGSAVVEKLLASEWRVGYNAMTDKFEDLVTAGVVDPCRVARCVLQNS

SEQ ID NO: 93202 - protein, 234 aa, Setaria italica
  misc_feature (29)..(29): Xaa can be any naturally occurring amino acid
  misc_feature (46)..(46): Xaa can be any naturally occurring amino acid
  Transcript Sequence Number=SeqID_27228
  Gene Ontology: Mol. function=transferase activity, transferring glycosyl groups; Cellular component=integral to Golgi membrane; Biological process=protein amino acid glycosylation
  Homolog annotation: Hit_ID=Q4JEY4; Match level="QueryCoverage=100%, HitCoverage=52%, E-value=1e-121, Identity=90%"; Hit description =Sialyltransferase-like protein
  Pfam annotation: Domain name=Glyco_transf_29; Domain location=1-190; Score=-79.6; E_value=0.037; Accession=PF00777.10; Description =Glycosyltransferase family 29 (sialyltransferase)
LPETSPYVPRQFGRCAVVGNSGDLLKTKXFGDEIDSYDVVFRENGXPIQNYTEYVGTKSTFRLLNRGSAKALDKVVELDETKKEVLIVKTTIHDIMNQMIRELPITNPVYLMLGTSSSFGSSAKGTGVKALEFALSICDSVDMYGFTVDPGYKEWTRYFSEARKGHTPLHGRAYYQMMECLGLIKIHSPMRGDPGRAVKWLPTKDIIEAARVASEKLLRRPGAGRDGPLGTCTM

SEQ ID NO: 93203 - protein, 109 aa, Setaria italica
  misc_feature (107)..(107): Xaa can be any naturally occurring amino acid
  Transcript Sequence Number=SeqID_27229
  Subcellular localization annotation: CTP_CleavageSite=49; ConfidenceScore=5.66e-01
LTESKPVTAPNEPATARTSPSASSSGQDRGIRCGLGVATFPSNATQRTRGRHGGPVRRRGAVSHRFLWVHAGRRSLVTARRTDLPVGARSSVTRSCRAHIKGCTIRXTT

SEQ ID NO: 93204 - protein, 32 aa, Setaria italica
  Transcript Sequence Number=SeqID_27230
SSSTANLISLQQLRVGIWHKQVNSLVHYERIP

SEQ ID NO: 93205 - protein, 70 aa, Setaria italica
  Transcript Sequence Number=SeqID_27231
SPPLGFRCALLQPTRSHFCLLNNYRCYRKKVTHVGLRKPIHTLRFNKPIDYLLCIWSPPWVIVSAFCPYL

SEQ ID NO: 93206 - protein, 79 aa, Setaria italica
  Transcript Sequence Number=SeqID_27232
VIESWRDRLETSSQLEQLRVCFEIGTECTDYDPRRRPDAKQIVDRLVKAESMDRFTETDVVVQQAEMTSSGLQQGTPKV

SEQ ID NO: 93207 - protein, 193 aa, Setaria italica
  Transcript Sequence Number=SeqID_27233
  Homolog annotation: Hit_ID=B6T8L2; Match level="QueryCoverage=98%, HitCoverage=33%, E-value=9e-85, Identity=78%"; Hit description=F-box domain containing protein
  Pfam annotation: Domain name=F-box; Domain location=81-128; Score =28.5; E_value=2.7e-05; Accession=PF00646.25; Description=F-box domain
MAFDCNKGRGVSSPDNCSSICPEGTLIQANPLSHYWKAKGWKSRNKLGNQKSSYESIPRDSNPKKDDEVRGEATASTCGLRCFTDLPAAYFCEVLARLDAKELGIVSCVSTLLHTLATDHHGWKKLYCERWGLPNLPATLNGLLVPGGPLDGKSWKTFFVEREFRSKSFMGKFNVDVFRGHNEDVRAVFLLGI

SEQ ID NO: 93208 - protein, 120 aa, Setaria italica
  misc_feature (69)..(69): Xaa can be any naturally occurring amino acid
  Transcript Sequence Number=SeqID_27234
  Gene Ontology: Mol. function=transferase activity, transferring glycosyl groups; Biological process=metabolic process
  Homolog annotation: Hit_ID=Q7XHS0; Match level="QueryCoverage=75%, HitCoverage=18%, E-value=2e-28, Identity=74%"; Hit description =Putative glucosyltransferase-2
RVGAVRYRSLLASLSSAGRQSQAGSDGADDGHSFPPVTCVVADGLLTWAIDTAEELGVPALAFRTSSAXLAYRTVPKLVELGEIPFPAGGDLDEAIRGVPGMESFLRRRDLPSVFSCRGD

SEQ ID NO: 93209 - protein, 316 aa, Setaria italica
  Transcript Sequence Number=SeqID_27235
  Homolog annotation: Hit_ID=B9T4Y8; Match level="QueryCoverage=94%, HitCoverage=84%, E-value=1e-116, Identity=69%"; Hit description=Non -imprinted in Prader-Willi/Angelman syndrome region protein, putative
  Pfam annotation: Domain name=DUF803; Domain location=1-271; Score =520.9; E_value=1.6e-153; Accession=PF05653.6; Description=Protein of unknown function (DUF803)
LRRAGAAGTRAGVGGYGYLLEPLWWVGMVTMLIGEIANFVAYMFAPAVLVTPLGALSIIVSAVLAHFILNEKLQRMGVLGCVLCIVGSTVIILHAPEEETPSSVAQIWHLATQPAFLCYAASALVISMILMLHCAPRYGQTNIVVYVGICSVIGSLTVMSIKAVGIAIKLTIEGINQAGYFQTWLFATVSATCIIIQLVYLNKALDTFNTAVVSPIYYAMFTSLTILASAIMFKDWSGQSISSIASEICGFLTVLTGTVVLHSTRENDPALSSDLYTPLPPIYWHIQGNSETGGKQKEDDLLSGDFITVVRQDYFV

SEQ ID NO: 93210 - protein, 147 aa, Setaria italica
  misc_feature (21)..(21): Xaa can be any naturally occurring amino acid
  misc_feature (62)..(62): Xaa can be any naturally occurring amino acid
  Transcript Sequence Number=SeqID_27236
  Gene Ontology: Mol. function=metal ion binding
VHDMYYTRYSYLYQRVDTWLXCLPVIMIALCSWLTVACLRVKRHDDTNLSNNSNLSLMPETXVTMVVLAVLEAYQLYLYIASGWFKVALIRCYVNAPSLQRGCCCEMIIRLLLIWKAFRPWKGRLGQLLFFLRSKLWSVLKVLRVLS

SEQ ID NO: 93211 - protein, 323 aa, Setaria italica
  Transcript Sequence Number=SeqID_27237
  Gene Ontology: Mol. function=metal ion binding; Biological process =RNA-dependent DNA replication
MLRFGHDMEKKGDAKYLWPPLTAILVVIVLKSYVMIASMRMVSKSYLGKNVKVVADYMQYIDNNKLGALNPVTMEGYWYMVAGEKQCVNRPGHTPWYKQEPDDLKVTTVEQIWQCKGNLLIDDQGKVLKDLCLSMALSKMLNRRFAGFKLSEAELQKTHDFVFKGLLAGDKPHMRAFRVIEEELVFVHDMYYTRYSYLYQKGRYLAIMMTGRQRARCSWLTVACLRVKRHDDTNLSNNSNLSLMPETIVIMVVLAVLEAYQLYLYMASGWFKVALIRSYVTAPSLQTSYCSEMIIRLLLMLKPFRPWKGRLGQYCFLENLGRK

SEQ ID NO: 93212 - protein, 112 aa, Setaria italica
  Transcript Sequence Number=SeqID_27238
  Gene Ontology: Mol. function=metal ion binding
MRIIQLVWQFLVFLAIVAMFLLHILGPLRRRFSHGLVHHIVMGVYTLSYPLVGYTIGLMHSTTWYFNDFTVWAVFLLLLLSSTDSLTACRLNDIDNWKSICIKQLFKGFLPR

SEQ ID NO: 93213 - protein, 168 aa, Setaria italica
  Transcript Sequence Number=SeqID_27239
  Gene Ontology: Mol. function=hydrolase activity, acting on acid anhydrides, catalyzing transmembrane movement of substances; Cellular component=integral to membrane; Biological process=copper ion transport
  Homolog annotation: Hit_ID=Q6JAG2; Match level="QueryCoverage=94%, HitCoverage=16%, E-value=1e-80, Identity=91%"; Hit description =Putative copper-exporting ATPase
  Pfam annotation: Domain name=E1-E2_ATPase; Domain location=1-155; Score=80.6; E_value=5.6e-21; Accession=PF00122.12; Description=E1-E2 ATPase
EAIAKLMDLAPETATLLIHDHEGNVVGEKEIDSRLIQKNDVIKVVPGGKVASDGFVIWGQSHVNESMITGESRPVAKRKGDTVIGGTVNENGVLHVRATFVGSESALSQIVRLVESAQMAKAPVQKFADQISRVFVPLVIVLSLLTWLVWFLVESYPWKKVSMSKGNH

SEQ ID NO: 93214 - protein, 276 aa, Setaria italica
  Transcript Sequence Number=SeqID_27240
  Gene Ontology: Mol. function=DNA binding; Biological process =regulation of transcription
  Homolog annotation: Hit_ID=B6U1F3; Match level="QueryCoverage=96%, HitCoverage=63%, E-value=1e-121, Identity=79%"; Hit description=CDPK substrate protein 1
MERLSTNQLYSSGVPVTVPTSLPSIPASLEESFPRLPDSQNVLIERELRSTPVPPHQNTVAPIRGQFHTSTGSVGPLCSPPAVRFSSVSNPEQYSNPSPYNSQAPSTASSSTRNYGSQYGGFEPSLTDFPRDVGPTWCPDPVDSILGYSGDVPGGNNLTGSTSLGASDDLTKQTEWWTELMNDDWKDIVDNPASAETQQVGPPAQSSISVHQSAAQQTVSSQSGEPMAVVAPSPTGGSNTAKARMRWTPELHERFVDAVNQLGGSEVCIVETLVSP

SEQ ID NO: 93215 - protein, 475 aa, Setaria italica
  Transcript Sequence Number=SeqID_27241
  Gene Ontology: Mol. function=1,2-diacylglycerol 3-beta-galactosyltrans ferase activity; Cellular component=chloroplast; Biological process =carbohydrate metabolic process
  Homolog annotation: Hit_ID=B4FBN5; Match level="QueryCoverage=100%, HitCoverage=89%, E-value=0.0, Identity=87%"; Hit description=MGDG synthase type A
  Pfam annotation: Domain name=Glyco_tran_28_C; Domain location=291 -454; Score=-16.0; E_value=0.00069; Accession=PF04101.8; Description =Glycosyltransferase family 28 C-terminal domain
  Pfam annotation: Domain name=Glycos_transf_1; Domain location=276 -445; Score=-26.9; E_value=0.06; Accession=PF00534.12; Description =Glycosyl transferases group 1
  Pfam annotation: Domain name=MGDG_synth; Domain location=97-265; Score=295.1; E_value=1.5e-85; Accession=PF06925.3; Description =Monogalactosyldiacylglycerol (MGDG) syntha
  Pfam module annotation: Pfam domain module=Glyco_tran_28_C::Glycos _transf_1::MGDG_synth; Domain location=291-454::276-445::97-265
SAAISAPGPASTAASRLHRMWGEFARFVRLHGNQISPLGFASLGLGLGGGEGGGGSAGGGGGGGGDVDAVGEVEEAAARAEAPKKVLILMSDTGGGHRASAEAIKAAFTQEFGDDYQVFVTDLWTDHTPWPFNQLPRSYSFLVKHGPLWKMTYYGTAPRVIHQPHFAATSTFIAREVAKGLMKYQPDVIISVHPLMQHVPLRILRSKGLLDKIPFTTVITDLSTCHPTWFHKLVTRCYCPSTEVEKRALKAGLKPSQIKVYGLPVRPSFVKPVRPKDELRRELGMDEDLPAVLLMGGGEGMGPIEATAKALGDTLYDENLGEPTGQILVICGRNKKLVNRLQSISWKVPVQVKGFVTKMEECMGACDCIITKAGPGTIAEAMIRGLPIILNDYIAGQEAGNVPYVVENGCGKFSKSPKQIANIVADWFGPKSDEFRIMSQNCLKLARPDAVFKIVHDLHELVRQKCFVPQYACAT

SEQ ID NO: 93216 - protein, 68 aa, Setaria italica
  Transcript Sequence Number=SeqID_27242
MDWFEKSLQKNFDLPPKNASEEARRRWRSAVGALVKNPRRRFRMVADLDTRSQNELMRRSAQEKIQVA

SEQ ID NO: 93217 - protein, 80 aa, Setaria italica
  Transcript Sequence Number=SeqID_27243
MADADSNVPGGYFMGRPSNAPEQQPAESKPANTQTPGDYFIGTPEHGRTAAGSGKPTGDQKKSKSFLECLPCLGGGQVAN

SEQ ID NO: 93218 - protein, 91 aa, Setaria italica
  misc_feature (37)..(37): Xaa can be any naturally occurring amino acid
  Transcript Sequence Number=SeqID_27244
  Homolog annotation: Hit_ID=B6TUB0; Match level="QueryCoverage=83%, HitCoverage=17%, E-value=2e-25, Identity=77%"; Hit description =Regulatory protein
VPVPFPRLLPAAAGEAQVVMSSDFFVGNPDSPGNYPXNGGLLYVRSSPAAVAFYEHWQASRARFPGKHEQFVFDRIVKEGCRRGSVRGCGS

SEQ ID NO: 93219 - protein, 244 aa, Setaria italica
  misc_feature (126)..(126): Xaa can be any naturally occurring amino acid
  Transcript Sequence Number=SeqID_27245
  Gene Ontology: Mol. function=endonuclease activity; Cellular component=nucleus; Biological process=response to DNA damage stimulus
  Homolog annotation: Hit_ID=B6TDH7; Match level="QueryCoverage=96%, HitCoverage=34%, E-value=2e-97, Identity=77%"; Hit description=XPG I- region family protein
KPDSEAVQRACSQRPFLRSQLQQICEQYFEWSPEKTDEYILPKIAERELRRFSNLRSTSSDLGLKPSLNEIPVPCPVLAIVKQRKVHGSEYYEVSWRNIDGLLVSVVPGDLVRSACPEKITEFLEXKGEQKKQKRRARPKKSPPAAVKDVDVQLQELLLGIESESGTFPSTAAGPQTADIHTVAPLQDIVDLSSPSPPIRACKIARSRKLSGSPVVPMDGIDLQSRSLLPGTMESQENTFCVTR

SEQ ID NO: 93220 - protein, 143 aa, Setaria italica
  misc_feature (1)..(9): Xaa can be any naturally occurring amino acid
  Transcript Sequence Number=SeqID_27246
XXXXXXXXXLLYGLSKCLVNFPVIVERKEARHATCRIHRPVPKNGRVLIGQAPRRAEPKTCQRNAIPTLRPKIATSLAYKATRIATPRTQNAVTISTETQAAYEFTKRASLNTKTPSMARALALVVILLAAVAVGLFAGPLVV

SEQ ID NO: 93221 - protein, 138 aa, Setaria italica
  Transcript Sequence Number=SeqID_27247
NANGRDSILGQEISMGENQMCRNLCEQELRSGKRKNASNKSAKFGLGNGVVTPDHADDNPPEKLLHVPHVDKMTIIDKQHTQPEYCRDKGREGNASHAFQEEPNNEQNHVLDKIFVDIHADVDQSKFKSRSGRSMELG

SEQ ID NO: 93222 - protein, 98 aa, Setaria italica
  misc_feature (55)..(55): Xaa can be any naturally occurring amino acid
  Transcript Sequence Number=SeqID_27248
MCISISKSTQKNCRSEDGEEMIMACSACLAPCTPPTASNHATGWIHVWHTGSQAXHTSRSWSTKPGSRRATSMASTSSTSQKLDGDRSIGVRKRRSQQ

SEQ ID NO: 93223 - protein, 388 aa, Setaria italica
  Transcript Sequence Number=SeqID_27249
  Gene Ontology: Mol. function=nucleotide binding; Biological process =defense response
  Homolog annotation: Hit_ID=Q2R8L1; Match level="QueryCoverage=94%, HitCoverage=27%, E-value=3e-89, Identity=47%"; Hit description=NB -ARC domain containing protein, expressed
  Pfam annotation: Domain name=NACHT; Domain location=113-267; Score= -34.2; E_value=0.036; Accession=PF05729.4; Description=NACHT domain
  Pfam annotation: Domain name=NB-ARC; Domain location=93-380; Score =150.6; E_value=4.7e-42; Accession=PF00931.14; Description=NB-ARC domain
  Pfam module annotation: Pfam domain module=NACHT::NB-ARC; Domain location=113-267::93-380
MMLSHNAANEKPRSIHAPKLRVARLKIRGLPSMLKLSTRIVRVAELRTLLWEASERHARYQLDGCVSNPRSVFSGRSSRITLVYKVVADPIGIEGPKKELTMWLTNQAEQQLKVLCIFGPAGIGKTTLAKELYRELSGKFDCRAFIRVSQNPDISRLLQELLYQILRPNKQNLYACSVQGDIENIRKHLEEKRYFIVIDDLWEAEAWDIIKNAFPNGSNCSRVIITCEVKNIAPECSGYHTVDTFEMKPLGSQDSENLFLDRALSSDNQCPDPLKDVSCRMLKECGGLPLAIISAAGLFASLRDNSDIWHQLLQSVLSTLENLSLEDMLKEIVSICYNNLPQELKTCLLYLTMYPVGCTIWKDDLLKQWAAEGFILQQKEMRELQRII

SEQ ID NO: 93224 - protein, 360 aa, Setaria italica
  Transcript Sequence Number=SeqID_27250
  Gene Ontology: Mol. function=aspartic-type endopeptidase activity; Cellular component=cell wall; Biological process=xylan catabolic process
  Homolog annotation: Hit_ID=Q8S1V1; Match level="QueryCoverage=98%, HitCoverage=99%, E-value=4e-73, Identity=45%"; Hit description =Putative xylanase inhibitor
MWNPKPLLLVISLCISALSPCTAATGGKPLVTAVTKDAATSLYTAPLKDGRPLVLDLSGPVISLTTCSSKNGTVTTLSSNATNGANPLFPVSFSAVASCAPGQPNLPAGAVGVAGLAPSTQSFLAQVARTQKVANKLALCLPSDGKITTGNSVGVAIYGGGPLIFPDRGDFTTMLAGTAPLVGFNGSPGYFISATGIAVEQSLAGNPGTLVVGLSTTAPYTALRPDVYDPFMKAFDQAATGSNFPWMTRVASVAPFERCYDSTKLPPTRLGYAVPQIEFVLKSGSNYSVVGGNSMVQVNVNTACLGFVKASGQAPAAIIGGFQMENRLLVLDAEKKTLGFTTFLNGVGLSCSNFNFTLAA

SEQ ID NO: 93225 - protein, 112 aa, Setaria italica
  Transcript Sequence Number=SeqID_27251
  Gene Ontology: Mol. function=nucleotide binding; Cellular component =plasma membrane; Biological process=small GTPase mediated signal transduction
  Homolog annotation: Hit_ID=O04486; Match level="QueryCoverage=98%, HitCoverage=50%, E-value=1e-52, Identity=87%"; Hit description=Ras -related protein RABA2a
  Pfam annotation: Domain name=MMR_HSR1; Domain location=6-108; Score= -2.0; E_value=0.0015; Accession=PF01926.15; Description=GTPase of unknown function
  Pfam annotation: Domain name=Miro; Domain location=7-108; Score=56.9; E_value=7.5e-14; Accession=PF08477.5; Description=Miro-like protein
  Pfam annotation: Domain name=Ras; Domain location=7-110; Score=125.5; E_value=1.7e-34; Accession=PF00071.14; Description=Ras family
  Pfam module annotation: Pfam domain module=MMR_HSR1::Miro::Ras; Domain location=6-108::7-108::7-110
EYDYLFKVVLIGDSGVGKSNLLSRFTRNTFSLDSKSTIGVEFATRTIQVEGKTIKAQIWDTAGQERYRAITGAYYRGAVGALLVYDTTKASTFENARRWLKELRDHADANTA

SEQ ID NO: 93226 - protein, 66 aa, Setaria italica
  Transcript Sequence Number=SeqID_27252
  Gene Ontology: Mol. function=nucleotide binding; Cellular component =plasma membrane; Biological process=small GTPase mediated signal transduction
  Homolog annotation: Hit_ID=O04486; Match level="QueryCoverage=80%, HitCoverage=24%, E-value=2e-22, Identity=88%"; Hit description=Ras -related protein RABA2a
  Pfam annotation: Domain name=Ras; Domain location=3-66; Score=-69.7; E_value=0.00046; Accession=PF00071.14; Description=Ras family
PCKSSPVPNVDLILQVEGKIIKAQIWDTAGQERYRAITSAYYRGALGAVLVYDVSKPTTFENISRW

SEQ ID NO: 93227 - protein, 54 aa, Setaria italica
  misc_feature (45)..(46): Xaa can be any naturally occurring amino acid
  misc_feature (51)..(54): Xaa can be any naturally occurring amino acid
  Transcript Sequence Number=SeqID_27253
GHSRTTQTINLNYRLLICASVRFIWCSCLSLQYHLLIDGRNKNKXXTHDDXXXX

SEQ ID NO: 93228 - protein, 65 aa, Setaria italica
  Transcript Sequence Number=SeqID_27254
  Gene Ontology: Mol. function=nucleotide binding; Cellular component =plasma membrane; Biological process=small GTPase mediated signal transduction
  Homolog annotation: Hit_ID=P40393; Match level="QueryCoverage=55%, HitCoverage=16%, E-value=2e-14, Identity=100%"; Hit description=Ras -related protein RIC2
CPWHFLVCKSECCFLGLLISLHFGSESYCRYRAITSAYYRGAVGALLVYDVTRHSTFENVERWLK

SEQ ID NO: 93229 - protein, 216 aa, Setaria italica
  Transcript Sequence Number=SeqID_27255
  Gene Ontology: Mol. function=nucleotide binding; Cellular component =plasma membrane; Biological process=small GTPase mediated signal transduction
  Homolog annotation: Hit_ID=Q40521; Match level="QueryCoverage=99%, HitCoverage=98%, E-value=1e-110, Identity=89%"; Hit description=Ras -related protein Rab11B
  Pfam annotation: Domain name=Arf; Domain location=5-173; Score=-69.9; E_value=0.00036; Accession=PF00025.13; Description=ADP-ribosylation factor family
  Pfam annotation: Domain name=GTP_EFTU; Domain location=15-175; Score=- 88.7; E_value=0.022; Accession=PF00009.19; Description=Elongation factor Tu GTP binding domain
  Pfam annotation: Domain name=MMR_HSR1; Domain location=13-128; Score =17.3; E_value=2.5e-05; Accession=PF01926.15; Description=GTPase of unknown function
  Pfam annotation: Domain name=Miro; Domain location=14-128; Score =79.0; E_value=1.7e-20; Accession=PF08477.5; Description=Miro-like protein
  Pfam annotation: Domain name=Ras; Domain location=14-175; Score =330.4; E_value=3.6e-96; Accession=PF00071.14; Description=Ras family
  Pfam module annotation: Pfam domain module=Arf::GTP_EFTU::MMR _HSR1::Miro::Ras; Domain location=5-173::15-175::13-128::14-128::14 -175
MAYRAEDDYDYLFKVVLIGDSGVGKSNLLSRFTRNEFSLESKSTIGVEFATRSIRVDDKVVKAQIWDTAGQERYRAITSAYYRGAVGALVVYDVTRHVTFENVERWLKELRDHTDANIVIMLVGNKADLRHLRAVSVEDAKGFAERESTFFMETSALESMNVESAFTEVLTQIYRVVSKKALDIGDDPAAPPRGQTINVGGKDDVSAVKKSGCCSS

SEQ ID NO: 93230 - protein, 216 aa, Setaria italica
  Transcript Sequence Number=SeqID_27256
  Gene Ontology: Mol. function=nucleotide binding; Cellular component =plasma membrane; Biological process=small GTPase mediated signal transduction
  Homolog annotation: Hit_ID=B6SHY2; Match level="QueryCoverage=100%, HitCoverage=100%, E-value=1e-117, Identity=93%"; Hit description=Ras- related protein Rab11C
  Pfam annotation: Domain name=AIG1; Domain location=13-181; Score= -101.3; E_value=0.055; Accession=PF04548.8; Description=AIG1 family
  Pfam annotation: Domain name=Arf; Domain location=1-173; Score=-77.3; E_value=0.0013; Accession=PF00025.13; Description=ADP-ribosylation factor family
  Pfam annotation: Domain name=GTP_EFTU; Domain location=15-175; Score=- 75.2; E_value=0.0017; Accession=PF00009.19; Description=Elongation factor Tu GTP binding domain
  Pfam annotation: Domain name=MMR_HSR1; Domain location=13-128; Score =9.7; E_value=0.00013; Accession=PF01926.15; Description=GTPase of unknown function
  Pfam annotation: Domain name=Miro; Domain location=14-128; Score =86.7; E_value=8.4e-23; Accession=PF08477.5; Description=Miro-like protein
  Pfam annotation: Domain name=Ras; Domain location=14-175; Score =330.5; E_value=3.4e-96; Accession=PF00071.14; Description=Ras family
  Pfam module annotation: Pfam domain module=AIG1::Arf::GTP_EFTU::MMR _HSR1::Miro::Ras; Domain location=13-181::1-173::15-175::13-128::14 -128::14-175
MAHRVDNEYDYLFKIVLIGDSGVGKSNILSRFTRNEFCLESKSTIGVEFATRTLQIDGKTVKAQIWDTAGQERYRAITSAYYRGAVGALLVYDITKKQTFDNVQRWLRELRDHADANIVVMLVGNKSDLNHLRSVPEEDGQAFSEKEGLSFLETSALEAVNVEKAFHTILSEIHQTVSKKALAAQESASASGRSMQGTTINVAESSTATKGSCCSS

SEQ ID NO: 93231 - protein, 219 aa, Setaria italica
  Transcript Sequence Number=SeqID_27257
  Gene Ontology: Mol. function=nucleotide binding; Cellular component =plasma membrane; Biological process=small GTPase mediated signal transduction
  Homolog annotation: Hit_ID=B6U632; Match level="QueryCoverage=100%, HitCoverage=99%, E-value=1e-119, Identity=95%"; Hit description=Ras -related protein Rab11B
  Pfam annotation: Domain name=Arf; Domain location=1-175; Score=-53.6; E_value=2.2e-05; Accession=PF00025.13; Description=ADP-ribosylation factor family
  Pfam annotation: Domain name=GTP_EFTU; Domain location=17-177; Score=- 93.4; E_value=0.052; Accession=PF00009.19; Description=Elongation factor Tu GTP binding domain
  Pfam annotation: Domain name=MMR_HSR1; Domain location=15-130; Score =6.4; E_value=0.00026; Accession=PF01926.15; Description=GTPase of unknown function
  Pfam annotation: Domain name=Miro; Domain location=16-130; Score =90.9; E_value=4.6e-24; Accession=PF08477.5; Description=Miro-like protein
  Pfam annotation: Domain name=Ras; Domain location=16-177; Score =320.8; E_value=2.9e-93; Accession=PF00071.14; Description=Ras family
  Pfam module annotation: Pfam domain module=Arf::GTP_EFTU::MMR _HSR1::Miro::Ras; Domain location=1-175::17-177::15-130::16-130::16 -177
MAAGYRAEEEYDYLFKVVLIGDSGVGKSNLLSRFARDEFSLETRSTIGVEFATKTVQVDGKLVKAQIWDTAGQERYRAITSAYYRGAVGALVVYDVTRRVTFENAERWLRELRDHTDANIVVMLVGNKADLRHLRAVSPEDAAAFAERHGTFSMETSALDATNVERAFAEVLRQIYHVVSRNALDIGEDPAAPPRGKTIDVGAAKDEVSPVNTGGCCSA

SEQ ID NO: 93232 - protein, 216 aa, Setaria italica
  Transcript Sequence Number=SeqID_27258
  Gene Ontology: Mol. function=nucleotide binding; Cellular component =plasma membrane; Biological process=small GTPase mediated signal transduction
  Homolog annotation: Hit_ID=Q9LK99; Match level="QueryCoverage=99%, HitCoverage=99%, E-value=2e-99, Identity=81%"; Hit description=GTP -binding protein-like
  Pfam annotation: Domain name=Arf; Domain location=5-173; Score=-83.7; E_value=0.004; Accession=PF00025.13; Description=ADP-ribosylation factor family
  Pfam annotation: Domain name=GTP_EFTU; Domain location=15-172; Score=- 84.9; E_value=0.011; Accession=PF00009.19; Description=Elongation factor Tu GTP binding domain
  Pfam annotation: Domain name=MMR_HSR1; Domain location=13-128; Score =15.1; E_value=4e-05; Accession=PF01926.15; Description=GTPase of unknown function
  Pfam annotation: Domain name=Miro; Domain location=14-128; Score =77.2; E_value=6.1e-20; Accession=PF08477.5; Description=Miro-like protein
  Pfam annotation: Domain name=Ras; Domain location=14-175; Score =343.0; E_value=5.9e-100; Accession=PF00071.14; Description=Ras family
  Pfam module annotation: Pfam domain module=Arf::GTP_EFTU::MMR _HSR1::Miro::Ras; Domain location=5-173::15-172::13-128::14-128::14 -175
MAYRADDDYDYLFKVVLIGDSGVGKSNLLSRFTRNEFSLESKSTIGVEFATRSIHVDDKVVKAQIWDTAGQERYRAITSAYYRGAVGALVVYDVTRHVTFENVERWMRELKDHTDANIVIMLVGNKADLRHLRAVPTEDAKAFAEKENAFFMETSALEAMNVEDAFTEVLTQIYRVVSKKALDIGDDPAAPPKGQTINVGGKDDVSAVKKSACCSS

SEQ ID NO: 93233 - protein, 218 aa, Setaria italica
  Transcript Sequence Number=SeqID_27259
  Gene Ontology: Mol. function=nucleotide binding; Cellular component =plasma membrane; Biological process=small GTPase mediated signal transduction
  Homolog annotation: Hit_ID=O04486; Match level="QueryCoverage=99%, HitCoverage=99%, E-value=9e-96, Identity=77%"; Hit description=Ras -related protein RABA2a
  Pfam annotation: Domain name=Arf; Domain location=13-174; Score= -67.7; E_value=0.00025; Accession=PF00025.13; Description=ADP -ribosylation factor family
  Pfam annotation: Domain name=GTP_EFTU; Domain location=16-176; Score=- 90.2; E_value=0.029; Accession=PF00009.19; Description=Elongation factor Tu GTP binding domain
  Pfam annotation: Domain name=MMR_HSR1; Domain location=14-129; Score =21.0; E_value=1.1e-05; Accession=PF01926.15; Description=GTPase of unknown function
  Pfam annotation: Domain name=Miro; Domain location=15-129; Score =75.4; E_value=2.1e-19; Accession=PF08477.5; Description=Miro-like protein
  Pfam annotation: Domain name=Ras; Domain location=15-176; Score =318.4; E_value=1.5e-92; Accession=PF00071.14; Description=Ras family
  Pfam module annotation: Pfam domain module=Arf::GTP_EFTU::MMR _HSR1::Miro::Ras; Domain location=13-174::16-176::14-129::15-129::15 -176
MAGRRAEEEYDYLFKVVLIGDSGVGKSNLLSRFTRNEFCLESKSTIGVEFATRTLHVEGKIIKAQIWDTAGQERYRAITSAYYRGALGAVLVYDVSKPTTFENISRWLKELRDHADSNIRIMLVGNKTDLRHLRAVATEHAQNFAEAEGLSYIETSALEATNVEEAFQLILGDIYRAISKKPVASDESGAGAAGGVKEGKTINVAADAAAEKKQCCST

SEQ ID NO: 93234 - protein, 221 aa, Setaria italica
  Transcript Sequence Number=SeqID_27260
  Gene Ontology: Mol. function=nucleotide binding; Cellular component =plasma membrane; Biological process=small GTPase mediated signal transduction
  Homolog annotation: Hit_ID=P40393; Match level="QueryCoverage=99%, HitCoverage=99%, E-value=2e-95, Identity=78%"; Hit description=Ras -related protein RIC2
  Pfam annotation: Domain name=Arf; Domain location=10-178; Score= -66.9; E_value=0.00021; Accession=PF00025.13; Description=ADP -ribosylation factor family
  Pfam annotation: Domain name=GTP_EFTU; Domain location=20-183; Score=- 82.3; E_value=0.0064; Accession=PF00009.19; Description=Elongation factor Tu GTP binding domain
  Pfam annotation: Domain name=MMR_HSR1; Domain location=18-133; Score =4.3; E_value=0.0004; Accession=PF01926.15; Description=GTPase of unknown function
  Pfam annotation: Domain name=Miro; Domain location=19-133; Score =91.5; E_value=3e-24; Accession=PF08477.5; Description=Miro-like protein
  Pfam annotation: Domain name=Ras; Domain location=19-180; Score =324.5; E_value=2.2e-94; Accession=PF00071.14; Description=Ras family
  Pfam module annotation: Pfam domain module=Arf::GTP_EFTU::MMR _HSR1::Miro::Ras; Domain location=10-178::20-183::18-133::19-133::19 -180
MAANGGGYRAEDDYDYLFKVVLIGDSGVGKSNLLSRFTKNEFSLESKSTIGVEFATRSLQVDGKVIKAQIWDTAGQERYRAITSAYYRGAVGALLVYDVTRRATFDNVGRWLRELRDHTDQSIVVMLIGNKSDLRHLVTISTEDAKEFAEAESMYFMETSALDATNVDNAFSEVLTQIYQIVSKKTVEAPEEGAAAPGKGEKINVKDDVSAMKRVGCCSSN

SEQ ID NO: 93235 - protein, 223 aa, Setaria italica
  Transcript Sequence Number=SeqID_27261
  Gene Ontology: Mol. function=nucleotide binding; Cellular component =plasma membrane; Biological process=small GTPase mediated signal transduction
  Homolog annotation: Hit_ID=O04486; Match level="QueryCoverage=100%, HitCoverage=99%, E-value=6e-87, Identity=72%"; Hit description=Ras -related protein RABA2a
  Pfam annotation: Domain name=Arf; Domain location=8-179; Score=-63.8; E_value=0.00013; Accession=PF00025.13; Description=ADP-ribosylation factor family
  Pfam annotation: Domain name=GTP_EFTU; Domain location=21-185; Score=- 86.7; E_value=0.015; Accession=PF00009.19; Description=Elongation factor Tu GTP binding domain
  Pfam annotation: Domain name=MMR_HSR1; Domain location=19-134; Score =17.9; E_value=2.2e-05; Accession=PF01926.15; Description=GTPase of unknown function
  Pfam annotation: Domain name=Miro; Domain location=20-134; Score =94.2; E_value=4.7e-25; Accession=PF08477.5; Description=Miro-like protein
  Pfam annotation: Domain name=Ras; Domain location=20-181; Score =319.7; E_value=5.9e-93; Accession=PF00071.14; Description=Ras family
  Pfam module annotation: Pfam domain module=Arf::GTP_EFTU::MMR _HSR1::Miro::Ras; Domain location=8-179::21-185::19-134::20-134::20 -181
MARRPASWEQGGDEYDYLFKVVLIGDSGVGKSNLLSRFTKNTFALDSKSTIGVEFATRTLQVENKTIKAQIWDTAGQERYRAITSAYYRGAVGALLVYDVTKVMTFENVKRWLKELRDHADSNIVVMLIGNKIDLRHLRSVAVEDAASFAESEGLFFIETSALDATNVEKAFQTVLAEVYRVISKKPLSSEESGSGSGNIRGGQSIQVSATNSSTLTSRCCSS

SEQ ID NO: 93236 - protein, 217 aa, Setaria italica
  Transcript Sequence Number=SeqID_27262
  Gene Ontology: Mol. function=nucleotide binding; Cellular component =plasma membrane; Biological process=small GTPase mediated signal transduction
  Homolog annotation: Hit_ID=Q40723; Match level="QueryCoverage=99%, HitCoverage=99%, E-value=1e-114, Identity=92%"; Hit description=Ras -related protein RGP2
  Pfam annotation: Domain name=Arf; Domain location=2-173; Score=-70.5; E_value=0.0004; Accession=PF00025.13; Description=ADP-ribosylation factor family
  Pfam annotation: Domain name=GTP_EFTU; Domain location=15-171; Score=- 92.6; E_value=0.045; Accession=PF00009.19; Description=Elongation factor Tu GTP binding domain
  Pfam annotation: Domain name=MMR_HSR1; Domain location=13-128; Score =1.5; E_value=0.00073; Accession=PF01926.15; Description=GTPase of unknown function
  Pfam annotation: Domain name=Miro; Domain location=14-128; Score =88.3; E_value=2.7e-23; Accession=PF08477.5; Description=Miro-like protein
  Pfam annotation: Domain name=Ras; Domain location=14-175; Score =325.6; E_value=1e-94; Accession=PF00071.14; Description=Ras family
  Pfam module annotation: Pfam domain module=Arf::GTP_EFTU::MMR _HSR1::Miro::Ras; Domain location=2-173::15-171::13-128::14-128::14 -175
MGGRVDHEYSYLFKMVLIGDSGVGKSNILSRFTRNHFSLDSKSTIGVEFATKSLQMEGKTIKAQIWDTAGQERYRAITSAYYRGAVGALLVYDITKRQSFDNVHRWLRELRDHADSSIVIMMVGNKSDLTHLRAISEDEGKALAEKEGLFFLETSAMEAVNVEEAFQTIISEVYGIVNRKALAAKEVAAAAAPLPSQGKTISIDSTSGNTKRACCST

SEQ ID NO: 93237 - protein, 215 aa, Setaria italica
  Transcript Sequence Number=SeqID_27263
  Gene Ontology: Mol. function=nucleotide binding; Cellular component =plasma membrane; Biological process=small GTPase mediated signal transduction
  Homolog annotation: Hit_ID=P40393; Match level="QueryCoverage=100%, HitCoverage=99%, E-value=1e-120, Identity=98%"; Hit description=Ras -related protein RIC2
  Pfam annotation: Domain name=Arf; Domain location=1-175; Score=-75.2; E_value=0.00091; Accession=PF00025.13; Description=ADP-ribosylation factor family
  Pfam annotation: Domain name=GTP_EFTU; Domain location=17-177; Score=- 93.7; E_value=0.056; Accession=PF00009.19; Description=Elongation factor Tu GTP binding domain
  Pfam annotation: Domain name=MMR_HSR1; Domain location=15-130; Score =11.7; E_value=8.3e-05; Accession=PF01926.15; Description=GTPase of unknown function
  Pfam annotation: Domain name=Miro; Domain location=16-130; Score =88.4; E_value=2.6e-23; Accession=PF08477.5; Description=Miro-like protein
  Pfam annotation: Domain name=Ras; Domain location=16-177; Score =337.2; E_value=3.2e-98; Accession=PF00071.14; Description=Ras family
  Pfam module annotation: Pfam domain module=Arf::GTP_EFTU::MMR _HSR1::Miro::Ras; Domain location=1-175::17-177::15-130::16-130::16 -177
MAAGYRAEDDYDYLFKVVLIGDSGVGKSNLLSRFTRNEFSLESKSTIGVEFATRSLQVDGKVVKAQIWDTAGQERYRAITSAYYRGAVGALLVYDVTRHSTFENVERWLKELRDHTDPNIVVMLVGNKSDLRHLVAVQTDEGKAFAERESLYFMETSALESTNVENAFAEVLTQIYRIVSKRAVEGGEDAVSGPGKGEKINIKDDVSAVKKGGCC

SEQ ID NO: 93238 - protein, 113 aa, Setaria italica
  Transcript Sequence Number=SeqID_27264
  Gene Ontology: Mol. function=protein serine/threonine kinase activity; Biological process=protein amino acid phosphorylation
  Homolog annotation: Hit_ID=B9ST85; Match level="QueryCoverage=98%, HitCoverage=9%, E-value=1e-12, Identity=42%"; Hit description =Serine/threonine-protein kinase bri1, putative
TSGQLITFPASRFENNSGLCGIPLNPCMHNASTGDSSQHSPSGRRKFLEEFVLLAVALLVLIMATLVIIYKLRRPRGSKTEEIQTGYSDSLPSSTSISWKLSGSREPLSINLA

SEQ ID NO: 93239 - protein, 54 aa, Setaria italica
  Transcript Sequence Number=SeqID_27265
MVDLTRARSLLAAGVLLVGLVGVAVLAAGDDEQFVYSGFTGVPLALDGTAVITS

SEQ ID NO: 93240 - protein, 81 aa, Setaria italica
  Transcript Sequence Number=SeqID_27266
  Pfam annotation: Domain name=CHCH; Domain location=15-56; Score=15.4; E_value=0.047; Accession=PF06747.5; Description=CHCH domain
MGRKAGALYINPKKFGAVAKPCMVEMVAFLNCLALNKQEDDKCVRQKDLLVMCTQTQKGKPKNAAKTINYHLQRLGRDKFL

SEQ ID NO: 93241 - protein, 81 aa, Setaria italica
  Transcript Sequence Number=SeqID_27267
MGRKAGALYINPKKFGAVAKPCMVEMVAFLNCLALNKQEDDKCVRQKDLLVMRTQTQKGKPKNAAKTINYHLQRLGRDKFL

SEQ ID NO: 93242 - protein, 69 aa, Setaria italica
  Transcript Sequence Number=SeqID_27268
  Gene Ontology: Mol. function=transferase activity, transferring glycosyl groups
  Homolog annotation: Hit_ID=B9I693; Match level="QueryCoverage=82%, HitCoverage=10%, E-value=2e-11, Identity=56%"; Hit description =Glycosyltransferase, CAZy family GT8
LLRQRSYLEGITDALNMTDEMLSARSFSRQIMDQIYLAKTYIAASKEANNLQFAAELSAQVRRAQSILA

SEQ ID NO: 93243 - protein, 68 aa, Setaria italica
  Transcript Sequence Number=SeqID_27269
  Pfam annotation: Domain name=3HCDH_N; Domain location=9-68; Score= -96.5; E_value=0.035; Accession=PF02737.10; Description=3-hydroxyacyl- CoA dehydrogenase, NAD binding domain
MATASEIAAVGVIGAGQMGSGIAQLAAAAGCAVLLLDADPAALSRAVASISSSLRRLAAKGHLSQPRD

SEQ ID NO: 93244 - protein, 50 aa, Setaria italica
  Transcript Sequence Number=SeqID_27270
  Subcellular localization annotation: CTP_CleavageSite=35; ConfidenceScore=5.17e-01
RRPPSLRPIGSPPTHPAWRPTPPPALTRPGPAPVRLSAAAQAAAIQPSSP

SEQ ID NO: 93245 - protein, 117 aa, Setaria italica
  misc_feature (55)..(55): Xaa can be any naturally occurring amino acid
  Transcript Sequence Number=SeqID_27271
  Gene Ontology: Mol. function=electron carrier activity; Biological process=metabolic process
  Homolog annotation: Hit_ID=Q6YU31; Match level="QueryCoverage=97%, HitCoverage=27%, E-value=2e-27, Identity=58%"; Hit description =Putative monooxygenase 1
LEKLQDCPAEIAEMVRRCDPAETKTLTKVRYRPPWQVMLGRFQRGTVTVAGDAMXAPFFGQGGSATLEDAVVLARSLSRSVPDGVVDGSTSNRELEEKQIRSALGKYVRERRPRLFL

SEQ ID NO: 93246 - protein, 58 aa, Setaria italica
  Transcript Sequence Number=SeqID_27272
LTVMYFCIWRWMARAQCDSCLACVLPRLCEYGHVDFIPVVETGHKTAQKPNVAVPKVH

SEQ ID NO: 93247 - protein, 84 aa, Setaria italica
  Transcript Sequence Number=SeqID_27273
  Gene Ontology: Mol. function=metal ion binding
  Homolog annotation: Hit_ID=Q7XQ90; Match level="QueryCoverage=100%, HitCoverage=1%, E-value=2e-41, Identity=91%"; Hit description =OSJNBa0018M05.18 protein
  Pfam annotation: Domain name=zf-C3HC4; Domain location=35-71; Score =6.0; E_value=0.021; Accession=PF00097.17; Description=Zinc finger, C3HC4 type (RING finger)
LQDQLKESQVALLVEQEKAEAAIREADVAKAAWSCRICLNAEVNMTIVPCVPCGHVLCNRCSSSVSRCPFCRTQVSRMMKIFRP

SEQ ID NO: 93248 - protein, 1296 aa, Setaria italica
  misc_feature (25)..(25): Xaa can be any naturally occurring amino acid
  misc_feature (514)..(514): Xaa can be any naturally occurring amino acid
  Transcript Sequence Number=SeqID_27274
  Gene Ontology: Mol. function=metal ion binding
  Homolog annotation: Hit_ID=Q7XQ90; Match level="QueryCoverage=100%, HitCoverage=26%, E-value=0.0, Identity=76%"; Hit description =OSJNBa0018M05.18 protein
  Pfam annotation: Domain name=zf-C3HC4; Domain location=1250-1283; Score=23.0; E_value=0.00024; Accession=PF00097.17; Description=Zinc finger, C3HC4 type (RING finger)
YDFGRGVVEDISKTKWPTIHRSQAXENNVLSSIIAELKGVPFPTSRKCLTRLGISELWIANEEQQLLMSPLLDHFIHYKCLEKPFLALLLSTLVIHGPLKLRSFSPQLLAGNLKHILDERWVHFALNNKSSWIPWDNNAEPSTAWPTPKWIRSFWTIFSSLNGDLSLLSDWPLIPAYLDKPVLCCVKECHLIFVPPIDDSNTVTGPVNDVSGQLDTSDPPRDDAREAEQKNVLDTAFESMNSKFPWLPALLNQLNVPIFDSSFPECGAICNLFPSNSRTLGQTIVFKLVAAKNVAHLPSPLSLSSGDCDKLFGLFVSEFRLASNHLYQREELDVLRTLPIYKTVTGKYTSLLGSNHCILSPSAFFHPSDDRCLSCSSDATLFLQALGVEQLSDHEILVKFALPGFGNKTAQEQDAILTYLYANWKDLHLNSAVVETLKETNFVANANESCKEFFKPKELLDPSDALLTSVFSGERNKFPAERFMSDAWLGILRKAGLRTSTEADMIVQCATKIXETMGHDVISSSEDPDDFVADFSDSKNEIPFEIWALAESVLNVIFANFATLYDSSFCEKIGKIAFVPAERGFPSIGGKRGGRRVLASYNEAILSKDWPLAWSSAPILTKQTAVPPEYSWGAFRLGSPPAFSTVFRHLQIVGRGNGEDTLAHWPTSSGIMTVEDAFQRILQYLDKIWGTISFSEKKELEKLAFIPVANGTRLVPVKSLFARLTINMSPFAFELPSRYLPFVSLLREIGMQESLTDSYARELLLDIQKACGYQRLNPNELRAVMEILDFMCSGINQNTTDRSDGIIDSVIPDDGCRLVTASSCVYVDPYGSHLLSNVNTSRLRFSHPDLSQNICKTLGIKKLSDVIVEELDEKEGIKLVNSIHSVTLGRIKEKLRSKSLQDALRIVMISIANHFPSFEALTLVQIELILEDISQNLQLVQCIHTRFLLLPSLQDVTKTVQHPSIPEWSSNGMHRSICFVNKSTGYILVAEPPSFLTIYDVIAIVVSHRLGAPVILPIASLFACPDGSEKEVLKILHLGTDIGVSKREGGYDASLGAELLSQDARQVQFLPLRPFYTGEIVAWKTGKEGERLRYGRVPEDVRPSAGQALYRFPVETAPGETRMLLSSQVYSFKSVSMADLSSTPFQVDGDRVAQGGLEDLLSINTSTEVTEDLAAGLEYGKVSSTELVQAVHDMLSAAGVRMDAEKETLLQTTLSLQDQLKESQVALLVEQEKAEAAIREADVAKAAWSCRICLNAEVNMTIVPCGHVLCNRCSSSVSRCPFCRTQVSRMMKIFRP

SEQ ID NO: 93249 - protein, 71 aa, Setaria italica
  Transcript Sequence Number=SeqID_27275
MDRLPNGKHKGSINRAGVVVLSDSDSGSDSEGFVEELTPVHSKSNGKASSESLKTGGKGSSFSKGEASQGK

SEQ ID NO: 93250 - protein, 218 aa, Setaria italica
  Transcript Sequence Number=SeqID_27276
  Gene Ontology: Mol. function=catalytic activity; Biological process =cellular metabolic process
  Homolog annotation: Hit_ID=A2Q5H4; Match level="QueryCoverage=53%, HitCoverage=52%, E-value=1e-20, Identity=46%"; Hit description=RNA polymerase Rpb4
  Pfam annotation: Domain name=RNA_pol_III_C17; Domain location=100 -211; Score=-23.0; E_value=0.028; Accession=PF09417.2; Description =RNA polymerase III subunit C17
  Pfam annotation: Domain name=RNA_pol_Rpb4; Domain location=100-215; Score=38.2; E_value=3.4e-08; Accession=PF03874.8; Description=RNA polymerase Rpb4
  Pfam module annotation: Pfam domain module=RNA_pol_III_C17::RNA_pol _Rpb4; Domain location=100-211::100-215
LPNGKHKGSINRAGVVVLSDSDSGSDSEGFVEELTPVHSKSNGKASSESLKTGGKGSSFSKGEASQGKAYSGGKGGKGTSSNVVPTKSDAELKLELDIPPNSRMLMNCEAAELLQEIHEHMAILSEDPKIKIPESFDKAFQYAKDGNQFTTASSVKQALEPLKKCGVNDGEICMIANIGPETIEEVYALVPSLKAKRTLNEGPITEILAALANIKAAK

SEQ ID NO: 93251 - protein, 96 aa, Setaria italica
  Transcript Sequence Number=SeqID_27277
  Gene Ontology: Mol. function=hydrolase activity; Biological process =metabolic process
  Homolog annotation: Hit_ID=B6TC25; Match level="QueryCoverage=95%, HitCoverage=28%, E-value=8e-16, Identity=45%"; Hit description =Gibberellin receptor GID1L2
AGAEPLPDGARINGAVVVHPYFLGAVRVASEETDPAMARSVVTMWRVVCPGSAGVDDPWINPLAAAAPGLRGLACGRVLVCLAEKDVVRDRGRAYA

SEQ ID NO: 93252 - protein, 50 aa, Setaria italica
  misc_feature (17)..(17): Xaa can be any naturally occurring amino acid
  Transcript Sequence Number=SeqID_27278
LALSSVTFFRTLPTTSXEKKVVLRYIKHFVSWQLSSSTILILKSMKSCFS

SEQ ID NO: 93253 - protein, 180 aa, Setaria italica
  misc_feature (50)..(50): Xaa can be any naturally occurring amino acid
  misc_feature (63)..(63): Xaa can be any naturally occurring amino acid
  Transcript Sequence Number=SeqID_27279
  Gene Ontology: Mol. function=transferase activity, transferring phosphorus-containing groups; Cellular component=membrane; Biological process=two-component signal transduction system (phosphorelay)
  Homolog annotation: Hit_ID=Q76H00; Match level="QueryCoverage=100%, HitCoverage=13%, E-value=8e-62, Identity=66%"; Hit description =Histidine kinase 2
  Pfam annotation: Domain name=Response_reg; Domain location=1-170; Score=9.3; E_value=0.00019; Accession=PF00072.16; Description =Response regulator receiver domain
NLKVAAGALKKYGAEVTCADSGKKAIALLKPPHNFDACFMDIQMPEMDGXVLSFASHHATLVXLYSVDTQYFLLSYIAYVSWRESLYHAFGTFCRFEATRRIRSMERDLNEQIERGEVLQECPNIRRWRTPILAMTADVIQATHEHCLKSEMDGYVSKPFEGEQLYSEVARFFLNQDEVQ

SEQ ID NO: 93254 - protein, 118 aa, Setaria italica
  Transcript Sequence Number=SeqID_27280
  Gene Ontology: Mol. function=transferase activity, transferring phosphorus-containing groups; Cellular component=membrane; Biological process=two-component signal transduction system (phosphorelay)
  Homolog annotation: Hit_ID=Q76H00; Match level="QueryCoverage=98%, HitCoverage=11%, E-value=1e-49, Identity=80%"; Hit description =Histidine kinase 2
  Pfam annotation: Domain name=Response_reg; Domain location=4-108; Score=6.5; E_value=0.00033; Accession=PF00072.16; Description =Response regulator receiver domain
KKEQNNEQTKLRKPTYNNFDACFMDIQMPEMDGFEATRRIRSMERDLNEQIERGEVLQECPNIRRWRTPILAMTADVIQATHEHCLKSEMDGYVSKPFEGEQLYSEVARFFLNQDEVQ

SEQ ID NO: 93255 - protein, 230 aa, Setaria italica
  misc_feature (108)..(108): Xaa can be any naturally occurring amino acid
  Transcript Sequence Number=SeqID_27281
  Gene Ontology: Mol. function=integrase activity; Biological process =DNA integration
  Pfam annotation: Domain name=ATG11; Domain location=127-227; Score =94.2; E_value=4.5e-25; Accession=PF10377.1; Description=Autophagy -related protein 11
MRTIHLRFIKKNCAHLENCLHEAREEARTNKCSADRRAVEYDALRSSALRIHGLFERLNSCVTAPGVTGFAESLRSLAVSLASSVKKDEADTTVQFQQCIKILAEKLXFLTRQSAELLDRYSAVQAAHGAIAKDLDEKKELIKNLYNKLQLEKQASKEKISFGRFEVHELAIFVRNPAGHYEAINRNCSNYYLSEESVALFTQQHPRHPAYIIGQIVHIERRIVHPDQIG

SEQ ID NO: 93256 - protein, 866 aa, Setaria italica
  misc_feature (371)..(371): Xaa can be any naturally occurring amino acid
  misc_feature (569)..(569): Xaa can be any naturally occurring amino acid
  Transcript Sequence Number=SeqID_27282
  Gene Ontology: Mol. function=integrase activity; Biological process =DNA integration
  Pfam annotation: Domain name=ATG11; Domain location=721-861; Score =152.2; E_value=1.6e-42; Accession=PF10377.1; Description=Autophagy -related protein 11
  Pfam annotation: Domain name=Tropomyosin; Domain location=529-738; Score=-109.2; E_value=0.025; Accession=PF00261.12; Description =Tropomyosin
  Pfam module annotation: Pfam domain module=ATG11::Tropomyosin; Domain location=721-861::529-738
KQFEMKVSQLKANFLELKKRVDNLFNVMSSSGCKDLEKLIKEHQGVISEQKSIMQSLSKDVDTSKKLVDDCSSCQLSASLRPHDAVSAVGRIYEVHEKDNLPRIRNFDHMLTKLLEKCRDKKNEMNTLVHVSMQRVKSTQMNIRDIMNELIAFQEGMSHQDDFANLKIVSGLGHAYRACLAEVARRKSYFKLYTGLAGTYAEKLATECETEKARREDFYRTWVKYIPDDIMGSMGLFDSPSQCDIKVTPFDRDLLPIDVDDVEKLAPQSLVGPFLKSERSQLPKSSLSNSSTSGNLNKSEQNLLSADDKMDFQDFLGDYDTIDIAGTSKLEVENARLKAELASAIATLCNLGVEYGYESIDEEQIDSVLEXAREKTAEALAAKDEFANKLKSLLTANQEKCLSYEKRIQDLEERLSNQYMQGHMVSGSKGTSGSLVSAFKCNDCNLEVSGGRQTQIRDESSVAMDEASSTSEQPSKQTEGGDENMTDISGALNLQLLDSVACTNLDAFMTELPRDNEDKIVSIDKEGQMLTQLTMADTSDVPVEDHHALELRNKELLVSELQNALDRKXKQLGETESRLSAMADEVNSLKRELEHARGLLDESQMNCAHLENCLHEAREEARTNKCSADRRAVEYDALRSSALRIHGLFERLNSCVTAPGVTGFAESLRSLAVSLASSVKKDEADTTVQFQQCIKILAEKVTFLTRQSAELLDRYSAVQAAHGAIAKDLDEKKELIKNLYNKLQLEKQASKEKISFGRFEVHELAIFVRNPAGHYEAINRNCSNYYLSEESVALFTQQHPRHPAYIIGQIVHIERRIVHPDQMGGAPRPDSSGSRRPPASTLNPYNLAPGCEYFVVTVAMLPDAVR

SEQ ID NO: 93257 - protein, 65 aa, Setaria italica
  Transcript Sequence Number=SeqID_27283
VALVPKKWQIRFDGSTKNLQGPARHGHRSSDHHHAYQEPEPYRWLTCMQLARSINLQIAATKHNY

SEQ ID NO: 93258 - protein, 128 aa, Setaria italica
  Transcript Sequence Number=SeqID_27284
  Homolog annotation: Hit_ID=B9GL79; Match level="QueryCoverage=98%, HitCoverage=27%, E-value=1e-48, Identity=72%"; Hit description =Proline transporter (Fragment)
DLTTAIVGPTVLTLPYAPRGTGWALGLTLLSAMAAVTFYEYSLMSRVLEHCEARGRRHIRFRELAADVLGSGWMFYFVVTVQTAINTGVSIGSILLAADCLEIMYRSLAPHGPLKLYHFIIIASVVLA

SEQ ID NO: 93259 - protein, 117 aa, Setaria italica
  Transcript Sequence Number=SeqID_27285
  Homolog annotation: Hit_ID=B9RCQ1; Match level="QueryCoverage=71%, HitCoverage=18%, E-value=6e-32, Identity=73%"; Hit description=Amino acid transporter, putative
SQVLLAAGTWWHAGFHLTTAIVGPTVLTLPYALRGTGWALGLTLLSAMAAVTFYEYSLMSRVLEHCEARGRRHIRFRELAADVLGTYAHPPPDLGNQNQPTESTTAIHRKSSLPNTP

SEQ ID NO: 93260 - protein, 94 aa, Setaria italica
  Transcript Sequence Number=SeqID_27286
QLLFNCSPYQNLPLNFIQMNMFISVMVRKVSLKNQAMLEFNKLPPVESVLTYQYVHEREIKNSVNMTFLHDINIYSYLTTKNDADHTLLSLCLN

SEQ ID NO: 93261 - protein, 93 aa, Setaria italica
  Transcript Sequence Number=SeqID_27287
RKQWTAFFIRIKHHLTKEQEARPCGSDIQTPCSSALLRLQLVYLPLKLSTAGSTTKWNKNQPQKPYEKNGKLAGNLHFWQNYLDCNKHLYCNK

SEQ ID NO: 93262 - protein, 114 aa, Setaria italica
  Transcript Sequence Number=SeqID_27288
  Gene Ontology: Mol. function=protein tyrosine kinase activity; Cellular component=plasma membrane; Biological process=protein amino acid phosphorylation
  Homolog annotation: Hit_ID=Q69IN5; Match level="QueryCoverage=85%, HitCoverage=26%, E-value=5e-38, Identity=81%"; Hit description =Putative Pto kinase interactor 1
LTQKSDVYSFGVVLLELLTGRKPVDHTMPRGQQSLVTWATPRLGEDKVKQCIDPRLNGEYPPKGVAKLAAVAALCVQYESEFRPSMSIVVKALSPLLANAPYQAAAATDTPSDA

SEQ ID NO: 93263 - protein, 57 aa, Setaria italica
  Transcript Sequence Number=SeqID_27289
LLDADVEIEEQSLKAPAAVNSITRLYWMVKHLSGSVYIWPLLSAIFILCLLMLIAES

SEQ ID NO: 93264 - protein, 93 aa, Setaria italica
  Transcript Sequence Number=SeqID_27290
  Gene Ontology: Mol. function=oxidoreductase activity; Biological process=oxidation reduction
  Homolog annotation: Hit_ID=Q2EFH3; Match level="QueryCoverage=75%, HitCoverage=29%, E-value=4e-29, Identity=88%"; Hit description=Short- chain dehydrogenase/reductase (Fragment)
GELGRHGVRVNCVSPGGVATPMSCALMGVGPEELEAMTVPHNVLRGKVLRAEDVAEAALFLASDQASFISGHNLVVDGATTAVNPAVLHTVGL

SEQ ID NO: 93265 - protein, 95 aa, Setaria italica
  Transcript Sequence Number=SeqID_27291
  Gene Ontology: Mol. function=protein serine/threonine kinase activity; Biological process=protein amino acid phosphorylation
  Homolog annotation: Hit_ID=Q0DCT8; Match level="QueryCoverage=100%, HitCoverage=15%, E-value=3e-28, Identity=64%"; Hit description =Protein kinase G11A
HIMLSDFDLSLRCDVSPTVVKSSNPGPDALQRNNQAYCVQPACIEPSCIQPACVAPTSCFGPRFFSSKSKSKKEKKPKPKPEIVNQVSPLPELIA

SEQ ID NO: 93266 - protein, 81 aa, Setaria italica
  Transcript Sequence Number=SeqID_27292
TCKSQYCSYPWGQAIFSKEVSLHGKSLGNSGRPSPIQFVCWYAGTCRGHHGSDAKLAFLGRTCVLPYQQFASPLIKAARNE

SEQ ID NO: 93267 - protein, 76 aa, Setaria italica
  Transcript Sequence Number=SeqID_27293
AVECFGGRPRRERPHAAGDAPIQSLGTPVNRFRLILSIPLRGARHLPSWCGRRRCRSWRWGETVVAGPRRWSSGDP

SEQ ID NO: 93268 - protein, 151 aa, Setaria italica
  Transcript Sequence Number=SeqID_27294
  Gene Ontology: Mol. function=electron carrier activity; Biological process=electron transport chain
  Homolog annotation: Hit_ID=B6T8E0; Match level="QueryCoverage=85%, HitCoverage=67%, E-value=3e-54, Identity=82%"; Hit description=Blue copper protein
  Pfam annotation: Domain name=Cu_bind_like; Domain location=58-138; Score=108.6; E_value=2.1e-29; Accession=PF02298.9; Description =Plastocyanin-like domain
  Subcellular localization annotation: CTP_CleavageSite=44; ConfidenceScore=5.30e-01
MSSQPLHRKHISGWVHSPSSSMAGARVALALCGVLLFVHGVARRAEATSYNVGNSAGWDLSADLPSWANGKTFSVGDVLVFQYSRYHTLAEVDEAGFKNCSAASAFLSRSDGNTTVPLTAPGDRYFICGNELHCLGGMKLHVLVNQPAGGG

SEQ ID NO: 93269 - protein, 57 aa, Setaria italica
  Transcript Sequence Number=SeqID_27295
  Subcellular localization annotation: CTP_CleavageSite=40; ConfidenceScore=5.10e-01
LEDYLPTLLFSSHIKLDWSGFAKASNVILFLDRKRRVGSVAEARSVNTRSSYLFTGS

SEQ ID NO: 93270 - protein, 80 aa, Setaria italica
  Transcript Sequence Number=SeqID_27296
MGAVVTAVIAIAAVVLGWITIEMACKPCLETGRRAMDRALDPNYDPDSPTNTTTGSGGASANEPLLGDLSASTAPPAKAI

SEQ ID NO: 93271 - protein, 151 aa, Setaria italica
  misc_feature (43)..(43): Xaa can be any naturally occurring amino acid
  misc_feature (102)..(102): Xaa can be any naturally occurring amino acid
  misc_feature (114)..(114): Xaa can be any naturally occurring amino acid
  Transcript Sequence Number=SeqID_27297
  Gene Ontology: Mol. function=aspartate-tRNA ligase activity; Cellular component=cytoplasm; Biological process=tRNA aminoacylation for protein translation
  Homolog annotation: Hit_ID=B9S7X4; Match level="QueryCoverage=100%, HitCoverage=24%, E-value=6e-37, Identity=53%"; Hit description =Aspartyl-tRNA synthetase, putative
  Pfam annotation: Domain name=tRNA_anti; Domain location=1-71; Score =33.2; E_value=1e-06; Accession=PF01336.17; Description=OB-fold nucleic acid binding domain
GLTFLTLRDSSGMVQVTTLPEYPEVYNIVNKLRVESVIAVEGXVRPRPADAINADMKTGAIEVAADRVLVLNSVTCSLPFPVTTAETVKEKFPEEIRLRFRXPQMQSNLRLRHXMLLKLIRRYLEDEHDLLSFTSLHQKGARDYRVPSRVQ

SEQ ID NO: 93272 - protein, 179 aa, Setaria italica
  misc_feature (116)..(116): Xaa can be any naturally occurring amino acid
  misc_feature (124)..(124): Xaa can be any naturally occurring amino acid
  Transcript Sequence Number=SeqID_27298
  Gene Ontology: Mol. function=aspartate-tRNA ligase activity; Cellular component=cytoplasm; Biological process=tRNA aminoacylation for protein translation
  Homolog annotation: Hit_ID=Q5ZD71; Match level="QueryCoverage=99%, HitCoverage=29%, E-value=1e-79, Identity=80%"; Hit description =Putative aspartyl-tRNA synthetase
  Pfam annotation: Domain name=GAD; Domain location=16-115; Score=82.2; E_value=1.9e-21; Accession=PF02938.6; Description=GAD domain
LKYVSGAFLGSSFKVFADTLENGGIIKALCVPGGATVFSNTDLKKGTVYTEASKAGAKGLPFLKVMENGDLEGIGPLVSSMKPEKKEQLVELLDAKAGDLILFALGEQSSANRIVXRVYHFQLXALELIDTSTNSVLWVTDFPMFEWNSDEQRYEALHHPATAQNGQTMNDLPSARMLV

SEQ ID NO: 93273 - protein, 103 aa, Setaria italica
  misc_feature (12)..(12): Xaa can be any naturally occurring amino acid
  Transcript Sequence Number=SeqID_27299
  Gene Ontology: Mol. function=aspartate-tRNA ligase activity; Cellular component=cytoplasm; Biological process=tRNA aminoacylation for protein translation
  Homolog annotation: Hit_ID=Q5ZD71; Match level="QueryCoverage=96%, HitCoverage=16%, E-value=3e-47, Identity=91%"; Hit description =Putative aspartyl-tRNA synthetase
  Pfam annotation: Domain name=tRNA-synt_2; Domain location=1-77; Score= -190.9; E_value=0.038; Accession=PF00152.12; Description=tRNA synthetases class II (D, K and N)
IGGGSLRIYKSXVQQRIFEIIGISPEQAEEKFGYLLESFDMGAPPHGGIAYGLDRLVMLLAGESSIRDVIAFPKTTTARCALTKAPSAVDPQELKDLAFPKST

SEQ ID NO: 93274 - protein, 189 aa, Setaria italica
  Transcript Sequence Number=SeqID_27300
  Gene Ontology: Mol. function=aspartate-tRNA ligase activity; Cellular component=cytoplasm; Biological process=tRNA aminoacylation for protein translation
  Homolog annotation: Hit_ID=Q5ZD71; Match level="QueryCoverage=97%, HitCoverage=30%, E-value=1e-98, Identity=92%"; Hit description =Putative aspartyl-tRNA synthetase
  Pfam annotation: Domain name=tRNA-synt_2; Domain location=1-162; Score=54.2; E_value=1.6e-14; Accession=PF00152.12; Description=tRNA synthetases class II (D, K and N)
ALGEQSSANRILGWLRLFIAHKLEVIDTSTNSVLWVTDFPMFEWNSDEQRYEALHHPFTAPNPKDMNDLPSARALAYDMIYNGVEIGGGSLRIYKSDVQQRIFEIIGISPEQAEEKFGYLLESFDMGAPPHGGIAYGLDRLVMLLAGESSIRDVIAFPKTTTARCALTKAPSAVDPQELKDLAFPKPTS

SEQ ID NO: 93275 - protein, 74 aa, Setaria italica
  Transcript Sequence Number=SeqID_27301
GLANSNCTGPNFRTVGICCNQLTLACNIRNILSGGMSSICLLLVCVPYHNMLGLHVQTLKTDFNNGGYSSGKMS

SEQ ID NO: 93276 - protein, 475 aa, Setaria italica
  misc_feature (398)..(398): Xaa can be any naturally occurring amino acid
  misc_feature (467)..(467): Xaa can be any naturally occurring amino acid
  Transcript Sequence Number=SeqID_27302
  Gene Ontology: Mol. function=aspartate-tRNA ligase activity; Cellular component=cytoplasm; Biological process=tRNA aminoacylation for protein translation
  Homolog annotation: Hit_ID=Q5ZD71; Match level="QueryCoverage=97%, HitCoverage=66%, E-value=0.0, Identity=73%"; Hit description =Putative aspartyl-tRNA synthetase
  Pfam annotation: Domain name=GAD; Domain location=338-428; Score =63.9; E_value=5.9e-16; Accession=PF02938.6; Description=GAD domain
  Pfam annotation: Domain name=tRNA-synt_2; Domain location=146-475; Score=325.0; E_value=1.5e-94; Accession=PF00152.12; Description=tRNA synthetases class II (D, K and N)
  Pfam annotation: Domain name=tRNA-synt_2b; Domain location=169-325; Score=-43.8; E_value=0.016; Accession=PF00587.17; Description=tRNA synthetase class II core domain (G, H, P, S and T)
  Pfam annotation: Domain name=tRNA_anti; Domain location=40-124; Score= 83.5; E_value=7.6e-22; Accession=PF01336.17; Description=OB-fold nucleic acid binding domain
  Pfam module annotation: Pfam domain module=GAD::tRNA-synt_2::tRNA -synt_2b::tRNA_anti; Domain location=338-428::146-475::169-325::40-124
EEAAAPAEAGAKVERLQPLQWPPRDALCGELGAGDAGRRVRLCGWVALRRVHAGLTFLTLRDRSGMVQVTTLPEYPEVYNIVNKLRVESVVAVEGVVRPRPADAINADMKTGAIEVAADRVLVLNSVTRSLPFPVTTAETVKEKFPEEIRLRFRVLDLRRPQMQSNLRLRHNVVKLIRRYLEDEHEFVEIETPVLSKSTPEGARDYLVPSRVQPGTFYALPQSPQLFKQMLMVSGFEKYYQIARCFQDEDLRADRQPEFTQLDMEIAFTSMEDMLKLNEDLMRHVFQVAGGIKLPNPFPRLTYAEAMDRYGTDRPDLRFDWELKDVSDAFLGTSFKVFADTLENGRIIKALRVPGGATVFSNTDLKKGTVYTEASKAGAKGLPFLKVMENGELEGRKXKEQLVELPDAKAGDLILFALGDRSSTNRILGRLRLFIAHKLEVIDTSAHSVLWVTDFPMFEWNSDEQRXEALHHPFT

SEQ ID NO: 93277 - protein, 59 aa, Setaria italica
  Transcript Sequence Number=SeqID_27303
LQIPKERRITRKSDNVPEFQKPMKAYNLEITAPVIFHNLQSCNIELRTHHLKFLTDYQG

SEQ ID NO: 93278 - protein, 117 aa, Setaria italica
  Transcript Sequence Number=SeqID_27304
  Gene Ontology: Mol. function=nucleic acid binding
  Homolog annotation: Hit_ID=B9S4G9; Match level="QueryCoverage=100%, HitCoverage=7%, E-value=1e-16, Identity=41%"; Hit description=Snf2 histone linker phd ring helicase, putative
EGQRYCPKCYDGSGSLCIQCELDELFQRYEARLFLVKKSNNDSVIDSVEEAQDLQRRKYELNHFFRNKNSNEGSEPGYDNNNPRSARENVQVYRHPSQTETTLGVIRNHSKTVLGRQ

SEQ ID NO: 93279 - protein, 52 aa, Setaria italica
  Transcript Sequence Number=SeqID_27305
EKPAAAKILCGASLVRGWNIQEHVVGMVVKLLSASLPSDSSISTTGSMNHYL

SEQ ID NO: 93280 - protein, 49 aa, Setaria italica
  Transcript Sequence Number=SeqID_27306
  Gene Ontology: Mol. function=electron carrier activity; Biological process=oxidation reduction
  Homolog annotation: Hit_ID=B6SXS5; Match level="QueryCoverage=100%, HitCoverage=9%, E-value=7e-18, Identity=89%"; Hit description =Cytochrome P450 CYP72A123
NFALLEAKMALSMILQSFEFELAPSYTHAPHTVIMLRPMHGAQIKLRAI

SEQ ID NO: 93281 - protein, 182 aa, Setaria italica
  Transcript Sequence Number=SeqID_27307
  Gene Ontology: Mol. function=hydrolase activity; Cellular component =mitochondrion; Biological process=tRNA splicing
  Homolog annotation: Hit_ID=A7WPK6; Match level="QueryCoverage=62%, HitCoverage=14%, E-value=4e-34, Identity=67%"; Hit description =Putative hydrolase
RAEGNDGGKRGSMELKTRKLNPVNTTCYVQILGTGMDTQDTSPSILLFFDKQRFIFNAGEGLQRFCTEHKIKLSKIDHIFLTRVCSETAGGLPGLVLTLAGIGDEGMSVNIWGPSDLDFLAGAMRSFIPNRAMLHTHSFGAERSASSSQPKDSVIILDDEVVRISAMFVKPKYHNGAGSLND

SEQ ID NO: 93282 - protein, 348 aa, Setaria italica
  misc_feature (294)..(294): Xaa can be any naturally occurring amino acid
  Transcript Sequence Number=SeqID_27308
  Gene Ontology: Mol. function=UDP-glucose 4-epimerase activity; Cellular component=integral to membrane; Biological process =galactose metabolic process
  Homolog annotation: Hit_ID=Q8H930; Match level="QueryCoverage=100%, HitCoverage=82%, E-value=0.0, Identity=94%"; Hit description =Probable UDP-arabinose 4-epimerase 1
  Pfam annotation: Domain name=3Beta_HSD; Domain location=2-261; Score=- 81.5; E_value=5.5e-05; Accession=PF01073.11; Description=3-beta hydroxysteroid dehydrogenaseisomerase family
  Pfam annotation: Domain name=Epimerase; Domain location=1-264; Score =228.8; E_value=1.3e-65; Accession=PF01370.13; Description=NAD dependent epimerasedehydratase family
  Pfam annotation: Domain name=NAD_binding_4; Domain location=3-246; Score=-59.9; E_value=3.3e-05; Accession=PF07993.4; Description=Male sterility protein
  Pfam annotation: Domain name=Polysacc_synt_2; Domain location=1-283; Score=-173.0; E_value=0.0046; Accession=PF02719.7; Description =Polysaccharide biosynthesis protein
  Pfam annotation: Domain name=RmlD_sub_bind; Domain location=1-280; Score=-183.0; E_value=0.049; Accession=PF04321.9; Description=RmlD substrate binding domain
  Pfam annotation: Domain name=adh_short; Domain location=1-130; Score=- 43.1; E_value=0.0094; Accession=PF00106.17; Description=short chain dehydrogenase
  Pfam module annotation: Pfam domain module=3Beta_HSD::Epimerase::NAD _binding_4::Polysacc_synt_2::RmlD_sub_bind::adh_short; Domain location=2-261::1-264::3-246::1-283::1-280::1-130
VLVTGGAGYIGSHAALRLLKDSFRVTIVDNLSRGNIGAIKVLQNLFPEPGRLQFIQADLGDPKAVNRIFAENAFDAVMHFAAVAYVGESTLEPLRYYHNITANTLVVLEAMATHSVKTLIYSSTCATYGEPEKMPITEETPQFPINPYGKAKKMAEDIILDFSKSKKADMAVMILRYFNVIGSDPEGRLGEAPRPELREHGRISGACFDAALGIIPGLKVKGSDYETPDGTCVRDYIDVTDLVDAHVKALNKAERGRVGIYNVGTGKGRSVKEFVEACKKATGVDIKVDYFPRXRPGDYAEVYSDPAKINRELNWTAQHTDLHESLKVAWTWQKAHRSGYEPPQAMIL

SEQ ID NO: 93283 - protein, 116 aa, Setaria italica
  Transcript Sequence Number=SeqID_27309
  Subcellular localization annotation: CTP_CleavageSite=74; ConfidenceScore=5.61e-01
RIKDILTIHRSPRPGPAPHPTQPLRNGTRIRKQNASVNLPASANLPAPPVPPLLASSSSSSPSSSRAPPRPAAAAAAVTQTLAAFLPLPFTRRHPRSHPLARLPQIAAHGALVPPS

SEQ ID NO: 93284 - protein, 120 aa, Setaria italica
  misc_feature (16)..(16): Xaa can be any naturally occurring amino acid
  Transcript Sequence Number=SeqID_27310
  Gene Ontology: Mol. function=zinc ion binding; Cellular component =nucleus; Biological process=regulation of transcription, DNA -dependent
  Homolog annotation: Hit_ID=Q2QWZ2; Match level="QueryCoverage=100%, HitCoverage=14%, E-value=3e-50, Identity=78%"; Hit description=SWIRM domain containing protein, expressed
  Pfam annotation: Domain name=SWIRM; Domain location=2-93; Score=74.2; E_value=4.7e-19; Accession=PF04433.9; Description=SWIRM domain
LHVVPKHSDWFSPGTXVHRLERQVVPHFFTGKSPGHTPEKYAMLRNKVIAKYLENPGKRLAFAECQGLVGNTGELYDLSRIVRFLDTWGIINYLAAGSVHRGLRMATSLLREEPSGELQL

SEQ ID NO: 93285 - protein, 681 aa, Setaria italica
  Transcript Sequence Number=SeqID_27311
  Gene Ontology: Mol. function=zinc ion binding; Cellular component =nucleus; Biological process=regulation of transcription, DNA -dependent
  Homolog annotation: Hit_ID=Q2QWZ2; Match level="QueryCoverage=89%, HitCoverage=78%, E-value=0.0, Identity=57%"; Hit description=SWIRM domain containing protein, expressed
  Pfam annotation: Domain name=Myb_DNA-binding; Domain location=315 -360; Score=47.7; E_value=4.5e-11; Accession=PF00249.23; Description =Myb-like DNA-binding domain
  Pfam annotation: Domain name=SWIRM; Domain location=108-185; Score =30.8; E_value=5.5e-06; Accession=PF04433.9; Description=SWIRM domain
  Pfam module annotation: Pfam domain module=Myb_DNA-binding::SWIRM; Domain location=315-360::108-185
HREAEVLPTAEPISAFPAAKRRVVNRPHQSVLALIAAERSAYSGDITAAAPPPVLENISHGQLQVLSGVLPDHPSLTTDPNKTSLYVCTPPPLMEGHGVPKQFHGRLHVVPKHSDWFSPGTVHRLERQVVPHFFTGKSPGHTPEKYAMLRNKVIAKYLENPGKRLAFAECQGLVGNTVHRGLRMATSLLREEPSGELQLLTAPLKSIDGLVLFDRPKCSLQAEDISSMASSSSNSELVDFDAAFADLDGKIRERLSESSCSYCLQPLPSLHYRSQKEADIALCSDCFHDARYITGHSSLDFQRVDGDNDGLENDSDKWTDEETLLLLEGIEKYNDNWDDIAGHVGTKSKAQCIYHFIRLPVEDGLLENVEVSNGSMPFRAQSNGFPHLDSNGSTSGIPVQSFRHGNELPFINSSNPVMSLVAFLASVIGPRVAASCAHAALSFLTRDDDPRLSSEGMHADGRGNGANPIFHNHNGASPAISPENVKHAAMCGLSAAAMKSKLFADQEEREVQRLAATVINHQLKRLELKLKQFAEVETLLLKECEQVERVRQRISADRARMRSAMLGSTGMPGSSSTMPSNPVSMSPRPVGVPGSMPQASMPTAYANNMQGHGHPQMPQMSFMHQRPQMLSFGPRLPLSAIQTQPSPQASNIMFNSGMPSSVTPNHHQLLRSSSGNNSSAG

SEQ ID NO: 93286 - protein, 39 aa, Setaria italica
  Transcript Sequence Number=SeqID_27312
  Gene Ontology: Mol. function=sequence-specific DNA binding; Cellular component=nucleus; Biological process=regulation of transcription, DNA-dependent
  Homolog annotation: Hit_ID=B6SMI9; Match level="QueryCoverage=100%, HitCoverage=18%, E-value=7e-15, Identity=94%"; Hit description =WRKY55-superfamily of TFs having WRKY and zinc finger domains
MSPAPSSHQSQMNSRKEKRMRKVDTFAPHNDGHQWRKYG

SEQ ID NO: 93287 - protein, 159 aa, Setaria italica
  Transcript Sequence Number=SeqID_27313
  Gene Ontology: Mol. function=sequence-specific DNA binding; Cellular component=nucleus; Biological process=regulation of transcription, DNA-dependent
  Homolog annotation: Hit_ID=B6SMI9; Match level="QueryCoverage=100%, HitCoverage=72%, E-value=8e-65, Identity=77%"; Hit description =WRKY55-superfamily of TFs having WRKY and zinc finger domains
  Pfam annotation: Domain name=WRKY; Domain location=29-92; Score=79.4; E_value=1.3e-20; Accession=PF03106.7; Description=WRKY DNA -binding domain
MSPAPSSHQSQMNSRKEKRMRKVDTFAPHNDGHQWRKYGEKKINNTNFPRYYYRCTYKDNMNCPATKQVQQKDHSDPPLYAVTYYNEHSCNSAFLPLSPSEFQLQTSSGKAVSICFDSSSGPAAQEPPSAAAAAATNASGGSPSSSAAARRGTPPEISN

SEQ ID NO: 93288 - protein, 103 aa, Setaria italica
  Transcript Sequence Number=SeqID_27314
  Homolog annotation: Hit_ID=Q9ZNV6; Match level="QueryCoverage=100%, HitCoverage=8%, E-value=6e-37, Identity=68%"; Hit description=Pib
QYINAGQISDYVTLEKDSLTRRCLWGARQCATCCVPLLRDIDGPLHKALTRRDACTFACCVLFPAVMTGVHEERGAMVPRGTRKLKELHTLREVNVGRGNAVL

SEQ ID NO: 93289 - protein, 51 aa, Setaria italica
  Transcript Sequence Number=SeqID_27315
FFFFFITRLKCLRGFKIKQYELHRFDVQIELVLRMVALLCLSSLNAQWRIK

SEQ ID NO: 93290 - protein, 167 aa, Setaria italica
  Transcript Sequence Number=SeqID_27316
LIIVSTDADDLLVLRSDSGVVVVAPGREGLSGASAEDQLVVDHGGGGADERADPEHPVILPGLPLVVHHGRPQAPGRVDAGAGDGDGGQVHHEHREPDGQRRQHRDVRVPDLALGVGGREHGVDEDEGADDLGGQPGPLGVAGGELVGAAAVAQVAAGAVEGPDESR

SEQ ID NO: 93291 - protein, 97 aa, Setaria italica
  Transcript Sequence Number=SeqID_27317
  Gene Ontology: Cellular component=extracellular region; Biological process=response to biotic stimulus
  Homolog annotation: Hit_ID=Q40035; Match level="QueryCoverage=96%, HitCoverage=54%, E-value=3e-37, Identity=76%"; Hit description=Type -1 pathogenesis-related protein
AIRENIFWGSAGRAWSAADAVRSWVEEKRYYHLSTNTCDPGKVCGHYTQVVWRRSTRIGCARVVCAANRGVFIVCSYDPPGNINGQRPFLTLDAAAK

SEQ ID NO: 93292 - protein, 202 aa, Setaria italica
  misc_feature (103)..(103): Xaa can be any naturally occurring amino acid
  misc_feature (171)..(171): Xaa can be any naturally occurring amino acid
  Transcript Sequence Number=SeqID_27318
  Gene Ontology: Mol. function=chromatin binding; Cellular component =chromatin
  Homolog annotation: Hit_ID=B6TVX0; Match level="QueryCoverage=91%, HitCoverage=89%, E-value=3e-33, Identity=52%"; Hit description =SAUR11-auxin-responsive SAUR family member
  Pfam annotation: Domain name=Auxin_inducible; Domain location=122 -190; Score=118.6; E_value=2e-32; Accession=PF02519.6; Description =Auxin responsive protein
MLTRRHGGFRLGRKLLSVWRWALCRRRRRRGRGYLRLQPFQAAGGANSKRSPLAAAAVCAKKQQHEQQFVVQRDDNDASSPRMLTWGRSLARRMRLQLRRRGXGGAKDRLLEDAAAEATTPKGQVAVYVGGAEPGGESMRYVVPVVYFNHPLFGELLREAEEEFGFEHPGXGITIPCAASRFERAAAVAAAGGGGKKVPGWW

SEQ ID NO: 93293 - protein, 132 aa, Setaria italica
  Transcript Sequence Number=SeqID_27319
PFRLRTDERGVQKEAKPEKRQPFAENNSMAVLKDANRGVMPTDKYNRGKGRDKPLCGEKQKQSTQMAMGQLGEAKPGFNSIRCNNARPVMTKRKVVEKSERVSRVASSARTTKTASGLMAPTQIGKGRKTSV

SEQ ID NO: 93294 - protein, 65 aa, Setaria italica
  Transcript Sequence Number=SeqID_27320
  Homolog annotation: Hit_ID=Q2HTU1; Match level="QueryCoverage=100%, HitCoverage=7%, E-value=4e-11, Identity=46%"; Hit description =Tetratricopeptide-like helical
  Pfam annotation: Domain name=PPR; Domain location=26-60; Score=20.4; E_value=0.0074; Accession=PF01535.12; Description=PPR repeat
VRNGKIGEAQELLREMTHEGIQPNSYTYNIIVSGLCKEGKAFDVRRVEDFIRSGVMTPDVVTYTS

SEQ ID NO: 93295 - protein, 202 aa, Setaria italica
  Transcript Sequence Number=SeqID_27321
CSSIAKAAAAAAKEEKGEKGETDKEENEASKKAGGTKDKARGLRTNKTRAAPVRKAAPNQKTEDNGSDSDAPAEGTKKPGKKGGSSAVGSGAGVAKKRNAVNFLNRMKQGSAPSTERVSLLETLKLSAAAEQKKAGKGSEGKKEPAGGSGSKRGRGTPPGRRNIGRPPKRAAAPPSPPPAKRARGGGTKRGGGSEGTGMGRQ

SEQ ID NO: 93296 - protein, 243 aa, Setaria italica
  Transcript Sequence Number=SeqID_27322
  Gene Ontology: Mol. function=DNA binding; Cellular component=nucleus
  Homolog annotation: Hit_ID=B9RI61; Match level="QueryCoverage=39%, HitCoverage=13%, E-value=1e-18, Identity=47%"; Hit description=DNA binding protein, putative
  Pfam annotation: Domain name=Bromodomain; Domain location=43-129; Score=60.4; E_value=6.7e-15; Accession=PF00439.17; Description =Bromodomain
PSPSRRREREGGGGAGVEEAEAEEASASTSARAALPAAEAEALLAFLESVRTSKPGSVFERRLESQDDAKYRSTIRRHVDLETVRSKLEGGGGACYSSASEFYRDLLLLCTNALVFFPRGSPEHSAATRTRALVSKHIPASLRKDQPGTSGKAAAPASKKAKAEADVGSLLEKTAPIIVCRKRSSIAKAAAAAAKEEKGEKGETDKEENEASKKAGGTKDKALRTKKKTNNPPSPVPVFLHTQ

SEQ ID NO: 93297 - protein, 81 aa, Setaria italica
  Transcript Sequence Number=SeqID_27323
  Gene Ontology: Mol. function=indole-3-glycerol-phosphate synthase activity; Cellular component=chloroplast; Biological process =tryptophan metabolic process
  Homolog annotation: Hit_ID=B9T1U0; Match level="QueryCoverage=98%, HitCoverage=20%, E-value=7e-36, Identity=81%"; Hit description =Tryptophan biosynthesis protein, trpc, putative
HFLGSFENLETVRNSGVKCPLLCKDFVIDVWQIYYARSKGADAVLLIAAVLPDLDIKYMLRVCRSLGMTALVEVHDERELD

SEQ ID NO: 93298 - protein, 69 aa, Setaria italica
  Transcript Sequence Number=SeqID_27324
LASLLACLYNNIRIRAGSAVERRGLSSFFGRTWGQIWRRAAPELPPTCYSSSCSCLRGLGLVPSSIDKG

SEQ ID NO: 93299 - protein, 82 aa, Setaria italica
  Transcript Sequence Number=SeqID_27325
  Gene Ontology: Mol. function=DNA primase activity; Cellular component= alpha DNA polymerase:primase complex; Biological process=DNA replication, synthesis of RNA primer
  Homolog annotation: Hit_ID=B9RMC0; Match level="QueryCoverage=90%, HitCoverage=16%, E-value=4e-27, Identity=75%"; Hit description=DNA primase large subunit, putative
AAGSGGTGALPTYRAAPQLEVRLEEFELFAIDRLRVLKGISDGLSRGKRPEEMEKLVSELWKTHMRHQDPAETLNKDIISHF

SEQ ID NO: 93300 - protein, 63 aa, Setaria italica
  Transcript Sequence Number=SeqID_27326
  Subcellular localization annotation: CTP_CleavageSite=35; ConfidenceScore=5.13e-01
LLQQVSACSVLLQLLCWFSNAESSLSTISSFVMVKPSSTWSSEQLRRDGYDQSTSREEHNIGV

SEQ ID NO: 93301 - protein, 71 aa, Setaria italica
  Transcript Sequence Number=SeqID_27327
SNPCSSEPARGNMAATTCFAARTHLRALVASRDSHHHPVAIQYAPAILNPGCMPARAAAAAAAAHQHKSYY

SEQ ID NO: 93302 - protein, 178 aa, Setaria italica
  Transcript Sequence Number=SeqID_27328
  Gene Ontology: Mol. function=metal ion binding; Cellular component =intrinsic to membrane; Biological process=innate immune response
  Homolog annotation: Hit_ID=B9SJF7; Match level="QueryCoverage=100%, HitCoverage=34%, E-value=6e-80, Identity=46%"; Hit description=Ran GTPase binding protein, putative
  Pfam annotation: Domain name=RCC1; Domain location=128-177; Score =33.2; E_value=1.1e-06; Accession=PF00415.10; Description=Regulator of chromosome condensation (RCC1)
  Pfam annotation: Domain name=RCC1; Domain location=73-125; Score =28.3; E_value=3.1e-05; Accession=PF00415.10; Description=Regulator of chromosome condensation (RCC1)
  Pfam module annotation: Pfam domain module=RCC1::RCC1; Domain location=128-177::73-125
VMLDVSYVACGVKHAALVTRQAEVFTWGEECSGRLAHGVGTNVFQPRLVESLSICNVELIACGEFHTCAVTATGDLYTWGDATHNAGLLGHGSNVSHWIPRRVSGPLDGLQVSTVSCGTWHTALITSSGKLYTFGDGTFGVLGHGNRKSCSYPKEVESLKGLRTISVSCGVWHTAAVV

SEQ ID NO: 93303 - protein, 224 aa, Setaria italica
  Transcript Sequence Number=SeqID_27329
  Gene Ontology: Mol. function=protein binding
  Pfam annotation: Domain name=WW; Domain location=64-94; Score=15.4; E_ value=0.036; Accession=PF00397.18; Description=WW domain
MVSLQSALLPEANKRRPCLSLVGGAVASTATSKKRKRDGSDDDGENSRGEVVDGIELNFDAAPLPPEWQRCLDIQSGQIHYYNTRTQKRTLKDPRGEQDFRAAPADDDDDEESANCAPPGLDLELNLTFSPRRPSAPEKKKPKPASPPPAAAQRRQPAEAEDSREMVAAVCVRCHMLVMMCRASPACPNCKFLHTPSRAAPPSPPPEPETAPLKLGLQLLCCRD

SEQ ID NO: 93304 - protein, 291 aa, Setaria italica
  Transcript Sequence Number=SeqID_27330
SYNYGKLSPTLSSMIQKVKVGQQTESPKAGIADVTPDSVLTLPSSEEENREENLCNDNVISSDELGTVNTIAEHISMSNPVSNSTYQIQEDSEMITDGHENSQNGNHDPMVIDPGVDNTVEPPAKLSPACKSFVNNVDMQSHLLDQSLLKDQPSGSNCTASASSTCNVDSEPNLLDQSPGTNNVTDASQLSSAALAILLMDAEQLHQQNEVMDRETILHTPRTVDQQLQVPQGSISSLRLKRQKLFSATPLSNGKVANQEAYSLVSEFAEHGNRISTLKNALKTRLQGTPA

SEQ ID NO: 93305 - protein, 57 aa, Setaria italica
  Transcript Sequence Number=SeqID_27331
  Subcellular localization annotation: CTP_CleavageSite=27; ConfidenceScore=5.68e-01
ISPMVRSHATCPPRTSTASSSSFVHCVQYTKSSSTLPRLSSRHCPSLKTKQIKASSS

SEQ ID NO: 93306 - protein, 127 aa, Setaria italica
  Transcript Sequence Number=SeqID_27332
HGHEVVGRCANCVRLASRQCCWQLAWVESRKVIGIILQTHPSTKTCLELTGNVIVITFAKNHFGFFNFHLDCIAYDYAAVPSIISNPASIMPSTAASLTCKHPCSPAHDKKQWQQHRHWRHEPSTNS

SEQ ID NO: 93307 - protein, 230 aa, Setaria italica
  Transcript Sequence Number=SeqID_27333
  Homolog annotation: Hit_ID=Q2QZW5; Match level="QueryCoverage=76%, HitCoverage=30%, E-value=9e-09, Identity=26%"; Hit description =Retrotransposon protein, putative, Ty3-gypsy subclass, expressed
MSLSRPRRGREEEEEVEEEQGGGPAGGEGSTPAKRPRCSCPCCFRHQCSKDFYEGQIDILKKEMQCMSKGFIEERKVFQREMQEFYQNSQLQLQEQISEQNRSMELIREQLNTLISDIRTPGDHVPENSNLRTLPHQRKVRTCRLKFESKCCEDKYSGHVITADDGNPITVAIYDHDNKIIRNGPLSSLQVKIVVLDGEFNKENKEQWSRESFLNNIRVYGRTGKPPLLA

SEQ ID NO: 93308 - protein, 82 aa, Setaria italica
  misc_feature (58)..(58): Xaa can be any naturally occurring amino acid
  Transcript Sequence Number=SeqID_27334
  Gene Ontology: Mol. function=nucleic acid binding
LFWILVEGSNTLYIEGIPTGCTRREVSHIFPSISFLPLSFPTHILHGLQVRSSMIHLXSFGYWSFTFPLDIFRPFVGFREVR

SEQ ID NO: 93309 - protein, 78 aa, Setaria italica
  misc_feature (54)..(54): Xaa can be any naturally occurring amino acid
  Transcript Sequence Number=SeqID_27335
  Gene Ontology: Mol. function=nucleic acid binding
MNISFQTLYIEGIPTGCTRREVSRILKSISFLPLSFPTHILHGLQVRSSMIHLXSFGYWSFTFPLDIFRPFVGFREVR

SEQ ID NO: 93310 - protein, 63 aa, Setaria italica
  Transcript Sequence Number=SeqID_27336
  Gene Ontology: Mol. function=nucleic acid binding
  Homolog annotation: Hit_ID=B9RQ14; Match level="QueryCoverage=73%, HitCoverage=19%, E-value=3e-14, Identity=76%"; Hit description =Nucleic acid binding protein, putative
VGDPIVLCFVDFAEATQAAIAMDALQGYKFDEHDRNSSNLRLQFARFTGPRGNSGPGGPRGRR

SEQ ID NO: 93311 - protein, 219 aa, Setaria italica
  Transcript Sequence Number=SeqID_27337
  Gene Ontology: Mol. function=nucleic acid binding
  Homolog annotation: Hit_ID=B9RQ14; Match level="QueryCoverage=91%, HitCoverage=89%, E-value=4e-51, Identity=50%"; Hit description =Nucleic acid binding protein, putative
  Pfam annotation: Domain name=RRM_1; Domain location=119-192; Score =27.0; E_value=7.6e-05; Accession=PF00076.14; Description=RNA recognition motif. (a.k.a. RRM, RBD, o
GGGQQPMKRPRPTDFSDGPGAPDMTGYYPRDEERAGYRAARDTEALNASYERFLRTGQIQSYGAGPAGEPIRPAVGGNAGYPVDERSMMAARGMDSRNIGGYGGGMPEPPLPPDASNTLYIEGIPTGCTRREVSHIFRPFVGFREVRLVNKEPKHPGGDPIVLCFVDFAEATQAAIAMDALQGYKFDEHDRNSSNLRLQFARFTGPRGNSGPGGPRGRR

SEQ ID NO: 93312 - protein, 122 aa, Setaria italica
  Transcript Sequence Number=SeqID_27338
  Gene Ontology: Mol. function=hydrolase activity, hydrolyzing O -glycosyl compounds; Biological process=carbohydrate metabolic process
  Homolog annotation: Hit_ID=B6TTA1; Match level="QueryCoverage=88%, HitCoverage=20%, E-value=4e-24, Identity=54%"; Hit description =Cellulase containing protein
SLAWGAWLVVEGWIKPSLFDGIPNRDMLDGTQVQLKSVGRQKYVSTGDGGGGNVTVDRDAASSWETFKLWRISMNEFQFRCFNGQFLTASDGDAISATADSPGDSETFYIERNNTLLHIKLL

SEQ ID NO: 93313 - protein, 83 aa, Setaria italica
  Transcript Sequence Number=SeqID_27339
CISATEYNASKAPLVQRLAALGVVVDCPDAEASAEEWSEIDLQDPPPPASAAASDKPKHKAFITPWKSRSKKEQDANGASRPP

SEQ ID NO: 93314 - protein, 96 aa, Setaria italica
  Transcript Sequence Number=SeqID_27340
  Gene Ontology: Mol. function=transferase activity
  Homolog annotation: Hit_ID=Q6K7Q1; Match level="QueryCoverage=76%, HitCoverage=12%, E-value=6e-14, Identity=57%"; Hit description=UDP -glucoronosyl/UDP-glucosyl transferase family protein-like
  Pfam annotation: Domain name=PPR; Domain location=25-59; Score=13.1; E_value=0.25; Accession=PF01535.12; Description=PPR repeat
  Pfam annotation: Domain name=PPR; Domain location=60-94; Score=22.3; E_value=0.002; Accession=PF01535.12; Description=PPR repeat
  Pfam module annotation: Pfam domain module=PPR::PPR; Domain location =25-59::60-94
RDLSLRHPLSSPLLLPSLLADDGPHVPSWLLLVLSQSARPDDAVRVFDQMRARGIAPDAHALTALLTALARARMTATARRVFDEMARAGVAFNTHV

SEQ ID NO: 93315 - protein, 210 aa, Setaria italica
  misc_feature (193)..(193): Xaa can be any naturally occurring amino acid
  Transcript Sequence Number=SeqID_27341
  Gene Ontology: Mol. function=ADP-ribose diphosphatase activity; Cellular component=cytosol
  Homolog annotation: Hit_ID=B6U183; Match level="QueryCoverage=85%, HitCoverage=64%, E-value=1e-89, Identity=88%"; Hit description=Nudix hydrolase 2
MLKMLHLMISFHLGFAGAGRRRRGELVRRAMSGSTNSTVAAELTVPVEQLPFVNDKHGGVIIEMVVPMDPGVFSASLKAALAKWREQGIRGVWIKLPITLSNLITPAVEEGFWYHHAEETYLMLAYWLPNTTHTLPVNATHRVGVGAFIMNDKREVLVVQEKSGVLRGLGVWKFPTGVVEPGEDINVGAVREXKEETGIDAEFVEVLAFR

SEQ ID NO: 93316 - protein, 203 aa, Setaria italica
  Transcript Sequence Number=SeqID_27342
  Gene Ontology: Mol. function=ADP-ribose diphosphatase activity; Cellular component=cytosol
  Homolog annotation: Hit_ID=B6U183; Match level="QueryCoverage=97%, HitCoverage=68%, E-value=1e-110, Identity=96%"; Hit description =Nudix hydrolase 2
  Pfam annotation: Domain name=NUDIX; Domain location=29-159; Score =98.3; E_value=2.7e-26; Accession=PF00293.20; Description=NUDIX domain
VTNHAEETYLMLAYWLPNTTHTLPVNATHRVGVGAFIMNDKREVLVVQEKSGVLRGLGVWKFPTGVVEPGEDINVGAVREVKEETGIDAEFVEVLAFRQSHKSFFEKSDLFFVCLLRPLSYDITKQDSEIEACQWMPVEEFAAQPFVQKHELVKYILEVSLAKVDKEYAGFSPISIKSAFTDKLSLFYLNRRDLDRASGSSKQ

SEQ ID NO: 93317 - protein, 157 aa, Setaria italica
  Transcript Sequence Number=SeqID_27343
  Gene Ontology: Mol. function=nucleic acid binding; Cellular component= mitochondrial matrix; Biological process=DNA duplex unwinding
  Homolog annotation: Hit_ID=B6U1E5; Match level="QueryCoverage=99%, HitCoverage=21%, E-value=3e-63, Identity=74%"; Hit description=ATP -dependent RNA helicase SUV3
VRVLALYVPSSAFPTYVRRFRTFLLPRLSRESAAHLLSLPAEEAHALLLPAFAEFCIANFADELKQHRSVMTAADLTAPDTWYPFARAMRRKIVYHCGPTNSGKTHNALTRFAAAKSGVYCSPLRLLAMEVFDKVNALGVYCTLRTGQEVKEVPFAN

SEQ ID NO: 93318 - protein, 562 aa, Setaria italica
  misc_feature (508)..(508): Xaa can be any naturally occurring amino acid
  Transcript Sequence Number=SeqID_27344
  Gene Ontology: Mol. function=thiamin pyrophosphate binding; Cellular component=peroxisome; Biological process=fatty acid alpha-oxidation
  Homolog annotation: Hit_ID=B9SPZ1; Match level="QueryCoverage=97%, HitCoverage=94%, E-value=0.0, Identity=73%"; Hit description=2 -hydroxyphytanoyl-CoA lyase, putative
  Pfam annotation: Domain name=TPP_enzyme_C; Domain location=399-545; Score=112.2; E_value=1.7e-30; Accession=PF02775.13; Description =Thiamine pyrophosphate enzyme, C-term
  Pfam annotation: Domain name=TPP_enzyme_M; Domain location=196-324; Score=172.7; E_value=1e-48; Accession=PF00205.14; Description =Thiamine pyrophosphate enzyme, central d
  Pfam annotation: Domain name=TPP_enzyme_N; Domain location=1-167; Score=155.6; E_value=1.5e-43; Accession=PF02776.10; Description =Thiamine pyrophosphate enzyme, N-termina
  Pfam module annotation: Pfam domain module=TPP_enzyme_C::TPP_enzyme _M::TPP_enzyme_N; Domain location=399-545::196-324::1-167
  Subcellular localization annotation: CTP_CleavageSite=30; ConfidenceScore=5.19e-01
TTLAGRALAAAGARHMFGVVGIPVTSLASRAAAAGVRFLAFRNEQSAGYAAAAYGFLTGTPGLLLTVSGPGCVHGLAGVSHATANAWPLLMVSGSCDQADAGRGDFQELDQIAATKPFAKFAVKATTIADIPRLVFQALAAATSGRPGGCYLDIPSDVLHQTIPESEAADLIASAAAESAASNPSPPKQKSLDEGIEKAADLLRRAERPLVVIGKGAAYARAEEAIQKLVDTTGIPFLPTPMGKGVVPDSHPLSATAARSLAIGQCDVALVVGARLNWLLHFGEPPKWSKDVKFILVDVCEEEIELRKPHVGIVGDAKRVVELINREIKDNPFCLARSHPWVEAITKKAKDNVLKMEAQLAKDVVPFNFMTPLRIIRDAILAEGSPAPVVVSEGANTMDVGRAVLVQNEPRTRLDAGTWGTMGVGLGYCIAAAVAEPERLVVAVEGDSGFGFSAMEVETLVRYQLPVVVIVFNNNGVYGGDRRGPDEITGPYKDDPAPTSFVPAAGYXKMMEAFGGKGYLVKTPDELKSALSESFRARKPAVINCIIDPYAGAESGRMQHKN

SEQ ID NO: 93319 - protein, 103 aa, Setaria italica
  Transcript Sequence Number=SeqID_27345
  Homolog annotation: Hit_ID=B9RMF5; Match level="QueryCoverage=96%, HitCoverage=16%, E-value=4e-20, Identity=55%"; Hit description=PLE, putative
IEQQTKNISDDILKKLNMTVQQLKEEKNNRREKLQNLVKALTNLWDTLDTTMEERQPYGQIKILAMTSVNGMLGPGSLTLETIQQVESEVQRLNQLKASKMKE

SEQ ID NO: 93320 - protein, 254 aa, Setaria italica
  misc_feature (7)..(7): Xaa can be any naturally occurring amino acid
  Transcript Sequence Number=SeqID_27346
  Pfam annotation: Domain name=WD40; Domain location=153-191; Score =20.7; E_value=0.0061; Accession=PF00400.24; Description=WD domain, G- beta repeat
  Pfam annotation: Domain name=WD40; Domain location=196-234; Score =22.8; E_value=0.0014; Accession=PF00400.24; Description=WD domain, G- beta repeat
  Pfam annotation: Domain name=WD40; Domain location=32-70; Score=32.9; E_value=1.2e-06; Accession=PF00400.24; Description=WD domain, G-beta repeat
  Pfam annotation: Domain name=WD40; Domain location=74-113; Score=9.9; E_value=2.7; Accession=PF00400.24; Description=WD domain, G-beta repeat
  Pfam module annotation: Pfam domain module=WD40::WD40::WD40::WD40; Domain location=153-191::196-234::32-70::74-113
TMEFYSXNHLACGSDCDYGGSAVVQLWDIDSPESYLSFSASDSYITSLKVNPAGNTIITGSGDGTIGIFDIRTCSAINHLSVGSGCEVTSVSFSNCGTYFSASSTSNNTLVWDTRLVPINQSKDVSQSRDMRFFRPLHCLSHGNQMPTAEFTSQLPGHVDEGDQGVNATQWLHGEPVLVTVSGDGSVGMWDVTLGQPCVRHIVTHTRCANAVAVAPNDEYISTGGSDQKVVLYHNRSGRTHLNWRLSHPLQGND

SEQ ID NO: 93321 - protein, 576 aa, Setaria italica
  Transcript Sequence Number=SeqID_27347
  Homolog annotation: Hit_ID=B9RMF5; Match level="QueryCoverage=85%, HitCoverage=85%, E-value=1e-148, Identity=55%"; Hit description=PLE, putative
  Pfam annotation: Domain name=MAP65_ASE1; Domain location=21-576; Score=19.8; E_value=1.3e-08; Accession=PF03999.4; Description =Microtubule associated protein (MAP65ASE1 family)
ILRVWIPTPPSKQDLRISPITSRDNVGFINISFEQECQEVYRRKVNSANMSRIQLHQALAESEAEFTNLLLSLGERSFPGRPEKMAGTLKEQLNSITPALQEMQMRKEARVKQFMEVQTEIQRIASEIAGRLGNEAVTLNEEDLSLKKLEEFQSELQRLKREKSDRLCKVEEYKVLIHNFAKVMGMDPSKILANVHPRLLDGPNEQQTKNISDDILKKLNMTVQQLKEEKNNRREKLQNLVKALTNLWDTLDTTMEERQPYGQIKILAMTSVNGMLGPGSLTLETIQQVESEVQRLNQLKASKMKELFLKKRAEVDEICKRSHMDMPYQKEMDKIMNLIMSGDVVHDDLLKTMDEYIYKAKEEATSRKDIMDKVEKWMASCDEERWLEEYSRDERRYSISRGAHKHLKRAERARIIVNKIPGLVEQLIAKTQFWEEERNKIFYYDELPLLAMLKDYMLTLKEKEEEKYRERENKKIQTLLVKRHENTLMLRPNTSFSRPSSRGFNSHGSTSMWSSQVSAKVQLLPDSENSPAEKDMHAKRIRNRVMQSALGNNRSCSIPQEDKTSVSKVKQGLSPI

SEQ ID NO: 93322 - protein, 89 aa, Setaria italica
  misc_feature (29)..(29): Xaa can be any naturally occurring amino acid
  misc_feature (35)..(35): Xaa can be any naturally occurring amino acid
  Transcript Sequence Number=SeqID_27348
LMGSRLIFLHRRMMRWGDGSRKVVQLLEXWFLTHXKALRQIRARNSRGRDVCPCGTKQSEVVPRKASKLQSYETVPQTDTGGRDEYSKA

SEQ ID NO: 93323 - protein, 277 aa, Setaria italica
  Transcript Sequence Number=SeqID_27349
  Gene Ontology: Mol. function=sequence-specific DNA binding; Cellular component=nucleus; Biological process=regulation of transcription, DNA-dependent
  Homolog annotation: Hit_ID=B9RVT3; Match level="QueryCoverage=98%, HitCoverage=13%, E-value=3e-35, Identity=37%"; Hit description =Homeobox protein, putative
YEPPQVILPHMAAVHLTQAEHRMIDSVETLIGEPLRDDGPVLGVEFDPLPPGAFGAPIVPEQPKQPYRSYEPKMFSGRDPKPMKASAFLPTIDPLLPNTVNGKRKSLVGSSSHLGSQAVHEYQFLPEQPSDVYERASQSRFYDTSTEASNSRIASLSTGSRFLHGVEQAPSYAFHGQLSGSSHLAQHGRSPIPSGSTDHEGALSNINVSPAPFHGQFGIPQVAGFETPLASSERMGYHDEDTYRVDRKRKHNEEAKIAKEVEAHEKRSERSLRSKIC

SEQ ID NO: 93324 - protein, 479 aa, Setaria italica
  Transcript Sequence Number=SeqID_27350
  Homolog annotation: Hit_ID=Q10L59; Match level="QueryCoverage=93%, HitCoverage=30%, E-value=1e-141, Identity=59%"; Hit description=PWWP domain containing protein, expressed
  Pfam annotation: Domain name=PWWP; Domain location=20-95; Score=39.6; E_value=1.3e-08; Accession=PF00855.9; Description=PWWP domain
AGEEEAAAAAAAAAAAAAAQWKVGDLVLAKMKGFPAWPAMISEPEQWNLSPPASKKKPLVYFYGTKQIAFCNYADLEAFTEEKKRSLLAKRHGKGADFLRAVDEIIEVYDSLKDKDNNKLDLAADEVKPGVEKLAENNSCMDTENLVNSSNVHSDKKIEDYSITTRSDDMVSSDGPSVTVKGDEPCVVNSAPDEPTENVSILDEMRDIPLCTNSFSNKPRDAQPKNCYTRSRVPSLRKSRSSVSVESRKAQGSGNLSDRHKHPEDDKANSGSVSTSDNVWLHSSAGTFNQSVALGTISSNGKLNPPAKADSTCNSEASENGASETELKSNGTSILPIDPAIIFKRKRKADRKPPHYKDCTASNKDEELQAEYSEILPDSPNSKNDVNKSDGDEHLPLVKRARVRMGRSQLEDSPVDEIDVSKKPEFAITANQCDMHGTPAIPVNDYPADQVSAVVNTVSNPSSKFDMPILVRGTSSFNG

SEQ ID NO: 93325 - protein, 83 aa, Setaria italica
  Transcript Sequence Number=SeqID_27351
  Gene Ontology: Mol. function=protein binding
  Homolog annotation: Hit_ID=B6TKJ6; Match level="QueryCoverage=63%, HitCoverage=12%, E-value=2e-10, Identity=57%"; Hit description =Receptor-like protein kinase
  Subcellular localization annotation: CTP_CleavageSite=47; ConfidenceScore=5.04e-01
MASVSRRVLLALLLPVLLLAPRRAAALPAATFPGDKAALAALKSAVAASSVPPYSCLASWDFSRDPCAAFPCGIRCFSPAANA

SEQ ID NO: 93326 - protein, 262 aa, Setaria italica
  misc_feature (35)..(35): Xaa can be any naturally occurring amino acid
  Transcript Sequence Number=SeqID_27352
  Homolog annotation: Hit_ID=Q0GPH0; Match level="QueryCoverage=75%, HitCoverage=47%, E-value=5e-46, Identity=45%"; Hit description=BZIP transcription factor bZIP80 (Fragment)
  Pfam annotation: Domain name=DUF632; Domain location=1-262; Score =295.9; E_value=8.7e-86; Accession=PF04782.4; Description=Protein of unknown function (DUF632)
ATQQLPGKVLSYSKSLKPMGWDLGVVGGGGYGKGXNGFTRFGRGDGGMSMGSGGGGGMLSHSSTVEKLYAWEKKLFLEVKSYEGYKQEHDKKVSLLRKQEVKGVDYLKMEKNKMEIESLESKMLVANQSIETTTSEIIRLRESELFPQLLELVAGLMSMWRGMYECHQVQTHIVQQLEYLKARNTNPTSNVHRQAALQLEIEVDRWYSAFCSLVTSQRDYVYSLTGWLRLSLFCHHDPLTKAQNSDIYSLCEEWQLAIDRIP

SEQ ID NO: 93327 - protein, 137 aa, Setaria italica
  Transcript Sequence Number=SeqID_27353
  Gene Ontology: Mol. function=microtubule motor activity; Cellular component=microtubule associated complex; Biological process =microtubule-based movement
  Homolog annotation: Hit_ID=B6SXM5; Match level="QueryCoverage=99%, HitCoverage=17%, E-value=1e-41, Identity=66%"; Hit description=ATP binding protein
SDAVMARWLQSAGLQHLATSSAGGGDYRGGMAGLGGAGAGSMLPNLLMQGYGPQSVEEKQRLYTLLRSLNFNGESAAVSMSEPYTPTAQSFGGGNPVEGFYSPELRGDLGAGLLDLHAMDDTELLSEDVVSEPLEAS

SEQ ID NO: 93328 - protein, 202 aa, Setaria italica
  Transcript Sequence Number=SeqID_27354
  Gene Ontology: Mol. function=acid-amino acid ligase activity; Cellular component=intracellular; Biological process=ubiquitin -dependent protein catabolic process
  Homolog annotation: Hit_ID=B2RFH4; Match level="QueryCoverage=82%, HitCoverage=39%, E-value=3e-62, Identity=71%"; Hit description =Putative hect E3 ubiquitin ligase (Fragment)
VTALLNYLSCGSFGREKVPEANLPNLRHQAVRRYKAFISVALPNYEDGNRTPMALLVQKLQGALSSLEHFPVVLSHSGRVQTLGGSRLVTGLGTLSQPFKLRLCRAPGEKSLKDYSSNIVLIDPLASLAAVEEFLWPRVQRTESVSKPVLSSANNSESGAAISTAGALSIPSATQSARRASLRSKSSAATSGVINKDHRVGF

SEQ ID NO: 93329 - protein, 208 aa, Setaria italica
  Transcript Sequence Number=SeqID_27355
  Gene Ontology: Cellular component=plasma membrane
  Pfam annotation: Domain name=DUF599; Domain location=10-208; Score =178.4; E_value=2.1e-50; Accession=PF04654.4; Description=Protein of unknown function, DUF599
MEWRDSFLDLALIPLSLLLPMAYHVWLWREIRLRPLRTAAGINAAARRLWAAGMMKDNAKNAVTVVQSVRNVIMGSTLMATTAILFCTGIAAVLSSTYTVKKPLSDTVFGAHGEYMMALKYVALLLAFLFAFLCHSLAICFLNQASFLINTSGCLVADSSGSGEGGDLIGLPSARDYIGEVLERGFTLNLVGNRLFYAGVPLLLWIFG

SEQ ID NO: 93330 - protein, 82 aa, Setaria italica
  Transcript Sequence Number=SeqID_27356
  Homolog annotation: Hit_ID=Q2R047; Match level="QueryCoverage=56%, HitCoverage=5%, E-value=2e-10, Identity=70%"; Hit description=Salt -inducible protein, putative
  Pfam annotation: Domain name=PPR; Domain location=1-33; Score=19.2; E_ value=0.017; Accession=PF01535.12; Description=PPR repeat
YTSLINGYCSQGETAKAEDLLQEMMDKGMKPDALTFFSIQSENRERLKGSFIFMMYQLLCIDEWLKRSCQHKGCCVLRILPD

SEQ ID NO: 93331 - protein, 65 aa, Setaria italica
  Transcript Sequence Number=SeqID_27357
  Subcellular localization annotation: CTP_CleavageSite=44; ConfidenceScore=5.43e-01
PRSARGCGWFGPSYLVVVAVVASPAVVSQGLWTMCKGVFSTCVRSSLSKGCLTPEGQVFFKRSRA

SEQ ID NO: 93332 - protein, 104 aa, Setaria italica
  misc_feature (55)..(55): Xaa can be any naturally occurring amino acid
  Transcript Sequence Number=SeqID_27358
  Gene Ontology: Mol. function=nucleic acid binding
  Homolog annotation: Hit_ID=B6SK91; Match level="QueryCoverage=92%, HitCoverage=15%, E-value=5e-42, Identity=88%"; Hit description =Nucleic acid binding protein
FFFPFFRFTPDWGADDEELGRLKRSSSFELRSGANGDEPDLSWVNTLVKEPTPEXPFINGTTAMESIGTLSQAASHEGIGGGEDNTAGVIGSWLEQLQLDDMVV

SEQ ID NO: 93333 - protein, 69 aa, Setaria italica
  Transcript Sequence Number=SeqID_27359
MKVLMMSRRRGAGGGLRIKKNARGFMCGCGGTKAVSISDGSDKQSPMATPQTTASTTPLTTVSAATTTT

SEQ ID NO: 93334 - protein, 187 aa, Setaria italica
  Transcript Sequence Number=SeqID_27360
  Homolog annotation: Hit_ID=Q84T94; Match level="QueryCoverage=100%, HitCoverage=29%, E-value=2e-39, Identity=53%"; Hit description =Protein phosphatase 2C 35
MGNSLACFCCAGGGAAGRRRHVAPAGLPSDPAYDEGLGHSFCYVRPDKVLVPFSADDLVADAKAAAAAEEATTFRAISGAALSANVSTPLSTSVLLLLPDDSAASSAAAASSGFESSESFAAVPLQPVPRFPSGPICAPAGGGFLSGPIERGFLSGPLDAALMSGPLPGAATSGRMGGAVPALRRSL

SEQ ID NO: 93335 - protein, 73 aa, Setaria italica
  Transcript Sequence Number=SeqID_27361
LSKIFGMTYNLEWMSTKFEQIHAHESICQIFVAAKYALWATLSIVQLLVLQQDALPINVSSCTIAIESIIIFL

SEQ ID NO: 93336 - protein, 137 aa, Setaria italica
  Transcript Sequence Number=SeqID_27362
HRLYPASAGSSPSRAQAIAGYRREMLDLVRGLPESAYELSLRDIVEHPAASSSSPSPPTPPDPLPQPSNAAAAARHHHTDATAAAVQVSDEPAVAAAAVEDGKKQGRKQRTMRKQRSRSLERSVSLDTGLLIKLFLP

SEQ ID NO: 93337 - protein, 363 aa, Setaria italica
  Transcript Sequence Number=SeqID_27363
  Gene Ontology: Mol. function=phosphoprotein phosphatase activity; Biological process=actin cytoskeleton organization and biogenesis
  Homolog annotation: Hit_ID=Q6K8Z4; Match level="QueryCoverage=96%, HitCoverage=25%, E-value=0.0, Identity=91%"; Hit description=Formin -like protein 7
  Pfam annotation: Domain name=FH2; Domain location=4-319; Score=348.0; E_value=1.8e-101; Accession=PF02181.15; Description=Formin Homology 2 Domain
MPNMEAKRQRQHPSVATKQEKVLLIDLQRSKNCEIMLRNIKMPLPDLMGSVLALDDSIVDGDQVDYLIKFCPTKEEMELLKGYTGKKENLGNCEQFFMEMMKVPRVESKLRILSFKIKFVTQVADLKNSLSTINSVAEEVRSSVKLKRVMQTILSLGNALNQGTARGAAVGFRLDSLLKLSDIRARNNRMTLMHYLCKVLSDKLPEVLDFNTDLAHLEPASKIQLKELAEEMQAITKGLEKVEQELATSEKDPPETEIFYRKLKEFLADAQAEGRSLALLYSTAGKSADSLAHYFGEDPVRCPFEQVVSTLLSFVKTFERAHAENVKQMELEKKRAQTEAEKEKAKLGAHKKGESPKPGVPDR

SEQ ID NO: 93338 - protein, 88 aa, Setaria italica
  misc_feature (58)..(58): Xaa can be any naturally occurring amino acid
  Transcript Sequence Number=SeqID_27364
  Subcellular localization annotation: CTP_CleavageSite=24; ConfidenceScore=5.30e-01
LRVLGYFLFLTLSSYSSSSPPRKRASAGQSYKPKPRAKKERTEEEKKFRQRSKYFLAXKLVGVLVFLSLMGGADSSELDDDDGLDYEE

SEQ ID NO: 93339 - protein, 333 aa, Setaria italica
  misc_feature (265)..(265): Xaa can be any naturally occurring amino acid
  Transcript Sequence Number=SeqID_27365
  Gene Ontology: Cellular component=mitochondrial outer membrane; Biological process=mitochondrial transport
  Homolog annotation: Hit_ID=A8DT15; Match level="QueryCoverage=65%, HitCoverage=84%, E-value=1e-14, Identity=27%"; Hit description =Metaxin 2b
  Pfam annotation: Domain name=Tom37; Domain location=22-225; Score= -89.0; E_value=0.00092; Accession=PF10568.1; Description=Outer mitochondrial membrane transport compl
MASAAAAAEWEAAERKVLVARKPCFGLPTACPTSLPVLLYLRMAQVPFDIHVDTSFPDADHIPYVEFSDCVAFNNEKGGVIEYLKVEKILDLNSKHPSISPADVLSTKAMVSTWLADALQYELWVVSDGSIAHDIYFSDLPWPIGKILHWKKARDVKQLLDITKLNAAEKEEEIYQKASAAYDTLSLRLGDQVFLFDNSPTDVDALFLGHALFVLNALPDTSVLRGTLQKHENLVNFVEHHKIQLLEDSSSSGLGSSPSPSSSSXPRKRASAGQSYKPKPRAKKERTEEEKKFRQRSKYFLAAQLVGVLVFLSLMGGADSLELDDDDGLDYED

SEQ ID NO: 93340 - protein, 106 aa, Setaria italica
  Transcript Sequence Number=SeqID_27366
  Gene Ontology: Mol. function=carboxylesterase activity
  Homolog annotation: Hit_ID=A5A7N4; Match level="QueryCoverage=97%, HitCoverage=38%, E-value=2e-17, Identity=46%"; Hit description =Alpha/beta hydrolase fold superfamily
HRGVYQLSPPEDLTLARMLVRPAQMFLGDEAMTGEKVLTEGRYGAVSRVFVVTEEDKTWPAEEQRRAAASCGPGVEVRAIGGADHVPMFSKPAELAQLIMEVAMNQ

SEQ ID NO: 93341 - protein, 61 aa, Setaria italica
  Transcript Sequence Number=SeqID_27367
SVFATILSRSCLAPCWQGNIICHDPQDDPQGKGRSSRTLRRHARQESRPGAASNSSTTSLH

SEQ ID NO: 93342 - protein, 157 aa, Setaria italica
  misc_feature (23)..(23): Xaa can be any naturally occurring amino acid
  Transcript Sequence Number=SeqID_27368
  Gene Ontology: Mol. function=tetrahydrofolylpolyglutamate synthase activity; Cellular component=mitochondrion; Biological process=folic acid and derivative biosynthetic process
  Homolog annotation: Hit_ID=B6U8C5; Match level="QueryCoverage=97%, HitCoverage=27%, E-value=4e-65, Identity=80%"; Hit description =Folylpolyglutamate synthase
KTRWNVAVLEVGLGGKYDATNVXVRAPVVCGISSLGYDHMEILGNTLGEIAGEKAGILKKGVPAYTVPQLEEAMSVLRRQASELGVSLQVVQHLDPKKLEGQPLGLHGEHQYTNAGLAVALANTWLEKQGHLDRMHARHSDALPDQFIKAVKCLSAR

SEQ ID NO: 93343 - protein, 45 aa, Setaria italica
  Transcript Sequence Number=SeqID_27369
HCYRKYLPTSANREIRKLEEEVRLLILDVIKEHNNSVDNDLLRVI

SEQ ID NO: 93344 - protein, 447 aa, Setaria italica
  misc_feature (45)..(45): Xaa can be any naturally occurring amino acid
  Transcript Sequence Number=SeqID_27370
  Gene Ontology: Mol. function=electron carrier activity; Biological process=oxidation reduction
  Homolog annotation: Hit_ID=Q9ATU9; Match level="QueryCoverage=99%, HitCoverage=87%, E-value=1e-175, Identity=64%"; Hit description =Putative cytochrome P450
  Pfam annotation: Domain name=p450; Domain location=5-442; Score =200.2; E_value=5.7e-57; Accession=PF00067.14; Description=Cytochrome P450
GLKIVQTQDANNYLSSVFPYLLLWRETYGPVFIYSTGALEILHVXDPEMVKDIGHRTPSELGKPNYLKRSRKALFGGGLFTLNGNDWAYQRKLIAPEFFMDKIKGMIELVEDATAPLLESWESLLDNVGGSREIVVDDYLRKLSADVIARVCFGSSFTRGEEIFCKLRQLQKTVSQQDALVGLSAFWKYLPTRANREIRKLEEEVRLLILDVIKEHNNSVDNDLLRVIIDGAQGRQLQGHDAEDFIIGNCKGMYFAGHGTTAVTLIWCLMLLSTHPEWQEHARAEAVEVCQGGATLDVDALRRLKIITMVIQETLRLYPPASLMMREALTDVKIGGLDVPGGTIIQVARSMLHQDKDAWGPDAAEFHPDRFANGVAAACRPAHMYMPFGHGPRTCIGQNLAMVELKVVLARLLSRFAFVPSPRYRHAPVFRLTIEPGFGMPLVVTRL

SEQ ID NO: 93345 - protein, 58 aa, Setaria italica
  Transcript Sequence Number=SeqID_27371
PYEKQSRCLARACCPCYVLGSVVRGIGRCLFVACYPMIQCCGLDECRHHHTSHLSHFR

SEQ ID NO: 93346 - protein, 58 aa, Setaria italica
  Transcript Sequence Number=SeqID_27372
LVILVAIYSFVYGWWIELNKGVWGKGCRCRIWIRVEGGRFELEFRKVSVVISELLVML

SEQ ID NO: 93347 - protein, 132 aa, Setaria italica
  Transcript Sequence Number=SeqID_27373
  Gene Ontology: Mol. function=phosphotransferase activity, alcohol group as acceptor; Cellular component=cytoplasm; Biological process =metabolic process
  Homolog annotation: Hit_ID=O23461; Match level="QueryCoverage=94%, HitCoverage=12%, E-value=5e-41, Identity=64%"; Hit description =Galactokinase like protein
LDGTTVPRADPLTVDPLATLEKYREAAVVPRESIVRAESEWLSSIKADLVVSDVVPVVCRVAADMGVRSVCIGNFSWDFIYSEYIMDAGYHHRSIVWQIAEDYSYCDILLRLPGYGPMPAFRNVIDVPLIVR

SEQ ID NO: 93348 - protein, 144 aa, Setaria italica
  Transcript Sequence Number=SeqID_27374
  Gene Ontology: Mol. function=metal ion binding
  Homolog annotation: Hit_ID=Q30BI2; Match level="QueryCoverage=99%, HitCoverage=37%, E-value=1e-48, Identity=70%"; Hit description=YZ1 (Fragment)
CLIGSIQCSDLYLLLDDSSLFSKTTRTSMEEFINLKNKTDNKHSTAENSSACEGQNILALRNTGQRMMGLPVSNLKSDTLKQAMEKLTASRSSFSFIVDEQGHVQGVVTTRDIISVFSPPCMDSRLDGGSFFSAALEQVGCRVE

SEQ ID NO: 93349 - protein, 94 aa, Setaria italica
  Transcript Sequence Number=SeqID_27375
  Subcellular localization annotation: CTP_CleavageSite=25; ConfidenceScore=5.40e-01
SLNNTAQPNPFRPPAPAPSAPMAADASAGDGKRREKRTASASAMHACVGVFRLICVACAIDWLSGTGSTPAGLMALMAAALAAGWFVSAVRPPP

SEQ ID NO: 93350 - protein, 54 aa, Setaria italica
  Transcript Sequence Number=SeqID_27376
  Gene Ontology: Mol. function=electron carrier activity; Biological process=response to oxidative stress
  Homolog annotation: Hit_ID=B6UBA1; Match level="QueryCoverage=100%, HitCoverage=15%, E-value=2e-19, Identity=79%"; Hit description =Peroxidase 1
HKEAFGHVKEYAENGTLWDEDFAESLVKLSELPMPAGSKGEIRKKCSVINHRLY

SEQ ID NO: 93351 - protein, 347 aa, Setaria italica
  Transcript Sequence Number=SeqID_27377
  Gene Ontology: Mol. function=electron carrier activity; Biological process=response to oxidative stress
  Homolog annotation: Hit_ID=B6UBA1; Match level="QueryCoverage=91%, HitCoverage=91%, E-value=1e-168, Identity=88%"; Hit description =Peroxidase 1
  Pfam annotation: Domain name=peroxidase; Domain location=47-307; Score=316.8; E_value=4.5e-92; Accession=PF00141.15; Description =Peroxidase
MKLSAAVLFALVAVQAAVLLAAVPSAQAGELQVGYYSKKCRGLENVVKWHVIRALKANRRTGAALVRLLFHDCFVRGCDGSVLLDASYDNPHPEKEAPVNIGLAAFDLLEEIKAAVEDRCPDVVSCSDILIYAARDAASILSNGHVHFDVPAGRLDGFVSKAEEAQAELPDSADDVQKLIDNFARKNFTIEELVILSGAHSIGQGHCSSFTGRLSEPNDQITPAYRNLLKYKCAKGNPPVDNNVRDEDYDVVARFMPGFTSRVRKIPDFLDNSYYHNNLAKIVTFHSDWTLLTHKEAFGHVKEYAENGTLWDEDFAESLVKLSELPMPAGSKGEIRKKCSVINHRLY

SEQ ID NO: 93352 - protein, 60 aa, Setaria italica
  Transcript Sequence Number=SeqID_27378
IKQTFTNMYTNNHSTIHICKRNRLAPKHLLPPFQIARRREQMALVLISNTHHLTMRDTIQ

SEQ ID NO: 93353 - protein, 103 aa, Setaria italica
  Transcript Sequence Number=SeqID_27379
  Homolog annotation: Hit_ID=Q43557; Match level="QueryCoverage=100%, HitCoverage=25%, E-value=1e-26, Identity=53%"; Hit description =Unidentified
  Pfam annotation: Domain name=DUF642; Domain location=1-103; Score= -130.6; E_value=0.00049; Accession=PF04862.4; Description=Protein of unknown function, DUF642
VEYIGSGQQQGDMILTVPEGAHALRLGSDASIQQQISVTRGLYYSVTFRASRTCAQDEKLSLTIVPVTGYPVQSGEPLPIQTVYSSCGWDAYSWAFKAEAGIV

SEQ ID NO: 93354 - protein, 47 aa, Setaria italica
  Transcript Sequence Number=SeqID_27380
WNWSAPPTAHLLRSKYSSWRKTILTVHSKFQALQSCRLLRSLQYQVS

SEQ ID NO: 93355 - protein, 121 aa, Setaria italica
  Transcript Sequence Number=SeqID_27381
  Gene Ontology: Mol. function=cysteine-type endopeptidase activity; Biological process=proteolysis
  Homolog annotation: Hit_ID=Q108Y0; Match level="QueryCoverage=95%, HitCoverage=14%, E-value=1e-60, Identity=93%"; Hit description=ICE -like protease p20 domain containing protein, expressed
  Pfam annotation: Domain name=Peptidase_C14; Domain location=12-120; Score=-48.4; E_value=0.044; Accession=PF00656.14; Description =Caspase domain
WGPPPPPAHGRKRAVVCGISYRYSRHELKGCINDAKCMRHLLMTRFNFPDDSIIMLNEEQTDPYKIPTKHNIRMAMYWLVQGCQPGDSLVFHYSGHGAQQRNYSGDEVDGFDETLCPLDFE

SEQ ID NO: 93356 - protein, 272 aa, Setaria italica
  Transcript Sequence Number=SeqID_27382
  Gene Ontology: Mol. function=cysteine-type endopeptidase activity; Biological process=proteolysis
  Homolog annotation: Hit_ID=B9SKF8; Match level="QueryCoverage=91%, HitCoverage=66%, E-value=1e-114, Identity=77%"; Hit description =Caspase, putative
  Pfam annotation: Domain name=Peptidase_C14; Domain location=1-267; Score=122.6; E_value=1.3e-33; Accession=PF00656.14; Description =Caspase domain
VLSVSFSDNVYCASTLELSKKSNTSIFMLNEEQTDPYKIPTKHNIRMAMYWLVQGCQPGDSLVFHYSGHGAQQRNYSGDEVDGFDETLCPLDFETQGMIVDDEINAALVRPLPHGVKLHALIDACHSGTALDLPFLCRMNRSGQYVWEDHRPRSGVWKGTSGGEAISFSGCDDDQTSADTSALSKITSTGAMTFCFIQAIERGQGTTYGSILNSMRSTIRNTGDSAGVGGGAVTSLITMLLTGGSLSTGGLKQEPQLTACDPFDVYAKPFSL

SEQ ID NO: 93357 - protein, 45 aa, Setaria italica
  Transcript Sequence Number=SeqID_27383
SSPHQLIMMPFASSVFSVTEVMYKLLTLGGVQKCSKRCANQKNNN

SEQ ID NO: 93358 - protein, 73 aa, Setaria italica
  Transcript Sequence Number=SeqID_27384
  Gene Ontology: Mol. function=nucleoside-triphosphatase activity; Cellular component=membrane; Biological process=transport
  Homolog annotation: Hit_ID=B8XSN5; Match level="QueryCoverage=100%, HitCoverage=5%, E-value=7e-25, Identity=73%"; Hit description=PDR -like ABC transporter
MTMSVFFRSHMTTDLTHAHYYMGALYYSIFIIMLNGIPEMTMQIARLPSFYKQKSYHFYPSWAYVIPASIMKV

SEQ ID NO: 93359 - protein, 236 aa, Setaria italica
  Transcript Sequence Number=SeqID_27385
  Gene Ontology: Mol. function=kinase activity; Biological process =fatty acid biosynthetic process
  Homolog annotation: Hit_ID=B6TF90; Match level="QueryCoverage=89%, HitCoverage=71%, E-value=1e-108, Identity=94%"; Hit description=SNF1- related protein kinase regulatory subunit beta-1
  Pfam annotation: Domain name=AMPKBI; Domain location=148-234; Score =122.8; E_value=1.1e-33; Accession=PF04739.7; Description=5'-AMP -activated protein kinase, beta subunit, complex-interacting region
SRSIFNILIRPVTPVLQTPVPPLQRAADVTPVFNQILMNEQEEEYDGPPPKEIPALIVWTLGGKSVYVEGSWDNWKSRKAMQKSGKDHSLLLVLPSGVYRYRFVVDGERKCLPDLPCETDAMGNAVNLLDVNDFVPESVESVAEFEPPPSPDSSYSFQAPEDKDFTKEPPALPSQLHLGVLNSQNSEESCARPQHIVLNHLFIEKGWGAHPLVALGLTHRFESKYVTVVLYKPIER

SEQ ID NO: 93360 - protein, 186 aa, Setaria italica
  Transcript Sequence Number=SeqID_27386
  Gene Ontology: Mol. function=transporter activity; Cellular component= intracellular; Biological process=transport
  Homolog annotation: Hit_ID=B9T0K7; Match level="QueryCoverage=91%, HitCoverage=27%, E-value=9e-60, Identity=64%"; Hit description =Transporter, putative
  Pfam annotation: Domain name=CRAL_TRIO_N; Domain location=72-141; Score=57.1; E_value=6.7e-14; Accession=PF03765.7; Description =CRALTRIO, N-terminus
MSVRRRSTSMEGLFTLDDRKERRSDVENSEDERRRLSIGSLKKKALNASNKLTHSLKKRGKRKVEHRASSFTIEDVRDEQEERAVFTFQQELLNRNLLPDKHNDYHLLLRFLKARKFDIEKAIQMWSEMLQWRKEFGADTILEDFNFEELDEVLCYYPQGYHGVDRQGRPVYIERFGGKVETQNKT

SEQ ID NO: 93361 - protein, 534 aa, Setaria italica
  Transcript Sequence Number=SeqID_27387
  Gene Ontology: Mol. function=transporter activity; Cellular component= intracellular; Biological process=transport
  Homolog annotation: Hit_ID=B6U127; Match level="QueryCoverage=100%, HitCoverage=86%, E-value=1e-153, Identity=51%"; Hit description =Phosphatidylinositol transporter/ transporter
  Pfam annotation: Domain name=CRAL_TRIO; Domain location=62-248; Score= 157.0; E_value=5.8e-44; Accession=PF00650.12; Description=CRALTRIO domain
  Pfam annotation: Domain name=CRAL_TRIO_N; Domain location=1-45; Score= 37.6; E_value=4.8e-08; Accession=PF03765.7; Description=CRALTRIO, N -terminus
  Pfam module annotation: Pfam domain module=CRAL_TRIO::CRAL_TRIO_N; Domain location=62-248::1-45
LLPDKHNDYHLLLRFLKARKFDIEKAIQMWSEMLQWRKEFGADTILEDFNFEELDEVLCYYPQGYHGVDRQGRPVYIERLGKVEPNKLMHITTVDRYMKYHVQEFEKAFRDRFPACSIAAKRHIDSTTTILDVDGVGLKNFSKTARDMLSRMQKIDSDYYPETLHQMFVVNAGSGFKLLWNSVKGFLDPKTASKIHVLGTKFQNRLLEVIDASQLPEFLGGTCTCAAEGGCLRSNKGPWNDPNIMKFAHNKEAKFTRHTRRLSEIEQRRSSFARLHLLKGRNSDTSTVESGSDIDDLGSPMMRSTVGCSRLAPVREEMQMRGRDSAAYYSCDDHFVVVDKTVDYGRGGSMSDKSRASEPRAKVRPLDTSTATHMAGPSTNRRGTVVPKDVLDEGTFHRFIKLLLALIVKGFAFFHIAYGQQETTVNNPLPPAEPEPVSDDYPAVETFSVDHISPIIERLQRLEGKVDELGSKPPEIPLEKERSLLESWDRIKCIESDLERTKKVLQATVMKQLEIAESLEEVIRSNLRRRRFCA

SEQ ID NO: 93362 - protein, 82 aa, Setaria italica
  Transcript Sequence Number=SeqID_27388
MKRPTSRGSSMVCQATTDQQEDSCRYMEQRHGVDGGDCGAAAAERDDVEAGAYDEEEEEDDELAGSRGGLGEKKRRLAADQV

SEQ ID NO: 93363 - protein, 128 aa, Setaria italica
  Transcript Sequence Number=SeqID_27389
  Subcellular localization annotation: CTP_CleavageSite=41; ConfidenceScore=5.25e-01
RLLPPLVSAFSKSNPGRNGENPILHRRGRAGAVVAVPLPVALATRRPRPALCPGRKAVGTSAPRPFIPHRRPPSFVRSPIHFVRPPFSVCPPVDLLLAKQTLFLTPRGRRREKAPRFSSRHPSTTSLC

SEQ ID NO: 93364 - protein, 77 aa, Setaria italica
  Transcript Sequence Number=SeqID_27390
INSDIKVKFRTDRVSSRMHLALQIKLSIFIRTLSMSGRCRDRDLVASSESDLTRELYYISAGGNTTAGWGSYSIPKD

SEQ ID NO: 93365 - protein, 110 aa, Setaria italica
  Transcript Sequence Number=SeqID_27391
TKINVFLKQHNTQQNCLYFQLLETQKFDLTKIKQITNCCISNAIQTSITNVTYATPYKFRLHIGISTQGLTSSSMEPPAFKATNLTLQRWNTRLLALLLYEKERKQIIRK

SEQ ID NO: 93366 - protein, 176 aa, Setaria italica
  Transcript Sequence Number=SeqID_27392
MRRAVRGGIGGNRRFSPDIGPFNGDAQASLSLSMANLKSSEEYRRSNCCHDAWDGPNSGYSPTYSTKTSIRKEAKRRLSDRWKMAHQYQHPSQDANSFSTLGDMLALSDKEVSKFTSGSLTCCKCPKRELHRDGMPGSCSYPLGISSNDGWKDESVPNTTRLKSLSSSCISRKSKT

SEQ ID NO: 93367 - protein, 51 aa, Setaria italica
  Transcript Sequence Number=SeqID_27393
IYTILQKNSKMESDIRVPLPTFTVGLLPHCRRLEDANVHFLPSPCLSLCYL

SEQ ID NO: 93368 - protein, 70 aa, Setaria italica
  misc_feature (8)..(8): Xaa can be any naturally occurring amino acid
  Transcript Sequence Number=SeqID_27394
PLPAGPPXALHVGPALRGRGLPPHRHAVVVVAAEQVHKERCLPDVPHDLRDRLPHPPLHLLLPDLLHPLP

SEQ ID NO: 93369 - protein, 93 aa, Setaria italica
  Transcript Sequence Number=SeqID_27395
WDLEARDLLVHGVELGLTGPGISWRWRGVCCCWWWELPRFCGGRALERRLHREQGTSFRQPALGSGVARPQPRLRWGAMALRPSPDTDGAGGG

SEQ ID NO: 93370 - protein, 323 aa, Setaria italica
  misc_feature (75)..(75): Xaa can be any naturally occurring amino acid
  misc_feature (89)..(89): Xaa can be any naturally occurring amino acid
  Transcript Sequence Number=SeqID_27396
  Gene Ontology: Mol. function=RNA-directed DNA polymerase activity; Biological process=DNA integration
  Homolog annotation: Hit_ID=Q53RL8; Match level="QueryCoverage=46%, HitCoverage=13%, E-value=1e-20, Identity=35%"; Hit description =Retrotransposon protein, putative, Ty1-copia subclass
MYWRTEGCLYSVTYTKFAETFGYGKADARRPKIHRKSSMPASELKFMYPKDHTGDYGKVKGLYSYYSTLNRMFRXTLTPRDDNNTDISXMLRICLLEMRPGGESFCVADFLWEEIKDISESLIKACGYGPYIMGLIEKVVGRSFPTDMVHKPLKILPTKKPIVPSSGRYDEQEDEQQDAAQQHDQQPHAPQPSQRDMHSRQPSEPSSRSHGKPPPVRWLFNLFIGMCKIQRDIHVELRQQRINSKKGRDAIKKMHAAMNLETPPPISPEHVEPEIPPLETMLIGFQQAGYYEQYEHIFAPGSSSQQGMDACGSSLAPIHLLHR

SEQ ID NO: 93371 - protein, 222 aa, Setaria italica
  Transcript Sequence Number=SeqID_27397
  Gene Ontology: Mol. function=structural constituent of ribosome; Cellular component=intracellular; Biological process=translation
  Homolog annotation: Hit_ID=B6T8M1; Match level="QueryCoverage=92%, HitCoverage=93%, E-value=2e-76, Identity=75%"; Hit description=50S ribosomal protein L19
  Pfam annotation: Domain name=Ribosomal_L19; Domain location=118-215; Score=63.5; E_value=7.7e-16; Accession=PF01245.12; Description =Ribosomal protein L19
  Subcellular localization annotation: CTP_CleavageSite=56; ConfidenceScore=5.79e-01
MAAASASATAAVSGVVLPHAFLSHRSPPPQVVAVASSFRRLSLCASPRRAAHLVARADASAEAGEPEPEAEAEPVTASADAEEGEAEGAVAVAEAEEPPPPPSKPKVKFGEIIGILNKQFIEEAEKVKTVPDLRPGDIIELRMQRPNKRRLSLFKGIIIAKHKAGVHTTIRVRRIIAGVGVEITFPVYSPRIKEITVIRHKKVRRAKLYYLKHKLPRFSTFK

SEQ ID NO: 93372 - protein, 88 aa, Setaria italica
  Transcript Sequence Number=SeqID_27398
MDSDSGIQYVAAINGMDGIATNSSGGQGVNASINEFDQFINLNSDSRPVNSSRDGSNLHAVSASTFVPQEMLSRPTPSAVLSPAGVTS

SEQ ID NO: 93373 - protein, 112 aa, Setaria italica
  Transcript Sequence Number=SeqID_27399
  Gene Ontology: Mol. function=protein serine/threonine kinase activity; Biological process=protein amino acid phosphorylation
  Homolog annotation: Hit_ID=C3SA69; Match level="QueryCoverage=100%, HitCoverage=10%, E-value=1e-31, Identity=68%"; Hit description =Serine/threonine protein kinase (Fragment)
EGAYPFDRLEHDTTNVKNLAPQNDIHMEVPPVAPHTNVDSSISPPGLISSQIDNPTTMKNVEGFQVDNPFTNMREMMPSHPDFEEQKTEEARAVGPVMDASFKDTDFEYLQV

SEQ ID NO: 93374 - protein, 130 aa, Setaria italica
  Transcript Sequence Number=SeqID_27400
  Gene Ontology: Mol. function=transferase activity, transferring groups other than amino-acyl groups
  Homolog annotation: Hit_ID=B6TXE4; Match level="QueryCoverage=98%, HitCoverage=42%, E-value=3e-38, Identity=67%"; Hit description =Transferase family protein
TVLFRAAAGGGALDHRALARACVDEASERLGAGKAPRSFSLVAVARDGVGGNPRGMTVETCAAGDSPPASGGSGHELEVAQWQELGLEEFALRESKPVHVSYSIVTGGDEALVVVIPDGKGFLVTATVPK

SEQ ID NO: 93375 - protein, 1212 aa, Setaria italica
  Transcript Sequence Number=SeqID_27401
  Gene Ontology: Mol. function=protein tyrosine kinase activity; Biological process=protein amino acid phosphorylation
  Homolog annotation: Hit_ID=C3SA69; Match level="QueryCoverage=89%, HitCoverage=98%, E-value=0.0, Identity=69%"; Hit description =Serine/threonine protein kinase (Fragment)
  Pfam annotation: Domain name=PB1; Domain location=178-265; Score =108.8; E_value=1.9e-29; Accession=PF00564.16; Description=PB1 domain
  Pfam annotation: Domain name=Pkinase; Domain location=935-1198; Score= 213.0; E_value=7.7e-61; Accession=PF00069.17; Description=Protein kinase domain
  Pfam annotation: Domain name=Pkinase_Tyr; Domain location=935-1198; Score=261.2; E_value=2.4e-75; Accession=PF07714.9; Description =Protein tyrosine kinase
  Pfam module annotation: Pfam domain module=PB1::Pkinase::Pkinase_Tyr; Domain location=178-265::935-1198::935-1198
MEPRKDDVRSAAQGSVRGSSSSACTNYPVPEYPVAGTNKPVLNYSIQTGEEFSLEFMRAIPKKHPVPGMPHNQNVIPGAGHKDSRVSLGAHRTGAETRFDASIFLTSDTHQTDEIERKPFSENENRRRHMSGTSVPRVPSAGGSSQGLSRGYASSEASETSRTIKILCSFGGKILPRPSDGKLRYVGGETHIIRISRNISWQELKQKTTAIFNQPHVIKYQLPGEDLDALISVSNDEDLRNMMEECGFLDNADGSQKLRIFLVSSIEYDDMSFSLGSMDSDSGIQYVAAINGMDGIATNSSGGQGVNASINEFDQFINLNSDSRPVNSSRDGSNLHAVSASTFVPQEMLSRPTPSAVSGDNTANLHSYYGHGMQNLQGNYANPATNDGFYDIEGQTSIPLSTPSDYRYMSQYAPFSGTTSQRSLDQQAYQDAEKETSTKEEKRVSGNMPHQNNELDYFQSLENLSGHTAHHESSASGVPPTASLQEGVTSSLQPSDSVKSLETCTAPRARSTTQGSDISEDDRHSGGAFASGCSDFQVDMIDHSYKNPPPHPGRVFHSERIPREQAGFLNRLSKSEDSLNPEFLIRQSQSGVASENIAENTDSTFEGTEKTNLSSHAINLNDPAVDDSLIQFEKEFTNTVQQTSPFSEQLLAEKRSSDNTSSRNVEKLTHAAEQVLAKGKHNEETQQDVEAPNHLGSHSAMPHHISWDAPKPTLPTDVKCDPAVPSTSSVDVSHKEPIISSTQNRDIAGGTERTSPDILSDFFANADSAAQSSSPFIDPVHSLNMPNYEPQRWSFFRNLAQNEFPQKDETQDLAKIEEGAYPFDRLEHDTTNVKNLAPQNDIHMEVPPVAPHTNVDSSISPPGLISSQIDNPTTMKNVEGFQVDNPFTNMREMMPSHPDFEEQKTEEARAVGPVMDASFKDTDFEYLQIIKNEDLEELRELGSGTFGTVYHGKWRGSDVAIKRIKKSCFTGRSSELERLAHEFWREAEILSKLHHPNVVAFYGVVKDGPGGTLATVTEFMVNGSLRHVLQRKDKYLDRRKRLIIAMDAAFGLEYLHSKNIVHFDLKCDNLLVNLKDQSRPICKVGDFGLSKIKRNTLVSGGVRGTLPWMAPELLNGSSNKVSEKVDVFSFGIVMWEILTGEEPYANMHYGAIIGGIVNNTLRPPVPATCDPEWRRLMEQCWAPDPAQRPAFTEIAGRLRAMSVAASQAKAAK

SEQ ID NO: 93376 - protein, 102 aa, Setaria italica
  Transcript Sequence Number=SeqID_27402
  Gene Ontology: Mol. function=protein binding
  Homolog annotation: Hit_ID=Q10GD4; Match level="QueryCoverage=99%, HitCoverage=16%, E-value=3e-37, Identity=73%"; Hit description =Leucine Rich Repeat family protein, expressed
YVNCPELVDLNLNSCTNLHPERLLIQCPKLKDVHVNGCRDMLIGAIRNQVLNEFAAAEPRLPCKRLADGSKRVHVPHFMIEQLEEQEKWGRPRKSQCTVHLT

SEQ ID NO: 93377 - protein, 105 aa, Setaria italica
  Transcript Sequence Number=SeqID_27403
  Gene Ontology: Mol. function=hydrolase activity, hydrolyzing O -glycosyl compounds; Cellular component=extracellular region; Biological process=carbohydrate metabolic process
  Homolog annotation: Hit_ID=B6SYY0; Match level="QueryCoverage=99%, HitCoverage=19%, E-value=5e-42, Identity=79%"; Hit description=Beta -fructofuranosidase, insoluble isoenzyme 7
ITRNNFRDPTTAWLGHDGLWRFAVAAEVAGVGSTVIYRSADFITWERNAAPLHAAPGVPCWECPDFFPVVEHGTEGLDTSANGPGVRHVLKLSKAANEDYYVVGW

SEQ ID NO: 93378 - protein, 183 aa, Setaria italica
  Transcript Sequence Number=SeqID_27404
  Gene Ontology: Mol. function=ATPase activity, coupled to transmembrane movement of substances; Cellular component=integral to membrane; Biological process=transport
  Homolog annotation: Hit_ID=Q71CZ3; Match level="QueryCoverage=75%, HitCoverage=8%, E-value=8e-14, Identity=42%"; Hit description =Multidrug resistance associated protein MRP2
LLAKYLQFDLRLWWALFLLLSVLAAATHVTTSLDGCPVPAHSWALDAVLVVAAVVLLCAGLLGGREEGGSAAEEPLLNDTHEMADENSRSAVEASKFTGAGFLSVLTFSWMGPLLAVGHKKTLGLDDVPGLDPGDSVAGLLLTFEANLEAVVGGISSSSRKAVTTFKLFVDPKIVLFQMAMLQ

SEQ ID NO: 93379 - protein, 203 aa, Setaria italica
  Transcript Sequence Number=SeqID_27405
  Homolog annotation: Hit_ID=Q8W2V6; Match level="QueryCoverage=100%, HitCoverage=29%, E-value=2e-77, Identity=71%"; Hit description =Putative membrane-associated salt-inducible protein
  Pfam annotation: Domain name=PPR; Domain location=101-135; Score=7.7; E_value=1.1; Accession=PF01535.12; Description=PPR repeat
  Pfam annotation: Domain name=PPR; Domain location=136-170; Score =25.1; E_value=0.00029; Accession=PF01535.12; Description=PPR repeat
  Pfam annotation: Domain name=PPR; Domain location=32-66; Score=36.8; E_value=8.9e-08; Accession=PF01535.12; Description=PPR repeat
  Pfam annotation: Domain name=PPR; Domain location=67-100; Score=27.5; E_value=5.5e-05; Accession=PF01535.12; Description=PPR repeat
  Pfam module annotation: Pfam domain module=PPR::PPR::PPR::PPR; Domain location=101-135::136-170::32-66::67-100
  Subcellular localization annotation: CTP_CleavageSite=54; ConfidenceScore=5.15e-01
ARVLKTHPPLQKAFLFFRLAAAASPTFRHDRFTYTSMIHLLGEAGRVPAMLRLLAEMLRAGVAPDAATFTTVMHWLARAGDVDGAMRVWVEMKARSRPTVVSYTACVKILFDAGRAEEARRVFGGDGGRGAAPTCKTYTVLIEHLADAGKFEATLEIMDKMNEACIEPDKALCNILVQKCSRAGETSVMTRILQYMKEHFIVL

SEQ ID NO: 93380 - protein, 102 aa, Setaria italica
  Transcript Sequence Number=SeqID_27406
  Homolog annotation: Hit_ID=Q8SAT5; Match level="QueryCoverage=100%, HitCoverage=10%, E-value=1e-45, Identity=84%"; Hit description =Putative membrane-associated salt-inducible protein
LNTGKFEATLEIMDKMNEACIEPDKALCNILVQKCSRAGETSVMTRILQYMKEHFIVLRRPIFLEALEALKASGDSDELLREVNPHLSYEGIECDPILSDQG

SEQ ID NO: 93381 - protein, 75 aa, Setaria italica
  Transcript Sequence Number=SeqID_27407
AGEGCREPSQVVRADGGDEFPGWVAQAAPVPRACCYAQTAATSSPGWVAQAAPVPRACCRTVGEPPGGNSNTILR

SEQ ID NO: 93382 - protein, 75 aa, Setaria italica
  Transcript Sequence Number=SeqID_27408
  Homolog annotation: Hit_ID=B6TMK4; Match level="QueryCoverage=100%, HitCoverage=20%, E-value=8e-13, Identity=54%"; Hit description =EMB1417
RIKMKVYPDNKTKELTEGDPGTDELEEAENIHHLGTDELEEAESIHLDDELEEAASSGLDRNVLDDAASGDFEYV

SEQ ID NO: 93383 - protein, 82 aa, Setaria italica
  Transcript Sequence Number=SeqID_27409
  Homolog annotation: Hit_ID=B6TMK4; Match level="QueryCoverage=100%, HitCoverage=22%, E-value=7e-17, Identity=57%"; Hit description =EMB1417
YRYIKGKRIKMKVYPDNKTKELTEGDPGTDELEEAENIHHLGTDELEEAESIHLDDELEEAASSGLDRNVLDDAASGDFEYV

SEQ ID NO: 93384 - protein, 204 aa, Setaria italica
  misc_feature (20)..(20): Xaa can be any naturally occurring amino acid
  Transcript Sequence Number=SeqID_27410
  Gene Ontology: Mol. function=electron carrier activity; Cellular component=mitochondrial respiratory chain; Biological process =electron transport chain
  Homolog annotation: Hit_ID=P25076; Match level="QueryCoverage=100%, HitCoverage=63%, E-value=1e-102, Identity=88%"; Hit description =Cytochrome c1-1, heme protein, mitochondrial
  Pfam annotation: Domain name=Cytochrom_C1; Domain location=1-194; Score=394.3; E_value=2.1e-115; Accession=PF02167.7; Description =Cytochrome C1 family
SCHSMSLIRYRDLVGFAYTXKEETKAMAAEIEVVDGPNDEGEMFTRPGKLSDRFPQPYANEQAARYANGGAYPPDLSLITKARHNGQNYVFALLTGYRDPPAGVSIREGLHYNPYFPGGAIAMPKMLMDGAVEYEDGTPATEAQMGKDVVSFLSWAAEPEMEERKLMGVKWIFLLSLALLQAAYYRRMKWSIFKSRKLVLDVVN

SEQ ID NO: 93385 - protein, 57 aa, Setaria italica
  Transcript Sequence Number=SeqID_27411
EKRHRYDGLLYLLDACVHLLRHRVLLLIHRRRRHDKRQQLQHCQLELLVPRRRISHC

SEQ ID NO: 93386 - protein, 637 aa, Setaria italica
  Transcript Sequence Number=SeqID_27412
  Gene Ontology: Mol. function=RNA-directed DNA polymerase activity; Cellular component=exocyst; Biological process=exocytosis
  Homolog annotation: Hit_ID=Q259N6; Match level="QueryCoverage=99%, HitCoverage=99%, E-value=0.0, Identity=81%"; Hit description =H0723C07.3 protein
  Pfam annotation: Domain name=Exo70; Domain location=266-629; Score =525.2; E_value=8.1e-155; Accession=PF03081.7; Description=Exo70 exocyst complex subunit
MESLAQRAALLRESLQKSQQVTDAVVSILGSFDSRLSALDSAMRPIQVRTHAVRTAHENIDRTLRSADVILTQFDRTREAEREIQKGPHENLQGFLDAVDRLRSIERFFSSNRSYRSSDGVLNHVNALLSKALVKMEGEFQNQLSQRSKPMEPDRLFDCLPSTLRPSSESQPEGGKNPSTGSQSDNQQNSEAAVYSPPALIEPKFVPLLSKLAQQLVQAGCQQQCSEIYSEARASALESSLKNLGVEKLSKDEVQKMPWEILDSKIGNWIHFMRIAVKLLFAGERQLCDQVFECSQSLRDKCFAAITKNSLATLLSFGEAIAMSKRSPEKLFVLLDMYEIMCELQTEIDTIFVGESCSQMRDSALSLTKCLAQTAQKTFSDFEEAVEKDATKNIHTDGTVHPLTSYVINYVKFLFDYQSTLKQLFQEFKKEDGTGSELAAVTMKIMQALQNNLDAKAKQYKDPALMHIFLMNNIHYIVKSVRRSEAKDLLGDDWIQRHRRIVQQNANQYRRIAWSKVLQCLSGQGLTSSGGSGQVGSEGGNSSGASRAAVKERFRSFNVLFEEIYQKQCSWSVPDTELRESLRLAVAEILLPAYRSFIKRFGPLIENSKAPGKYVKHTPEQLELLLGNLFEGKQERA

SEQ ID NO: 93387 - protein, 296 aa, Setaria italica
  Transcript Sequence Number=SeqID_27413
  Gene Ontology: Mol. function=serine-type carboxypeptidase activity; Cellular component=extracellular region; Biological process =proteolysis
  Homolog annotation: Hit_ID=Q7XKJ9; Match level="QueryCoverage=100%, HitCoverage=60%, E-value=1e-134, Identity=78%"; Hit description =OSJNBa0038O10.8 protein
  Pfam annotation: Domain name=Peptidase_S10; Domain location=1-287; Score=84.8; E_value=3e-22; Accession=PF00450.14; Description=Serine carboxypeptidase
ASRERAINIKGFMIGNAVLNDATDQLGMVEYAWSHAIISDELYSAVRRECDSFKEEADGGRPGKGCSPALRAFLGAYDDIDIYSIYTPTCLLPAAAAKPRRPASLVAAPRLLSKHDAWHRLKRVPAGYDPCTEAYVTKYFNRGDVQRALHANRTGLPYPYSPCSEVIRKWNDSPATILPILKKLMAAGLRVWVYSGDTDGRVPVTSTRYSINAMGLRPRERLRANASADAVAQWGGWRAWYYRQQVAGWAVEYEEGLTLVTVRGAGHQVPLFAPARSLAMLYHFLRGQDLPAARTR

SEQ ID NO: 93388 - protein, 107 aa, Setaria italica
  Transcript Sequence Number=SeqID_27414
  Gene Ontology: Mol. function=hydrolase activity, hydrolyzing O -glycosyl compounds; Cellular component=anchored to membrane; Biological process=carbohydrate metabolic process
  Homolog annotation: Hit_ID=B9SGA7; Match level="QueryCoverage=100%, HitCoverage=22%, E-value=3e-29, Identity=57%"; Hit description =Glucan endo-1,3-beta-glucosidase, putative
RAPPGVVVDLMRANRISKVKLFDADPGVLRELAGSGIQVMVGVTNGELASIAGSQAAADAWVAQNVSRYVGRGVVDIRYIAVGNEPFLTSYQGQFQSYIIPAMTNIQ

SEQ ID NO: 93389 - protein, 70 aa, Setaria italica
  Transcript Sequence Number=SeqID_27415
  Gene Ontology: Mol. function=beta-amylase activity; Cellular component=chloroplast; Biological process=polysaccharide catabolic process
  Homolog annotation: Hit_ID=Q5NB81; Match level="QueryCoverage=87%, HitCoverage=10%, E-value=9e-29, Identity=91%"; Hit description =Putative beta-amylase PCT-BMYI
AAGVAGVAVELWWGVVERQGPGEYDWAGYLDLAAMARHHGLRVRAILAFHQCGAGPHDPLWIPLPQWVLE

SEQ ID NO: 93390 - protein, 76 aa, Setaria italica
  Transcript Sequence Number=SeqID_27416
CTKPEPLRNRLILGYFSSVMGSLHDLGKMTAFLSLHQLSKHCMLQAKEVLLHIKLGPNAFMKPFPKSNTLCQNHGP

SEQ ID NO: 93391 - protein, 46 aa, Setaria italica
  Transcript Sequence Number=SeqID_27417
LYNSKYLEAWFLLLQLHYLTKTIAQALQVFNDVQSGLSVPSMVSRN

SEQ ID NO: 93392 - protein, 125 aa, Setaria italica
  Transcript Sequence Number=SeqID_27418
SLLIATTWWARAPCITRHPAKQVPDTNNTSEVGIQRQSEKHHRNVQGRGRWRCSHLLILVVHLGLGLVRVTRRGRASRLQSRCHRKHITSMYSRDECAGIVRRCKWRLGSEAYRLVVVGVHLLGV

SEQ ID NO: 93393 - protein, 53 aa, Setaria italica
  misc_feature (10)..(10): Xaa can be any naturally occurring amino acid
  Transcript Sequence Number=SeqID_27419
  Gene Ontology: Mol. function=DNA binding; Biological process =regulation of transcription, DNA-dependent
  Homolog annotation: Hit_ID=B6TXE9; Match level="QueryCoverage=100%, HitCoverage=41%, E-value=1e-13, Identity=81%"; Hit description =HMG1/2-like protein
KAPFVTKAEXSVKAEYTKKMDAYNNKPSGGPTASGDSDKSKSEVNDEDEEGDE

SEQ ID NO: 93394 - protein, 80 aa, Setaria italica
  Transcript Sequence Number=SeqID_27420
  Gene Ontology: Mol. function=DNA binding; Cellular component =chromatin; Biological process=regulation of transcription, DNA -dependent
  Homolog annotation: Hit_ID=B6TXE9; Match level="QueryCoverage=91%, HitCoverage=57%, E-value=2e-31, Identity=89%"; Hit description =HMG1/2-like protein
  Pfam annotation: Domain name=HMG_box; Domain location=28-78; Score =40.0; E_value=9.7e-09; Accession=PF00505.11; Description=HMG (high mobility group) box
MKSRARSSGADSRLSVRKSKAEKDPNKPKRPPSAFFVFMEEFRKDYKEKHPNVKQVSVIGKAGGDKWKSLSEAVSSLSPL

SEQ ID NO: 93395 - protein, 126 aa, Setaria italica
  Transcript Sequence Number=SeqID_27421
  Gene Ontology: Mol. function=DNA binding; Cellular component =chromatin; Biological process=regulation of transcription, DNA -dependent
  Homolog annotation: Hit_ID=B6TXE9; Match level="QueryCoverage=100%, HitCoverage=100%, E-value=3e-57, Identity=88%"; Hit description =HMG1/2-like protein
  Pfam annotation: Domain name=HMG_box; Domain location=28-97; Score =109.4; E_value=1.2e-29; Accession=PF00505.11; Description=HMG (high mobility group) box
MKSRARSSGADSRLSVRKSKAEKDPNKPKRPPSAFFVFMEEFRKDYKEKHPNVKQVSVIGKAGGDKWKSLSEAEKAPFVTKAEKLKAEYTKKMDAYNNKPSGGPTASGDSDKSKSEVNDEDEEGDE

SEQ ID NO: 93396 - protein, 122 aa, Setaria italica
  Transcript Sequence Number=SeqID_27422
CENELPLLLILSSSVLQALYSTNTLHIFLPPIHMFLQFTAIASFQQMPGPHKAKLKLENSKRLHKKNHISSYSSPFLFPLLLEGIFAPLLTCGPRGDGGSSTTGTEYGPARQAINRPTTAEC

SEQ ID NO: 93397 - protein, 282 aa, Setaria italica
  misc_feature (32)..(32): Xaa can be any naturally occurring amino acid
  misc_feature (272)..(272): Xaa can be any naturally occurring amino acid
  Transcript Sequence Number=SeqID_27423
  Homolog annotation: Hit_ID=Q9SJF2; Match level="QueryCoverage=97%, HitCoverage=31%, E-value=4e-65, Identity=48%"; Hit description =T27G7.8
PNPLVLMNGENKEKYSQSFLALCALQHVQAKXEVRQCQLAAATPAWADLKCFDKTACLENGLWAIDELVHPVASRMEYHFAKWSEQPEFIFTLVYKITKDFMDGVDDILQPLIDHARLAGLSAKESWVTGMVKMLVGYLERQIFPALVTSNQDQSTVGKPEVESSWMHLNDLMISFDKRMQLLADSGIQKAASLSEGLSRSLSVFSIYGEHPDWLHIWATVELSSAQDKLKSEMEDETNWSCSDSQNDQLGHVENSMKFLLSTREDYKAPTXSEFVVKKLLC

SEQ ID NO: 93398 - protein, 541 aa, Setaria italica
  misc_feature (106)..(106): Xaa can be any naturally occurring amino acid
  Transcript Sequence Number=SeqID_27424
  Gene Ontology: Mol. function=magnesium ion binding; Biological process=metabolic process
  Homolog annotation: Hit_ID=Q5GAS4; Match level="QueryCoverage=98%, HitCoverage=80%, E-value=0.0, Identity=60%"; Hit description=Stc
  Pfam annotation: Domain name=Terpene_synth; Domain location=15-203; Score=227.7; E_value=2.9e-65; Accession=PF01397.13; Description =Terpene synthase, N-terminal domain
  Pfam annotation: Domain name=Terpene_synth_C; Domain location=216 -484; Score=355.3; E_value=1.2e-103; Accession=PF03936.8; Description= Terpene synthase family, metal binding domain
  Pfam module annotation: Pfam domain module=Terpene_synth::Terpene _synth_C; Domain location=15-203::216-484
SRLSQNAGIFHPSIWGDFFLGYSNPAASSQQQTQMEERADKLKEEVAEIMASSTFSGLHERLHLIDTLERLCLDHLFEEEINAALPQMQTADVSDYDLGTVALWFXLLRKHGYKVSPDVLARFKDEDGDFLADNPADLLSLYNAAHMRTHGEIILDEAILFTRSCLETTLPNMEESLLAREIKYALEIPLPRRVRIYESKYYISAYEKDATVHETILQLAKLNSNIMQLHHQRELITITRWWKDLHIESRLPFARDRVVECYLWMLGVYFEPCYSRSRIIVTMIIAIVTLLDDIYDSYATPEECELLTKCIESWDAKAAHDLPECLKFALGKMLDSFQTIANMLHQEEKYRMSYLRYFIEDLVRSFSMEVKMLEEGYIPESVEEHLQVSIRTGGCPLLSCASFIGMNDVATKDCFNWVSSVPNMVKALSRILRLLDDLQSYEREQLIPHVASTIDSYMKEHNVSIEVAREKIHTLKEESWKDFNNEWLNSDNTIPKQLLERIFNLTRTMEFMYNQEDNFTNSTNLKDTIHSLFVEPYTKLI

SEQ ID NO: 93399 - protein, 40 aa, Setaria italica
  Transcript Sequence Number=SeqID_27425
RLTCPARCFRSFSYKGAHGGGGGGGGGCSFDCTTRCVATC

SEQ ID NO: 93400 - protein, 73 aa, Setaria italica
  Transcript Sequence Number=SeqID_27426
  Gene Ontology: Mol. function=oxidoreductase activity; Cellular component=cytoplasm; Biological process=oxidation reduction
  Homolog annotation: Hit_ID=A4UUE0; Match level="QueryCoverage=100%, HitCoverage=14%, E-value=3e-19, Identity=68%"; Hit description =Cytosolic aldehyde dehydrogenase
MAAANGSGGDKGFEVPKVEVRFTKLFINGQFVDAVSGKTFETRDPRTGEVIANIAEGDKADVDLAVKAAREAF

SEQ ID NO: 93401 - protein, 508 aa, Setaria italica
  Transcript Sequence Number=SeqID_27427
  Gene Ontology: Mol. function=oxidoreductase activity; Cellular component=cytoplasm; Biological process=metabolic process
  Homolog annotation: Hit_ID=Q8S531; Match level="QueryCoverage=96%, HitCoverage=97%, E-value=0.0, Identity=90%"; Hit description =Cytosolic aldehyde dehydrogenase RF2C
  Pfam annotation: Domain name=Aldedh; Domain location=36-498; Score =831.0; E_value=7.4e-247; Accession=PF00171.14; Description=Aldehyde dehydrogenase family
MAGATNGSGGGGGGGKGFEVPRVEVRFTKLFINGNFVDAVSGKTFETRDPRTGEVIANIAEGDKADVDLAVKAAREAFDNGPWPRMTGYERGRILHKFADLIDQHVEELAMLDTVDAGKLFLVGKVRDIPGAAHLLRYYAGAADKIHGETLKMAQRMHGYTLKEPVGVVGHIVPWNYPTTMFFFKVSPALAAGCAVVVKPAEQTPLSALFYAHLAKEAGVPDGVLNVVTGFGPTAGAAVASHMDVDKLSFTGSTEVGRLVMKAAAESNLKSVSLELGGKSPIVVFDDADLDMAVNLVNFATYTNKGEICVAGTRIYVQEGIYDAFVKKAAELAKKSVVGDPFNPRVNQGPQVDKDQYEKVLKYIDIGKREGATLVTGGKPCGDKGYYIEPTIFTDVKDGMAIAQDEIFGPVMALMKFKTIEEVIQKANNTRYGLAAGIVTKNIDIANTVSRSIRAGAIWINCYFAFDPDAPFGGYKMSGFGKDMGMDGLEKYLQTKTVVTPLYNTPWL

SEQ ID NO: 93402 - protein, 187 aa, Setaria italica
  Transcript Sequence Number=SeqID_27428
  Homolog annotation: Hit_ID=A0ZS64; Match level="QueryCoverage=91%, HitCoverage=14%, E-value=3e-42, Identity=57%"; Hit description =Na+/H+ antiporter
LLSHGHEPPPRTMSKEHSGLLCWPESFRRSRGGHSASLAEIRNQPGSFSARALQLSMYGSMVNLTSGQQGHRRQKPHRMPAANHRHSSSYPRVPSRPSNTRPLLSVQSEGSNMKRVAAPKDATAGEATTAAPATSAGQQQRTAVQDDNSSDDSGGEEVIVRVDSPSMLSFRQSAAAVHSPPPPPQDQ

SEQ ID NO: 93403 - protein, 85 aa, Setaria italica
  Transcript Sequence Number=SeqID_27429
  Subcellular localization annotation: CTP_CleavageSite=19; ConfidenceScore=5.05e-01
MRDTNFGFPRVPPTSSSPPAEAAAEPSPKRRRVGEAAEEPPTPPEMREEALERLRGVVRDSVGKHLYSSAIFLADKVAAADGGPR

SEQ ID NO: 93404 - protein, 95 aa, Setaria italica
  Transcript Sequence Number=SeqID_27430
  Subcellular localization annotation: CTP_CleavageSite=48; ConfidenceScore=5.49e-01
AVPFINHATSAVAAAMDGNGTASHSSGAAGNNQTLLIQSPADNKNHTRSSAASDGSSSSENKQIESTASPQGSTSSAKDQSAQVGYPIANNNTTV

SEQ ID NO: 93405 - protein, 112 aa, Setaria italica
  misc_feature (60)..(60): Xaa can be any naturally occurring amino acid
  Transcript Sequence Number=SeqID_27431
VTSEYRQNKVCYCINKRQSAHHRLPEYQNMQGSTALPVAHSDRQKAVSNQQITCCLKKNXAMPVAISNHQSQSDQMNLAFYGAFHGSKLSLDKEFSRNTKPQPRTLPSCYHS

SEQ ID NO: 93406 - protein, 93 aa, Setaria italica
  Transcript Sequence Number=SeqID_27432
  Gene Ontology: Mol. function=phosphatidylinositol phosphate kinase activity; Biological process=phosphatidylinositol metabolic process
  Homolog annotation: Hit_ID=Q2QVA9; Match level="QueryCoverage=77%, HitCoverage=5%, E-value=5e-15, Identity=52%"; Hit description =Phosphatidylinositol-4-phosphate 5-Kinase family protein, expressed
DHLFLLKAKLLKVGSHQFETSVEKSIALPFMNHEQPAASKVNKMYGGVIPSDDAGKWVWNRFSHLEMEYKKELRGGSLDNFHLINKYTPCSSS

SEQ ID NO: 93407 - protein, 62 aa, Setaria italica
  Transcript Sequence Number=SeqID_27433
AHVWQHFIDKYRSGIQQVKECKKHLKIATIERRAITLGPKTLVACQQSASSAPEHSRLTIDF

SEQ ID NO: 93408 - protein, 408 aa, Setaria italica
  misc_feature (387)..(387): Xaa can be any naturally occurring amino acid
  Transcript Sequence Number=SeqID_27434
  Gene Ontology: Mol. function=metal ion binding
  Homolog annotation: Hit_ID=B6SKK2; Match level="QueryCoverage=99%, HitCoverage=79%, E-value=0.0, Identity=81%"; Hit description=Zinc ion binding protein
  Pfam annotation: Domain name=DUF500; Domain location=332-408; Score =3.3; E_value=4.6e-06; Accession=PF04366.4; Description=Family of unknown function (DUF500)
  Pfam annotation: Domain name=FYVE; Domain location=151-219; Score =94.7; E_value=3.3e-25; Accession=PF01363.13; Description=FYVE zinc finger
  Pfam module annotation: Pfam domain module=DUF500::FYVE; Domain location=332-408::151-219
IFKEGSLGVANAYEFSDEMTTMKESGEKICDSFPLCEQTGIWVPASVPPMTKHDHEEWQKGFGYNSRCFPEEEYQWDIDEENMEITMWDVLSEMVVAGKDKILSIASFDLGRYGMSMVSDFFLEEALKDKAQTLEDISAGSEHALLETEPTKWLPDSAAPSCMLCGARFHPIICTRHHCRFCGGIFCGGCSKGRSLMPPKFMTSDPQRVCDVCGVRLECIQPYLMNRFSRACQFPTQDLTDLSTLRSWINIPWATKMEYEIYKAANSIYGYCKVGELKAEKSIPDSILREAKGLAIITVVKVGMMLTYKIGTGLVVSRRADGSWSPPSAISTCGLGYGVQAGGELADYIIVLRNTDAIKTFSGNAHMSIGAGISASAGHLGRAAEAXCSKGAFVGCALNGSVVSTRDF

SEQ ID NO: 93409 - protein, 43 aa, Setaria italica
  Transcript Sequence Number=SeqID_27435
VVCGRNQKSSCSDLKVDGRFSQSILLHSFCSTQYLIFRIQHLI

SEQ ID NO: 93410 - protein, 116 aa, Setaria italica
  Transcript Sequence Number=SeqID_27436
AEAPAAPASDGEALASAGLQDSGMAAAAAAFFKIRSPALTNPPAAARDWAGRAVWRCSARPVVACLLAPAAYQQRLTHHGSEQRTGISIRPVRLRPRLPPSGSARSPLKSPDSNPN

SEQ ID NO: 93411 - protein, 140 aa, Setaria italica
  misc_feature (117)..(117): Xaa can be any naturally occurring amino acid
  Transcript Sequence Number=SeqID_27437
  Gene Ontology: Cellular component=membrane; Biological process=amino acid transport
  Homolog annotation: Hit_ID=B6TS04; Match level="QueryCoverage=87%, HitCoverage=24%, E-value=5e-45, Identity=76%"; Hit description=L -tyrosine transporter
  Subcellular localization annotation: CTP_CleavageSite=35; ConfidenceScore=5.04e-01
TVQLLGLASAGGNAGIGDPIKLLLSVNPAALPAVRGFAFAALATSLIGYAVSFPKQLADTFELIVQRFSPKQGSMQHSDSSSGYGRNWVILTWMVLIIPIFIASFFSAAFSRALDFXAGVYANCFLFGILPPVMAWIHRS

SEQ ID NO: 93412 - protein, 97 aa, Setaria italica
  Transcript Sequence Number=SeqID_27438
  Gene Ontology: Mol. function=methyltransferase activity; Cellular component=nucleus
  Homolog annotation: Hit_ID=B9GPK5; Match level="QueryCoverage=91%, HitCoverage=6%, E-value=5e-14, Identity=41%"; Hit description=SET domain protein
TQNTGVFPAMQESVCTTANSGVVYPKSGLGFSAGQNGTYGAYLQHQYLEGCMYMNEHGQMCGPYPPEQLYEGLSTGFLPQDLAIYAVFGGKTADPVP

SEQ ID NO: 93413 - protein, 116 aa, Setaria italica
  Transcript Sequence Number=SeqID_27439
  Homolog annotation: Hit_ID=Q7XUM1; Match level="QueryCoverage=61%, HitCoverage=11%, E-value=1e-09, Identity=57%"; Hit description =OSJNBa0074L08.7 protein
RDFRAEAEPQESAGSNSVSGHPWTLSREPTSVESTDRTWSTGDEVVEQSGSHGAHCSPMNRPRQSKQRPSQPEPSGRSRAGSGNGNTLHRGRSAHRGSSSSVASGRSGVRVVSAAS

SEQ ID NO: 93414 - protein, 108 aa, Setaria italica
  Transcript Sequence Number=SeqID_27440
  Gene Ontology: Mol. function=thiopurine S-methyltransferase activity; Cellular component=cytoplasm; Biological process=metabolic process
  Homolog annotation: Hit_ID=B6T6T8; Match level="QueryCoverage=53%, HitCoverage=20%, E-value=8e-24, Identity=96%"; Hit description =Cysteine sulfinate desulfinase/cysteine desulfurase and related enzymes
NSIINTTTSGASGTNAAVIRGALRAEKPELLTVILPQSLKKQPPESQELLSKVQNLIEKPQYDHLPLIEASRLVSYLSKLLILFLYCIFFVTNGVATCIRSMPDQCII

SEQ ID NO: 93415 - protein, 109 aa, Setaria italica
  Transcript Sequence Number=SeqID_27441
  Homolog annotation: Hit_ID=B6T6T8; Match level="QueryCoverage=100%, HitCoverage=38%, E-value=3e-37, Identity=74%"; Hit description =Cysteine sulfinate desulfinase/cysteine desulfurase and related enzymes
  Subcellular localization annotation: CTP_CleavageSite=35; ConfidenceScore=5.36e-01
MTMAGSCAAAPVGGLPSLRTPPRMNLRLGGFLHCSSAARSPGGVLLGWAQATKQPPAEARLNRLLCGYMQRDGHEGDVRSQGRDDTIMFGPDDDGVKIPTQTETLVKGT

SEQ ID NO: 93416 - protein, 57 aa, Setaria italica
  Transcript Sequence Number=SeqID_27442
  Homolog annotation: Hit_ID=B6T6T8; Match level="QueryCoverage=77%, HitCoverage=15%, E-value=4e-19, Identity=97%"; Hit description =Cysteine sulfinate desulfinase/cysteine desulfurase and related enzymes
TIALDWGLPKGQGLCNMDIISKIQQVICFAFHDSKLLMETCQEAKNLRKIVTLFYLD

SEQ ID NO: 93417 - protein, 217 aa, Setaria italica
  Transcript Sequence Number=SeqID_27443
  Gene Ontology: Mol. function=thiopurine S-methyltransferase activity; Cellular component=cytoplasm; Biological process=metabolic process
  Homolog annotation: Hit_ID=B6T6T8; Match level="QueryCoverage=100%, HitCoverage=77%, E-value=1e-119, Identity=95%"; Hit description =Cysteine sulfinate desulfinase/cysteine desulfurase and related enzymes
LLCGYMRRDGHEGDVRSQGRDDAIMFGPDDDGVKIPTQTETLVKGTAMVAEPEYKPIPDLDYLQELLAIQQQGPRAIGFFGTRNMGYMHQQLIEILSYAMVITKNHIFTSGASGTNAAVIRGALRAEKPELLTVILPQSLKKQPPESQELLSKVQNLIEKPQYDHLPLIEASRLCNMDIISKVQQVICFAFHDSKLLMETCQEAKNLRKIVTLFYLD

SEQ ID NO: 93418 - protein, 114 aa, Setaria italica
  Transcript Sequence Number=SeqID_27444
  Homolog annotation: Hit_ID=B6SNK6; Match level="QueryCoverage=100%, HitCoverage=99%, E-value=7e-40, Identity=76%"; Hit description =SAUR12-auxin-responsive SAUR family member
  Pfam annotation: Domain name=Auxin_inducible; Domain location=12-80; Score=107.6; E_value=4.3e-29; Accession=PF02519.6; Description=Auxin responsive protein
MQWEEKRGKVKKGWLAVRVGAEGDEGGFQRFVIPIAYLYHPLFRRLLEAARDAYGYDYSAGPLRLPCSVDEFLRLRALVDRETQAAPSSSSHRVHAGGHGHYSLSPCTRAKVSS

SEQ ID NO: 93419 - protein, 83 aa, Setaria italica
  Transcript Sequence Number=SeqID_27445
RRRRRWRGGGRHVHGALEPLRRILRRCAPRPQRRRFLRFHAASPAAPLATARRIFCQSINSANVLGASSPASDEAVPVPVVMI

SEQ ID NO: 93420 - protein, 102 aa, Setaria italica
  Transcript Sequence Number=SeqID_27446
  Gene Ontology: Mol. function=amino acid binding; Cellular component =chloroplast envelope
  Homolog annotation: Hit_ID=B6TWB2; Match level="QueryCoverage=96%, HitCoverage=35%, E-value=2e-48, Identity=94%"; Hit description=ACT domain containing protein
  Pfam annotation: Domain name=ACT; Domain location=24-81; Score=19.3; E_value=0.016; Accession=PF01842.17; Description=ACT domain
YLNWQVDIDIATHVVVEDDGPKRSMLYIETADRPGLLLEIIKIIADTNVDVESAEIDTEGLVVKDKFHVSYRGAKLNSSLSQVLINCLRYYLRRPETDEDSY

SEQ ID NO: 93421 - protein, 108 aa, Setaria italica
  Transcript Sequence Number=SeqID_27447
RHSRDLGLDVTKGTVGQLTQLPHKQSSTSCDCGCLPLSVYCIFVYRIYLSVSMYRKLKSTHCPCTCITTLTFLNSSICLSAQCQQSAHLCLCLYSSSCDQFPDYLCPW

SEQ ID NO: 93422 - protein, 31 aa, Setaria italica
  Transcript Sequence Number=SeqID_27448
  Gene Ontology: Mol. function=amino acid binding
  Homolog annotation: Hit_ID=B6TWB2; Match level="QueryCoverage=100%, HitCoverage=11%, E-value=1e-09, Identity=96%"; Hit description=ACT domain containing protein
RGAKLNSSLSQVLINCLRYYLRRPETDEDSY

SEQ ID NO: 93423 - protein, 516 aa, Setaria italica
  Transcript Sequence Number=SeqID_27449
  Homolog annotation: Hit_ID=A2CF03; Match level="QueryCoverage=15%, HitCoverage=13%, E-value=2e-10, Identity=41%"; Hit description=Novel protein similar to vertebrate LAS1-like (S. cerevisiae) (LAS1L)
  Pfam annotation: Domain name=Las1; Domain location=1-95; Score=38.0; E_value=7e-09; Accession=PF04031.5; Description=Las1-like
RKTELGLAADAMESEEMLAMLYSMAIMRLVNGFVENPHKKTGRSISELAEAVGIPRVLVDIRHESSHRNLPSLRLLRLASIKAFDWLKCIYWDRQSNSIPDVQVELRLRLHEIACFLKENDSKETKSGSKRKRSEKLIVKAIKYTRRLYYAYPFEVVSVLLDLMQLDAPESPESSDMQETHSFAVNHSSDTQISNSDMKTIIMKLSEKEPRLLLSVLKSVIEMIDAKEELTNKGVSFACLPVAPFEVKRLYSLVLWLITSIKELKDSGYIGFVHEIGVLSSDKNAVPRFCLAKLLWKLLNLSTIGEKCIIDAALLLIEMVNNNNVEEKLRKLPVLSLPNLAKVLRQSRTICNELGSIEKATETLEMFKLQLKRQKNGCLTETGTTEGSFNTSTPEKHNRWSVAKSWTPCPIGTIPCSFSSCAVLPAFDVVDHGPEVATLEQHGNFEEVDHSERFESQSEELEDESILNIPRSPEYDISDMPELTYPLKGRLLVGGVWKKVTAEELLLIKSNMKMLL

SEQ ID NO: 93424 - protein, 94 aa, Setaria italica
  Transcript Sequence Number=SeqID_27450
  Gene Ontology: Mol. function=serine-type endopeptidase activity; Biological process=negative regulation of catalytic activity
  Homolog annotation: Hit_ID=O48610; Match level="QueryCoverage=85%, HitCoverage=75%, E-value=9e-29, Identity=71%"; Hit description =Subtilisin-like protease (Fragment)
PVTVPRTVTNVGEVDAVYHVAIESPAGVRIEVEPSVLVFNAANKVHTFQVKLSPMWRLQGDYTFGSITWYNDHRTVRIPVAARITIHDLFADVA

SEQ ID NO: 93425 - protein, 70 aa, Setaria italica
  Transcript Sequence Number=SeqID_27451
MAVDPRQVVAGFLTLSMFVMLGNMIKHDHFSSPGPQLGLEATGAEFNTMKLDDNAEMSNINTGGVENLMD

SEQ ID NO: 93426 - protein, 146 aa, Setaria italica
  Transcript Sequence Number=SeqID_27452
LSVDKGLQELAFLKVEDAVLFALAQHHRSNVVGPADPDIKSTGDEKFTEAFDLSKEEEEDVKFKQAWLIYFWRRAKTHNVEEDIAEERLQMWIDRHSQEPTSHDAVDVEQGLHELRKLGIEQLLWELSRHEVNLTKDDPSDVEDLT

SEQ ID NO: 93427 - protein, 251 aa, Setaria italica
  Transcript Sequence Number=SeqID_27453
KLGLAEEKLRQSEARTIELEKQVANLGDGLSMEVKLMKRREEMLVRKEQEIRKALISKNGKSEELTALQQQLQSAKEEASAAVKKLKEAESETKDLRTMTRRMVLSKEEMEEVVMKRCWLARYWGLAVQYGIYPDISMSKHEYWSSLAPLPFEYVTSAGQRAKNGSETGSDGLEDADKLVHDLTVTAGEGNVETMLSVDKGLQELAFLKVEDAVLFALAQHHRSNVVGPADPDIKSTGDEKFTEAFGTVIF

SEQ ID NO: 93428 - protein, 84 aa, Setaria italica
  Transcript Sequence Number=SeqID_27454
  Gene Ontology: Mol. function=catalytic activity; Biological process =trehalose biosynthetic process
  Homolog annotation: Hit_ID=Q1W5S4; Match level="QueryCoverage=91%, HitCoverage=31%, E-value=5e-36, Identity=93%"; Hit description =Sister of ramosa 3 (Fragment)
WDKGNALQFLLEALGFADSKNVFPIYIGDDRTDEDAFKVLRNMGQGVGILVSKIPKETSASYSLREPSEVKEFLHKLVKSKQRD

SEQ ID NO: 93429 - protein, 55 aa, Setaria italica
  Transcript Sequence Number=SeqID_27455
  Subcellular localization annotation: CTP_CleavageSite=36; ConfidenceScore=5.68e-01
PIRTRPAPTGSISSTCPSSPRLRSRRVHAISGGRVSTTSASGHRRSVARRSFAVV

SEQ ID NO: 93430 - protein, 110 aa, Setaria italica
  Transcript Sequence Number=SeqID_27456
  Subcellular localization annotation: CTP_CleavageSite=38; ConfidenceScore=5.00e-01
SSRQGFARSPAHRRPPAKSPSGHPDPPAKSPSGAPDPRCLHRGSCGGADAELYADTADTTPTQATAPGPPIPGAPEAMEGEEGPGAYMEALVPTRPRRTTKPNERNPLTP

SEQ ID NO: 93431 - protein, 52 aa, Setaria italica
  Transcript Sequence Number=SeqID_27457
PKWRQLLSGRKIFDSYEDEFVLEPGIAAAGHRFGGESSSLASARAMSGGCCL

SEQ ID NO: 93432 - protein, 130 aa, Setaria italica
  Transcript Sequence Number=SeqID_27458
  Gene Ontology: Cellular component=cytoplasm; Biological process =protein modification process
  Homolog annotation: Hit_ID=Q9FKI1; Match level="QueryCoverage=82%, HitCoverage=14%, E-value=4e-53, Identity=85%"; Hit description =Similarity to zinc metalloproteinase
  Pfam annotation: Domain name=WLM; Domain location=17-129; Score=87.0; E_value=6.5e-23; Accession=PF08325.2; Description=WLM domain
MILDVQSSQSDLSCCTCLILFLCHLPGIELNPPPSEALKRMHMLACDPGIIAIMNKHKWRVGIMTEMAPVGYVGVSPKCILGFNKNMGEEISLRLRTDDLKGFRKYESIKKTLLHELAHMVHSEHDAKLF

SEQ ID NO: 93433 - protein, 218 aa, Setaria italica
  Transcript Sequence Number=SeqID_27459
  Homolog annotation: Hit_ID=Q9FKI1; Match level="QueryCoverage=95%, HitCoverage=27%, E-value=7e-69, Identity=61%"; Hit description =Similarity to zinc metalloproteinase
  Pfam annotation: Domain name=WLM; Domain location=139-218; Score= -59.4; E_value=0.0037; Accession=PF08325.2; Description=WLM domain
MEESRIARISVTWRGRQLDVDADPSCTVKEFGQLLQDLTSVKPETLKLIVPQSTSKGSKLITPFSDPHSSLSLNEAAISEGKPIRMMGVFDDEIEEVSDNGKRPDLRIIGFDEEEQRLRQRSSGRPQISLKLPQGQYIFCDFRTLHLPGIELNPPPSEALKRMHMLACDPGIIAIMNKHKWRVGIMTEMAPVGYVGVSPKCILGFKNMGNKDNKIGRS

SEQ ID NO: 93434 - protein, 498 aa, Setaria italica
  Transcript Sequence Number=SeqID_27460
  Gene Ontology: Mol. function=hydrolase activity, acting on acid anhydrides, in phosphorus-containing anhydrides; Cellular component =nucleus; Biological process=regulation of transcription, DNA -dependent
  Homolog annotation: Hit_ID=A3BT52; Match level="QueryCoverage=91%, HitCoverage=54%, E-value=0.0, Identity=75%"; Hit description=DEAD -box ATP-dependent RNA helicase 29
  Pfam annotation: Domain name=DBP10CT; Domain location=302-362; Score =92.2; E_value=1.9e-24; Accession=PF08147.4; Description=DBP10CT (NUC160) domain
TDVAARGLDIPLLDNVVNWDFPAKPKLFVHRVGRVARQGRSGTAYTFVTSEDMPYLLDLHLFLSRPLKPAPTEEELLRDMDGINMKIDQAIANGESVYGRFPQTVLDLASDGIKEVISGCTELNALEKPCANAFRLYLKTRAVPSKESIKRVKDLPREGLHPIFRDVLRSDELSALAFSERLKSFRPKQTILEAEGEAAKARNFKGSNQWLDVMKKKREVHEGIINLVHQKSSVDPRPEEEEDGILNWEKKEVCGTKRKSQSFRDEDYYISSVPQNHHLEAGLSVRNNEGFVQNRLDAAVLDLVDDEASGMQAQKTRYHWMKNKFVKLNSGDRVTATGKIKTEGGAKIKASATGIYKRWQQRTHKSINIGGKSGSFAEERTSSAGGYHGGNNKHFSGGRGRRSIPNANVPSEIRNPDQMQKSRQKKAMEITRLKNKSAKDGKFQNKFQKNRRPDGNGKGRGNGKGAGKGGFGKGLGKGGKGPNKGGKGKGKVKGKGGR

SEQ ID NO: 93435 - protein, 83 aa, Setaria italica
  misc_feature (1)..(1): Xaa can be any naturally occurring amino acid
  Transcript Sequence Number=SeqID_27461
  Gene Ontology: Mol. function=transferase activity, transferring glycosyl groups; Biological process=metabolic process
  Homolog annotation: Hit_ID=Q6Z381; Match level="QueryCoverage=98%, HitCoverage=17%, E-value=1e-17, Identity=56%"; Hit description =Putative UDP-glucosyltransferase
XSPRIRLVSLPLPAVDGLPDGAESTADVPPEKVELLKLAFDGLAGPVASFLAEAFAGAGGEGHAKRPDWIILDFAHNWLPPIA

SEQ ID NO: 93436 - protein, 82 aa, Setaria italica
  Transcript Sequence Number=SeqID_27462
  Gene Ontology: Mol. function=protein tyrosine kinase activity; Biological process=protein amino acid phosphorylation
  Homolog annotation: Hit_ID=B9S8A7; Match level="QueryCoverage=64%, HitCoverage=7%, E-value=4e-14, Identity=66%"; Hit description =Receptor kinase, putative
VEGAMAGLGEDDDDPAAAATAFRELARLRHPNILPLIGYCIAGKEKLLLYEYMEKGDLHRWLHELPRRGRPDMDDTGSGDIW

SEQ ID NO: 93437 - protein, 61 aa, Setaria italica
  Transcript Sequence Number=SeqID_27463
FSPFCWLSYLYLFVVYMRLRLPFFHIAGGCPLFIMKHCDIYFGHLKRSSLAHKWFARAKNK

SEQ ID NO: 93438 - protein, 114 aa, Setaria italica
  Transcript Sequence Number=SeqID_27464
  Gene Ontology: Mol. function=nucleic acid binding
  Homolog annotation: Hit_ID=B6TMR7; Match level="QueryCoverage=57%, HitCoverage=26%, E-value=8e-23, Identity=77%"; Hit description=THO complex subunit 4
  Subcellular localization annotation: CTP_CleavageSite=33; ConfidenceScore=5.06e-01
PLLRGGRRSRGGSASGGGSGSGGVGPTRRPFKRAGNRQAPYQPPKAPDAAWQHDMYPGVAAGGGSGGRVSAIETGTKLYISNLDFGVSNEDIKVYASPARRVLCFRAFNCAQIP

SEQ ID NO: 93439 - protein, 67 aa, Setaria italica
  Transcript Sequence Number=SeqID_27465
  Gene Ontology: Mol. function=nucleic acid binding
  Homolog annotation: Hit_ID=B9SZF6; Match level="QueryCoverage=88%, HitCoverage=23%, E-value=3e-12, Identity=62%"; Hit description=RNA and export factor binding protein, putative
  Pfam annotation: Domain name=RRM_1; Domain location=5-59; Score=17.3; E_value=0.0049; Accession=PF00076.14; Description=RNA recognition motif. (a.k.a. RRM, RBD, o
GKIQRKLFSELGDLKRSSINYDRSGRSKGTAEVVFARRADAVAAVKKYNNVQLDGNPMKIEIVVPRT

SEQ ID NO: 93440 - protein, 254 aa, Setaria italica
  Transcript Sequence Number=SeqID_27466
  Gene Ontology: Mol. function=nucleic acid binding; Cellular component= nucleus; Biological process=mRNA processing
  Homolog annotation: Hit_ID=B6TMR7; Match level="QueryCoverage=100%, HitCoverage=100%, E-value=3e-75, Identity=61%"; Hit description=THO complex subunit 4
  Pfam annotation: Domain name=ARS2; Domain location=80-242; Score= -95.1; E_value=0.076; Accession=PF04959.5; Description=Arsenite -resistance protein 2
  Pfam annotation: Domain name=RRM_1; Domain location=98-167; Score =69.0; E_value=1.8e-17; Accession=PF00076.14; Description=RNA recognition motif. (a.k.a. RRM, RBD, o
  Pfam module annotation: Pfam domain module=ARS2::RRM_1; Domain location=80-242::98-167
  Subcellular localization annotation: CTP_CleavageSite=53; ConfidenceScore=5.41e-01
MADTLDMTLDDIIKNNKKSNPSSGGGRRSRGGSASGGGSGSGGVGPTRRPFKRAGNRQAPYQPPKAPDAAWQHDMYPGVAAGGGSGGRVSAIETGTKLYISNLDFGVSNEDIKELFSELGDLKRSSINYDRSGRSKGTAEVVFARRADAVAAVKKYNNVQLDGKPMKIEIVGTNTPTAAAALPVVNGGQARNAVKSAPRGGPTGMPQRRPHQRGGGRRGGGSGGRRGKERSKPRSAEELDADLEKYHADAMQTN

SEQ ID NO: 93441 - protein, 54 aa, Setaria italica
  misc_feature (47)..(47): Xaa can be any naturally occurring amino acid
  misc_feature (54)..(54): Xaa can be any naturally occurring amino acid
  Transcript Sequence Number=SeqID_27467
VYWSSNKRVGEKLCHHIDLEATTHRSLSNGIAKVISTECGGARPFFXLLLSRKX

SEQ ID NO: 93442 - protein, 55 aa, Setaria italica
  Transcript Sequence Number=SeqID_27468
LEIYLPKCPFALQFMLHDLKLIAVSWGCIDIIDVWTLTLTRFLRVNWLVRSNSVL

SEQ ID NO: 93443 - protein, 41 aa, Setaria italica
  Transcript Sequence Number=SeqID_27469
  Gene Ontology: Mol. function=palmitoyl-(protein) hydrolase activity; Biological process=protein modification process
LKTVFQDMADYLKSCRFLPKLNNEIPDGRNATYKERFSSLE

SEQ ID NO: 93444 - protein, 58 aa, Setaria italica
  Transcript Sequence Number=SeqID_27470
HPLCSSISKLVCQVSGTTDELSKIPIIIVSAKNSEIHLYLGQFDEFYESLVSYSLQLG

SEQ ID NO: 93445 - protein, 154 aa, Setaria italica
  misc_feature (50)..(50): Xaa can be any naturally occurring amino acid
  Transcript Sequence Number=SeqID_27471
  Gene Ontology: Mol. function=substrate-specific transmembrane transporter activity; Cellular component=integral to membrane; Biological process=transmembrane transport
  Homolog annotation: Hit_ID=Q01JT9; Match level="QueryCoverage=87%, HitCoverage=25%, E-value=1e-34, Identity=50%"; Hit description =H0505F09.2 protein
MTGGGALAVGSDGGGGGGAITFTVVVSCLTAASGGLLLGYDISVTGFFFXGLMQMESFLQAFFPEILRKTNNAQQDAYCIFKNQTLTMFVSSLYLAGIISSLVSGHLTRTVGRRNSMLIGGLLFLAGVVLNFTAVNISMLVIGRVLLGLAIGFT

SEQ ID NO: 93446 - protein, 317 aa, Setaria italica
  misc_feature (309)..(309): Xaa can be any naturally occurring amino acid
  Transcript Sequence Number=SeqID_27472
  Gene Ontology: Mol. function=calcium ion binding; Cellular component =nucleus; Biological process=regulation of transcription, DNA -dependent
  Homolog annotation: Hit_ID=O23463; Match level="QueryCoverage=48%, HitCoverage=16%, E-value=7e-49, Identity=62%"; Hit description =Calmodulin-binding transcription activator 5
  Pfam annotation: Domain name=CG-1; Domain location=30-148; Score =266.7; E_value=5.4e-77; Accession=PF03859.8; Description=CG-1 domain
MAGGAGARDPLVASEIHGFLTCADLNFDKLMAEAGTRWFRPNEIYAVLANHARFKVHAQPIDKPASGTVVLYDRKVVRNFRKDGHNWKKKKDGKTVQEAHEKLKIGNEEKVHVYYARGEDDPNFFRRCYWLLDKELERIVLVHYRQTSEENAIPQPHIEAEVAEVPPINIIHYTSPLTSTDSVSARTELSSCAAAAAPEEINSHGGRAISCETDDHDSSLESFWADLLESSMKNDTSVRGGSLTPNQQTNYGMMDSGNNIFNTNATSNAIFPSPANVVSEAYATNPGLNQISESYYGALKHQANQSPSXLTSDLDSQ

SEQ ID NO: 93447 - protein, 695 aa, Setaria italica
  Transcript Sequence Number=SeqID_27473
  Gene Ontology: Mol. function=calcium ion binding; Cellular component =nucleus; Biological process=regulation of transcription, DNA -dependent
  Homolog annotation: Hit_ID=B9RZM9; Match level="QueryCoverage=78%, HitCoverage=60%, E-value=1e-154, Identity=49%"; Hit description =Calmodulin-binding transcription activator (Camta), plants, putative
  Pfam annotation: Domain name=Ank; Domain location=388-420; Score =42.4; E_value=1.7e-09; Accession=PF00023.22; Description=Ankyrin repeat
  Pfam annotation: Domain name=IQ; Domain location=502-522; Score=0.8; E_value=28; Accession=PF00612.19; Description=IQ calmodulin-binding motif
  Pfam annotation: Domain name=IQ; Domain location=555-575; Score=23.3; E_value=0.001; Accession=PF00612.19; Description=IQ calmodulin -binding motif
  Pfam annotation: Domain name=IQ; Domain location=578-598; Score=26.0; E_value=0.00015; Accession=PF00612.19; Description=IQ calmodulin -binding motif
  Pfam annotation: Domain name=IQ; Domain location=659-679; Score=21.2; E_value=0.0043; Accession=PF00612.19; Description=IQ calmodulin -binding motif
  Pfam module annotation: Pfam domain module=Ank::IQ::IQ::IQ::IQ; Domain location=388-420::502-522::555-575::578-598::659-679
  Subcellular localization annotation: CTP_CleavageSite=60; ConfidenceScore=5.12e-01
SLESFWADLLESSMKNDTSVRGGSLTPNQQTNYGMMDSGNNIFNTNATSNAIFPSPANVVSEAYATNPGLNQISESYYGALKHQANQSPSLLTSDLDSQSKPLANSLMRTPVDGNMPSYAPTRQNSLGLWKYLDDDITSLGDNPSSAIPTTRPVNDEIPFHIIEISSEWAYCTEDTKVLVVGYFHENYKHLAGTNLYCVIGDQCVNTDIVQTGVYRFMARPHVPGRVNLYLTLDGKTPISKVLSFDYREIPGSSDDDEPKKSKLQMQMRLARLLFSTSKKKIAPKFLAEGSRVSNLLSASTEKEWMDMFKYVTDSKGTNIPATEGLLELVLRNRLQEWLVEKIIEGQKSTDRDDLGRGPIHLCSFLGYTWAIRLFSLSGFSLDFRDSSGWTALHWAAYYGREKMVAALLSAGANPSLVTDPTHDDPGGHTAADLAARQGFDGLAAYLAEKGLTAHFEAMSLSKDKRSTSRTQSIKQHSKEVENLSEQELCLRESLAAYRNAADAASNIQAALRERTLKLQTKAIQLANPEIEAATIVAAMRIQHAFRNYNRKKEMRAAARIQSHFRTWQMRRNFINMRRQAIKIQAAYRGHQVRRQYRKVIWSVGVVEKAILRWRKKRKGLRGIATGMPVAMATDAEAASTAEEDYYQVGRQQAEDRFNRSVVRVQALFRSHRAQQEYRRMKVAHEEAKVEFSQK

SEQ ID NO: 93448 - protein, 106 aa, Setaria italica
  Transcript Sequence Number=SeqID_27474
QTRPRILKLSWRRACPTAPLVCNLSSAEAREPFHEAPRSLQLAGWPCWFSLHPLLPEVLRGPDEVIAGSLCGGSRLGFGGGRVRRRAHEVSAGDIGIIDVAHGGSV

SEQ ID NO: 93449 - protein, 130 aa, Setaria italica
  Transcript Sequence Number=SeqID_27475
  Gene Ontology: Mol. function=hydrolase activity; Biological process =metabolic process
  Homolog annotation: Hit_ID=B6TRC0; Match level="QueryCoverage=96%, HitCoverage=35%, E-value=9e-34, Identity=59%"; Hit description =Gibberellin receptor GID1L2
MAGSGAIDDEVVFEIAQCIRVYKSGRVERYFGSDPVPASTDAATGVTSKDRAISPDVAVRLYLPPAANPTEDDGGSIKKLPILVYFHGGGFCLHTAFNFVFHAYLTSLAARTRAIVVSVEYRLAPEHPLP

SEQ ID NO: 93450 - protein, 432 aa, Setaria italica
  Transcript Sequence Number=SeqID_27476
  Gene Ontology: Mol. function=transcription regulator activity; Cellular component=small-subunit processome; Biological process=rRNA processing
  Homolog annotation: Hit_ID=B9SAS6; Match level="QueryCoverage=91%, HitCoverage=43%, E-value=7e-73, Identity=42%"; Hit description=U3 small nucleolar RNA-associated protein, putative
  Pfam annotation: Domain name=Utp14; Domain location=1-392; Score= -125.5; E_value=0.00018; Accession=PF04615.5; Description=Utp14 protein
ENDSEAKILNRGKEKILKVLEEDKEIPNSGVFSLPFMERAMKKQEEAAYEEARQALEDYDDSLRKLEDDNTEQNEDSIKVTGKRTFGPAKNTHEDVNKRQKLHETESSDSEYDSDPAQHLGNNEPTTKQDDIQLGTALLDDEQNDLYKSFDDIMKNPGPKTTFEVGMLAGDSWKKVNSSKGNGNSNVNGVTNKSKLQAPPIVDPNPKQQGSNPDSDSEEEMVEGFLTMSDTKENYELPSQAELIRQAFAGDDVEAEFEKDKMEVLNEENPEPEKPALVPGWGQWTDIQQKKGLPSWMIKEHAIAKRNREEALKRRKDSKLKHVIISEHVDKKVEKYLVRNLPFPYTSKDVYEQSIRMPIGPDFNPAISVSALNRPAIVKKPGVIIKPIQYEEVDPHMKPDEPKRVIQRVTPHPNAKKASAKQSKGATSHKRK

SEQ ID NO: 93451 - protein, 123 aa, Setaria italica
  Transcript Sequence Number=SeqID_27477
  Gene Ontology: Mol. function=structural molecule activity; Cellular component=mitochondrion; Biological process=iron-sulfur cluster assembly
  Homolog annotation: Hit_ID=B6T2K9; Match level="QueryCoverage=98%, HitCoverage=76%, E-value=3e-61, Identity=94%"; Hit description =Protein aq_1857
  Pfam annotation: Domain name=Fe-S_biosyn; Domain location=15-107; Score=94.0; E_value=5.2e-25; Accession=PF01521.12; Description=Iron -sulphur cluster biosynthesis
SAERASQSPAEPEAVRMTEGCVRRLKQLHGKEPSAEGKMLRLSVEAGGCSGFQYSFSLDDKKNPDDRVFETDGVKLVVDDISYDFVKGATVDYEEELIRSAFVVSTNPSAVGGCSCKSSFMVK

SEQ ID NO: 93452 - protein, 107 aa, Setaria italica
  Transcript Sequence Number=SeqID_27478
  Subcellular localization annotation: CTP_CleavageSite=52; ConfidenceScore=5.64e-01
LFPNSKSAAISSPGFPRGKRVDGDWQRALGTKSVRQRRPTSSAPRPPEAYLRTSVAPEQPPLLSSGSHPPLLAVNRSIAFLKMINTLVYDIQVDLVLSRISRFIPMG

SEQ ID NO: 93453 - protein, 60 aa, Setaria italica
  Transcript Sequence Number=SeqID_27479
HDTSTILLTWQGHYEERGERVSSYVRESFITMKPSRQSNQVLCLGNCAMKLCTETGLRYG

SEQ ID NO: 93454 - protein, 74 aa, Setaria italica
  misc_feature (53)..(53): Xaa can be any naturally occurring amino acid
  Transcript Sequence Number=SeqID_27480
MNTTKKIRHDVVMSHLKMGNDKRNLKAENDVRMWKEECAKANMELEVTAAKLXKVKGHLDQATNVVKKVKQSLL

SEQ ID NO: 93455 - protein, 88 aa, Setaria italica
  Transcript Sequence Number=SeqID_27481
SQAIPPQHPLFHPERNTYETDMLAIRRKQKKMRETENSVHPKLQESTQSPLFDLVGARRHICEAQSRVQQVELPLHRARALSWAGRRG

SEQ ID NO: 93456 - protein, 194 aa, Setaria italica
  Transcript Sequence Number=SeqID_27482
DFQKPFVGGFAILPDDEEEQCEKTAGVTINSRSVQPTRDNNTLLCLVQADSGTRYHEGPRPASSGLQEDTVIHRFVGSTIDDESKVENACHHGLVDPTVNLKEAMDDINNMFGRPLNFKGEKTKRKTNALSDGKAVSVSGFSILADDDLKENTCKASQSNSCKFGDENGLFEPTITTRDVMVEINNMFGMPLDF

SEQ ID NO: 93457 - protein, 97 aa, Setaria italica
  Transcript Sequence Number=SeqID_27483
  Gene Ontology: Mol. function=transferase activity, transferring glycosyl groups; Biological process=metabolic process
  Homolog annotation: Hit_ID=B6SXW3; Match level="QueryCoverage=92%, HitCoverage=18%, E-value=2e-31, Identity=67%"; Hit description =Cytokinin-O-glucosyltransferase 2
IPAVYTIGPLASVAEQAVVPTGGPVDAISSSLWREDPTCLAWLEGREPRSVVYVNFGSVTVMSGEELAEFAWGLAGSGHDFLWIVRPDVVRGAGTAS

SEQ ID NO: 93458 - protein, 122 aa, Setaria italica
  Transcript Sequence Number=SeqID_27484
  Gene Ontology: Mol. function=sequence-specific DNA binding; Cellular component=cytoplasm; Biological process=type I hypersensitivity
  Homolog annotation: Hit_ID=B6U085; Match level="QueryCoverage=100%, HitCoverage=79%, E-value=5e-50, Identity=83%"; Hit description =Endothelial differentiation-related factor 1
  Pfam annotation: Domain name=MBF1; Domain location=12-80; Score =114.5; E_value=3.6e-31; Accession=PF08523.2; Description =Multiprotein bridging factor 1
MPTGRLSGNITQDWEPVVLRRTKPKAADLKSAKAVNQALRSGAAVETVRKSAAGTNKHSAPAAPARKLDETTEPAAVERVAAEVRAAIQKARVAKGWSQAELAKRISERAQVVQEYESGKAA

SEQ ID NO: 93459 - protein, 123 aa, Setaria italica
  Transcript Sequence Number=SeqID_27485
RPLNSFRNFDLRTVFGSLGEGLTVFLLLDEILRHNGHVKSYLSLFSRMMSKVKSEVDIFGMSVEDVDFLDQVVHNLQKIFDSGLFHRLLQVDSPLRSSIDLVRSNKKLLDAFHSCFAESSSEI

SEQ ID NO: 93460 - protein, 73 aa, Setaria italica
  Transcript Sequence Number=SeqID_27486
DPFVRSEHDSLFSLMSSSLIHVFLFIIIVSCLHELISLQNIEMRVNCVIFDFIIIHLKILLSSYTAKKLGKLI

SEQ ID NO: 93461 - protein, 47 aa, Setaria italica
  Transcript Sequence Number=SeqID_27487
MDAAHWQQSLGLVKPMEEMLMAANAGAAAANTGQGSNPNPPAPAPSY

SEQ ID NO: 93462 - protein, 73 aa, Setaria italica
  Transcript Sequence Number=SeqID_27488
  Subcellular localization annotation: CTP_CleavageSite=12; ConfidenceScore=5.28e-01
MVGGSIRAAAKAAMIGGYRSAAYMRRAVIPSSNSSSSSSAADNRKASTLVADDWVIPDREVFGPVPTHEEAMA

SEQ ID NO: 93463 - protein, 53 aa, Setaria italica
  Transcript Sequence Number=SeqID_27489
MTKHPRDAAAGDVTLSLALSLGGLLPGEHGAKKPRRTGGGGGEGEFVCKTCSR

SEQ ID NO: 93464 - protein, 88 aa, Setaria italica
  Transcript Sequence Number=SeqID_27490
TSLVDTMPVFTVASLLVEIAARVEGVVDAVDELATLANFKQVDDDDDDDDDDDDKKGESEMTTTKVHPLNEPDADEASSSPENQASKV

SEQ ID NO: 93465 - protein, 131 aa, Setaria italica
  misc_feature (99)..(99): Xaa can be any naturally occurring amino acid
  misc_feature (115)..(115): Xaa can be any naturally occurring amino acid
  Transcript Sequence Number=SeqID_27491
  Gene Ontology: Mol. function=nucleotide binding; Cellular component =cellular_component; Biological process=biological_process
  Homolog annotation: Hit_ID=B6T783; Match level="QueryCoverage=100%, HitCoverage=65%, E-value=1e-60, Identity=86%"; Hit description =Josephin-2
  Pfam annotation: Domain name=Josephin; Domain location=1-131; Score =147.5; E_value=4.1e-41; Accession=PF02099.9; Description=Josephin
QFCLLHALNNLMQEKECFTRAELDRIAGNLVLSDPNKDQWTPLSFIFRPHHNVVTGNYDVNVLIAALEARKKKVVWHDRRKGASSIELDAEVLVGLMIXNVPLRRFRGLWTGRHXWVAIRSIDGTWFNLDS

SEQ ID NO: 93466 - protein, 103 aa, Setaria italica
  Transcript Sequence Number=SeqID_27492
MGSQPPASRAALEPLATLDPAALAGFPASSPLTVRAAALSAHLLYLGTGGGKLLLFSLQDPSTPEFLRLLPIGATLPVSAILPLPSVARLLVLADGLLLLADP

SEQ ID NO: 93467 - protein, 40 aa, Setaria italica
  Transcript Sequence Number=SeqID_27493
MSSVGGQRITISSISCRGVRAFVPFQKPPLYAAVSPREAR

SEQ ID NO: 93468 - protein, 65 aa, Setaria italica
  Transcript Sequence Number=SeqID_27494
LMLVHSSNIMLPRHMFLNPAEQINKEEGTWGRREEQNGDQVPRLNHDQQAGSSSECRRGKGRKPP

SEQ ID NO: 93469 - protein, 139 aa, Setaria italica
  Transcript Sequence Number=SeqID_27495
  Gene Ontology: Mol. function=DNA binding; Cellular component=nucleus; Biological process=regulation of transcription
  Homolog annotation: Hit_ID=Q8LKN9; Match level="QueryCoverage=90%, HitCoverage=41%, E-value=8e-57, Identity=78%"; Hit description=Nam -like protein 15 (Fragment)
  Pfam annotation: Domain name=NAM; Domain location=1-94; Score=180.3; E_value=5.4e-51; Accession=PF02365.7; Description=No apical meristem (NAM) protein
ADVDLNKCEPWDLPSKASMGEKEWYFFSMRDRKYPTGIRTNRATDSGYWKTTGKDKEIFHCGMLVGMKKTLVFYRGRAPKGEKTSWVMHEYRLQNKFPYKPNKEEWVVCRVFKKSQIIKIRPPQGSPTMDDSLGHDANA

SEQ ID NO: 93470 - protein, 172 aa, Setaria italica
  misc_feature (150)..(150): Xaa can be any naturally occurring amino acid
  Transcript Sequence Number=SeqID_27496
  Gene Ontology: Mol. function=nucleotide binding; Cellular component =nucleus; Biological process=small GTPase mediated signal transduction
  Homolog annotation: Hit_ID=P41916; Match level="QueryCoverage=100%, HitCoverage=77%, E-value=8e-95, Identity=95%"; Hit description=GTP -binding nuclear protein Ran-1
  Pfam annotation: Domain name=Arf; Domain location=1-172; Score= -100.7; E_value=0.075; Accession=PF00025.13; Description=ADP -ribosylation factor family
  Pfam annotation: Domain name=MMR_HSR1; Domain location=14-128; Score=- 8.3; E_value=0.0058; Accession=PF01926.15; Description=GTPase of unknown function
  Pfam annotation: Domain name=Miro; Domain location=15-128; Score =51.8; E_value=2.7e-12; Accession=PF08477.5; Description=Miro-like protein
  Pfam annotation: Domain name=Ras; Domain location=15-172; Score =200.0; E_value=6.4e-57; Accession=PF00071.14; Description=Ras family
  Pfam module annotation: Pfam domain module=Arf::MMR_HSR1::Miro::Ras; Domain location=1-172::14-128::15-128::15-172
MALPNQQTVDYPSFKLVIVGDGGTGKTTFVKRHLTGEFEKKYEPTIGVEVHPLDFHTNCGKIRFYCWDTAGQEKFGGLRDGYYIHGQCGIIMFDVTSRLTYKNVPTWHRDLCRVCENIPIVLCGNKVDVKNRQVKAKQVTFHRKKSLQYXYEVSAKSNYNFEKPFLYLAKKL

SEQ ID NO: 93471 - protein, 206 aa, Setaria italica
  Transcript Sequence Number=SeqID_27497
  Gene Ontology: Cellular component=membrane
  Homolog annotation: Hit_ID=B6T9F8; Match level="QueryCoverage=100%, HitCoverage=53%, E-value=6e-83, Identity=73%"; Hit description =Nodulin protein
  Pfam annotation: Domain name=DUF6; Domain location=21-154; Score =49.1; E_value=1.7e-11; Accession=PF00892.12; Description=Integral membrane protein DUF6
  Subcellular localization annotation: CTP_CleavageSite=31; ConfidenceScore=5.02e-01
MGVGKVLNEVKPYLYMVLLMVGFSGMYIVSVASLRRGMSHFVLVVYRNFVGTVLMTPFALLFERGVRPKMTPLIFVKVMGLALLEPVLDQNMYYLGAKLTSAGFASALVNMLPAVTFLMALVLRMEKLRLRSLHSQAKILGTVCTVAGAVLMVLYHGPVVPFPWSSGGAHHHAAVAAGTAASQSGGAWLYGVAMVIGSCVCWAGFF

SEQ ID NO: 93472 - protein, 458 aa, Setaria italica
  Transcript Sequence Number=SeqID_27498
  Gene Ontology: Cellular component=integral to membrane
  Homolog annotation: Hit_ID=Q337C0; Match level="QueryCoverage=100%, HitCoverage=100%, E-value=1e-161, Identity=65%"; Hit description =UPF0496 protein 4
  Pfam annotation: Domain name=DUF793; Domain location=2-336; Score= -207.4; E_value=0.0035; Accession=PF05633.3; Description=Protein of unknown function (DUF793)
MSRAHDGHRSFFPVGNPFRMILPRGARLTPKLTEVLTSYEDGLASSLRKLKPEAASSVLTLSWMRLAVDCLSELHTNIATLITELELPVSDWDEKWVDIYLNSSVKLLDICIALSSELARLDQGQLLVQYVLHVLDSGNQVPSQEQLKRAEVSLKEWMERSSERSPRLDNCSTALQELSGNFCLMKVKHSAKGKVLMRALYGIEAVTVFICSVLVAVLLGSSKPLMEFNVPEKFGWSKAFNDLHKAISGELSRQLSGDRVAAVKELEEVEVCARQLHALTSAAQLEEDNASLVHAVSHSKEVAMSDTTSQEGGHEDNLKLTEDNSREREVIMLQSITKEDGIDTAGIKEDGKTISHTKELMVLEGTSGGHQDDNRNQQDDNRNQSAGVGSEITGLERREQLLNCISSMSKSAKGLRLGLDSLSKRVGDFFQIVLTGRDALLCNLRISDGSKVGAEVRS

SEQ ID NO: 93473 - protein, 172 aa, Setaria italica
  Transcript Sequence Number=SeqID_27499
MAPSSKLAVALLLAVAVLAAASPAATAQTNHKNCDKDKKITVQNLCAHDVVLTLEPLANSPHLFNGAANYTLHPHSHAECPVCWWTGRLHATGAPTAEFHVGPDGGSFYLAANTRSPGQGVPVIISPHGAPLVGECPAVGCPVSGRCSVSQVPSGRCSHVQEIKVIYCSPHV

SEQ ID NO: 93474 - protein, 104 aa, Setaria italica
  misc_feature (60)..(60): Xaa can be any naturally occurring amino acid
  Transcript Sequence Number=SeqID_27500
  Subcellular localization annotation: CTP_CleavageSite=23; ConfidenceScore=5.52e-01
PLLPPPAPVPDPTPPASDQGSARAAAGRAGATSIARAVTPAMRAGGTAREEGARAGRRDXRREEPGPGEGEGPPPPDENDEGAAQRTGRGRDAPSSRPTPSRSP

SEQ ID NO: 93475 - protein, 589 aa, Setaria italica
  Transcript Sequence Number=SeqID_27501
  Gene Ontology: Mol. function=transferase activity, transferring glycosyl groups; Cellular component=integral to membrane
  Homolog annotation: Hit_ID=B9RDH4; Match level="QueryCoverage=90%, HitCoverage=75%, E-value=0.0, Identity=78%"; Hit description =Transferase, transferring glycosyl groups, putative
  Pfam annotation: Domain name=Glyco_transf_8; Domain location=247-563; Score=404.8; E_value=1.4e-118; Accession=PF01501.12; Description =Glycosyl transferase family 8
MAIRAGGSALLALAVLLAASSCLQARVDQLHHGRQVSDWSRKHNFELQNLSSSQMDDLHLLGRPEEITRRKLRDRRTGVRKKMEVVQQDDEALVKLENTGIERSKAVDSAVLGKYSIWRRENENEKADSRVRQMRDQMIMARIYSVLAKSRDKLDLYQELLARLKESQRSLGEATADAELPKSASERIKAMSQVLSKARDLLYDCKAITHRLRAMLLSADEQVRSLKKQSTFLSQLAAKTIPNGIHCLSMRLTIDYYLLSPEKRKFPNSENLENPDLYHYALFSDNVLAASVVVNSTIMNAKEPEKHVFHLVTDKLNFGAMNMWFLLNPPGDATIHVENVDDFKWLNSSYCPVLKQLESAAMKEYYFKADRPKTLSAGSSNLKYRNPKYLSMLNHLRFYLPQVYPKLNKILFLDDDIVVQRDLTGLWEVDLNGNVNGAVETCGESFHRFDKYLNFSNPNISQNFDPNACGWAYGMNMFDLEEWKRKDITGIYHKWQNMNENRLLWKLGTLPPGLLTFYKLTHPLDKSWHVLGLGYNPTIERSEIDNAAVIHYNGNMKPWLEIAMTKYRPYWTKYINYEHPYIHGCKISQ

SEQ ID NO: 93476 - protein, 71 aa, Setaria italica
  misc_feature (61)..(61): Xaa can be any naturally occurring amino acid
  Transcript Sequence Number=SeqID_27502
FDKFVYFKLKDMVEVAEPVQEHVGMVSSSPENDATECQEPTTPRSSAPIELISQFSPDGSXTKKQEQPSPV

SEQ ID NO: 93477 - protein, 674 aa, Setaria italica
  misc_feature (267)..(267): Xaa can be any naturally occurring amino acid
  misc_feature (340)..(340): Xaa can be any naturally occurring amino acid
  misc_feature (353)..(353): Xaa can be any naturally occurring amino acid
  misc_feature (364)..(364): Xaa can be any naturally occurring amino acid
  misc_feature (376)..(376): Xaa can be any naturally occurring amino acid
  Transcript Sequence Number=SeqID_27503
  Homolog annotation: Hit_ID=Q2HTJ8; Match level="QueryCoverage=44%, HitCoverage=32%, E-value=2e-12, Identity=27%"; Hit description=(, related)
TTLQVGFPGRGHSRKNSRDLDEIDEDGANMDECSPSKPTVKRLMEDELGKVKQLKVPNDEVQRILADLGHDVCLDKSSTQNSKSKGDPNHSTSITMSAPARSLDPSGSNCMEEAEENELEFAVADFLGQIHRCHDEQPHQNSKNKGELCSELKVLIQTKLNELDNAPCSLAYEQTPECEEKDMVDGKRLCSSSVTQPKKFRDALEMLSSDTELFLKILQKPNSHILESVQGHQNRHIGTRLVQIPENNNSNKDTKSLSQPELATKTXGKGSRHIPFWKKERPNRRHSAEGTNISQPIKKIVILKPNPIGGIEPAVSASSTQDPELSASESSKFSIKEVRXRFTIVTSEARKGXPSVCEDSLQKXQHWFKSSPFTIXTNTRQLTEQTSEEKFSSTAIKDSRSSTSSRQKQRNDGPNEINSNIITSSKDGSVFYDEAKKHLAEILKDKSQMAKYPTLRISRSLVRMLSLPQCSTPSPRSSPRAKDCIYLSPEEANVDAIYKAKREELAKEESQTGEISESVACEAQHEQDGHWVKEDSQETTQDDVEPNTLRTEEIDKLDCLEKNGSAWHIPVEQCRHKPLQDMVEVAEPVQEHVGMVSSSPENDATECQEPTTPRSSAPIELISQFSPDGSHEKQEQPSPVSVLDFFFHEDVNSPNNENIIKCELHEDILRLQYT

SEQ ID NO: 93478 - protein, 60 aa, Setaria italica
  Transcript Sequence Number=SeqID_27504
AALDPAVRRHAPLGQDSKLQLRPDLLPPYLHLASTPCSTAPILQDFDGKKDIFNQREVCG

SEQ ID NO: 93479 - protein, 113 aa, Setaria italica
  Transcript Sequence Number=SeqID_27505
  Gene Ontology: Mol. function=ATPase activity, coupled to transmembrane movement of substances; Cellular component=integral to membrane; Biological process=transport
  Homolog annotation: Hit_ID=Q5JLI1; Match level="QueryCoverage=94%, HitCoverage=58%, E-value=6e-46, Identity=67%"; Hit description =Putative CjMDR1
VFEFTVSEEGVIITSVRGDIDFQNVFFKYPLRPNVQIFKDLSMRIPSGKSVALVGESGSGKSTVIALLERFYDPDSGKILFDDVELQAFKVGWLRQQVGLVAQEPVLFNDTIR

SEQ ID NO: 93480 - protein, 603 aa, Setaria italica
  Transcript Sequence Number=SeqID_27506
  Gene Ontology: Mol. function=ATPase activity, coupled to transmembrane movement of substances; Cellular component=integral to membrane; Biological process=transport
  Homolog annotation: Hit_ID=Q7FMW2; Match level="QueryCoverage=99%, HitCoverage=91%, E-value=0.0, Identity=59%"; Hit description=MDR -like ABC transporter
  Pfam annotation: Domain name=ABC_membrane; Domain location=38-316; Score=164.8; E_value=2.5e-46; Accession=PF00664.15; Description=ABC transporter transmembrane region
  Pfam annotation: Domain name=ABC_tran; Domain location=388-573; Score= 218.6; E_value=1.6e-62; Accession=PF00005.19; Description=ABC transporter
  Pfam module annotation: Pfam domain module=ABC_membrane::ABC_tran; Domain location=38-316::388-573
EFSEAPDVQETTDKITSAPRKAPIGRLFYLNKPEAFVLGLGSIIAAMHGVIFPIYGILISTAIKVFYEPPAELLKESRFLASMFVVLGVCVFVLIPIEYFLFGLAGGKLVERVRSLTFQSVMRQEINWFDKPEHSSGSIGARLSTDALNVKQLVGDNLALNVQTLSTVISGFTIAMVANWKLALIITVVVPFVGFQAYAQMKFLGGLNRNAKLKYEEASQVATDAVGGIRTVASFSAEKKVMDAYEKKCESPTKKGIREGVIGGLGFGFSFLTFYFTYALCFYVGAKFVQQGTATFPEVFRVFFVLVLGASAISRASAFGVDSTKANDAAASVFEILDRKSKIDYSSEEGVIITSVRGDIDFQNVFFKYPLRPNVQIFKDLSMRIPSGKSVALVGESGSGKSTVIALLERFYDPDSGKILFDDVELQAFKVGWLRQQVGLVAQEPVLFNDTIRANIAYGKQGEASEDEIVAAAEAANAHQFISALPDGYNTIAGERGIQLSGGQKQRIAIARAIIKDPKVLLLDEATSALDSESERVVQEALDQVMVGRTTVVVAHRLATIRGADIIAVLKNGAVAEKGRHEELMRIKDGTYASLVELSSSSA

SEQ ID NO: 93481 - protein, 83 aa, Setaria italica
  misc_feature (10)..(10): Xaa can be any naturally occurring amino acid
  Transcript Sequence Number=SeqID_27507
  Gene Ontology: Mol. function=protein serine/threonine kinase activity; Cellular component=basolateral plasma membrane; Biological process=protein amino acid phosphorylation
  Homolog annotation: Hit_ID=B9RMV5; Match level="QueryCoverage=100%, HitCoverage=12%, E-value=7e-17, Identity=48%"; Hit description =Serine/threonine-protein kinase, putative
EYKLQRLVGXGSFAKVFRAAHRRTGARVAVKAIDRRRVEKRVHEGILKEREILKSIDHPNILRLLDTIDTTNMMYLVLEYCDG

SEQ ID NO: 93482 - protein, 83 aa, Setaria italica
  Transcript Sequence Number=SeqID_27508
  Homolog annotation: Hit_ID=B6U6Q3; Match level="QueryCoverage=92%, HitCoverage=12%, E-value=8e-24, Identity=72%"; Hit description=ATPase
LVCKPRRLTHDSYQENVASELDNLLRRLQQYEMEMEDYHAKLYIWENSREKERRRLLVEEAEDKQRDGVWIDEERGFLDKLVT

SEQ ID NO: 93483 - protein, 108 aa, Setaria italica
  Transcript Sequence Number=SeqID_27509
  Gene Ontology: Mol. function=ribose-5-phosphate isomerase activity; Biological process=pentose-phosphate shunt, non-oxidative branch
  Homolog annotation: Hit_ID=B6U2Y8; Match level="QueryCoverage=95%, HitCoverage=34%, E-value=2e-18, Identity=56%"; Hit description =Ribose-5-phosphate isomerase
  Subcellular localization annotation: CTP_CleavageSite=44; ConfidenceScore=5.36e-01
MEAIVRAGVSSSAPAQLRPCPMPCRNRCLPSSVRRPGRRGVACSASAADADVVDLFDAAKLTVDRFVQSGMVVGLGSGPASALAVQYLGTRLRRGSLTDIVAVTSSVL

SEQ ID NO: 93484 - protein, 63 aa, Setaria italica
  Transcript Sequence Number=SeqID_27510
SGKLEQFPTLSFKCIRYLIIELVVEHRISNGCHFSTISLHSLTQRLLQWGSRPQPQLHPVDRD

SEQ ID NO: 93485 - protein, 79 aa, Setaria italica
  Transcript Sequence Number=SeqID_27511
ELPKRDDGVCYFGLHLQRLIWAQKPNLFEAVDGGERGEAVPEASVDGDMEMGQEDGDEDADTDVKSKSLEELELGDGEA

SEQ ID NO: 93486 - protein, 85 aa, Setaria italica
  Transcript Sequence Number=SeqID_27512
  Gene Ontology: Mol. function=transferase activity, transferring hexosyl groups; Biological process=metabolic process
CRLASGTESQAQNLKQAMEKTIVLYPGVFVSHFVPMMQLADVLLADGYAVAVALIDLTLDQDVALAATVDRVAAAKPSLAIHRLP

SEQ ID NO: 93487 - protein, 82 aa, Setaria italica
  Transcript Sequence Number=SeqID_27513
  Subcellular localization annotation: CTP_CleavageSite=55; ConfidenceScore=5.05e-01
MLDKKEDRTRMLPKSSSQKTLRAAMQEERATMASRLLSKDPSSVSNPSFRVYYGVASAGSVPFMWESAPGTPKNSISDTTLP

SEQ ID NO: 93488 - protein, 81 aa, Setaria italica
  Transcript Sequence Number=SeqID_27514
  Subcellular localization annotation: CTP_CleavageSite=57; ConfidenceScore=5.76e-01
LLTFIAPTSQVTTSSLSQIHFASSPRSPCAASSAGAVVALSPHSPPPNAPCAAALAVAAARSPRWPPRAAISPHRRPPPRA

SEQ ID NO: 93489 - protein, 185 aa, Setaria italica
  misc_feature (130)..(130): Xaa can be any naturally occurring amino acid
  misc_feature (166)..(166): Xaa can be any naturally occurring amino acid
  Transcript Sequence Number=SeqID_27515
  Gene Ontology: Mol. function=drug transporter activity; Cellular component=membrane; Biological process=multidrug transport
  Homolog annotation: Hit_ID=B9RZD1; Match level="QueryCoverage=98%, HitCoverage=36%, E-value=2e-48, Identity=54%"; Hit description =Multidrug resistance pump, putative
  Pfam annotation: Domain name=MatE; Domain location=1-118; Score=21.3; E_value=0.00016; Accession=PF01554.10; Description=MatE
  Subcellular localization annotation: CTP_CleavageSite=30; ConfidenceScore=5.27e-01
ALGFNAAVSVRVSNELGANRPKAAKFSVIMAVLTSGSIGAVFFAVFLTWRTGLPRFFSEDEDVLREAAKLGYLLAGSIFLNSIQPVLSGVAIGAGWQALVAFVNIGSYYFVGIPLAALFGFKLKMDAMGXIGWGMTLGTLLQTAILLFISYRTKWDKQAMRAEERXVREWGGRNEALPSATQVAP

SEQ ID NO: 93490 - protein, 74 aa, Setaria italica
  Transcript Sequence Number=SeqID_27516
  Subcellular localization annotation: CTP_CleavageSite=13; ConfidenceScore=5.14e-01
SISCRAIISRSSQSSNVSSLQLSGSWTCRWVPAHEPFHCMTSSHRSMQIHEQIAKALNSFAPADGLPLFSPSPP

SEQ ID NO: 93491 - protein, 176 aa, Setaria italica
  misc_feature (153)..(153): Xaa can be any naturally occurring amino acid
  Transcript Sequence Number=SeqID_27517
  Gene Ontology: Mol. function=heparin binding
  Homolog annotation: Hit_ID=Q9AUL3; Match level="QueryCoverage=99%, HitCoverage=48%, E-value=2e-74, Identity=79%"; Hit description =Putative angio-associated migratory cell protein
  Pfam annotation: Domain name=WD40; Domain location=105-143; Score =22.7; E_value=0.0016; Accession=PF00400.24; Description=WD domain, G- beta repeat
  Pfam annotation: Domain name=WD40; Domain location=18-56; Score=29.1; E_value=1.8e-05; Accession=PF00400.24; Description=WD domain, G-beta repeat
  Pfam annotation: Domain name=WD40; Domain location=60-98; Score=46.9; E_value=7.7e-11; Accession=PF00400.24; Description=WD domain, G-beta repeat
  Pfam module annotation: Pfam domain module=WD40::WD40::WD40; Domain location=105-143::18-56::60-98
LACGSFDGQINVWNTAIRSLHGTLEGSGSGFEWLKWHPRGHLIIAGSEDCNVWMWNADHNAFLNTFAGHSSTVTCGDFTPDGKLICTGSDDATLRIWDPRSAQSRHVVRGHGYHTDGLTCLSITLDSQTVVSGSKDNSVHIVNVNSGQVVGSXLVGHTNSIECVGISSKTNGLGTD

SEQ ID NO: 93492 - protein, 397 aa, Setaria italica
  Transcript Sequence Number=SeqID_27518
  Gene Ontology: Mol. function=heparin binding; Cellular component =cytoplasm
  Homolog annotation: Hit_ID=Q9AUL3; Match level="QueryCoverage=83%, HitCoverage=91%, E-value=1e-164, Identity=85%"; Hit description =Putative angio-associated migratory cell protein
  Pfam annotation: Domain name=WD40; Domain location=100-138; Score =44.4; E_value=4.3e-10; Accession=PF00400.24; Description=WD domain, G-beta repeat
  Pfam annotation: Domain name=WD40; Domain location=142-180; Score =29.1; E_value=1.8e-05; Accession=PF00400.24; Description=WD domain, G-beta repeat
  Pfam annotation: Domain name=WD40; Domain location=184-222; Score =46.9; E_value=7.7e-11; Accession=PF00400.24; Description=WD domain, G-beta repeat
  Pfam annotation: Domain name=WD40; Domain location=229-267; Score =22.7; E_value=0.0016; Accession=PF00400.24; Description=WD domain, G- beta repeat
  Pfam annotation: Domain name=WD40; Domain location=271-309; Score =37.9; E_value=4e-08; Accession=PF00400.24; Description=WD domain, G -beta repeat
  Pfam annotation: Domain name=WD40; Domain location=312-350; Score =36.1; E_value=1.4e-07; Accession=PF00400.24; Description=WD domain, G-beta repeat
  Pfam annotation: Domain name=WD40; Domain location=354-392; Score =32.9; E_value=1.3e-06; Accession=PF00400.24; Description=WD domain, G-beta repeat
  Pfam annotation: Domain name=WD40; Domain location=57-96; Score=23.9; E_value=0.00066; Accession=PF00400.24; Description=WD domain, G-beta repeat
  Pfam module annotation: Pfam domain module=WD40::WD40::WD40::WD40::WD4 0::WD40::WD40::WD40; Domain location=100-138::142-180::184-222::229 -267::271-309::312-350::354-392::57-96
MSISGELPGEGSDGEEEVFINEEDIIHEITIDDEDLPDRDDDDEDGGDGMGDSEDVDDSTYIFQGHKDEVFTVACSPTDASLVASGGKDDRGFLWRIGSAEGALELTGHSDTVSTVAFSSDGNLLACGSFDGQINVWNTAIRSLHGTLEGSGSGFEWLKWHPRGHLIIAGSEDCNVWMWNADHNAFLNTFAGHSSTVTCGDFTPDGKLICTGSDDATLRIWDPRSAQSRHVVRGHGYHTDGLTCLSITLDSQTVVSGSKDNSVHIVNVNSGQVVGSLVGHTNSIECVGISSSYGWAATGSMDQKLIIWDLAHQSSRCICEHDEGVTSLAWLGSSRYVASGCIDGKVRIWDSLSGDCAREFSGHADVVQSLATTADGNALVSASTDGSARVFDISMFK

SEQ ID NO: 93493 - protein, 50 aa, Setaria italica
  Transcript Sequence Number=SeqID_27519
VAQTYQDVVMGPDYSLLFNLTRRCQILQFSLCSETKRKSKNPKAIGQYMF

SEQ ID NO: 93494 - protein, 93 aa, Setaria italica
  Transcript Sequence Number=SeqID_27520
QTELSLPTLEENVEVFQLPPKLPEQKATPSGAVIGSRACCAIASIFSLSTTSRQLLFGDSDKFEYAFSTRNLLDSGSTRSLCSGCGNLFSLVK

SEQ ID NO: 93495 - protein, 219 aa, Setaria italica
  Transcript Sequence Number=SeqID_27521
  Gene Ontology: Mol. function=nucleotide binding; Biological process =defense response
  Homolog annotation: Hit_ID=Q6IYE1; Match level="QueryCoverage=97%, HitCoverage=26%, E-value=1e-47, Identity=47%"; Hit description=LZ -NBS-LRR class
MLRVECDSSKPHGFKGFIVRSMKLMTTVNTRHEIAKEFEGLKNRVKEVSERRTRYKMDDVAPKSNNTAIDLRLLALHAETASLVGVTGPRDQLIQLMDAEGVPAHQLKVLSIVGFGGLGKTTLANEIYRKLEKFQCQAFVSVSQKPNIRKILRTILSQVGFVPPKDTNIEMWEEPELISSVKKILLDKRYLIVIDDIWDASAWYVIRCALPESMNGSSS

SEQ ID NO: 93496 - protein, 97 aa, Setaria italica
  Transcript Sequence Number=SeqID_27522
  Gene Ontology: Mol. function=protein tyrosine phosphatase activity; Biological process=dephosphorylation
  Homolog annotation: Hit_ID=B6TNL4; Match level="QueryCoverage=98%, HitCoverage=44%, E-value=1e-26, Identity=65%"; Hit description =Tyrosine specific protein phosphatase family protein
MKLEVPARQRSQDAEQNDKAAGVLGIEPWNHPTTKLPFPEAGAGDDALVPPVNFAMVDDGIFRSGLPDAANFSFLLSLNLRSIVYLCPEPYPEENAT

SEQ ID NO: 93497 - protein, 66 aa, Setaria italica
  Transcript Sequence Number=SeqID_27523
PLSTPHHQLSSSHEALPHPAPLRLRLPISTYPTALASLPIAHYATLRSPPASRPYTAALRSSPHNP

SEQ ID NO: 93498 - protein, 295 aa, Setaria italica
  Transcript Sequence Number=SeqID_27524
  Gene Ontology: Mol. function=electron carrier activity; Cellular component=extracellular region; Biological process=response to oxidative stress
  Homolog annotation: Hit_ID=B6T750; Match level="QueryCoverage=90%, HitCoverage=76%, E-value=1e-145, Identity=93%"; Hit description =Peroxidase 17
  Pfam annotation: Domain name=peroxidase; Domain location=1-243; Score= 394.5; E_value=1.8e-115; Accession=PF00141.15; Description=Peroxidase
ARARAREASSVASVMRLQFHDCFVNGCDGSVLMDATPTMPGEKDALSNINSLRSFEVVDEIKEALEERCPGVVSCADIVIMAARDAVVLTGGPSWEVRLGRDDSLTASQEDSDSIMPSPRANASALIRLFAGLNLSVTDLVALSGSHSIGEARCFSIVFRLYNQSGSGRPDPHMDAAYRCALDALCPKGGDEEVTGGMDATPRAFDNQYFKDLVALRGFLNSDQTLFSDNARTRRVVKRFSKDQNAFFRAFAEGMIKMGELQNPRKGEIRRNCRVANNSPATTPKEVAAYRVMDF

SEQ ID NO: 93499 - protein, 284 aa, Setaria italica
  Transcript Sequence Number=SeqID_27525
  Gene Ontology: Mol. function=protein dimerization activity
  Homolog annotation: Hit_ID=A8QW53; Match level="QueryCoverage=100%, HitCoverage=75%, E-value=5e-99, Identity=65%"; Hit description=O -methyltransferase 3
  Pfam annotation: Domain name=Methyltransf_2; Domain location=3-261; Score=291.9; E_value=1.4e-84; Accession=PF00891.10; Description=O -methyltransferase
SPSDDGHEPVYKLTTASRLLLTSNNDNGGGEGSTVTLSPVLNHVLNPFRDSVLSMGLTAWFRHDGEQHGPCPFALMHGETLWEVSGRDDALNASVNDAMAADSRILMRVVLKECGEVFGGIDSLVDVAGGIGGAATVIASAFPSLKCSVLDLPHVVAKAPSGSNVQFVAGDMFQRIPPANAVFLKWILHDWGDDECINILKNCKQAIPSRDAGGKVIIIDIVVGSKSSDAKLLETQVLYDFDIMKIGGVERDEQEWKKIFLEAGFNDYTIMPVLGLRSIIVLYP

SEQ ID NO: 93500 - protein, 82 aa, Setaria italica
  Transcript Sequence Number=SeqID_27526
SRIGDSWPSWSSRGSRARLRIWGDKMGRVALSCLGNDYGKGWHLQCLWKENLKGPPMQVGTAHSVEPYTLYGTQKEVSLHSI

SEQ ID NO: 93501 - protein, 57 aa, Setaria italica
  Transcript Sequence Number=SeqID_27527
FEPDTFLCLLLQTHTMIPLQRCGKINTKASKQEPTIGDYPCHFLDASFYNLVTHGVC

SEQ ID NO: 93502 - protein, 195 aa, Setaria italica
  Transcript Sequence Number=SeqID_27528
  Gene Ontology: Mol. function=methyltransferase activity; Biological process=methylation
  Homolog annotation: Hit_ID=B9T8H4; Match level="QueryCoverage=100%, HitCoverage=48%, E-value=8e-93, Identity=81%"; Hit description=DNA binding protein, putative
LPFLTPDSTFKIVVDSFGKVISSQEQNEIMQSLTYIPFKGRVNLKKPDHRFFVMETDDYGSNNGLPPVAKRTIFFGREVGAADRHLLPTYQLKSRKYIGPTAMDAEMAFLMANQGLARPGKLVYDPFVGTGSILVAAAHFGAMTMGADIDIRVVRDGRGPDCNVWSNFEQYKLPEPLGLLRADNNLPPWRPGLKE

SEQ ID NO: 93503 - protein, 80 aa, Setaria italica
  Transcript Sequence Number=SeqID_27529
VSVIERTNLRYLSELLQPVDLVTLDLSFISILLNASQDSSGGLLQFSSCNLAIVVQGVGKFSIYSWVLFTKLILGKVSVI

SEQ ID NO: 93504 - protein, 101 aa, Setaria italica
  misc_feature (48)..(48): Xaa can be any naturally occurring amino acid
  Transcript Sequence Number=SeqID_27530
  Gene Ontology: Mol. function=RNA binding; Biological process =hemolysis by symbiont of host red blood cells
  Homolog annotation: Hit_ID=B6UCU6; Match level="QueryCoverage=94%, HitCoverage=32%, E-value=3e-40, Identity=85%"; Hit description =Hemolysin A
VMPAVIKVMKMDSTLVTLIKPQFEARRSQVGSGGIVRDLLVHKEVLDXISGVEEFGFCNKGWIESPIKGAERNTEFLACFHRVPISEWQPEVETKAEIEVT

SEQ ID NO: 93505 - protein, 204 aa, Setaria italica
  misc_feature (94)..(94): Xaa can be any naturally occurring amino acid
  Transcript Sequence Number=SeqID_27531
  Gene Ontology: Mol. function=RNA binding; Biological process =hemolysis by symbiont of host red blood cells
  Homolog annotation: Hit_ID=B6UCU6; Match level="QueryCoverage=96%, HitCoverage=66%, E-value=1e-99, Identity=92%"; Hit description =Hemolysin A
  Pfam annotation: Domain name=FtsJ; Domain location=6-186; Score=-2.4; E_value=3.5e-06; Accession=PF01728.11; Description=FtsJ-like methyltransferase
NPKIIAGHKLEAAIKEFGIGCDGKIALDSGLSTGGFTDCLLQNGASHVYGVDVGYGQVAEKIRTHERVSVIERTNLRYLSQLPQPVDLVTLDLXSFISILLVMPAVIKVMKMDSTLITLIKPQFEARRSQVGGGGIVRDPLVHKEVLDRIISGVEEFGFCNKGWIESPIKGAEGNKEFLACFHRIPISESQPEVETKTEAEATW

SEQ ID NO: 93506 - protein, 99 aa, Setaria italica
  misc_feature (56)..(56): Xaa can be any naturally occurring amino acid
  Transcript Sequence Number=SeqID_27532
  Gene Ontology: Mol. function=RNA binding; Biological process =hemolysis by symbiont of host red blood cells
  Homolog annotation: Hit_ID=B6UCU6; Match level="QueryCoverage=80%, HitCoverage=27%, E-value=3e-31, Identity=84%"; Hit description =Hemolysin A
VYWLLVLFGLTVLGWSVIGIGCDGKIALDSGLSTGGFTDCLLQHGASHVYGVDVGXLKKIRIHKCVSVIERTNLRYLSELLQPVDLVTLDLSFISILLV

SEQ ID NO: 93507 - protein, 57 aa, Setaria italica
  Transcript Sequence Number=SeqID_27533
  Gene Ontology: Mol. function=oxidoreductase activity; Cellular component=mitochondrial matrix; Biological process=metabolic process
  Homolog annotation: Hit_ID=A9Z0U5; Match level="QueryCoverage=100%, HitCoverage=10%, E-value=1e-23, Identity=92%"; Hit description =Aldehyde dehydrogenase
MSADAGAAMEKIRAAGLLRTQGLIAGQWVDAYDGKTIEVQNPATGEVLASVSCMGSR

SEQ ID NO: 93508 - protein, 70 aa, Setaria italica
  Transcript Sequence Number=SeqID_27534
  Gene Ontology: Mol. function=transporter activity; Cellular component= membrane; Biological process=transport
  Homolog annotation: Hit_ID=B6TEJ2; Match level="QueryCoverage=74%, HitCoverage=9%, E-value=7e-19, Identity=86%"; Hit description =Permease I
PITDLQTLNSLDECAWLIYLLVAPTISIILAGRYSNEADPREKFLRTMRGTQGALIIASTIQIILGFSGL

SEQ ID NO: 93509 - protein, 97 aa, Setaria italica
  misc_feature (55)..(55): Xaa can be any naturally occurring amino acid
  Transcript Sequence Number=SeqID_27535
PVAVGLQLAARIWASDTQLLEFTLPVLHAMQEEASSKSLHASACLLLRYAIYASXSCTDKAAHQAGVQYRSTLSSFVLFFTRYQRPVWTEEEEAKDS

SEQ ID NO: 93510 - protein, 528 aa, Setaria italica
  Transcript Sequence Number=SeqID_27536
  Gene Ontology: Mol. function=oxidoreductase activity, acting on the aldehyde or oxo group of donors, NAD or NADP as acceptor; Cellular component=mitochondrial matrix; Biological process=oxidation reduction
  Homolog annotation: Hit_ID=A9Z0U5; Match level="QueryCoverage=94%, HitCoverage=94%, E-value=0.0, Identity=91%"; Hit description =Aldehyde dehydrogenase
  Pfam annotation: Domain name=Aldedh; Domain location=63-522; Score =787.3; E_value=1.1e-233; Accession=PF00171.14; Description=Aldehyde dehydrogenase family
  Subcellular localization annotation: CTP_CleavageSite=37; ConfidenceScore=5.03e-01
MAMAIGMMTMRRAAALGARHILAASSSSRVVPLRHMSADAGAAMEKIRAAGLLRTQGLIAGQWVDAYDGKTIEVQNPATGEVLASVSCMGSRETSDAIASAHSTFYSWSKLTANERSKALRKWYDLIIAHKEELALLMTLEQGKPMKEALGEVNYGASFIEYFAEEAKRIYGDIIPPTLSDRRLLVLKQPVGVVGAITPWNFPLAMITRKVGPALACGCTVVVKPSEFTPLTALAAADLALQAGIPAGALNVVMGNAPEIGDALLQSTQVRKITFTGSTAVGKKLMAGSADTVKKVSLELGGNAPCIVFDDADIDVAVKGSLAAKFRNSGQTCVCANRILVQEGIYEKFASAFIKAVQSLQVGNGLEESTSQGPLINEAAVQKVEKFINDATSKGANVMLGGKRHSLGMTFYEPTVVGNVSNDMLLFREEVFGPVAPLIPFKTEEEAIHLANDTNAGLAAYIFTRSIPRSWRVSESLEYGLVGVNEGIISTEVAPFGGVKQSGLGREGSKYGVDEYLELKYICMGNMG

SEQ ID NO: 93511 - protein, 67 aa, Setaria italica
  Transcript Sequence Number=SeqID_27537
  Gene Ontology: Cellular component=membrane
  Homolog annotation: Hit_ID=Q2QVM7; Match level="QueryCoverage=100%, HitCoverage=12%, E-value=1e-21, Identity=74%"; Hit description =Exostosin family protein, expressed
AIRDRVFDVCESAAARGRCGLVDCSHGLEGSITCRTAAKLVALFASARFCLQPRGDSFMRRSSIDSV

SEQ ID NO: 93512 - protein, 146 aa, Setaria italica
  Transcript Sequence Number=SeqID_27538
  Gene Ontology: Mol. function=oxidoreductase activity; Cellular component=extracellular region; Biological process=lignin catabolic process
  Homolog annotation: Hit_ID=Q2R0L0; Match level="QueryCoverage=87%, HitCoverage=21%, E-value=6e-30, Identity=51%"; Hit description =Laccase-20
VQYGNKQELPKEKDVPSSDIPVSPEMPDQHDMITSFYFHGNLTGLHHPQHLEVPKHVDERLFITLGLGSICRGGQSSCKRSENNESVDVATMNNFSYQQPAVATPLLELHSYNTDNCVLSMLQELPDKPPRVFNYTDPALIHLDAK

SEQ ID NO: 93513 - protein, 70 aa, Setaria italica
  Transcript Sequence Number=SeqID_27539
GRLLAGVFLPRLREVSGSTDRFCLPDLACFKFSSDFSSQIRLKYSSSSYSDLATIFGGLCCSLFLCDYTI

SEQ ID NO: 93514 - protein, 37 aa, Setaria italica
  Transcript Sequence Number=SeqID_27540
CLSLLVHSTGGLLPVNEYGVLMQSLQMGESYFLVTRG

SEQ ID NO: 93515 - protein, 80 aa, Setaria italica
  Transcript Sequence Number=SeqID_27541
GENAMRRLASVLSLRCLKLSGGAFTEQELVFRVLQFKALKILVLEGGPITTVTFLAADAAPALEKIVWAIGRSRVRDGED

SEQ ID NO: 93516 - protein, 144 aa, Setaria italica
  Transcript Sequence Number=SeqID_27542
  Gene Ontology: Mol. function=nucleotide binding; Biological process =defense response
  Homolog annotation: Hit_ID=Q9ATQ8; Match level="QueryCoverage=100%, HitCoverage=15%, E-value=3e-25, Identity=46%"; Hit description=LRR19
RSEHCDYLCNAVSNLSCLVHLEIMAQNEEELQLQGLHLPQTLSWLGFEGRLEAASMLQVMSSLLHLQNLTRLQLVLSRLDEESFSRLLVLQRLCSLQLTNAFEGKKLHFRAMSFPKLRYLNIFGAPHVAQVQIEESALSSLVEL

SEQ ID NO: 93517 - protein, 122 aa, Setaria italica
  Transcript Sequence Number=SeqID_27543
  Gene Ontology: Mol. function=nucleoside-triphosphatase activity; Cellular component=membrane; Biological process=transport
  Homolog annotation: Hit_ID=Q8GU83; Match level="QueryCoverage=100%, HitCoverage=8%, E-value=3e-39, Identity=62%"; Hit description=PDR -like ABC transporter
IVSLTPNNQVATIMSSMCFITQNLMAGFVVPGPQIPKWWIWLYRISPTSWMLNVLFTTQFLYDDDKNIMVSGEIIPMTSFVKNYFGYSRDLLPLAAVMLTIFPILFGTIFAYNISKLNFQRR

SEQ ID NO: 93518 - protein, 195 aa, Setaria italica
  misc_feature (142)..(142): Xaa can be any naturally occurring amino acid
  Transcript Sequence Number=SeqID_27544
  Gene Ontology: Mol. function=electron carrier activity; Cellular component=membrane; Biological process=oxidation reduction
  Homolog annotation: Hit_ID=B9II24; Match level="QueryCoverage=80%, HitCoverage=30%, E-value=2e-29, Identity=43%"; Hit description =Cytochrome P450
MEAAAAVAALLLLLALSAALVSRRRSGSHRLPPSPMALPLIGHLHLIRPPPHRAFDRILARYGPLVYLRLGPSTHCVVAGTADAARDLLKFEASIPERPLTVVTRHLAYDDAGFAFAPYGQHWRFMKRLCMSELLGPRTVEXCRPVREAELAAVLRAARDAAARGEAVDVSRHLISMSNNAIMRMVALLDMLMRW

SEQ ID NO: 93519 - protein, 294 aa, Setaria italica
  Transcript Sequence Number=SeqID_27545
  Gene Ontology: Mol. function=electron carrier activity; Cellular component=membrane; Biological process=oxidation reduction
  Homolog annotation: Hit_ID=B9II24; Match level="QueryCoverage=100%, HitCoverage=58%, E-value=5e-78, Identity=48%"; Hit description =Cytochrome P450
  Pfam annotation: Domain name=p450; Domain location=1-294; Score= -32.1; E_value=4.2e-10; Accession=PF00067.14; Description=Cytochrome P450
VDVSRHLISMSNNAIMRMVASALPGHMTEAARDCAKHVAEVVGAFNLEDYVGICRGWDLQGLTRRTREVRDKFDALMEIMITAKEEARRSPAAAGQPKAATKDLLDILMDAAEDQNAEVKLTRENIKAFILDIFTAGSDTTATSVEWMLSHLINHPACLDRLRAEVDDVVGGARLVGEHDVARLPYLQAVFKETLRLQPPAVFAQRETIEPVHVRGYTIPPKTSVFFNIFSIGRDPGSWEEPLQFRPERFMPGGAGAGVDPKGQHMQLIPFGSGRRACPGMGLAMVSVPAFLAA

SEQ ID NO: 93520 - protein, 62 aa, Setaria italica
  Transcript Sequence Number=SeqID_27546
FFIYGVSFHFISTQIFTFIIGRWIHLCGVVWCGQTVSLKSEYPPTWFMFIMHLCGVVWCGQT

SEQ ID NO: 93521 - protein, 93 aa, Setaria italica
  Transcript Sequence Number=SeqID_27547
  Subcellular localization annotation: CTP_CleavageSite=72; ConfidenceScore=5.43e-01
HVGELAAGHILDPPGLLRRKERSVPPPSARRPPGRRPSPPLPGARRRRPNPPLPGRGSAGRGRAPTRRRLVLAVGVPARRSLNEVAREEVACA

SEQ ID NO: 93522 - protein, 58 aa, Setaria italica
  Transcript Sequence Number=SeqID_27548
TMNWHYWHQQVDRPTSLTRHSVLSMMIYEGTSYDILAKGLPRSGTMYMIKTCHHKYSS

SEQ ID NO: 93523 - protein, 63 aa, Setaria italica
  Transcript Sequence Number=SeqID_27549
  Gene Ontology: Mol. function=zinc ion binding
  Homolog annotation: Hit_ID=Q9SRZ1; Match level="QueryCoverage=84%, HitCoverage=4%, E-value=1e-20, Identity=88%"; Hit description =F22D16.1 protein
FVDPDVALSYIDEKLQDVLGHFQKDFEGGVSAENLGSKFGGYGSFLPTYQRSPLPQTRSPHKA

SEQ ID NO: 93524 - protein, 78 aa, Setaria italica
  Transcript Sequence Number=SeqID_27550
MDDSVLFDDLGPSKAPPASVYDDMFDSYFNRAAEPPEPSPKASSSPSTPPPVFDKPVFDDDPDTVDPFEAIPLFGDGG

SEQ ID NO: 93525 - protein, 214 aa, Setaria italica
  Transcript Sequence Number=SeqID_27551
  Gene Ontology: Mol. function=metal ion binding; Cellular component =plasma membrane
  Homolog annotation: Hit_ID=B6SXK5; Match level="QueryCoverage=100%, HitCoverage=30%, E-value=1e-113, Identity=91%"; Hit description =Protein binding protein
  Pfam annotation: Domain name=PHD; Domain location=4-51; Score=4.0; E _value=0.0095; Accession=PF00628.21; Description=PHD-finger
  Pfam annotation: Domain name=zf-C3HC4; Domain location=5-48; Score =40.4; E_value=7.2e-09; Accession=PF00097.17; Description=Zinc finger, C3HC4 type (RING finger)
  Pfam module annotation: Pfam domain module=PHD::zf-C3HC4; Domain location=4-51::5-48
SKRMCAICFDSMKPGHGQALFTAECSHMFHFHCISSSVKHGNHVCPICRAKWKEIPFNRSLSSIVPRGRGGLNANQARLPQQDAYMALLRPVPNRQREAPVLLGSEPVDFNDDEPLQKMESANIGSSRTVEIKAYPEFSAIPQSSQDDFAVLIHLKAPYANPEQVTGRSVNVTSNGYPTSRAPVDLVTVLDVSGSMAGTKLALLKRAMGFVIQH

SEQ ID NO: 93526 - protein, 158 aa, Setaria italica
  Transcript Sequence Number=SeqID_27552
  Gene Ontology: Mol. function=transcription regulator activity; Cellular component=nucleus; Biological process=regulation of transcription, DNA-dependent
  Homolog annotation: Hit_ID=Q5QCN0; Match level="QueryCoverage=99%, HitCoverage=22%, E-value=2e-69, Identity=74%"; Hit description =Ethylene insensitive 3-like 4
  Pfam annotation: Domain name=EIN3; Domain location=1-158; Score =161.2; E_value=3.1e-45; Accession=PF04873.5; Description=Ethylene insensitive 3
GVCSAQGFVYGIIPENGKPVTGASDNLRAWWKEKVRFDRNGPAAVARYQGAGGGDGGAVAAAPAGPHSLHELQDTTLGSLLSALMQHCDPPQRRFPLEKGVPPPWWPQGAEPWWPEAGVPRELGPPPYKKPHDLKKAWKVAVLTAVIKHIVPDVDKVR

SEQ ID NO: 93527 - protein, 122 aa, Setaria italica
  Transcript Sequence Number=SeqID_27553
  Gene Ontology: Mol. function=transcription regulator activity; Cellular component=nucleus; Biological process=regulation of transcription, DNA-dependent
  Homolog annotation: Hit_ID=B2BA48; Match level="QueryCoverage=93%, HitCoverage=17%, E-value=9e-45, Identity=71%"; Hit description =Ethylene insensitive-like protein 4
  Pfam annotation: Domain name=EIN3; Domain location=1-122; Score= -76.0; E_value=1.2e-09; Accession=PF04873.5; Description=Ethylene insensitive 3
SVGWPEAGVPRELGPPPYKKPHDLKKAWKVAVLTAVIKHMSPDVDKVRRLVRQSKCLQDKMTAREIVTWLAVLKQEEDLYLMLHPGAHPPPCSTNAAALPFSASSGEYDVDGADDGEETARN

SEQ ID NO: 93528 - protein, 206 aa, Setaria italica
  misc_feature (29)..(29): Xaa can be any naturally occurring amino acid
  Transcript Sequence Number=SeqID_27554
  Gene Ontology: Mol. function=protein dimerization activity; Cellular component=nucleus; Biological process=regulation of transcription, DNA-dependent
  Homolog annotation: Hit_ID=Q6AT33; Match level="QueryCoverage=100%, HitCoverage=75%, E-value=2e-77, Identity=73%"; Hit description=Auxin- responsive protein IAA19
  Pfam annotation: Domain name=AUX_IAA; Domain location=1-198; Score =218.5; E_value=1.7e-62; Accession=PF02309.8; Description=AUXIAA family
PPRGGAKRGFADSLDRPAKRDADAGDADXGREGEEEKGVAETAAGAPRAAKVQVVGWPPVRNYRKHTLAASAAKTKGEDEGRSEAGCCYVKVSMDGAPYLRKVDLKTYSSYEDLSLGLEKMFSCFITGKSSSVKPPRERLTDGSRADALQDQEYVLTYEDKDADWMLVGDLPWDLFTTICRKLRIMRGSDAAGMAPRSLEQIGRNK

SEQ ID NO: 93529 - protein, 104 aa, Setaria italica
  Transcript Sequence Number=SeqID_27555
  Pfam annotation: Domain name=FMC1; Domain location=1-100; Score=97.3; E_value=5.4e-26; Accession=PF10560.1; Description=FMC1 protein family
MAAAAPVYRRVLRAVQKHVGGDASKQHFRDFIAAEFRAPAGTEADARARLRLAGDYAYLLTSVHHHKDLLFSYNIAVDRSDEMKKILNKSAASVGLQLPDVYQP

SEQ ID NO: 93530 - protein, 93 aa, Setaria italica
  Transcript Sequence Number=SeqID_27556
HLWSLARRESKETASMALVEKEHRSASSRLLSRGGRKKTASSCSLYITESHHACSLRRVCVCAGGDASSSRSDELGRWMANKCGWLPGSYPAC

SEQ ID NO: 93531 - protein, 62 aa, Setaria italica
  Transcript Sequence Number=SeqID_27557
MLGRAAGLSGPRWRGGSLDLRAALRSGGNLLFALFVAAVLAFTLLAAVHSPDDPLLHPSSHQ

SEQ ID NO: 93532 - protein, 137 aa, Setaria italica
  misc_feature (10)..(10): Xaa can be any naturally occurring amino acid
  Transcript Sequence Number=SeqID_27558
  Homolog annotation: Hit_ID=B6TIL9; Match level="QueryCoverage=100%, HitCoverage=37%, E-value=9e-70, Identity=88%"; Hit description =Conserved protein
  Pfam annotation: Domain name=DUF171; Domain location=2-127; Score= -47.1; E_value=8e-06; Accession=PF02598.9; Description=Uncharacterized ACR, COG2106
ACIREVVPPXTPREEIRSYWGYKVRYASNLSGVLKNSPYKEEYDHIIGTSEHGQIINSSELTLPSFRHLLIAFGGLAGLEESIEEDTNLKGKHANDVFTSYLNTCPNQGSRTIRTEEALLISLQYFQDPIRRVEQQM

SEQ ID NO: 93533 - protein, 285 aa, Setaria italica
  misc_feature (64)..(64): Xaa can be any naturally occurring amino acid
  misc_feature (95)..(95): Xaa can be any naturally occurring amino acid
  misc_feature (132)..(132): Xaa can be any naturally occurring amino acid
  misc_feature (143)..(143): Xaa can be any naturally occurring amino acid
  misc_feature (268)..(268): Xaa can be any naturally occurring amino acid
  Transcript Sequence Number=SeqID_27559
  Gene Ontology: Mol. function=GTP binding; Cellular component =intracellular; Biological process=ribosome biogenesis
  Homolog annotation: Hit_ID=B6TMG1; Match level="QueryCoverage=99%, HitCoverage=66%, E-value=1e-73, Identity=85%"; Hit description =Nucleolar GTP-binding protein 2
  Pfam annotation: Domain name=MMR_HSR1; Domain location=139-227; Score= -0.6; E_value=0.0011; Accession=PF01926.15; Description=GTPase of unknown function
  Pfam annotation: Domain name=NGP1NT; Domain location=1-56; Score= -46.3; E_value=0.00054; Accession=PF08153.4; Description=NGP1NT (NUC091) domain
  Pfam module annotation: Pfam domain module=MMR_HSR1::NGP1NT; Domain location=139-227::1-56
MLLGQRAQHQANGLSLAFDDPFEHAFGPKGKRKRPKLTALDYESLLKKADDSQDAFEQKYASSXKLPREEEEDGLRDLVRHTMFEKGQSKRIWGXELYKVIDSSDVVVQVLDARDPMGTRCYHLEKHLRENXTHNKVKLINNXRYERSVCKVAPIPGETKVWQYITLTKKIFLIDCPGVVYQNNDSETDIVLKGVVRVTNLADAAEHIGEVLRRVKKEHLQRAYKIQDWADDNDFLVQLCRTTGKLLKGGEPDLTTVAKMVLHDWQRXIPFFVPPPQQSDDGAFL

SEQ ID NO: 93534 - protein, 133 aa, Setaria italica
  misc_feature (109)..(109): Xaa can be any naturally occurring amino acid
  misc_feature (116)..(116): Xaa can be any naturally occurring amino acid
  Transcript Sequence Number=SeqID_27560
  Gene Ontology: Mol. function=GTP binding; Cellular component =intracellular; Biological process=ribosome biogenesis
  Homolog annotation: Hit_ID=B6TMG1; Match level="QueryCoverage=99%, HitCoverage=30%, E-value=6e-62, Identity=74%"; Hit description =Nucleolar GTP-binding protein 2
FEQKYASSKFPREEEEDGLRDLVLDARDPMGTRCYHLEKHLKENCKHKHLVFLLNKCDLIPAWATKGWLRTLSKNYPTLAFHASINKSFGKGSLLSVLRQFARLKNDSXAISVGFXGYPLAGSSVSNSLRSKY

SEQ ID NO: 93535 - protein, 541 aa, Setaria italica
  Transcript Sequence Number=SeqID_27561
  Gene Ontology: Mol. function=GTP binding; Cellular component =intracellular; Biological process=ribosome biogenesis
  Homolog annotation: Hit_ID=B6TMG1; Match level="QueryCoverage=88%, HitCoverage=91%, E-value=0.0, Identity=94%"; Hit description =Nucleolar GTP-binding protein 2
  Pfam annotation: Domain name=MMR_HSR1; Domain location=315-417; Score= 82.2; E_value=1.9e-21; Accession=PF01926.15; Description=GTPase of unknown function
  Pfam annotation: Domain name=NGP1NT; Domain location=49-175; Score =236.4; E_value=6.9e-68; Accession=PF08153.4; Description=NGP1NT (NUC091) domain
  Pfam module annotation: Pfam domain module=MMR_HSR1::NGP1NT; Domain location=315-417::49-175
  Subcellular localization annotation: CTP_CleavageSite=46; ConfidenceScore=5.08e-01
MAKKKEKAVNVSGKPRHSNDVNRPNDKKGAGGGAGGGARSAATVRRLQMYKTRPKRDRSGKVLRNEFQSKELPNTRIEPDRRWFGNTRVVGQPQLALFREELQNHLSDNFSVILKERKLPLSLLQDHQKQARAHLLDVEPFEHAFGPKGKRKRPKLTALDYESLLKKADDSQDAFEQKYASSKLPREEEEDGLRDLVRHTMFEKGQSKRIWGELYKVIDSSDVVVQVLDARDPMGTRCYHLEKHLKENCKHKHLVFLLNKCDLIPAWATKGWLRTLSKNYPTLAFHASINKSFGKGSLLSVLRQFARLKNDKQAISVGFVGYPNVGKSSVINTLRSKSVCKVAPIPGETKVWQYITLTKKIFLIDCPGVVYQNNDSETDIVLKGVVRVTNLADAAEHIGEVLRRVKKEHLQRAYKIQDWADDNDFLVQLCRTTGKLLKGGEPDLTTVAKMVLHDWQRGKIPFFVPPPQQSDDGASEGAEPVEKTEEDGVSSDRTAAAMKAIAGIISSQQNMNVPCHKEHDGDNEDSESEDNEDSEVPEQSE

SEQ ID NO: 93536 - protein, 51 aa, Setaria italica
  Transcript Sequence Number=SeqID_27562
  Homolog annotation: Hit_ID=B6TEQ7; Match level="QueryCoverage=100%, HitCoverage=11%, E-value=7e-17, Identity=88%"; Hit description =Uncharacterized ACR, COG1565 family protein
MAPAFSAHVPALRRGALCARWVTAALFSSGILAGNNPILVRDFVRSALYRP

SEQ ID NO: 93537 - protein, 95 aa, Setaria italica
  Transcript Sequence Number=SeqID_27563
  Subcellular localization annotation: CTP_CleavageSite=21; ConfidenceScore=5.01e-01
TPFVRPRGAACRGAAAALRSRASETPPLPRRETSRGSDAIGAVEPPRTLPSRVELQLAQGLCPFENMARKRNPIVFLDVSIGDEQDSERMIFELF

SEQ ID NO: 93538 - protein, 64 aa, Setaria italica
  Transcript Sequence Number=SeqID_27564
FTEQKFKCHVPIQRLEKEFIFLKEKSFQLQTFRKCIYIYKERSANFIYISRRHAGVIHSRNINA

SEQ ID NO: 93539 - protein, 50 aa, Setaria italica
  Transcript Sequence Number=SeqID_27565
FFFCFFFEMKLNCFNLLLRLLHSQGKKNRKTVSCSNQERKTKEKKPNLNN

SEQ ID NO: 93540 - protein, 218 aa, Setaria italica
  Transcript Sequence Number=SeqID_27566
  Gene Ontology: Mol. function=transferase activity
  Homolog annotation: Hit_ID=Q8LGN5; Match level="QueryCoverage=99%, HitCoverage=99%, E-value=1e-109, Identity=84%"; Hit description =Glutathione-S-transferase 19E50
  Pfam annotation: Domain name=GST_C; Domain location=109-205; Score =96.0; E_value=1.3e-25; Accession=PF00043.17; Description=Glutathione S-transferase, C-terminal domain
  Pfam annotation: Domain name=GST_N; Domain location=2-77; Score=82.5; E_value=1.5e-21; Accession=PF02798.12; Description=Glutathione S -transferase, N-terminal domain
  Pfam module annotation: Pfam domain module=GST_C::GST_N; Domain location=109-205::2-77
MAPVKVFGPAMSTNVARVLVCLEEVGAEYEVVNIDFQAKEHKGPEHLARNPFGQIPAFQDGDVVLFESRAISKYILRKYKSAETDLLREGNLREAAMVDVWTEVEAHQYNPALSPVVYECLINPTMRGVPTNQKVVDESLEKLRKVLHVYEARLSKSKYLAGDFLSFADLNHFPYTFYFMATPHASLFDSYPHVKAWWERLMARPSMKKLGASMAPKP

SEQ ID NO: 93541 - protein, 46 aa, Setaria italica
  Transcript Sequence Number=SeqID_27567
LISYQITLVSAIVAFLQFSFMCMHEYYSVSLYSFYSVIGLFAGFTV

SEQ ID NO: 93542 - protein, 103 aa, Setaria italica
  Transcript Sequence Number=SeqID_27568
  Gene Ontology: Mol. function=protein serine/threonine kinase activity; Biological process=protein amino acid phosphorylation
  Homolog annotation: Hit_ID=B9T069; Match level="QueryCoverage=91%, HitCoverage=13%, E-value=7e-44, Identity=87%"; Hit description =Casein kinase, putative
TRQGKTGGQVVMSRNAGFTAQVVELDFLYPSEGIHRRWDNGFRITSTAATWDQAAFILSIPKRKPADETQETLRTSAFPSQHVKDKWAKNLYLASICYGRTVS

SEQ ID NO: 93543 - protein, 89 aa, Setaria italica
  misc_feature (12)..(12): Xaa can be any naturally occurring amino acid
  Transcript Sequence Number=SeqID_27569
  Gene Ontology: Mol. function=protein serine/threonine kinase activity; Biological process=protein amino acid phosphorylation
  Homolog annotation: Hit_ID=B9T069; Match level="QueryCoverage=100%, HitCoverage=12%, E-value=2e-40, Identity=85%"; Hit description =Casein kinase, putative
NAGFTAQVVELXFLYPSEGIHRRWDNGFRITSTAATWDQAAFILSIPKRKPADETQETLRTSAFPSQHVKDKWAKNLYLASICYGRTVS

SEQ ID NO: 93544 - protein, 590 aa, Setaria italica
  Transcript Sequence Number=SeqID_27570
  Gene Ontology: Mol. function=protein serine/threonine kinase activity; Biological process=protein amino acid phosphorylation
  Homolog annotation: Hit_ID=UPI000034ED93; Match level="QueryCoverage =95%, HitCoverage=83%, E-value=0.0, Identity=82%"; Hit description =protein kinase family protein
  Pfam annotation: Domain name=Pkinase; Domain location=39-316; Score =48.5; E_value=2.2e-11; Accession=PF00069.17; Description=Protein kinase domain
  Pfam annotation: Domain name=Pkinase_Tyr; Domain location=39-316; Score=-168.5; E_value=0.016; Accession=PF07714.9; Description =Protein tyrosine kinase
  Pfam module annotation: Pfam domain module=Pkinase::Pkinase_Tyr; Domain location=39-316::39-316
MDDGDSVVRSVDRAGAAPGDDGGATPLPETVQIGNSPTYRLDRKLGKGGFGQVYVGRRISSPSVSERTPGANALEVAIKFEHRTSKGCNYGAPYEWQVYNTLSGIHGVPRVHYKGKQGEYYIMIMDMLGPSLWDVWNNNSHSMSVEMVACIAIEAISILEKMHSKGYVHGDVKPENFLLGPPGTLEEKKLFLVDLGLATRWKDTSTGEHVEYDQRPDVFRGTVRYASVHAHLGRTGSRRDDLESLAYTLVFLLRGRLPWQGYQGENKGFLVCKKKMATSSESLCCFCPQPFRQFIEYVVNLKFDEEPNYAKCISLFDGIVGPNPDIRPINTDGAQKLIYQVGQKRGRLMMEEDDDEQPKKKIRMGMPATQWISVYNARRPMKQRYHYNVADSRLAQHISKGNEDGLFISSVASCSNLWALIMDAGTGFTSQVYELSPYFLHKEWIMEQWEKNFYITALAGANNGSSLVVMSRGTQYAQQSYKVSDSFPFKWINKKWREGFYVTSMATAGSRWAVVMSRNAGFTAQVVELDFLYPSEGIHRRWDNGFRITSTAATWDQAAFILSIPKRKPADETQETLRTSAFPSQHVKVT

SEQ ID NO: 93545 - protein, 104 aa, Setaria italica
  misc_feature (8)..(8): Xaa can be any naturally occurring amino acid
  Transcript Sequence Number=SeqID_27571
  Gene Ontology: Mol. function=cholestenol delta-isomerase activity; Cellular component=endoplasmic reticulum; Biological process=steroid biosynthetic process
  Homolog annotation: Hit_ID=Q2TU57; Match level="QueryCoverage=100%, HitCoverage=46%, E-value=7e-33, Identity=64%"; Hit description =Sterol-8,7-isomerase
  Pfam annotation: Domain name=EBP; Domain location=24-104; Score= -38.6; E_value=1e-06; Accession=PF05241.4; Description=Emopamil binding protein
HPYSPAEXLELPGFVPQRLSQVEILAPFLGASLLVALAVWLVSGRCGGRLSRTDRLLMCWWAFTGLTHVVLEGPFLFTPDFFSKEDPNYFDDLFKEYSKGDSRY

SEQ ID NO: 93546 - protein, 78 aa, Setaria italica
  Transcript Sequence Number=SeqID_27572
  Homolog annotation: Hit_ID=Q56W45; Match level="QueryCoverage=93%, HitCoverage=10%, E-value=9e-19, Identity=67%"; Hit description=BZIP -like protein
  Pfam annotation: Domain name=DUF630; Domain location=1-60; Score =122.7; E_value=1.2e-33; Accession=PF04783.4; Description=Protein of unknown function (DUF630)
MGCTASKVEQEDTVRRCKERRRHMKDAVAARQLLASAHADYLRSLRVTAAALSRFAQGHPSLAVSHHTAPVLLSADRR

SEQ ID NO: 93547 - protein, 127 aa, Setaria italica
  Transcript Sequence Number=SeqID_27573
QLHGMHVHGQLWEEKNWPSSAATLRPLLLELQLLLIMLLLEGLYQTSNIQAATLEEQGKRFRALVICTRRLVAEMTCPPSASPFVSPSHLSQHSTYLWFQIFHTEAAMVWRHLPNLPLHCFSNLSGS

SEQ ID NO: 93548 - protein, 174 aa, Setaria italica
  Transcript Sequence Number=SeqID_27574
  Gene Ontology: Mol. function=peptidyl-prolyl cis-trans isomerase activity; Cellular component=cytoplasm; Biological process=protein folding
  Homolog annotation: Hit_ID=B6TB16; Match level="QueryCoverage=98%, HitCoverage=93%, E-value=5e-77, Identity=80%"; Hit description =Peptidyl-prolyl cis-trans isomerase
  Pfam annotation: Domain name=Pro_isomerase; Domain location=10-174; Score=314.7; E_value=1.9e-91; Accession=PF00160.13; Description =Cyclophilin type peptidyl-prolyl cis-tr
MAPTRSNHPRVFLDINIGGEHVGRVVIELFADEVPNTAENFRMLCTGERGTGRWSGKRLHYKGAPFHRVVPGFMCQGGDITASNGTGGESALGYGRYFPDEGFSAVKHDGPGVVSMANAGPNTNGSQFFITFAETPWLDDRHVAFGRVVEGMDAVRAIEKAGSMSGRTVRPVVI

SEQ ID NO: 93549 - protein, 78 aa, Setaria italica
  Transcript Sequence Number=SeqID_27575
  Gene Ontology: Mol. function=metalloendopeptidase activity; Biological process=proteolysis
LIQLLYLLCTVAYHLSSDSVNLNISNFPKVRKQVYIVGNSEPRENIGVLNELIDARDELAKTMGCKSYADFAIRPNMD

SEQ ID NO: 93550 - protein, 87 aa, Setaria italica
  Transcript Sequence Number=SeqID_27576
  Gene Ontology: Mol. function=protein serine/threonine kinase activity; Cellular component=plasma membrane; Biological process =protein amino acid phosphorylation
  Homolog annotation: Hit_ID=B9SSV3; Match level="QueryCoverage=68%, HitCoverage=13%, E-value=4e-21, Identity=75%"; Hit description =Serine/threonine protein kinase, putative
  Subcellular localization annotation: CTP_CleavageSite=51; ConfidenceScore=5.03e-01
FPKEPSVSSAAKDLVTALLAKDPARRLGATVGAAAIKRHPFFSGVNWALLRCATPPYVPPRDRLGNNVKGGAAGGGGAGSSANDDGM

SEQ ID NO: 93551 - protein, 98 aa, Setaria italica
  misc_feature (16)..(16): Xaa can be any naturally occurring amino acid
  Transcript Sequence Number=SeqID_27577
  Gene Ontology: Mol. function=sequence-specific DNA binding; Cellular component=nucleus; Biological process=regulation of transcription, DNA-dependent
  Homolog annotation: Hit_ID=B6SME7; Match level="QueryCoverage=94%, HitCoverage=29%, E-value=1e-33, Identity=75%"; Hit description =Homeobox domain containing protein
ISRQMGFAESPVAAVXVVAPSTAGHQQQYYSCQSPAATITVFINGVPMEVPRGPIDLRAMFGQDVMLVHSTGALLPVNDYGILTQSLQMGESYSWWRG

SEQ ID NO: 93552 - protein, 108 aa, Setaria italica
  Transcript Sequence Number=SeqID_27578
PNHENRQVLVVEAGEGKIGIPGRIFGKFLPESWRYSIRRIYCPTRLKIHLQNKSLAFSVEEVRFPHLRSRHRRLRGSVQHVVVDVAISFPTLCSHHSCHREGYDTASL

SEQ ID NO: 93553 - protein, 65 aa, Setaria italica
  Transcript Sequence Number=SeqID_27579
LRYSEILWHFTFALQNSFFTYIKIMLHIYKFSSRNIQIPFFMHSRFQGSFLRHCFRFDTTTAAAA

SEQ ID NO: 93554 - protein, 107 aa, Setaria italica
  Transcript Sequence Number=SeqID_27580
MEESPHAPVAAEAGAGAGAEAAGDSYIIRPLDLADLSKGFFDLLAQLSPSPPLSEEAFRARFAELAALGADHLVLVAEEAATGRLAAAGAMLVERKFIRRCGLVGHL

SEQ ID NO: 93555 - protein, 213 aa, Setaria italica
  Transcript Sequence Number=SeqID_27581
  Homolog annotation: Hit_ID=B9V0G6; Match level="QueryCoverage=92%, HitCoverage=50%, E-value=9e-33, Identity=38%"; Hit description =Mitochondrial transcription termination factor-like family-3
LLLSRSLESVVEPNMAFLRHCGLTDCEIAKLFLASPRTLALEPEAVKEIVVCADMLGVPRNSRMFKGVLSAISSITPRRVGAKLDFLKKALGCSEAELGIAIGKLPSILASAEDRLSRTVEFLKMEVGLNAAYIVHRPALLGYSLKKRLMPRYYVLKVLKEKGLVKENVDLYGVVCKIEKKFVERFLDPHKESVPGLADAYAAACAGQVPPAL

SEQ ID NO: 93556 - protein, 91 aa, Setaria italica
  Transcript Sequence Number=SeqID_27582
YTTDAGARRWFLCSTIVCSWVTDMWDRTHTLVTQEQLQLLAHMGVYNTGTALASRASRCHAGPTGGVGRGGGQRVVAGSCWPVDDDVVAVR

SEQ ID NO: 93557 - protein, 716 aa, Setaria italica
  misc_feature (45)..(45): Xaa can be any naturally occurring amino acid
  Transcript Sequence Number=SeqID_27583
  Gene Ontology: Mol. function=zinc ion binding; Cellular component =nucleus; Biological process=regulation of transcription, DNA -dependent
  Homolog annotation: Hit_ID=Q9SZL8; Match level="QueryCoverage=72%, HitCoverage=66%, E-value=7e-80, Identity=32%"; Hit description =Protein FAR1-RELATED SEQUENCE 5
  Pfam annotation: Domain name=FAR1; Domain location=1-79; Score=63.0; E_value=1.1e-15; Accession=PF03101.7; Description=FAR1 family
  Pfam annotation: Domain name=MULE; Domain location=199-295; Score =138.4; E_value=2.3e-38; Accession=PF10551.1; Description=MULE transposase domain
  Pfam annotation: Domain name=SWIM; Domain location=478-514; Score =31.6; E_value=3.3e-06; Accession=PF04434.9; Description=SWIM zinc finger
  Pfam module annotation: Pfam domain module=FAR1::MULE::SWIM; Domain location=1-79::199-295::478-514
GFSVRKGKQSYFIGTKNIRTKDYYCSKEGLKYEEPVTEANDQRSXKTPNCKAMIRFRVDEKGRWTVIRFVPVHNHQLAKPGERHMLRSAKSLAFGKSGVIDPSASTESHPINGFSDTIEGDTADNSGYTIRECYNQVGMQGITVIEAGDGQSLVSYFKRRTNEEGMFYWDVQVDQEGRMTNFFYRDGKCRNDYGCFGDAIIFDTTYRTNKYNLICAPFVGVDHHWQNVVFGCAFLLDESVASYVWLFKSFLESMGGKSPKSIFTDQDEAIMQAVEQVFPNTQHCFSYWHILKNAQSHLGSLNTSQAFQHLFMQGSDSEEDFEESWTAMLREYKLQDNSWLNDLHRFRHKWCSALNKDTFDGGINSSQWGEVSNNILSGISDENTSLTRFALLLEKVVKDLRRNESEEDFRCSQTAPVRAVKHSTVLKQAAESYTHRIYKLFEAEFLDGCGATSCHETSSGGNLLRFEITMQGRGSKVWAVALDTSTMEITCGCRKFERMGLLCSHALKVFTLQNVDTIPEKYVLKRWTKDARRSMFKLAQDDSTQQECTEAELAYRNRAMQYAYNLIMKSQELEESRKIFWDSLETGEKALEVFFEMRNMRTQAAKDASNREKKKKKPSKGPNSKKAKQAPAASSAGLELIVQTNEHQYQPSQDAQGNATIGRPYYYQAFPTAPIQPNQMYMHPNVHTMPLCTSQDHLPAYAAIRPNSNFGGAKNI

SEQ ID NO: 93558 - protein, 121 aa, Setaria italica
  Transcript Sequence Number=SeqID_27584
  Gene Ontology: Mol. function=transporter activity; Cellular component= membrane; Biological process=oligopeptide transport
  Homolog annotation: Hit_ID=B6TSV4; Match level="QueryCoverage=100%, HitCoverage=20%, E-value=8e-46, Identity=77%"; Hit description =Peptide transporter PTR2
APSPTGSTDMKEYCKTGEMGVISDAAAAAGDEPAEPSRELAFLNRAAQCQAPPNGLLACTVQEVEDVKIVLMVLPIFFSTIMLNCCLAQLSTFSVEQAATMDTRVGKLTVPPASLPVFPVT

SEQ ID NO: 93559 - protein, 271 aa, Setaria italica
  misc_feature (111)..(111): Xaa can be any naturally occurring amino acid
  Transcript Sequence Number=SeqID_27585
  Gene Ontology: Mol. function=binding
  Homolog annotation: Hit_ID=Q5TJC6; Match level="QueryCoverage=100%, HitCoverage=92%, E-value=1e-79, Identity=56%"; Hit description =Impaired sucrose induction 1-like protein
  Pfam annotation: Domain name=CDC14; Domain location=17-238; Score= -87.9; E_value=0.0048; Accession=PF08045.3; Description=Cell division control protein 14, SIN compon
AAGELVDALARRRLYREVTLALRSGLRDAKADFSFLRARGLRSLLGFLRSTASEADDARLLLFRHSQSIPDLQVIPVLFQNSLHQPKEDPVVTLDHIVGTEPMRITSPPTXSEIALALRVLEGCCLLYSRCTALAHKYKAVKVLLNILASRGPTEQGVCLDALISLMLDSPSNQMDFEEYSGLEKVAELLKDVQVEKQIRLKCGEFLLLLIGHVYVRENSPIHGQMKNLFGEQCASLIWAASRFGSTLDAEQRQTTLQIQAMRVVESLEPY

SEQ ID NO: 93560 - protein, 81 aa, Setaria italica
  Transcript Sequence Number=SeqID_27586
  Gene Ontology: Mol. function=transcription regulator activity; Cellular component=nucleus; Biological process=regulation of transcription
  Homolog annotation: Hit_ID=Q8H8E4; Match level="QueryCoverage=93%, HitCoverage=17%, E-value=3e-34, Identity=90%"; Hit description =Putative bHLH transcription protein
IVETGSTRIEICCPTNPGVLLSTVSALEVLGLEIEQCVVSCFSDFGMQASCLQEDGERQVISTEEIKQALFRSAGYGGRCL

SEQ ID NO: 93561 - protein, 70 aa, Setaria italica
  Transcript Sequence Number=SeqID_27587
TFYSKTKYKNTRVRYPILSAQMMTAKNILYTIILIILVYRQEALSFSFRIYRLCCFSLWSPRLPEARCTK

SEQ ID NO: 93562 - protein, 146 aa, Setaria italica
  misc_feature (9)..(9): Xaa can be any naturally occurring amino acid
  misc_feature (111)..(111): Xaa can be any naturally occurring amino acid
  Transcript Sequence Number=SeqID_27588
  Gene Ontology: Mol. function=steroid hormone receptor activity; Cellular component=nucleus; Biological process=regulation of transcription, DNA-dependent
  Homolog annotation: Hit_ID=Q2HU72; Match level="QueryCoverage=97%, HitCoverage=24%, E-value=1e-37, Identity=56%"; Hit description =Steroid nuclear receptor, ligand-binding
GRKEKTLFXVFWYGTWSAITGSCTVVRDMKDMLLHSYFSIMDEVRLHAPPDGKPYEIRLLHIPGAILAAACGLVVDAIMFTLIALYKFPVMLFKGWKRLIEDLIGREGPFXLETACVPFAGLAILLWPFAVIGAFLASIICSCFHL

SEQ ID NO: 93563 - protein, 64 aa, Setaria italica
  Transcript Sequence Number=SeqID_27589
  Subcellular localization annotation: CTP_CleavageSite=50; ConfidenceScore=5.12e-01
QVQAARHRRRRGSSVDAAAFTVTTVPRHRRQRGLGRHHGGRHGCDRRKARQTASLTLIDFLELE

SEQ ID NO: 93564 - protein, 71 aa, Setaria italica
  Transcript Sequence Number=SeqID_27590
MASNNNAVAAEVSTAVAKLNDHLAAALTGANDDAATNTIITLAGENSGATMDASAAAGDVEDLVVVGNADA

SEQ ID NO: 93565 - protein, 68 aa, Setaria italica
  Transcript Sequence Number=SeqID_27591
SNPTCRYYCYFFSIYCFAFHPLPGLFKKNTTNAHVDVGTCSCVRPETEEITIQSCDLLGPVLLCYVVL

SEQ ID NO: 93566 - protein, 455 aa, Setaria italica
  Transcript Sequence Number=SeqID_27592
  Gene Ontology: Mol. function=protein tyrosine/serine/threonine phosphatase activity; Cellular component=nucleoplasm; Biological process=protein amino acid dephosphorylation
  Homolog annotation: Hit_ID=Q2R8T5; Match level="QueryCoverage=98%, HitCoverage=67%, E-value=0.0, Identity=75%"; Hit description=mRNA capping enzyme, C-terminal domain containing protein, expressed
  Pfam annotation: Domain name=DSPc; Domain location=113-262; Score =28.5; E_value=1.1e-06; Accession=PF00782.12; Description=Dual specificity phosphatase, catalytic domain
  Pfam annotation: Domain name=mRNA_cap_enzyme; Domain location=353 -454; Score=15.0; E_value=3.7e-09; Accession=PF01331.11; Description =mRNA capping enzyme, catalytic domain
  Pfam module annotation: Pfam domain module=DSPc::mRNA_cap_enzyme; Domain location=113-262::353-454
MTFSMDLNASPLPEDDEQQPYEEAAEVEYAQEEHVESAVATMRREREERRRRLKREQQDDGSRLHSQQIRNDYVPQPKRHSRIKEAPQGWLDCPAFGEPIDKIIPSKVPLDETFNESVPPGKRYSSKQLVNKQRKAGRDIGLVIDLTNTTRYYSPAEWTKQGTKHVKIPCKGRDAVPDNESVNVFVYEAMMFLDRQKQSKNPKYILVHCTHGHNRTGFMIIHYLMRTHVSCVAEAINIFAQRRPPGIYKRDYIEALYSFYHEVPENMMIGCPPTPEWKRPDDLDLNGEAKQDDDDDNGDIEPPNNETEEKVITNDDVLGDAVPYDQQEALRVLCYRLLEMPLVRGHTQFPGSHPVSLNSENLQLLRQRYYYATWKADGTRYMMLIMRYGCFLIDRNFCFRRVQMRFPHKSLEVKGLHDTTLIDGEMIIDTVPDSGLKRRYLAYDLMALDCSVQKP

SEQ ID NO: 93567 - protein, 76 aa, Setaria italica
  misc_feature (35)..(35): Xaa can be any naturally occurring amino acid
  Transcript Sequence Number=SeqID_27593
GESAPAAGAAATEVKIRITRKQLEELLRRVEDGRXSGDGVPVRDVISELLYVASTSSNFRHRDEGQWRPSLQSIPE

SEQ ID NO: 93568 - protein, 71 aa, Setaria italica
  Transcript Sequence Number=SeqID_27594
  Subcellular localization annotation: CTP_CleavageSite=51; ConfidenceScore=5.38e-01
IRASYSVNLVGNTHTRMPLSGHSTFIYRSTYVLRQPLLRKEPRRRAQSPGRASVARALPPVVPRRGQRHRR

SEQ ID NO: 93569 - protein, 51 aa, Setaria italica
  Transcript Sequence Number=SeqID_27595
  Gene Ontology: Mol. function=nucleoside-triphosphatase activity; Biological process=small GTPase mediated signal transduction
AGNGGKERVSYVCSHCGEGHWRWWGYCHHCNVPGTLQRSREMVPQSLQEVN

SEQ ID NO: 93570 - protein, 40 aa, Setaria italica
  Transcript Sequence Number=SeqID_27596
TPRDSSTGSGRIESAAAQPPPPPPPVPPPLRPRPLHSPRI

SEQ ID NO: 93571 - protein, 83 aa, Setaria italica
  misc_feature (67)..(67): Xaa can be any naturally occurring amino acid
  Transcript Sequence Number=SeqID_27597
DEEPSFGSIPVASSISSETVVARQGDGPLPVAVVIDVVTEEEEEERRQEALELQQIGSQRRAMRPRXGRRPATAQLARSHSTG

SEQ ID NO: 93572 - protein, 214 aa, Setaria italica
  misc_feature (87)..(87): Xaa can be any naturally occurring amino acid
  misc_feature (154)..(154): Xaa can be any naturally occurring amino acid
  misc_feature (160)..(160): Xaa can be any naturally occurring amino acid
  misc_feature (194)..(194): Xaa can be any naturally occurring amino acid
  Transcript Sequence Number=SeqID_27598
  Gene Ontology: Mol. function=metal ion binding; Cellular component =intracellular
  Homolog annotation: Hit_ID=B4FX33; Match level="QueryCoverage=87%, HitCoverage=27%, E-value=5e-61, Identity=70%"; Hit description=DNA binding protein
  Pfam annotation: Domain name=Bromodomain; Domain location=88-186; Score=84.1; E_value=5e-22; Accession=PF00439.17; Description =Bromodomain
RSLRLQAQNPSPAPSPSRRDPNPSDDDEDGAGSGRRRQKRLKSVLSGVVKEEPGEGKKDAAKATGKGLAALDGGGPTGTPLPTTKSXLLFILDRLQKKDTYGVFSEPVDPEELPDYHEIIEHPMDFSTIREKLLNDSYSNLEQFEGPNWARTIXLMSLMXDDVFLLTSNAMSYNSADTIYFRQARSIEALAKKXFENLRQPSDEEEEPKPPARR

SEQ ID NO: 93573 - protein, 65 aa, Setaria italica
  misc_feature (15)..(15): Xaa can be any naturally occurring amino acid
  Transcript Sequence Number=SeqID_27599
  Homolog annotation: Hit_ID=B4FX33; Match level="QueryCoverage=100%, HitCoverage=10%, E-value=8e-25, Identity=81%"; Hit description=DNA binding protein
STYDQHYSRNSSLFXAFDDERKLLVPVGVQQQHAYARSLARFAAKLGPVGWDIAANRIQKGTTPG

SEQ ID NO: 93574 - protein, 432 aa, Setaria italica
  Transcript Sequence Number=SeqID_27600
  Gene Ontology: Mol. function=metal ion binding; Cellular component =intracellular
  Homolog annotation: Hit_ID=B4FX33; Match level="QueryCoverage=97%, HitCoverage=67%, E-value=1e-163, Identity=72%"; Hit description=DNA binding protein
  Pfam annotation: Domain name=Bromodomain; Domain location=13-91; Score=98.2; E_value=2.9e-26; Accession=PF00439.17; Description =Bromodomain
GLLRLCVFICLPCTALRKDTYGVFSEPVDPEELPDYHEIIEHPMDFSTIREKLLNDSYSNLEQFEDDVFLLTSNAMSYNSADTIYFRQARSIEALAKKDFENLRQPSDEEEEPKPPARRGRPPKNPKTEDDVSPDLSNVKTNKPEDNADTIRKRSTGDRTRNTTPLKDPSTFHSMFGSFSAKRTDKIGDYSGSSKWGKKPPSLDDDRRSTYDQHYSRNSSLFGAFDDERKLLVPVGVQQQHAYARSLARFAAKLGPVGWDIAANRIRRALPPGTNFGPGWIVDGEPPQNSQWPPVVTSTNPSESTAPPNMPSKIDVLHHKSGPSSNGAVTGEEHLTRTQTVPSTSASFDKSSEIASKVIKHENGANKSCGGIDNTGPAPPLQHHSHSREIHSNINGFSAVSNAMSQFAGHGLFGSGIPMTHAQVLGGIVFLG

SEQ ID NO: 93575 - protein, 319 aa, Setaria italica
  misc_feature (155)..(155): Xaa can be any naturally occurring amino acid
  misc_feature (227)..(227): Xaa can be any naturally occurring amino acid
  misc_feature (251)..(251): Xaa can be any naturally occurring amino acid
  Transcript Sequence Number=SeqID_27601
  Gene Ontology: Mol. function=nucleotide binding; Cellular component =nucleus; Biological process=apoptosis
  Homolog annotation: Hit_ID=Q2YE87; Match level="QueryCoverage=67%, HitCoverage=17%, E-value=2e-25, Identity=37%"; Hit description=NB -LRR type disease resistance protein Rps1-k-2
SSVLDSLQPHPDLEELTIRGFSGVRFPLWLGNHMFCISILELKDCQNSKELPSVGRLPCLKHLSINSLTSIMHVRRMLSVHDETTCGDYGSSTSRAFPVLETLKFMNMDSWELWDEIEATDFPHLQHLTIMRCSKLSGLPSLQALQNLRIKNCEXLELPSFPSLQCIKIEGFWSVGQILQLPLFSHIETLELRCHKKIVSVKKIQNPLLHSLRLKQKGLLHKVSSCXVLPFQNLFVQDSQRTWTFLRCAGXILECNCNFIAFTDLTFGQTNVHPSEAKTCEGVSFHAGEPEDIELVSCKPVWVQMGQPEEIELCFAIRL

SEQ ID NO: 93576 - protein, 127 aa, Setaria italica
  misc_feature (126)..(126): Xaa can be any naturally occurring amino acid
  Transcript Sequence Number=SeqID_27602
  Homolog annotation: Hit_ID=Q8LMR2; Match level="QueryCoverage=65%, HitCoverage=4%, E-value=2e-29, Identity=77%"; Hit description =Endoribonuclease Dicer homolog 1
TGESRHDCRRRPMPPPPSRGWEDRRGRREYERPRKRDRDHGHYAHDHHRREARGFWERDRGGKMVFRHGMWEAEVDRQGKRARTQDGNPVESKVEVDRTVAAQKEKPVTEEQARQYQLEVLEQAKXR

SEQ ID NO: 93577 - protein, 95 aa, Setaria italica
  Transcript Sequence Number=SeqID_27603
  Gene Ontology: Mol. function=hydrolase activity, acting on ester bonds; Biological process=lipid metabolic process
  Homolog annotation: Hit_ID=B6T560; Match level="QueryCoverage=98%, HitCoverage=25%, E-value=1e-17, Identity=45%"; Hit description=GSDL -motif lipase
PGLVYSLADFYGFTQDVLADPGASGFTDIAGACCGSGRLGGEGECTTNSTLCTNRDQHVFWDRAHPSQRTTFLAAQAFYNGPAKYTTPINFMQLA

SEQ ID NO: 93578 - protein, 60 aa, Setaria italica
  misc_feature (23)..(23): Xaa can be any naturally occurring amino acid
  Transcript Sequence Number=SeqID_27604
  Gene Ontology: Mol. function=binding
SDGELILDKPRIKALLIVSISAXFSDDKHKKLDIPSIIFSHAVPLLGKVSCALGEEVNQD

SEQ ID NO: 93579 - protein, 53 aa, Setaria italica
  Transcript Sequence Number=SeqID_27605
  Subcellular localization annotation: CTP_CleavageSite=32; ConfidenceScore=5.14e-01
SVCSGLPFPVPGAENPPSSSSVCSYLPFPVPEAEKPSSSSSVCLGLPFSVLIP

SEQ ID NO: 93580 - protein, 271 aa, Setaria italica
  misc_feature (93)..(93): Xaa can be any naturally occurring amino acid
  Transcript Sequence Number=SeqID_27606
  Gene Ontology: Mol. function=electron carrier activity; Cellular component=integral to membrane; Biological process=oxidation reduction
  Homolog annotation: Hit_ID=Q7G234; Match level="QueryCoverage=100%, HitCoverage=51%, E-value=1e-104, Identity=70%"; Hit description =Cytochrome P450 family protein, expressed
FHQLYHVRRLHDYHTDLFRKRKTFQLLAPAGRRQIYTCDPAVVEHILRTNFANYGKGAFNYENMTDLLGDGIFAVDGDKWKQQRKIASYDFSXRALRDFSGSVFKRNAAKLASIVAGSAASGQSMDFQGLALRATMDSIFTIAFGLDLDTLGGSGDGTRFAAAFDDASEFTLLRYVNAFWKALRFLNVGSEAALKDRVKVVDEFVYKRIRDRARELADSKEQDPVTDSRQEDMLSRFIQTATSESGTVDYKYLRDIILNIVIAGKDTTAGA

SEQ ID NO: 93581 - protein, 87 aa, Setaria italica
  Transcript Sequence Number=SeqID_27607
  Gene Ontology: Mol. function=protein serine/threonine kinase activity; Cellular component=integral to membrane; Biological process=protein amino acid phosphorylation
  Homolog annotation: Hit_ID=B2MV71; Match level="QueryCoverage=100%, HitCoverage=16%, E-value=2e-38, Identity=83%"; Hit description=Ca2+ and calmodulin-dependent protein kinase
DALLTNEILIMRRIVENVAPHPNVIGLHDVYEDVHGVHLILELCSGGELFDRIVGRDRYSEFDAAAVVRQIARGLEALHKANIIHRD

SEQ ID NO: 93582 - protein, 53 aa, Setaria italica
  Transcript Sequence Number=SeqID_27608
RPILHHVVIAPTLTLSSSTGPSYAKLTRYDMTPHTTSCCNSSHPNYHPHLPNL

SEQ ID NO: 93583 - protein, 110 aa, Setaria italica
  Transcript Sequence Number=SeqID_27609
  Gene Ontology: Mol. function=drug transporter activity; Cellular component=membrane; Biological process=multidrug transport
  Homolog annotation: Hit_ID=Q10A00; Match level="QueryCoverage=87%, HitCoverage=19%, E-value=6e-33, Identity=73%"; Hit description=MATE efflux family protein, expressed
  Pfam annotation: Domain name=MatE; Domain location=1-110; Score=-6.1; E_value=0.0046; Accession=PF01554.10; Description=MatE
  Subcellular localization annotation: CTP_CleavageSite=57; ConfidenceScore=5.11e-01
LLVLLSGLLPNPKLETAVLSICLNTNGFAFMVPLGLGSAISTRVSNELGAGRPEAARLATRVVVLLALAVGMSEGLVMVLVRNLWGYAYSNEEEVARYTARMMPILAMSI

SEQ ID NO: 93584 - protein, 71 aa, Setaria italica
  Transcript Sequence Number=SeqID_27610
PQVPCAFMLGTSGSTDRTVLYPRTVPILPALVSHLDVKSSRILLLLLFHCTVPHRMHTHFNPRLFKILNKL

SEQ ID NO: 93585 - protein, 95 aa, Setaria italica
  Transcript Sequence Number=SeqID_27611
DPPENLISSLLLPQPFSLLLHSFSMASLVDLVNTKCGVIQRLRGGASRGHSKQPVEVEPACGGCFPQRDHAARHHGEAEQRELVRLCLPTTPSTN

SEQ ID NO: 93586 - protein, 93 aa, Setaria italica
  Transcript Sequence Number=SeqID_27612
MVVECSVGATHKGRKTKNPHDDDLEMEERKSKQLALCDEETVREMFDKVLLCTDANCEFHSPMPAEAQINGRYVKGSGNRRGRRKGRSGTSPE

SEQ ID NO: 93587 - protein, 78 aa, Setaria italica
  misc_feature (43)..(43): Xaa can be any naturally occurring amino acid
  Transcript Sequence Number=SeqID_27613
  Subcellular localization annotation: CTP_CleavageSite=57; ConfidenceScore=5.40e-01
RKKKAQFREAQSRRGGRSSQGTSGASDSGTGGSQRSSAGSETXETLMLLRRLAASTPAGAVGSVTQASAPPGSAAASQ

SEQ ID NO: 93588 - protein, 128 aa, Setaria italica
  Transcript Sequence Number=SeqID_27614
  Gene Ontology: Mol. function=catalytic activity; Cellular component =plasma membrane; Biological process=metabolic process
  Homolog annotation: Hit_ID=B6SYY5; Match level="QueryCoverage=100%, HitCoverage=19%, E-value=4e-60, Identity=85%"; Hit description=Acyl CoA synthetase
TIEARLESVPEMGYDALSDTPRGEICLRGHTLFSGYYKRPSLTEEVFSDGWFHTGDIGEWQPNGAMKIIDRKKNIFKLSQGEYVAVEVVERAYMQSPLVASVWVYGNSFESFLVAVVVPERQALDEWA

SEQ ID NO: 93589 - protein, 123 aa, Setaria italica
  Transcript Sequence Number=SeqID_27615
  Gene Ontology: Mol. function=catalytic activity; Cellular component =plasma membrane; Biological process=metabolic process
  Homolog annotation: Hit_ID=B6SYY5; Match level="QueryCoverage=89%, HitCoverage=16%, E-value=2e-53, Identity=90%"; Hit description=Acyl CoA synthetase
KFKKYPKNRMLGRRQVTGGKAGEYVWQTYEEVHQKVMRIGSAIRSFGVKPGSHCGIYGSNCPEWVMAMQACNSQGICYVPLYDTLGANAVEFIMDHAEISIAFVQESKIKSVRQNICPLFCPL

SEQ ID NO: 93590 - protein, 118 aa, Setaria italica
  Transcript Sequence Number=SeqID_27616
  Gene Ontology: Mol. function=catalytic activity; Cellular component =plasma membrane; Biological process=metabolic process
  Homolog annotation: Hit_ID=B6SYY5; Match level="QueryCoverage=84%, HitCoverage=15%, E-value=6e-44, Identity=84%"; Hit description=Acyl CoA synthetase
MPDHLFFSSDKLLSCIFQIVTVVPKCTAHLKAIVSFGDFTSEMKREAEDLGVSCFSWEEFSSMGKQNYELPEKRKDDICTIMYTSGTTGDPKGVIITNRAIIAGVMTTEHLLKRDRIK

SEQ ID NO: 93591 - protein, 661 aa, Setaria italica
  Transcript Sequence Number=SeqID_27617
  Gene Ontology: Mol. function=catalytic activity; Cellular component =plasma membrane; Biological process=metabolic process
  Homolog annotation: Hit_ID=B6SYY5; Match level="QueryCoverage=99%, HitCoverage=99%, E-value=0.0, Identity=86%"; Hit description=Acyl CoA synthetase
  Pfam annotation: Domain name=AMP-binding; Domain location=79-547; Score=287.6; E_value=2.7e-83; Accession=PF00501.20; Description=AMP -binding enzyme
MAEMFTVKVEEAAPAAGGRPSAGPVYRSIYARDGLMELPQDIQSPWDFFSGAVKKYPKNRMLGRRQVTGGKAGEYVWQTYEEVHQKVMRIGSAIRSFGVKPGSHCGIYGSNCPEWVMAMQACNSQGICYVPLYDTLGANAVEFIMDHAEISIAFVQESKIKSIVTVVPKCTAHLKAIVSFGDFTSEMKREAEDLGVSCFSWEEFSSMGKQNYELPEKRKDDICTIMYTSGTTGDPKGVIITNRAIIAGVMTTEHLLKETDKVITEEDSYFSYLPLAHIFDQVIENYCISKGASIGFWQGDIRYLMEDVHVMKPTIFCGVPRVYDRIYTGINQKIQSGGMIAKHLFQYAYNYKLANMKKGMKQHEASPFFDKIVFNKIKEGLGGRIRLMIAGAAPLPGQIEEFMRVTSCSVFVQGYGLTESCAGCFTSIANVFSMIGTVGPPVTTIEARLESVPEMGYDALSDTPRGEICLRGHTLFSGYYKRPSLTEEVFSDGWFHTGDIGEWQPNGAMKIIDRKKNIFKLSQGEYVAVEVVERAYMQSPLVASVWVYGNSFESFLVAVVVPERQALDEWAAANNKTSDFAELCNDPKAKGYIQDELNKTGKKLGLRGFEMLKAIHLEPVPFSIEKDLITPTFKLKRPQLLKYYKDRIDQMYNDAKEGRTV

SEQ ID NO: 93592 - protein, 151 aa, Setaria italica
  misc_feature (123)..(123): Xaa can be any naturally occurring amino acid
  misc_feature (147)..(147): Xaa can be any naturally occurring amino acid
  Transcript Sequence Number=SeqID_27618
  Gene Ontology: Mol. function=nucleic acid binding; Cellular component= nucleus; Biological process=regulation of transcription, DNA-dependent
  Homolog annotation: Hit_ID=Q9LTV5; Match level="QueryCoverage=100%, HitCoverage=7%, E-value=3e-74, Identity=86%"; Hit description =Helicase-like protein
  Pfam annotation: Domain name=Helicase_C; Domain location=78-151; Score=66.6; E_value=9.6e-17; Accession=PF00271.23; Description =Helicase conserved C-terminal domain
FIDPAYREKCTNEFSPILSPIRSAIVRRQVYFPDRRLIQFDCGKLQELAILLRRLKSEGHRALIFTQMTKMLDVLEEFINLYGYTYLRLDGSTPPEERQTLMQRFNTNPKFFLFILSTRSGGXGINLVGADTVIFYDSDWNPAMYQXAQDR

SEQ ID NO: 93593 - protein, 99 aa, Setaria italica
  Transcript Sequence Number=SeqID_27619
  Subcellular localization annotation: CTP_CleavageSite=41; ConfidenceScore=5.07e-01
KAFFYLIYVLTLLGFSLVNCKTTCFLISVVLYCQFLNGQTRCPNSSSTKVEVQSSNYICSLNLLTFLYFNCCDLFASDSIILICLFQKVPVRMLLNCPP

SEQ ID NO: 93594 - protein, 168 aa, Setaria italica
  Transcript Sequence Number=SeqID_27620
  Gene Ontology: Mol. function=sequence-specific DNA binding; Cellular component=nucleus; Biological process=regulation of transcription, DNA-dependent
  Homolog annotation: Hit_ID=Q84N17; Match level="QueryCoverage=94%, HitCoverage=52%, E-value=5e-70, Identity=85%"; Hit description =Homeotic protein knotted-1
  Pfam annotation: Domain name=ELK; Domain location=16-36; Score=1.1; E_ value=93; Accession=PF03789.5; Description=ELK domain
  Pfam annotation: Domain name=ELK; Domain location=97-118; Score=35.1; E_value=2.7e-07; Accession=PF03789.5; Description=ELK domain
  Pfam annotation: Domain name=KNOX2; Domain location=7-58; Score =104.3; E_value=4.1e-28; Accession=PF03791.5; Description=KNOX2 domain
  Pfam module annotation: Pfam domain module=ELK::ELK::KNOX2; Domain location=16-36::97-118::7-58
RRAAAAAGGEVGLDPELDEFMEAYCGVLERYKEELSRPFDEAASFLSSVRTQLSTLCGGAASLSDEMVGSSEDEPCSGDTDATDLGQEHSSRLADRELKEMLLKKYSGCLSRLRSEFLKKRKKGKLPKDARSALMDWWNTHYRWPYPTEEDKVRLAAMTGLDPKQESN

SEQ ID NO: 93595 - protein, 170 aa, Setaria italica
  Transcript Sequence Number=SeqID_27621
  Gene Ontology: Mol. function=sequence-specific DNA binding; Cellular component=nucleus; Biological process=regulation of transcription, DNA-dependent
  Homolog annotation: Hit_ID=Q7GDL5; Match level="QueryCoverage=93%, HitCoverage=51%, E-value=3e-69, Identity=80%"; Hit description =Homeobox protein knotted-1-like 10
  Pfam annotation: Domain name=ELK; Domain location=55-76; Score=35.1; E_value=2.7e-07; Accession=PF03789.5; Description=ELK domain
  Pfam annotation: Domain name=Homeobox; Domain location=78-137; Score =5.3; E_value=0.0036; Accession=PF00046.21; Description=Homeobox domain
  Pfam module annotation: Pfam domain module=ELK::Homeobox; Domain location=55-76::78-137
QDKTYRNDKTQATLCGGAASLSDEMVGSSEDEPCSGDTDATDLGQEHSSRLADRELKEMLLKKYSGCLSRLRSEFLKKRKKGKLPKDARSALMDWWNTHYRWPYPTEEDKVRLAAMTGLDPKQINNWFINQRKRHWKPSEDMRFALMEGVTGGGSSSGTTLYFDTGTIGP

SEQ ID NO: 93596 - protein, 167 aa, Setaria italica
  Transcript Sequence Number=SeqID_27622
  Gene Ontology: Mol. function=mannosyltransferase activity; Cellular component=endoplasmic reticulum membrane; Biological process=GPI anchor biosynthetic process
  Homolog annotation: Hit_ID=O65394; Match level="QueryCoverage=98%, HitCoverage=30%, E-value=2e-21, Identity=41%"; Hit description =F12F1.28 protein
LLASPVLSLAVYSIIHYTKMLHQLFRTTSIHRQIITALEERSVESCKGSDDTTVLRSEHSTGFTNKAHGNSKVKQRKSVASGTASAMFHDTMLANKEIQDEGSILLLPFVLHLAFMTSTAFFVMHVQVSTRFLSASPPIYWAAAHILASPNCSSKRWGYLICVYFIA

SEQ ID NO: 93597 - protein, 84 aa, Setaria italica
  misc_feature (58)..(58): Xaa can be any naturally occurring amino acid
  Transcript Sequence Number=SeqID_27623
  Gene Ontology: Mol. function=protein serine/threonine kinase activity; Biological process=protein amino acid phosphorylation
  Homolog annotation: Hit_ID=Q8SB68; Match level="QueryCoverage=100%, HitCoverage=7%, E-value=2e-34, Identity=83%"; Hit description =Leucine Rich Repeat family protein, expressed
PMIVHRDVKSSNILMDADLVPKITDFGMGKIIDDDDADATVSVVVGTLGYIAPEHGYXTRLTEKSDVYSYGVVLLELMCRKMPV

SEQ ID NO: 93598 - protein, 281 aa, Setaria italica
  Transcript Sequence Number=SeqID_27624
  Homolog annotation: Hit_ID=B6TNA8; Match level="QueryCoverage=14%, HitCoverage=12%, E-value=6e-11, Identity=73%"; Hit description =Meiosis 5
MEARKTARALLASFVLAALAAQAFVGVVEARTSPMEKASQGDVKKPDCVPGVDPHTFPGIPGHGGGITPVPSGGTTPSHGSGYVPTPSHGGGTGGALPSPSHGGTGGALPSPSHGGTGGELPSPSHGGSGSSPSTGGGYGGSPSTPSHGGSGSSPSTGGGYGSSPSTPSHGGGGYGSSPSTGGGYGGSPSTPSGGAYGGGSPSPSHGGGAYGGSSSPTPSYGGSPSHGGIGTSSPTPFLPVDPHSLGSLPGSCDYWRSHPMEIWSALGGRFPSSMGHFFGG

SEQ ID NO: 93599 - protein, 82 aa, Setaria italica
  Transcript Sequence Number=SeqID_27625
KRLVACVRDKARHMNHRHVGNGRLVWGICIEELYAHELLVPSKRKNRVIFHLCLRRNSLISGWNSPRTISLILLESSHSKYP

SEQ ID NO: 93600 - protein, 99 aa, Setaria italica
  Transcript Sequence Number=SeqID_27626
  Gene Ontology: Mol. function=substrate-specific transmembrane transporter activity; Cellular component=integral to membrane; Biological process=transmembrane transport
  Homolog annotation: Hit_ID=B6TEX4; Match level="QueryCoverage=51%, HitCoverage=10%, E-value=1e-13, Identity=62%"; Hit description=Sugar transport protein 5
SIDRSIDLRRPERGCKKRTGEVAKMHGGGVVLPVNGGGGPGAGYSSEITFTVVMSCLMAASGGLIFGYDISITGGLTQMHSFLEAFFPDIIEKIETNEQ

SEQ ID NO: 93601 - protein, 53 aa, Setaria italica
  Transcript Sequence Number=SeqID_27627
HIWKQRNSLIFEGKRPTVRDWLSRFVDETRLQAHRIKESKKQDFLSWVTNVQL

SEQ ID NO: 93602 - protein, 229 aa, Setaria italica
  misc_feature (25)..(25): Xaa can be any naturally occurring amino acid
  Transcript Sequence Number=SeqID_27628
  Gene Ontology: Mol. function=helicase activity; Cellular component =chromatin; Biological process=chromatin assembly or disassembly
  Homolog annotation: Hit_ID=Q7XAM4; Match level="QueryCoverage=95%, HitCoverage=49%, E-value=4e-75, Identity=65%"; Hit description =Chromodomain-helicase-DNA-binding protein-like protein
AKAGARQTVNNDNSGGTRSMRGRQXDAQEKDDNKLNKDEIQKRKIVEAEAREEGEISESEAETKYRLDKEEKWLEWCSEVLDEEQETLKRLDRLQNTSLNLPKEKVLSRIRKYLQIIGDKIVEVVRQHSESYRQSRKSSRSSRMTMRLWNYVATFSNMSGEQLHDLYLKLSQDVEGGVGPSHGGNFTSNPPSKGGTSNQLHPSRNQRPTRSLQYTSESSIIMRTLGKFP

SEQ ID NO: 93603 - protein, 441 aa, Setaria italica
  misc_feature (434)..(434): Xaa can be any naturally occurring amino acid
  Transcript Sequence Number=SeqID_27629
  Gene Ontology: Mol. function=nucleic acid binding; Cellular component= chromatin; Biological process=chromatin assembly or disassembly
  Homolog annotation: Hit_ID=B9HP20; Match level="QueryCoverage=95%, HitCoverage=23%, E-value=0.0, Identity=74%"; Hit description =Chromatin remodeling complex subunit
  Pfam annotation: Domain name=Chromo; Domain location=129-184; Score =28.7; E_value=2.4e-05; Accession=PF00385.16; Description='chromo' (CHRromatin Organisation MOdifier)
  Pfam annotation: Domain name=Chromo; Domain location=16-95; Score =13.9; E_value=0.02; Accession=PF00385.16; Description='chromo' (CHRromatin Organisation MOdifier)
  Pfam annotation: Domain name=DEAD; Domain location=222-395; Score= -19.3; E_value=0.001; Accession=PF00270.21; Description=DEADDEAH box helicase
  Pfam annotation: Domain name=ResIII; Domain location=218-389; Score= -3.2; E_value=9.8e-05; Accession=PF04851.7; Description=Type III restriction enzyme, res subunit
  Pfam annotation: Domain name=SNF2_N; Domain location=224-440; Score =198.6; E_value=1.7e-56; Accession=PF00176.15; Description=SNF2 family N-terminal domain
  Pfam module annotation: Pfam domain module=Chromo::Chromo::DEAD::ResII I::SNF2_N; Domain location=129-184::16-95::222-395::218-389::224-440
KSTKQQKEEPEEEDGETIERVLWHQPKGVAEEAMRNDQSAQPTVSSLPSDFNQQWDELEFYIKWKGQSYLHCQWKTLSELQSVSGYKKVLNYTKRVAEEQRYKRALSREEVEVHDVGKEMELDLIKQYSQVERIFADRVSKADGDDLVPTSATEWQGLPYAESTWEKDTDIEFAQDAIDEYKAREAATAILGKTVDFQRKKSKASLRRLDDQPEWLKGGKLRDYQLEGLNFLVNGWRNDTNVILADEMGLGKTIQSVSMLGFLHNAQEINGPFLVVVPLSTLSNWAKEFRKWLPNMNVVIYVGNRASREMCQQYEFFSDKKGGRHVKFHTLITTYEVILKDKAVLSKIKWNYLMVDEAHRLKNCEASLYTTLLEFSTKNKLLITGTPLQNSVEELWALLHFLDPVKFNSKDSFVEKYKNLSSFNETELANLHKXLRPHILR

SEQ ID NO: 93604 - protein, 917 aa, Setaria italica
  Transcript Sequence Number=SeqID_27630
  Gene Ontology: Mol. function=nucleic acid binding; Cellular component= chromatin; Biological process=chromatin assembly or disassembly
  Homolog annotation: Hit_ID=B9HP20; Match level="QueryCoverage=95%, HitCoverage=51%, E-value=0.0, Identity=63%"; Hit description =Chromatin remodeling complex subunit
  Pfam annotation: Domain name=Helicase_C; Domain location=237-316; Score=95.1; E_value=2.4e-25; Accession=PF00271.23; Description =Helicase conserved C-terminal domain
  Pfam annotation: Domain name=SNF2_N; Domain location=1-176; Score =48.7; E_value=1.6e-11; Accession=PF00176.15; Description=SNF2 family N-terminal domain
  Pfam module annotation: Pfam domain module=Helicase_C::SNF2_N; Domain location=237-316::1-176
TKSNLSLTLTKEYKIGTNLMVDEAHRLKNCEASLYTTLLEFSTKNKLLITGTPLQNSVEELWALLHFLDPVKFNSKDSFVEKYKNLSSFNETELANLHKELRPHILRRVIKDVEKSLPPKIERILRVEMSPLQKQYYKWILERNFQNLNKGVRGNQVSLLNIVVELKKCCNHPFLFESADHGYGGDSIGDRNKVERIVMSSGKLVLLDKLLVRLRETNHRVLIFSQMVKMLDILAEYLSLRGFQFQRLDGSTRADLRHQAMEHFNAPGSDDFCFLLSTRAGGLGINLATADTVIIFDSDWNPQNDLQAMSRAHRIGQQETVNIYRFVTCKSVEEDILERAKKKMVLDHLVIQKLNAEGRLEKKESKKGGSMFDKNELSAILRFGAEELFKEDKTDEETKRNLESLDIDEILERAEKVETKGGEGEEGNELLSAFKVANFSSGEDDATFWSRLIQPDPADMVQETLAPRAARSRKSYVEDPQLDKNNNNRKRRAVEAQEKPRRRSGRIVETVVSLPLVDGAVAQVREWSFGNIPKKDASRFVRAVKKFGNATQIDLIVDDVGGVLAKAPHEAQIELFDLLIDGCQEAVKENTDIKGTVLDFFGVAVKPYELLARVEELQFLAKRIARYKDPIKQYRIQLPYKKPQWSASCGWTETDDARLMVGIHWYGYGNWEKIRLDPKLGLTTKIAPATLGERETFLPRAPNLDNRASALLQKEYAKFSGKSSKAKAGARQTVNNDNSGGTRSMRGRQKDAQEKDDNKLNKDEIQKRKIVEAEAREEGEISESEAETKYRLDKEEKWLEWCSEVLDEEQETLKRLDRLQNTSLNLPKEKVLSRIRKYLQIIGDKIVEVVRQHSESYRQSRMTMRLWNYVATFSNMSGEQLHDLYLKLSQDVEGGVGPSHGGNFTSNPPSKGGTSNQ

SEQ ID NO: 93605 - protein, 75 aa, Setaria italica
  Transcript Sequence Number=SeqID_27631
  Gene Ontology: Mol. function=ATP-dependent DNA helicase activity; Biological process=DNA repair
  Homolog annotation: Hit_ID=B9RA07; Match level="QueryCoverage=84%, HitCoverage=5%, E-value=7e-18, Identity=66%"; Hit description=ATP -dependent DNA helicase pcrA, putative
HLQCKGLWYLQKEQSVSVIISSAGDMLPQKYLLEKRAVVDVDNGKLLNEDSDIRSVLQFLMDDVSEFLSTLFFST

SEQ ID NO: 93606 - protein, 51 aa, Setaria italica
  Transcript Sequence Number=SeqID_27632
SNLVIFCNLTLMLLLKSLLQLMRRDWWFPYRFLGLARRASNDEAPPEPRNM

SEQ ID NO: 93607 - protein, 69 aa, Setaria italica
  Transcript Sequence Number=SeqID_27633
IYRMSKYIITSMNLEIPKRPTIWNGGSNCQCQLILELTKTSHCDQENDNDIFMQTKNVKTAAECFDNGS

SEQ ID NO: 93608 - protein, 72 aa, Setaria italica
  Transcript Sequence Number=SeqID_27634
MQLSTFTKVTSIPREKSYREFPVMVRVKAPEMTVHQHSPVDIVAVIDVSWSMGWDDKYGKEPNDRLILVKKA

SEQ ID NO: 93609 - protein, 55 aa, Setaria italica
  Transcript Sequence Number=SeqID_27635
TNKVVSFLPSFKSNKLVYVQLWEAYRNMDGVQVQTTSLQSEYRLDYTKVLQVEVA

SEQ ID NO: 93610 - protein, 80 aa, Setaria italica
  Transcript Sequence Number=SeqID_27636
  Gene Ontology: Mol. function=nucleoside-triphosphatase activity
  Homolog annotation: Hit_ID=Q5ZDA1; Match level="QueryCoverage=100%, HitCoverage=17%, E-value=1e-26, Identity=75%"; Hit description=BCS1 protein-like
MATYDKAIESYKKAGTTAASLAASAMLVRGVVNELVPYEVRDLLFSGLGYLRSRMSSQHTVVIEETEGWATNQLYDAART

SEQ ID NO: 93611 - protein, 201 aa, Setaria italica
  Transcript Sequence Number=SeqID_27637
  Gene Ontology: Cellular component=vacuole
  Homolog annotation: Hit_ID=B9RHR0; Match level="QueryCoverage=100%, HitCoverage=27%, E-value=2e-75, Identity=67%"; Hit description =Protein regulator of cytokinesis, putative
KELQSLQKEKSDRLKQVMEHLNTLHSLCEVLGIDFKQTVHDVHPSLGEADGSKNLSNSTIERLASAVNGLREMKVQRMQKLQDLASSMLELWNLMDTPLEEQQMFQNVTCNIAASEHEITEPNTLSVDYLSYVESEVLRLEQLKASKMKDLVLKKKTELEEHRRRAHLIGEEGYAAEFSTEAIEAGAVDPALVLEQIEAHI

SEQ ID NO: 93612 - protein, 104 aa, Setaria italica
  Transcript Sequence Number=SeqID_27638
  Subcellular localization annotation: CTP_CleavageSite=47; ConfidenceScore=5.24e-01
QHDTKHHHHRIGATSRMSTVSGCFPLTHATPDATVSPSPPSHTCRSRGTAGGPCIPPPGLQTPVQGEKSLAHPRPELAQGRSGRSGSNRQIDGSRIAIATGALP

SEQ ID NO: 93613 - protein, 108 aa, Setaria italica
  Transcript Sequence Number=SeqID_27639
  Homolog annotation: Hit_ID=B4FP99; Match level="QueryCoverage=100%, HitCoverage=45%, E-value=5e-54, Identity=96%"; Hit description =Harpin-induced protein
FDVMYHGVPLGVAAVPGFEQPAHSTRLLQTRVIVDRFNVLQADAQDLVRDAAIRDSVELRITGDVGAKILVLGFSSPKVQVSVDCAIAISPRSQSLKYKQCGVDGLSV

SEQ ID NO: 93614 - protein, 122 aa, Setaria italica
  Transcript Sequence Number=SeqID_27640
  Homolog annotation: Hit_ID=B6TVE6; Match level="QueryCoverage=92%, HitCoverage=31%, E-value=6e-45, Identity=85%"; Hit description =Dirigent-like protein
  Subcellular localization annotation: CTP_CleavageSite=62; ConfidenceScore=5.06e-01
AAVANPTGDHGMVFFMHDILGGTNPSARIVAGIVDNAAVTGQLPFARPNGAVLPLSSGVNVNSGAASAIDNNNIPFLTGLGGATNAVKSINNNNNNNGGNGVPIFAGGSLPQGTTLQKLLFG

SEQ ID NO: 93615 - protein, 87 aa, Setaria italica
  Transcript Sequence Number=SeqID_27641
  Gene Ontology: Mol. function=transferase activity, transferring glycosyl groups
  Homolog annotation: Hit_ID=B6SSE4; Match level="QueryCoverage=54%, HitCoverage=9%, E-value=3e-17, Identity=95%"; Hit description =Hydroquinone glucosyltransferase
  Subcellular localization annotation: CTP_CleavageSite=61; ConfidenceScore=5.06e-01
MEHAAANGSCCNGNGAAAPASPPPPHVAMLVTPGMGHLIPLAELAKRLASRHGATATLITFASTASATQRAFLSSLPPAVSSLSLPP

SEQ ID NO: 93616 - protein, 108 aa, Setaria italica
  Transcript Sequence Number=SeqID_27642
PIPCVPCLSPAACLRVEESIRIRREAEPVELVQAVKKLQKVFAREEKWRKELPLVLKQKISYDIVRRLQELGGNGSLAQQRGIMLSATILCTRDRALSLLHVLGLNVY

SEQ ID NO: 93617 - protein, 277 aa, Setaria italica
  Transcript Sequence Number=SeqID_27643
  Subcellular localization annotation: CTP_CleavageSite=31; ConfidenceScore=5.29e-01
MARGIARAVSFGGRATAGWFSYRRVTVAVCLGNLVAALLVLRSLTAPASFAPTAPNNGGVVPYTEEQIKRVEESIRIRREAEPVELVQAVKKLQKVFAREEKWRKELPLVLKQKISYDIVRRLQELGGNGSLAQQREVVESWRAEKLKDIKSASTQNQTNLDLSSDETRMLKRALEFNWRMLMEDIGLWIPEEVTHTVHDDKPENEPEEEEIIAGPPLSPQCNAELHTDYDGAAVRWGLTHHKESAADCCQACLDQAKNAKPGELKCNIWVYCPSEF

SEQ ID NO: 93618 - protein, 163 aa, Setaria italica
  Transcript Sequence Number=SeqID_27644
MLKRALEFNWRMLMEDIGLWIPEEVTHTVHDDKPENEPEEEEIIAGPPLSPQCNAELHTDYDGAAVRWGLTHHKESAADCCQACLDQAKNAKPGELKCNIWVYCPSEFGCYSPDKYEHKHQECWLKQADHPKLNFKDKYSESYRDAHPTAPVVVPWMSGVIGA

SEQ ID NO: 93619 - protein, 105 aa, Setaria italica
  Transcript Sequence Number=SeqID_27645
ADSCCLIGVRTFPLSARPWKVHQLEHEMELYHGYLEDHFNIHKLSRLQPLATTSGAPAGWYGAPAAAASGGAMGIYERQRHMVAAGLWGSRSGPTATLSSRPWPP

SEQ ID NO: 93620 - protein, 95 aa, Setaria italica
  Transcript Sequence Number=SeqID_27646
  Gene Ontology: Mol. function=sequence-specific DNA binding; Cellular component=nucleus; Biological process=regulation of transcription, DNA-dependent
  Homolog annotation: Hit_ID=Q851P4; Match level="QueryCoverage=81%, HitCoverage=35%, E-value=3e-36, Identity=89%"; Hit description =Putative WRKY DNA-binding protein
  Pfam annotation: Domain name=WRKY; Domain location=25-85; Score =129.1; E_value=1.4e-35; Accession=PF03106.7; Description=WRKY DNA -binding domain
GEEGGGSLEEREGCCAISDKNADIPADNYSWRKYGQKPIKGSPHPRGYYRCSSKKDCPARKHVERCRSDAGMLIVTYENDHNHAQPLDPSVLTAT

SEQ ID NO: 93621 - protein, 290 aa, Setaria italica
  Transcript Sequence Number=SeqID_27647
  Gene Ontology: Mol. function=binding
  Homolog annotation: Hit_ID=O80784; Match level="QueryCoverage=83%, HitCoverage=10%, E-value=1e-35, Identity=38%"; Hit description =Nodulin-like protein
  Pfam annotation: Domain name=HEAT; Domain location=72-107; Score =17.3; E_value=0.062; Accession=PF02985.14; Description=HEAT repeat
EGADRHVAGALLAFLSAALPALPSAVVRSRGHEVANDVVRVLEFPSTPDSGVRAGLRCLAHLISAGYRANWETVEPLYAVILRLATDHRPKVRKQAHSCLRDVLQSFQRQAILVPASEGIARCFERFLLLAGGSSAVNTGVAEEGPKGAKEVLYILNGLKCCLPLMASKPSNTILKYFKALLDLHQLILTRNILEILNAVGESPTLQLKSDVLLDIMCSLGLSVSSERKSGDEMASIARLLHVGTKKVYNQNKDICIVKLPLVFTSLGDILSSEFEEARFSSVEAFKGYR

SEQ ID NO: 93622 - protein, 72 aa, Setaria italica
  Transcript Sequence Number=SeqID_27648
  Gene Ontology: Mol. function=histidine-tRNA ligase activity; Cellular component=cytoplasm; Biological process=tRNA aminoacylation for protein translation
  Homolog annotation: Hit_ID=B6TS97; Match level="QueryCoverage=75%, HitCoverage=11%, E-value=2e-22, Identity=92%"; Hit description =Histidyl-tRNA synthetase
IHSHSRRRFLSSASSSMLTHGDEASTHVDANGVVDVNPPRGTRDFPPEDMRLRTWLFDQFREVSRLMAFEEG

SEQ ID NO: 93623 - protein, 168 aa, Setaria italica
  Transcript Sequence Number=SeqID_27649
  Gene Ontology: Mol. function=tRNA dihydrouridine synthase activity; Cellular component=endoplasmic reticulum; Biological process =metabolic process
  Homolog annotation: Hit_ID=B9SSD6; Match level="QueryCoverage=99%, HitCoverage=50%, E-value=8e-74, Identity=79%"; Hit description=tRNA -dihydrouridine synthase, putative
LNTPKDTVELARRIEKAGVPALAVHGRKIKDRPRDPAKWDEIADVVSALSIPVIANGDVFEYEDFKRVKDATGAASVMVARGAMWNASIFCAKGKTPHEDVKREYVRKSILWDNDVKSTKHTLKEMIMHYSCLELPEGKGVIKCDTSADLARLYGEEDYYNFVVSNRK

SEQ ID NO: 93624 - protein, 89 aa, Setaria italica
  Transcript Sequence Number=SeqID_27650
  Gene Ontology: Mol. function=hydrolase activity, hydrolyzing O -glycosyl compounds; Cellular component=cell wall; Biological process= carbohydrate metabolic process
  Homolog annotation: Hit_ID=Q10QC0; Match level="QueryCoverage=98%, HitCoverage=15%, E-value=1e-37, Identity=82%"; Hit description=1,4 -beta-xylanase, putative, expressed
KFPGNTNDGRMAIGLEGHFSTPNIPYIRAALDTMSKAGVPIWLTEIDVAPGPNQAANLEKILREVYSHPAVHGIILWTAWHQQGCYVMC

SEQ ID NO: 93625 - protein, 47 aa, Setaria italica
  Transcript Sequence Number=SeqID_27651
HLSAMVLLNILMLLACFLLNPNLLKWPTNLLVSNRLYCCFCIFWLNQ

SEQ ID NO: 93626 - protein, 125 aa, Setaria italica
  Transcript Sequence Number=SeqID_27652
STTHHRSVGLGLQPSLSQLCPVGLGYRHEPHETPPGRIGISTRASTNSVRSDWDVNTSHHTTNTTDRIFFSKEKESRKKGKERKAPFRCHRRSKSPCWNCLTSLSRRSRHRGRRRCQPKLGWVLT

SEQ ID NO: 93627 - protein, 188 aa, Setaria italica
  misc_feature (73)..(73): Xaa can be any naturally occurring amino acid
  Transcript Sequence Number=SeqID_27653
  Gene Ontology: Mol. function=DNA binding; Cellular component=nucleus; Biological process=tRNA transcription from RNA polymerase III promoter
  Homolog annotation: Hit_ID=Q5QLI3; Match level="QueryCoverage=46%, HitCoverage=28%, E-value=1e-37, Identity=81%"; Hit description =Transcription factor-like protein
  Pfam annotation: Domain name=Tau95; Domain location=1-130; Score= -113.0; E_value=0.039; Accession=PF09734.1; Description=RNA polymerase III transcription factor (TF)
RQVILKTMHRGVVQERWEMKVGPTLALPFNIQVVPEKINWEDHVRKNSVDWDWQVAVCKLFDERPVWPRQSLXERLQDDGVHVSQNQFKRLLFRAGYYFSTGPFGKFWIRRGYDPLKDPDSRIYQRIDFRVPPELRNLLRTKDSGGRGRAGGSGKQEGLSSPWRPLGMELAAVTLVAAAFKNTTKSRD

SEQ ID NO: 93628 - protein, 54 aa, Setaria italica
  Transcript Sequence Number=SeqID_27654
MNSYKLINYSTVNHAITTILIHLLCLCRAKKKRVTEEKKSARKMGIGVRLLPPS

SEQ ID NO: 93629 - protein, 291 aa, Setaria italica
  misc_feature (197)..(197): Xaa can be any naturally occurring amino acid
  Transcript Sequence Number=SeqID_27655
  Gene Ontology: Mol. function=protein binding; Cellular component =cellular_component; Biological process=response to virus
  Homolog annotation: Hit_ID=B9SEI0; Match level="QueryCoverage=99%, HitCoverage=93%, E-value=1e-131, Identity=78%"; Hit description =Coiled-coil domain-containing protein, putative
  Pfam annotation: Domain name=DUF572; Domain location=11-278; Score =185.4; E_value=1.6e-52; Accession=PF04502.5; Description=Family of unknown function (DUF572)
MSSLAAARADNFYYPPEWSPKKGGLNKFHGQHALRERARKLDQGILIIRFEMPFNIWCGGCNSMIAKGVRFNAEKKQVGNYYSTKIWSFTMKSPCCKHEIVIQTDPKNTEYVIISGAQKKTEDFDVEDAETLLLPADEDRDKLADPMYWLEHQEEDLRKKKEAEPVLVRLQRLSDSRHSDDYALNRALRDRLRSQKXRVTEEKKSARKMGIGVRLLPPSAEDAATAASVKFASKFEKSRKDKRAAIKAASIFPESSSSASKGKLDLALKRRNIKAGAATALMAGRVKPSYV

SEQ ID NO: 93630 - protein, 114 aa, Setaria italica
  Transcript Sequence Number=SeqID_27656
  Gene Ontology: Mol. function=protein serine/threonine kinase activity; Biological process=protein amino acid phosphorylation
  Homolog annotation: Hit_ID=Q8LKM7; Match level="QueryCoverage=99%, HitCoverage=66%, E-value=1e-53, Identity=90%"; Hit description =Serine/threonine protein kinase (Fragment)
PMLVYEFVSSGTLYHYIHKDLKADKTFDTRLRIAAESAEALAYMHSSASPPILHGDVKTANILLDDKLTAKVSDFGASKLAPSDEAEIATLVQGTCGYLDPEYLMTCQLTDKSD

SEQ ID NO: 93631 - protein, 77 aa, Setaria italica
  Transcript Sequence Number=SeqID_27657
MHLTKTMEMISKPFLLASLLPLLTWLLSRLLSASHRKNNAGGQGRRSIPSPPALPVVGHLHLLKKPLHHSLAALAKP

SEQ ID NO: 93632 - protein, 663 aa, Setaria italica
  Transcript Sequence Number=SeqID_27658
  Gene Ontology: Mol. function=electron carrier activity; Cellular component=endoplasmic reticulum membrane; Biological process =oxidation reduction
  Homolog annotation: Hit_ID=B6SS78; Match level="QueryCoverage=93%, HitCoverage=88%, E-value=0.0, Identity=85%"; Hit description=NADPH- -cytochrome P450 reductase
  Pfam annotation: Domain name=FAD_binding_1; Domain location=255-480; Score=369.6; E_value=5.8e-108; Accession=PF00667.12; Description=FAD binding domain
  Pfam annotation: Domain name=Flavodoxin_1; Domain location=57-200; Score=178.5; E_value=1.9e-50; Accession=PF00258.17; Description =Flavodoxin
  Pfam annotation: Domain name=NAD_binding_1; Domain location=517-628; Score=122.6; E_value=1.2e-33; Accession=PF00175.13; Description =Oxidoreductase NAD-binding domain
  Pfam module annotation: Pfam domain module=FAD_binding_1::Flavodoxin _1::NAD_binding_1; Domain location=255-480::57-200::517-628
VRRCLGAALFVLWRRAAAGKKRKREVAVAEAAQVKARGAKGAADEAFADDGRKKVTVFFGTQTGTAEGFAKSLAEEAKARYDKAIFKVADLEDYAAEDEEYEEKLKKEKLALFFVATYGDGEPTDNAARFYKWFTEGNERGVWLSDLEYAVFGLGNRQYEHFNKVAKVVDELLTEQGGKRLVPVGLGDDDQCIEDDFNAWKEALWPELDRLLRDENDVSTGTTYTAAISEYRVEFMKPEEAAHLEKNFSLANGHAVHDAQHPCRANVAVRRELHSPASDRSCTHLEFDIAGSGLMYETGDHVGVYTENCPDVVEEAERLLGYSPETFFTIHADNEDGTPLGGGSLAPPFPSPITVRNALARYADLLNSPKKSSLLALAAHASDLAEADRLRFLASPAGKDEYAQWVVANQRSLLEVMAEFPSAKPPLGVFFAAVAPRLQPRYYSISSSPSMAPTRIHVTCALVNETTPAGRVHKGVCSTWIKNAVPSEESKDCSWAPIFVRQSNFKLPADPSVPIIMIGPGTGLAPFRGFLQERLAQKESGVELGRSVFFFGCRNSKMDFIYEDELNNFLEQGALSELVLAFSRQGPTKEYVQHKMAQKASEIWDMISQGAYIYVCGDAKGMAKDVHKVLHTIVQEQGSLDSSKAESFVKNLHTEGRYLRDVW

SEQ ID NO: 93633 - protein, 336 aa, Setaria italica
  misc_feature (305)..(305): Xaa can be any naturally occurring amino acid
  Transcript Sequence Number=SeqID_27659
  Gene Ontology: Mol. function=tRNA dihydrouridine synthase activity; Biological process=metabolic process
  Homolog annotation: Hit_ID=Q01LS4; Match level="QueryCoverage=99%, HitCoverage=91%, E-value=1e-171, Identity=85%"; Hit description =OSIGBa0113C11.1 protein
  Pfam annotation: Domain name=Dus; Domain location=1-292; Score=112.5; E_value=1.4e-30; Accession=PF01207.9; Description=Dihydrouridine synthase (Dus)
LHQKDNLDRFLAFPEEQHPIVLQIGGSNLKNLAKATELANAYSYDEINLNCGCPSGKVAGHGCFGARLMFDPEFVGDAMSAIAANCDVPVSVKCRIGVDDCDSYEELCDFVDKVVSNSPTRHFIIHARKALLSGISPAENRKVPPLKYEYYFALLRDFPEVKFTLNGGITTIDQVSASIRQGAQGVMVGRSAYNNPWNMLGHVDSEIYGKPTRCISRRQILESYQFYGDSIIGRYGPSRPNVRQLVKPLLHLFHSEPGNNLWKRKSDSALRYCKTVKSFLEETLDAIPDTVLDKPVTREQSVEKXNFADVDSLLPPRYTTLTNCTYGSPELATASA

SEQ ID NO: 93634 - protein, 106 aa, Setaria italica
  Transcript Sequence Number=SeqID_27660
  Homolog annotation: Hit_ID=Q7XNU5; Match level="QueryCoverage=42%, HitCoverage=5%, E-value=1e-11, Identity=75%"; Hit description =OSJNba0093F12.13 protein
MDFLALSRRELQALCKRNAVRANMSNAAMADALRALPSVDGFEEIGTTVPPPVSAIKSVEEVIIEEEKKDGIPLSRGGRARSRARTAAADRMEQDAPDQGALQGSQ

SEQ ID NO: 93635 - protein, 113 aa, Setaria italica
  Transcript Sequence Number=SeqID_27661
MGGGHDGGVKGFVSNLVHGGKGHGHGYEHGYGHGHGHGHEHGYGHGAHGYPPPAAGAYPPPHGAYPPAAYPAHSAQYGHMGSYHTGHGGGHHGGYGGKHKGGMFGGGKYRKWK

SEQ ID NO: 93636 - protein, 233 aa, Setaria italica
  Transcript Sequence Number=SeqID_27662
  Gene Ontology: Mol. function=protein-glutamine gamma-glutamyltransfera se activity
  Homolog annotation: Hit_ID=B4FKA1; Match level="QueryCoverage=100%, HitCoverage=87%, E-value=1e-76, Identity=63%"; Hit description =Myosin-like protein
  Pfam annotation: Domain name=MCC-bdg_PDZ; Domain location=125-195; Score=8.1; E_value=0.1; Accession=PF10506.1; Description=PDZ domain of MCC-2 bdg protein for U
  Pfam annotation: Domain name=Mei5; Domain location=4-173; Score= -67.1; E_value=0.061; Accession=PF10376.1; Description=Double-strand recombination repair pr
  Pfam module annotation: Pfam domain module=MCC-bdg_PDZ::Mei5; Domain location=125-195::4-173
MAGRHRVPRHYEEPRGYRDAPPPPLARTRVVSPRRLEEELSSRRAEMRRIREENQRLADEIVGLRQTIPHMKEDLHASSQAVPKLRADKELESRELTQRNLKLEAELRALEPLRQDALHLRSEAGKLQSLRQELAAKVQGLLKELEHHKSESQKIPAMIAERDALRQELIQARAALEYEKNAKPELTAQVQAMEKDLVAMAQEAEKLRADIAKRRAPSFSSHGTYGAPVSTPG

SEQ ID NO: 93637 - protein, 119 aa, Setaria italica
  Transcript Sequence Number=SeqID_27663
  Homolog annotation: Hit_ID=B4FKA1; Match level="QueryCoverage=96%, HitCoverage=40%, E-value=8e-46, Identity=76%"; Hit description =Myosin-like protein
LKLSRKIPAMIAERDALRQELIQARAALEYEKNAKPELTAQVQAMEKDLVAMAQEAEKLRADIAKRRAPSFSSHGTYGAPVSTPGMGLQGMYDGGYSSIGSRYGTGPWGSHDLHGYPHP

SEQ ID NO: 93638 - protein, 114 aa, Setaria italica
  misc_feature (45)..(45): Xaa can be any naturally occurring amino acid
  Transcript Sequence Number=SeqID_27664
  Gene Ontology: Mol. function=transferase activity, transferring groups other than amino-acyl groups; Cellular component=membrane; Biological process=fatty acid biosynthetic process
  Homolog annotation: Hit_ID=B6UF74; Match level="QueryCoverage=91%, HitCoverage=33%, E-value=2e-35, Identity=70%"; Hit description =Senescence-associated protein 15
  Pfam annotation: Domain name=ACP_syn_III_C; Domain location=19-79; Score=-17.3; E_value=0.001; Accession=PF08541.2; Description=3 -Oxoacyl-[acyl-carrier-protein (ACP)
YIISSRLLRKYQCLHLDRLKYLGLGDADMEPSRCTLHRFGNTSSXLAYAEAKGRVRRGHRVWQIGFGSGFKCNSTVWRALRDVAPVPADGTGGGSCNPWVDSIQKLKNPKKTKK

SEQ ID NO: 93639 - protein, 127 aa, Setaria italica
  Transcript Sequence Number=SeqID_27665
  Gene Ontology: Mol. function=hydrolase activity, hydrolyzing O -glycosyl compounds; Cellular component=cell wall; Biological process= carbohydrate metabolic process
  Homolog annotation: Hit_ID=Q94IY5; Match level="QueryCoverage=100%, HitCoverage=15%, E-value=4e-62, Identity=89%"; Hit description =Putative alpha-L-arabinofuranosidase/beta-D-xylosidase isoenzyme ARA- I
YGDRVRDLVGQLTLEEKVRNLGDKAEGAARVGLPPYKWWGEALHGVSDVGPGGTWFGDVVPGATSFPLVINSAAAFNESLWRAIGGAVSTEIRAMYNLGHAELTYWSPNINVVRDPRWGRASETPGE

SEQ ID NO: 93640 - protein, 136 aa, Setaria italica
  Transcript Sequence Number=SeqID_27666
  Gene Ontology: Mol. function=nucleoside-triphosphatase activity; Cellular component=membrane
MASEQQQQRVPAVPRWTPSPPRRLDRGGDAHDDDAADSDVGASSMRSTDGFPFGSGRSFAPPPFPLPQPSLEITSASGNGNGVASGGPVAREKSLRRTDEGVVISWEDLWVSASGGGKGGGRLPILCGLNGYARPG

SEQ ID NO: 93641 - protein, 148 aa, Setaria italica
  Transcript Sequence Number=SeqID_27667
  Gene Ontology: Mol. function=aspartic-type endopeptidase activity; Cellular component=extracellular region; Biological process =proteolysis
  Homolog annotation: Hit_ID=Q9LTW4; Match level="QueryCoverage=91%, HitCoverage=26%, E-value=1e-23, Identity=42%"; Hit description =Chloroplast nucleoid DNA binding protein-like
AFAMPLSSGAYTGTGQYFVRFRVGTPAQPFLLVADTGSDLTWVKCRGPAPDAGYGYGAPLPAPSSSSPPPHGRVFRPEKSRTWAPIPCSSDTCIASLPFSLAACPTPGSPCAYDYRYKDGSAARGTVGTDSATIELSGPGAEAAATST

SEQ ID NO: 93642 - protein, 244 aa, Setaria italica
  misc_feature (19)..(19): Xaa can be any naturally occurring amino acid
  misc_feature (53)..(53): Xaa can be any naturally occurring amino acid
  Transcript Sequence Number=SeqID_27668
  Gene Ontology: Mol. function=protein serine/threonine phosphatase activity; Cellular component=protein serine/threonine phosphatase complex; Biological process=protein amino acid dephosphorylation
  Homolog annotation: Hit_ID=Q5SMK6; Match level="QueryCoverage=100%, HitCoverage=66%, E-value=1e-116, Identity=84%"; Hit description =Probable protein phosphatase 2C 54
  Pfam annotation: Domain name=PP2C; Domain location=1-202; Score =137.9; E_value=3.2e-38; Accession=PF00481.13; Description=Protein phosphatase 2C
NLPRVIVEDSDFPLQLEKXVVRRSFMQIDCQFAETCSHHRALSSGTTALTAMXFGRSLLVANAGDCRAVLSRCGTAIEMSMDHRPCSLTEKLRIESLGGYVDDGYLNGLLGVTRALGDWHLEGMKEVGEPGGPLIAEPELKMITLTKDDEFLIIGSDGIWDVFSNQNSVDFARKRLQEHNDVKLCCKEIVEEAIRRGAIDNLTAVLVSFHLEPPPQIKVDRPGRVARSISADGLNSLRILLGRQ

SEQ ID NO: 93643 - protein, 489 aa, Setaria italica
  Transcript Sequence Number=SeqID_27669
  Gene Ontology: Mol. function=catalytic activity; Biological process =metabolic process
  Homolog annotation: Hit_ID=B6SS27; Match level="QueryCoverage=95%, HitCoverage=80%, E-value=0.0, Identity=89%"; Hit description=AMP -binding protein
  Pfam annotation: Domain name=AMP-binding; Domain location=4-406; Score=202.1; E_value=1.5e-57; Accession=PF00501.20; Description=AMP -binding enzyme
FQLHLLNFRVKKSKKTCRAIHLGTIRLNAETIAFLLEHSVAEVVMVDQEFFTLAEESLKIITEKKKSAFRPPILIVIGDPTCDPKSLHYALGKGAIGYEEFLKTGDPEFNWKPPKDEWQSIALGYTSGTTSSPKGVVLHHRGAYLMALSVAMVWGMPEGAVYLWTLPMFHCNGWCYTWALAAFCGTSVCLRQVSTKAIYHSIAKLGVTHFCAAPVVLNNLINAPASETFLPLPRVVNVNVAGAAPTPSLLAALSIRGFRVTHTYGLSETYGPSTVCAWKPEWDELPLEERSRLHCRQGIRYIALEGLDVVDPKTMAPVPADGKTYGEIVMRGNAVMKGYLKNPEANAEAFAGGWYHSGDLGVKHPDGYIEVRDRMKDVIISGGENISSLEVEKVVCMHPAVLEASVVARADERWGESPCAFVTLKDGAADGTEDTANDIMRFCRERMPGYWVPKSVIFGPLPKTATGKIKKNELRAKAKELGPVKKSRM

SEQ ID NO: 93644 - protein, 73 aa, Setaria italica
  Transcript Sequence Number=SeqID_27670
DFASNLLGFAYVRMRSLFFPKSREVLISRITGGEIMIFDHYFQTTIVHAILRQRDGFLINLNKLYKGDHININ

SEQ ID NO: 93645 - protein, 168 aa, Setaria italica
  misc_feature (132)..(132): Xaa can be any naturally occurring amino acid
  Transcript Sequence Number=SeqID_27671
  Gene Ontology: Mol. function=hydrolase activity, acting on glycosyl bonds; Cellular component=chloroplast; Biological process =polysaccharide catabolic process
  Homolog annotation: Hit_ID=B9RUR8; Match level="QueryCoverage=88%, HitCoverage=26%, E-value=1e-71, Identity=83%"; Hit description=Beta -amylase, putative
  Pfam annotation: Domain name=Glyco_hydro_14; Domain location=1-168; Score=-103.3; E_value=6.8e-11; Accession=PF01373.9; Description =Glycosyl hydrolase family 14
ITLNSFICCWYSFIDVCCSDDVCSIPLPPWVLEEMSSNPDIVYTDRSGRRNPEYISLGCDTLPVLKGRTPIQVYADYMRSFHDRFRDYLGNVIAEIQVGMGPCGELRYPSYPEANGTWRFPGIGEFQCYDKXYMRASLEAAAVAAGHEEWGRGGPHDAGEYKQMPEET

SEQ ID NO: 93646 - protein, 71 aa, Setaria italica
  Transcript Sequence Number=SeqID_27672
ASAAGVELAGENALERYDEAAFSQVVSTARGARPALPRCDTGHSDLYVGFLDAAKERKAPEAEGAATAVAL

SEQ ID NO: 93647 - protein, 492 aa, Setaria italica
  misc_feature (51)..(51): Xaa can be any naturally occurring amino acid
  misc_feature (216)..(216): Xaa can be any naturally occurring amino acid
  misc_feature (289)..(289): Xaa can be any naturally occurring amino acid
  misc_feature (447)..(447): Xaa can be any naturally occurring amino acid
  Transcript Sequence Number=SeqID_27673
  Gene Ontology: Mol. function=hydrolase activity, acting on glycosyl bonds; Biological process=polysaccharide catabolic process
  Homolog annotation: Hit_ID=B9RUR8; Match level="QueryCoverage=91%, HitCoverage=82%, E-value=0.0, Identity=68%"; Hit description=Beta -amylase, putative
  Pfam annotation: Domain name=Glyco_hydro_14; Domain location=27-444; Score=759.3; E_value=2.8e-225; Accession=PF01373.9; Description =Glycosyl hydrolase family 14
PAEAAELLHGGAAGQDHGRPRGGVPVYVMLPLDTVGPGGQLSRQRAVAAEXLWRWRGAGVEGVMVDVWWGVVEREGPGRYDWEAYAELVRMVERAGLRLQAVMSFHQCGGNVGDTCNIPLPPWVLEEMSSNPDIVYTDRSGRRNPEYISLGCDTLPVLKGRTPIQVYADYMRSFHDRFRDYLGNVIAEIQVGMGPCGELRYPSYPEANGTWRFPGXIGEFQCYDKYMRASLEAAAVAAGHEEWGRGGPHDAGEYKQMPEETGFFRRDGTWSTEYGQFFLEWYSGMLLEXHGDRVLAAADAVFGGTGATLSAKVAGIHWHYGTRSHAAELTAGYYNTRHHDGYAPIARMLAKRGAVLNFTCMEMKDEQQPQHASCSPEQLVQQVKAAASAAGVELAGENALERYDEAAFSQVVSTARGAGLAAFTYLRMNKALFDGDNWREFVSFVRXMADGGARPALPRCDTGHSDLYVGFLDAAKERKAPEAEGAATAVAL

SEQ ID NO: 93648 - protein, 155 aa, Setaria italica
  Transcript Sequence Number=SeqID_27674
  Gene Ontology: Mol. function=electron carrier activity; Cellular component=membrane; Biological process=oxidation reduction
  Homolog annotation: Hit_ID=Q0JF01; Match level="QueryCoverage=96%, HitCoverage=29%, E-value=4e-59, Identity=71%"; Hit description =Cytochrome P450 99A3
  Subcellular localization annotation: CTP_CleavageSite=88; ConfidenceScore=5.03e-01
NKQSIVMELSAATLIFLSLLSLPIVVTLLSRKLTPSSKKRRPPGPWNLPFIGSLHYFIKSHPQVALRNLAKRYGPVMFLRMGQIDTVVISSPVAVQEVLREKDIIFASRPSIVASEIFCYGNLDVGFAPYGAYWRTLRKLCTVELLSAKMVRQLA

SEQ ID NO: 93649 - protein, 68 aa, Setaria italica
  Transcript Sequence Number=SeqID_27675
RGVRRVQLALFLTSFLIREYERVKLQHCIRAMVGTGYRFWYKNSCVSKGEGGNPLVKIISKLLSTVTF

SEQ ID NO: 93650 - protein, 96 aa, Setaria italica
  Transcript Sequence Number=SeqID_27676
  Gene Ontology: Mol. function=oxidoreductase activity; Biological process=oxidation reduction
  Homolog annotation: Hit_ID=Q9SRM3; Match level="QueryCoverage=90%, HitCoverage=21%, E-value=2e-29, Identity=67%"; Hit description =Leucoanthocyanidin dioxygenase, putative; 41415-43854
IVNVGDQVQILSNSTYKSVEHRVIVNAKQERISLALFFNPKGNIPISPAPELVTAADGPPLYPPMTFDEYRLFIRKKGAKGKAQIEALKGQAPPEN

SEQ ID NO: 93651 - protein, 572 aa, Setaria italica
  misc_feature (39)..(39): Xaa can be any naturally occurring amino acid
  misc_feature (461)..(461): Xaa can be any naturally occurring amino acid
  Transcript Sequence Number=SeqID_27677
  Homolog annotation: Hit_ID=O04626; Match level="QueryCoverage=43%, HitCoverage=23%, E-value=6e-41, Identity=37%"; Hit description =F2P16.20 protein
RCLVASAALAASLPADRPSGPPERLDAVVALVECGGAGXGQGLGFRDADGKKDEGRKLEIKEKEVAGAGEVTLQDWVGPSDAIEGYVPRRDRTTEGQKPAKKNKVAGPELSGIENVDCRNAAPGEDGMAGSSPSAETHVSSEVIAEKMGNMVLSENTKTPRKMTTKTPSKMLKQEDDNNMLSSCISDSIEKQLEDVVLEEKRGAKKTKASKASSRSQKSKSRKRPGGSDGHEVDFTSTIIIGDASTNMEQGTMNQYNYFSSSILTDNYASSSQSGAKGPMQGYAEQLYREFSEAVSIGKDETSDEKMKPALKSSMKAPGSKSGSQSVTWADENGSVLETSKLYESPSSSIKQSEEGMDISLRRASAEACAAAFIEAAEAISSGTSEVDDAVSKAGIIILPDTLHPKQYSNEKSSGADEESEIDRDVLKWPKKTVLLDTDMFEVDDSWHDTPPEGFSLTLSXFATMWAALFGWISRASLAYVYGLDGCSVEDLLIANGREYPEKIVLKDGHSAEIRRALDTCVCNALPVLVSNLRLRIPVSKLEITLGYLIDTMSFFDPLPSPNTTRRIQRTS

SEQ ID NO: 93652 - protein, 132 aa, Setaria italica
  Transcript Sequence Number=SeqID_27678
  Gene Ontology: Mol. function=protein serine/threonine kinase activity; Biological process=protein amino acid phosphorylation
  Homolog annotation: Hit_ID=Q7XQT3; Match level="QueryCoverage=100%, HitCoverage=16%, E-value=3e-37, Identity=58%"; Hit description =OSJNBa0043L09.14 protein
  Pfam annotation: Domain name=Pkinase; Domain location=1-125; Score= -113.4; E_value=0.097; Accession=PF00069.17; Description=Protein kinase domain
SYLHGLCKEVIHRDLKPSNILLDDNWRPKIADFGTTKQFVVDQTDPTLVQTAGYTAPEYILERYLTLKCDVYSFGVILLEIVSGQRNRTTPMLLSNAWESWNQGTINELLDSDVAHPKPELLFELERCVQIG

SEQ ID NO: 93653 - protein, 103 aa, Setaria italica
  Transcript Sequence Number=SeqID_27679
  Gene Ontology: Mol. function=ATPase activity, coupled to transmembrane movement of substances; Cellular component=integral to membrane; Biological process=transport
  Homolog annotation: Hit_ID=Q6Y3I1; Match level="QueryCoverage=99%, HitCoverage=6%, E-value=8e-50, Identity=92%"; Hit description =Multidrug resistance associated protein 1
QLIDTDATLFFHTVAAQEWVLIRVEALQSLTIITAALFLVLVPPGVISPGFAGLCLSYALTLTAAQVFLTRYYSYLENYIISVERIKQYMQLPAEPPAIIPEK

SEQ ID NO: 93654 - protein, 65 aa, Setaria italica
  Transcript Sequence Number=SeqID_27680
  Gene Ontology: Mol. function=ATPase activity, coupled to transmembrane movement of substances; Cellular component=integral to membrane; Biological process=transport
  Homolog annotation: Hit_ID=Q6Y3I1; Match level="QueryCoverage=86%, HitCoverage=3%, E-value=5e-24, Identity=96%"; Hit description =Multidrug resistance associated protein 1
MRRQASIDSATDAILQKVIRQQFSSCTVITIAHRVPTVTDSDRVLVLSYGKLLEYETPAKQCVRT

SEQ ID NO: 93655 - protein, 201 aa, Setaria italica
  Transcript Sequence Number=SeqID_27681
  Gene Ontology: Mol. function=ATPase activity, coupled to transmembrane movement of substances; Cellular component=integral to membrane; Biological process=transport
  Homolog annotation: Hit_ID=Q6Y3I1; Match level="QueryCoverage=100%, HitCoverage=13%, E-value=1e-110, Identity=96%"; Hit description =Multidrug resistance associated protein 1
  Pfam annotation: Domain name=ABC_tran; Domain location=1-166; Score =91.3; E_value=3.5e-24; Accession=PF00005.19; Description=ABC transporter
SSLFRLVDPAGGRILIDKLDICSIGLKDLRTKLSIIPQEPTLFRGTVRNNLDPLGLHSDQEIWEALEKCQLKTAISSTPALLDTAVSDDGDNWSAGQRQLFCLGRVLLRRNKILVLDEATASIDSATDAILQKVIRQQFSSCTVITIAHRVPTVTDSDRVLVLSYGKLLEYETPAKLLEDKQSAFAKLVAEYWANTKRNST

SEQ ID NO: 93656 - protein, 347 aa, Setaria italica
  Transcript Sequence Number=SeqID_27682
  Gene Ontology: Mol. function=ATPase activity, coupled to transmembrane movement of substances; Cellular component=integral to membrane; Biological process=transport
  Homolog annotation: Hit_ID=Q6Y3I1; Match level="QueryCoverage=99%, HitCoverage=23%, E-value=1e-178, Identity=87%"; Hit description =Multidrug resistance associated protein 1
  Pfam annotation: Domain name=ABC_tran; Domain location=259-344; Score= -55.8; E_value=0.07; Accession=PF00005.19; Description=ABC transporter
FFDSTPVGRILTRASSDLSILDFDIPYSMAFVVTGGIEVVTTVLVMGTVTWQVLVVAIPVTIAMVYVQRYYISSARELVRINGTTKAPVMNYASESILGVVTIRAFAATERFIHSNMQLIDTDATLFFHTVAAQEWVLIRVEALQSLTIITAALFLVLVPPGVISPGFAGLCLSYALTLTAAQVFLTRYYSYLENYIISVERIKQYMQLPAEPPAIIPENRPPASWPQEGRIDLQDLKIRYRPNAPLVLKGITCTFAAGNKIGVVGRTGSGKSTLISSLFRLVDPAGGRILIDKLDICSIGLKDLRTKLSIIPQEPTLFRGTVRNNLDPLGLHSDQEIWEVSKNCHA

SEQ ID NO: 93657 - protein, 153 aa, Setaria italica
  misc_feature (14)..(14): Xaa can be any naturally occurring amino acid
  misc_feature (80)..(80): Xaa can be any naturally occurring amino acid
  Transcript Sequence Number=SeqID_27683
  Gene Ontology: Mol. function=ATP-dependent helicase activity; Cellular component=intracellular; Biological process=DNA recombination
  Homolog annotation: Hit_ID=Q6Y5A8; Match level="QueryCoverage=100%, HitCoverage=19%, E-value=2e-74, Identity=85%"; Hit description =Putative DNA helicase RecQsim
  Pfam annotation: Domain name=Helicase_C; Domain location=1-69; Score =52.1; E_value=2.2e-12; Accession=PF00271.23; Description=Helicase conserved C-terminal domain
RAAAYNAKMPNLIXKVHHQFHCNDLEVVVATIAFGMGIDKSNVRRIIHYGFPQSLEAYYQEAGRAGRDGKLSDCTLYCNXLCRAPTLLPNKESEEQTKAAYRMLRDCFHYSLNTSTCRAKILVKYFGEEFGPHRCDMCDVCINGPPQMHDFKE

SEQ ID NO: 93658 - protein, 121 aa, Setaria italica
  Transcript Sequence Number=SeqID_27684
ENSDAVLQDLLEFLKAKRKLVGESKASRTCQTHQPSAYFVLVVLPLALIACQIHQSPACSFTFFLVVLPPSHRRRCGEGRKEAGTIFSSRRTVHSGGAGDGRAGSVRRRRRLAPDAVDRFS

SEQ ID NO: 93659 - protein, 216 aa, Setaria italica
  Transcript Sequence Number=SeqID_27685
  Homolog annotation: Hit_ID=B9RN44; Match level="QueryCoverage=68%, HitCoverage=70%, E-value=7e-48, Identity=66%"; Hit description=NEFA -interacting nuclear protein NIP30, putative
  Pfam annotation: Domain name=Nefa_Nip30_N; Domain location=24-113; Score=150.0; E_value=7.3e-42; Accession=PF10187.1; Description=N -terminal domain of NEFA-interacting n
MAAQETTPSSKGAEAPATIRLVNFISEDQLDEVKRTRGERVEDGTAQRDKPLFQILQENKEKKDAEFNERFKHRPPKALDEDETEFLENLASSRREYEQQVANEEAEQLRSFHEAVAARSNIVHELEAPTVSRPEESRPKPPTKRSQPALLKNVIISVKPQVKKAKVDVEAKPAPEEQRPSNGHDADQNPPSDANKAALGSLVAYDDDDESGDDQD

SEQ ID NO: 93660 - protein, 47 aa, Setaria italica
  Transcript Sequence Number=SeqID_27686
PHPLLLVVDWCGRRSTEEGGELQLVREPAAACWLVVLLIATRCCCGC

SEQ ID NO: 93661 - protein, 243 aa, Setaria italica
  Transcript Sequence Number=SeqID_27687
  Homolog annotation: Hit_ID=B2Z6N3; Match level="QueryCoverage=97%, HitCoverage=9%, E-value=2e-43, Identity=39%"; Hit description =Neuroblastoma-amplified gene
GRCLIDVKDISWWTDNVLMLVRADGSISMYGITESEVVSKDDPVLSTPLLEKAKATEGHAFILQSSRYERNTSANKRMDSDLEPNLPSGSREHQQTEMDKMFWSLISFSKVTVTEMYSVMIRENRFKEALDFASRYNLDKDEVLKARWLHCDGDTSEIDSYLAKIKDQVFVLSECVNKVGPTEAALRALLSFGLRITDHYKFSRLDNSSEGSTWDSRIIRLRLLRHRDMLETFLGINMGRYSA

SEQ ID NO: 93662 - protein, 60 aa, Setaria italica
  Transcript Sequence Number=SeqID_27688
QSRETTNEEQERGSIRVEWRSSLERGRISTTRYQLLPMHHRCPDSRSCRHAGKHHERESR

SEQ ID NO: 93663 - protein, 54 aa, Setaria italica
  Transcript Sequence Number=SeqID_27689
  Subcellular localization annotation: CTP_CleavageSite=45; ConfidenceScore=5.39e-01
SKCARLNTSVNCLSPSRSLNTGPVFSFSNCYFSFYFDRKLQQQSSAVMMMTTLW

SEQ ID NO: 93664 - protein, 162 aa, Setaria italica
  Transcript Sequence Number=SeqID_27690
  Gene Ontology: Mol. function=structural molecule activity
  Homolog annotation: Hit_ID=B6SUF8; Match level="QueryCoverage=95%, HitCoverage=57%, E-value=1e-16, Identity=37%"; Hit description=VAP27
FFKFFVKQQKEAPPDMQCKDKFLVQSVIVAEDTLPKDITGDMFTTQSGNVVDEVKLKVVYVPPPKPPSPVREGSEEGSSPRPSLSDGSTLNYQEMQTTRESDEPPSLTAVKAQRDQEGFTSETSALISKLTEERNSAIQQNNLLREELDLVRRELSKQNGGF

SEQ ID NO: 93665 - protein, 250 aa, Setaria italica
  Transcript Sequence Number=SeqID_27691
  Gene Ontology: Mol. function=structural molecule activity; Cellular component=plasma membrane; Biological process=innate immune response
  Homolog annotation: Hit_ID=B6SUF8; Match level="QueryCoverage=92%, HitCoverage=91%, E-value=5e-52, Identity=49%"; Hit description=VAP27
  Pfam annotation: Domain name=Motile_Sperm; Domain location=8-115; Score=132.7; E_value=1.2e-36; Accession=PF00635.18; Description=MSP (Major sperm protein) domain
MGSDSKELLGIEPLELRFPFETKKQISCSMQLTNRTDDYIGFKVKTTSPKKYCVRPNSGIVPPRSTNDVIVTMQAQKEAPPDMQCKDKFLVQSVIVAEDTLPKDITGDMFTKQSGNVVDEVKLKVVYVPPPKPPSPVREGSEEGSSPRPSLSDGSTLNYQEMQTTRESDEPPSLTAVKAQRDQEGFTSETSALISKLTEERNSAIQQNNLLREELDLVRRELSKQNGGFSFVVVAAIALLGILLGFIMKR

SEQ ID NO: 93666 - protein, 88 aa, Setaria italica
  Transcript Sequence Number=SeqID_27692
KPNAAGIWDLGSDGEHVGAERKDPTLEWMTSEAGLGTVDEDDGVELRIQPARTAGVSRRCGGSRGRQSGLLGDRGGGQKGGARRAVSR

SEQ ID NO: 93667 - protein, 232 aa, Setaria italica
  Transcript Sequence Number=SeqID_27693
  Gene Ontology: Cellular component=mitochondrial matrix
  Homolog annotation: Hit_ID=B6T2U8; Match level="QueryCoverage=64%, HitCoverage=63%, E-value=3e-40, Identity=57%"; Hit description =Cation cation antiporter
  Pfam annotation: Domain name=Use1; Domain location=83-232; Score =18.8; E_value=4.9e-08; Accession=PF09753.1; Description=Membrane fusion protein Use1
  Subcellular localization annotation: CTP_CleavageSite=9; ConfidenceScore=5.04e-01
ERNYGCGPGCAVTGSPLSLLPPSVPRRGLPRGPIDAPGSHRIVGIRLPCARVESGARPRRLHRQCQALLRLSSILRYPAMGISRTQVNLLRLLDSAPRQENQAKLIHYVTTSRELLEQLAAETTSEGISSVSKVKLNEYSDKIEELAARLASKVPDDALNEIQEEYSSEVEHVRSPIALSSGLKRRLTAQVEARETVSEKERDVGAPIRLDADAQAQIEKHKKITKNLRKRF

SEQ ID NO: 93668 - protein, 185 aa, Setaria italica
  Transcript Sequence Number=SeqID_27694
  Gene Ontology: Cellular component=mitochondrial matrix
  Homolog annotation: Hit_ID=B6T2U8; Match level="QueryCoverage=99%, HitCoverage=78%, E-value=9e-67, Identity=68%"; Hit description =Cation cation antiporter
  Pfam annotation: Domain name=Use1; Domain location=1-185; Score =186.9; E_value=5.8e-53; Accession=PF09753.1; Description=Membrane fusion protein Use1
FSVSKVKLNEYSDKIEELAARLASKVPDDALNEIQEEYSSEVEHVRSPIALSSGLKRRLTAQVEARETVSEKERDVGAPIRLDADAQAQIEKHRNLQEGFTDEMVELARQLKETSLLMNQSVQETEKILDSTERVVEHSLAGTSHANARAVEVYSLTSKTTCFQWLLLFVMTCMFFMVVLLIRIT

SEQ ID NO: 93669 - protein, 106 aa, Setaria italica
  Transcript Sequence Number=SeqID_27695
  Subcellular localization annotation: CTP_CleavageSite=62; ConfidenceScore=5.84e-01
PRSPDPSASPARSPASPARRGPHSPQRRVSPAQSPKQQPPPQPFRRPSGFDSAGARARIARRAAQNAAALSPDDEASTTFSDGGSSSSFSASSRWDLEPVGLHDHC

SEQ ID NO: 93670 - protein, 92 aa, Setaria italica
  misc_feature (81)..(81): Xaa can be any naturally occurring amino acid
  Transcript Sequence Number=SeqID_27696
  Gene Ontology: Mol. function=transferase activity; Cellular component= plastid outer membrane; Biological process=glycolysis
  Homolog annotation: Hit_ID=B6U2X9; Match level="QueryCoverage=83%, HitCoverage=15%, E-value=8e-30, Identity=83%"; Hit description =Hexokinase-1
  Pfam annotation: Domain name=Hexokinase_1; Domain location=4-92; Score=-112.5; E_value=0.027; Accession=PF00349.13; Description =Hexokinase
MAAAEAVAMAEQVVADLREKCETPPELLREVASAMAHEMGAGLEKDGGSRVNMLLSYVDKLPTGREEGLFYGLDLGGTNFXVLRVQLGGIEK

SEQ ID NO: 93671 - protein, 130 aa, Setaria italica
  Transcript Sequence Number=SeqID_27697
  Gene Ontology: Mol. function=nucleic acid binding; Cellular component= nucleus; Biological process=mRNA processing
  Homolog annotation: Hit_ID=Q9FMP4; Match level="QueryCoverage=93%, HitCoverage=98%, E-value=2e-46, Identity=72%"; Hit description=Pre -mRNA branch site p14-like protein
  Pfam annotation: Domain name=RRM_1; Domain location=21-88; Score =63.4; E_value=8.4e-16; Accession=PF00076.14; Description=RNA recognition motif. (a.k.a. RRM, RBD, o
MAAVGMRKGNARLPPEVNRVLYVRNLPFNISSEEMYDIFGKYGAIRQIRLGNAKDTRGTAYVVYEDIYDAKNAVDHLSGFNVANRYLIVLYYQPTKMSKKSDVKKKEEEITRLQEKYGIGSKTPGPGSSD

SEQ ID NO: 93672 - protein, 67 aa, Setaria italica
  Transcript Sequence Number=SeqID_27698
LIDLDFTRSDQIYSLQNIIIAIPLLDSQCCKVIYLILNSSFMFGLTKEYIELLSCFIHLSGVSCTSC

SEQ ID NO: 93673 - protein, 113 aa, Setaria italica
  Transcript Sequence Number=SeqID_27699
  Subcellular localization annotation: CTP_CleavageSite=80; ConfidenceScore=5.57e-01
LGASPQPTPPLPPPAPSQNIAPISSSNVSLPTPSLDLPDVADLFAPPTENASRKRESNGSALHDSRSKFPRTQPQPQVVRSAAGNALIPPQLRGRSNVVTEDMSKLFVAKRKE

SEQ ID NO: 93674 - protein, 163 aa, Setaria italica
  Transcript Sequence Number=SeqID_27700
  Gene Ontology: Mol. function=nucleoside-triphosphatase activity
  Homolog annotation: Hit_ID=B6TNP7; Match level="QueryCoverage=100%, HitCoverage=31%, E-value=1e-73, Identity=85%"; Hit description=ATP binding protein
RRRELRLFANTGVDGTTGAPRWASAPFTHPATLDAVAMDPELKARVRADLESFLKGRAYYHRLGRAWRRSYLLYGPPGTGKSTFAAAMARFLGYDVYDIDLSRGGCDDDPRALLLDTAPRSLILVEDLDRYLRGGDGETAAARTARVLGFMDGLSSCCGEERV

SEQ ID NO: 93675 - protein, 42 aa, Setaria italica
  Transcript Sequence Number=SeqID_27701
TIIKYVLDNILPRVHRSCMEIWTGIVYGKCCDMSYFLSLMPV

SEQ ID NO: 93676 - protein, 116 aa, Setaria italica
  Transcript Sequence Number=SeqID_27702
  Subcellular localization annotation: CTP_CleavageSite=50; ConfidenceScore=5.66e-01
IQLQHSPRPLLSPGLFFLSGSSTTNRSLVQLQPKVPNNIRVSAGLQLCVRCSVFVSDSNFAGTGLDCSFSAALHKQDFLKQKNKKRTRVMCFQEGERNRVMASAELGSKSSESYWC

SEQ ID NO: 93677 - protein, 54 aa, Setaria italica
  Transcript Sequence Number=SeqID_27703
WSLVSRKFQKMKVACEERQLQALERSIGDLEDGIEFLFRRLIQSRVALLNILSS

SEQ ID NO: 93678 - protein, 252 aa, Setaria italica
  misc_feature (85)..(85): Xaa can be any naturally occurring amino acid
  Transcript Sequence Number=SeqID_27704
  Gene Ontology: Mol. function=carbohydrate binding; Biological process= carbohydrate metabolic process
  Homolog annotation: Hit_ID=B6SUB8; Match level="QueryCoverage=88%, HitCoverage=61%, E-value=5e-97, Identity=78%"; Hit description =Aldose 1-epimerase
  Pfam annotation: Domain name=Aldose_epim; Domain location=32-252; Score=167.2; E_value=4.9e-47; Accession=PF01263.12; Description =Aldose 1-epimerase
MARAPAPLLLLALLAALAAAAGANAAGRKMVGVYELRKGDFSVKVTNWGATLTSVVLPDCKGNLADVVLGYDTIADYVNGSNYFXGALVGRVANRVANARFVLDGKVYHLVPNDGKNALHGGKRGFSKVIWTVKDYVGGGDSPYITLYYHSFDGEEGFPGDLDVYVTYRLLGRYELSLHMNATALDKATPVNLANHAYWNLAGQGRGDILGHTVQLFASRYTPVDGALIPTGAVVPVAGTPYDLRAPTPVGA

SEQ ID NO: 93679 - protein, 135 aa, Setaria italica
  Transcript Sequence Number=SeqID_27705
  Gene Ontology: Mol. function=catalytic activity; Cellular component =nucleus; Biological process=multicellular organismal development
  Homolog annotation: Hit_ID=Q6ZGY0; Match level="QueryCoverage=98%, HitCoverage=22%, E-value=5e-72, Identity=95%"; Hit description =Probable protein phosphatase 2C 26
GRYLKQAKLNDGLLEMFRNEYIGDTPYISCTPSLCHHKLSTRDQFLVLSSDGLYQYLSNEEVVLHVENFMERFPEGDPAQSLIEEVLSRAAKKAGMDFYELLDIPQGDRRKYHDDVTIMVISLEGRIWKSSGTYV

SEQ ID NO: 93680 - protein, 109 aa, Setaria italica
  Transcript Sequence Number=SeqID_27706
  Gene Ontology: Mol. function=transferase activity, transferring nitrogenous groups; Biological process=cellular amino acid and derivative metabolic process
  Homolog annotation: Hit_ID=Q5Z7R2; Match level="QueryCoverage=87%, HitCoverage=30%, E-value=2e-25, Identity=61%"; Hit description =Putative nicotianamine aminotransferase B
MEGGRSSRRWRFASPNPAVAAAGERSVRRYLLDLHGCLDERGPRPVIPLSVGDPSSCPSFRTAPEAVEAVATALRSGEFDGYPSRDTNLAARRSVPILLVHLTTLTVLA

SEQ ID NO: 93681 - protein, 129 aa, Setaria italica
  Transcript Sequence Number=SeqID_27707
  Gene Ontology: Mol. function=ATP-dependent helicase activity; Cellular component=intracellular
  Homolog annotation: Hit_ID=B9RL32; Match level="QueryCoverage=100%, HitCoverage=11%, E-value=1e-61, Identity=86%"; Hit description=ATP -dependent RNA helicase, putative
  Pfam annotation: Domain name=HA2; Domain location=29-120; Score =113.0; E_value=1e-30; Accession=PF04408.15; Description=Helicase associated domain (HA2)
LQIKSLQVGSIGEFLSAALQPPEPLAVQNAVEFLKMIGALDGNENLTDLGRYLSMLPVDPKLGKMLIMGSVFRCIDPILTVVAGLSVRDPFLLPQDKKDLAGTAKSRFSAKDYSDHMALVRAYEGWKDA

SEQ ID NO: 93682 - protein, 83 aa, Setaria italica
  Transcript Sequence Number=SeqID_27708
  Pfam annotation: Domain name=GRP; Domain location=1-81; Score=1.2; E _value=5.8e-05; Accession=PF07172.3; Description=Glycine rich protein family
MASKAALFLALNLVLFVVTNACPYCGGGNNGHGGSGGHHGGGGSGGYGGGSGPGSGSSGGGWGGNNGGGGSGGTSGWYGHCPT

SEQ ID NO: 93683 - protein, 123 aa, Setaria italica
  misc_feature (45)..(45): Xaa can be any naturally occurring amino acid
  Transcript Sequence Number=SeqID_27709
  Gene Ontology: Mol. function=oxidoreductase activity; Biological process=oxidation reduction
  Homolog annotation: Hit_ID=Q40061; Match level="QueryCoverage=100%, HitCoverage=36%, E-value=2e-54, Identity=82%"; Hit description=Ids2
VMRDMDAVCHEFFQMPTEDKAEFYSEDKSIRSRLFSGSSFETLGXEKYWLDVLELLYPLPSGDTSGWPHKPQRLREVVGNYTGLARGLAMEILQLLCEGLGLRPDFFVGDISGGRVVVDINYY

SEQ ID NO: 93684 - protein, 77 aa, Setaria italica
  Transcript Sequence Number=SeqID_27710
  Gene Ontology: Mol. function=voltage-gated anion channel activity; Cellular component=mitochondrial outer membrane; Biological process =anion transport
  Homolog annotation: Hit_ID=Q6K548; Match level="QueryCoverage=97%, HitCoverage=30%, E-value=2e-18, Identity=64%"; Hit description =Mitochondrial outer membrane protein porin
FTLTTYTSNGVAVTATSTKKADLIIGEIQSQIKNKNITVDVKANSDSNVNTSLFSLYIYLMPGIPCLEKDQQYVHFL

SEQ ID NO: 93685 - protein, 107 aa, Setaria italica
  Transcript Sequence Number=SeqID_27711
  Gene Ontology: Mol. function=transporter activity; Cellular component= integral to membrane; Biological process=transport
  Homolog annotation: Hit_ID=B6TCP1; Match level="QueryCoverage=92%, HitCoverage=20%, E-value=4e-27, Identity=63%"; Hit description =Carbohydrate transporter/ sugar porter/ transporter
GALTLCRSVVQAACYPLAAYAAARHNRAHVIAVGAFLWAAATFLVGVSDTFLQVAISRGLNGIGLALVVPSIQSLVADSTDDGTRGSAFGWLQLASSLGDPEDRGLR

SEQ ID NO: 93686 - protein, 70 aa, Setaria italica
  Transcript Sequence Number=SeqID_27712
  Gene Ontology: Mol. function=inositol-1,3,4-trisphosphate 5/6-kinase activity; Cellular component=intracellular; Biological process =inositol trisphosphate metabolic process
  Homolog annotation: Hit_ID=Q84Y01; Match level="QueryCoverage=98%, HitCoverage=20%, E-value=1e-14, Identity=56%"; Hit description =Inositol-tetrakisphosphate 1-kinase 1
MAEHSSPADHTYTIGYAMLPNKHDTFVQPSFIDLAARHGIRLVAVDASRPLVEQGPFDLIVHKLYGQPWR

SEQ ID NO: 93687 - protein, 77 aa, Setaria italica
  Transcript Sequence Number=SeqID_27713
  Subcellular localization annotation: CTP_CleavageSite=28; ConfidenceScore=5.28e-01
LVSPGQHGSQAQHIDGIRNAGLSFDCARESSLSSSSTFTSDSLENKLSSANSTKDRSSGEYTYSERTDVSDMQVKSV

SEQ ID NO: 93688 - protein, 107 aa, Setaria italica
  Transcript Sequence Number=SeqID_27714
HTSQQCTPHPHARAPGGWSDKHRVASGDGHCQPRAIPFVMRTSHPHITPPLPPPPPPRLTASAAPAPHPRRAPQNPPQIHPPSSPAPAFIPLASPKPRARSDATRLR

SEQ ID NO: 93689 - protein, 140 aa, Setaria italica
  Transcript Sequence Number=SeqID_27715
  Homolog annotation: Hit_ID=Q259S8; Match level="QueryCoverage=77%, HitCoverage=26%, E-value=2e-19, Identity=55%"; Hit description =H0403D02.10 protein
RVLVAVNAVSSLAAAAAAAVLGGDALATVFPRVSGGDFPWAEPFNAVSIQLSALAVSNASEVDAIDEAVQRLASVLDGKGGGDEAALRAAAREVEERTEELTARLDRLSDAVNGVFRAALGLRNAELGAFMAGPAGKTCV

SEQ ID NO: 93690 - protein, 88 aa, Setaria italica
  Transcript Sequence Number=SeqID_27716
  Gene Ontology: Mol. function=hydrolase activity, hydrolyzing O -glycosyl compounds; Biological process=carbohydrate metabolic process
  Homolog annotation: Hit_ID=B6T391; Match level="QueryCoverage=76%, HitCoverage=19%, E-value=3e-23, Identity=82%"; Hit description =Lichenase-2
  Subcellular localization annotation: CTP_CleavageSite=48; ConfidenceScore=5.04e-01
VGGTGISVTVGAPNDVLSNIAASPAAAASWVRNNIQAYPSVSFRYICVGNEVAGGAAQNLAPAMENVRRRRAGERGQRQDLQPVPDQP

SEQ ID NO: 93691 - protein, 68 aa, Setaria italica
  Transcript Sequence Number=SeqID_27717
LHTVYMYMCYSWCTYTVVPPRHVLRTYTCVSYPSPELSSMIKYVYGVRISVRTCRLCIVLGACFATAG

SEQ ID NO: 93692 - protein, 68 aa, Setaria italica
  Transcript Sequence Number=SeqID_27718
  Gene Ontology: Mol. function=hydrolase activity, hydrolyzing O -glycosyl compounds; Cellular component=extracellular region; Biological process=carbohydrate metabolic process
  Homolog annotation: Hit_ID=B6T391; Match level="QueryCoverage=94%, HitCoverage=19%, E-value=5e-25, Identity=90%"; Hit description =Lichenase-2
MYVGAEAIGVCYGMSANNLPPASTVIDMYKANGISAMRLYAPDQGALQAVGGTGISVTVGAPNDVASS

SEQ ID NO: 93693 - protein, 213 aa, Setaria italica
  Transcript Sequence Number=SeqID_27719
  Gene Ontology: Mol. function=hydrolase activity, hydrolyzing O -glycosyl compounds; Cellular component=vacuole; Biological process =carbohydrate metabolic process
  Homolog annotation: Hit_ID=B6T391; Match level="QueryCoverage=35%, HitCoverage=22%, E-value=3e-34, Identity=92%"; Hit description =Lichenase-2
  Pfam annotation: Domain name=Glyco_hydro_17; Domain location=1-162; Score=-122.6; E_value=0.00052; Accession=PF00332.10; Description =Glycosyl hydrolases family 17
MPRMACDTDVVTLMWPSPAAASAAWTFSIAGARFTGEAKGYMGPVLSFLARTGSPLMANIYPYLAWAYNPSAMDMSYALFTSKGTVVQDGAYGYQNLFDTTVDAVLHHRALGGEERVAHVHGARVVGPRKVRVDVGHQRRPGPGQERQHGAHVPLGLVHVDHRARRRQVVGAHAVAHADGLSTLWDGCKDPRSNAMANMEATPCLAILSLSLK

SEQ ID NO: 93694 - protein, 68 aa, Setaria italica
  Transcript Sequence Number=SeqID_27720
LGREINRRCTVFIYGTYISLRRIHRPTYSLTAYASGSTIWHSQRSQSKPPVQYIIYMYVHLYVPRIRT

SEQ ID NO: 93695 - protein, 69 aa, Setaria italica
  Transcript Sequence Number=SeqID_27721
  Subcellular localization annotation: CTP_CleavageSite=62; ConfidenceScore=5.49e-01
AQSTCRPNPSLAAILFIPLRRTTPPAAVRRPSSSRHLTLCQRPATHDAAPAGRPATHVYGVSCSILQAC

SEQ ID NO: 93696 - protein, 335 aa, Setaria italica
  Transcript Sequence Number=SeqID_27722
  Gene Ontology: Mol. function=hydrolase activity, hydrolyzing O -glycosyl compounds; Cellular component=extracellular region; Biological process=carbohydrate metabolic process
  Homolog annotation: Hit_ID=B6TNS8; Match level="QueryCoverage=100%, HitCoverage=100%, E-value=1e-168, Identity=87%"; Hit description =Lichenase-2
  Pfam annotation: Domain name=Glyco_hydro_17; Domain location=29-334; Score=584.2; E_value=1.5e-172; Accession=PF00332.10; Description =Glycosyl hydrolases family 17
MARQGAASMLATALLLGVFANVAPSVESIGVSYGMSGDNLPPASTVVGMYKANGIPLMRIYAPDQAALEAVGGTGIRVVVGAPNDVLSSLAASPAAAAAWVRNNIAAYPDVTFRCVCVGNEVEGGAAQNLVPAMENIRAALAAAGLDGIKVTTSVSQAILGGYKPPSAAEFTDEAQGFMGPVLEFLARTGAPLMASIYPYFTYATNPSAMDLSYALFTAPGTVLQDGTYGYQNLFDATVDSFYVAMANHGGAGVTLVVSESGWPSAGGVAASPENAALYNQNLINHVGRGTPRHPGAIETILFSMFNENLKESGVEQNWGLFYPNKQRVYPISFN

SEQ ID NO: 93697 - protein, 335 aa, Setaria italica
  misc_feature (255)..(255): Xaa can be any naturally occurring amino acid
  misc_feature (294)..(294): Xaa can be any naturally occurring amino acid
  Transcript Sequence Number=SeqID_27723
  Gene Ontology: Mol. function=hydrolase activity, hydrolyzing O -glycosyl compounds; Cellular component=extracellular region; Biological process=carbohydrate metabolic process
  Homolog annotation: Hit_ID=B6T391; Match level="QueryCoverage=99%, HitCoverage=99%, E-value=1e-156, Identity=83%"; Hit description =Lichenase-2
  Pfam annotation: Domain name=Glyco_hydro_17; Domain location=29-335; Score=616.3; E_value=3.2e-182; Accession=PF00332.10; Description =Glycosyl hydrolases family 17
MARQGVASMFAMALLLGVFASIPQSAEAIGVCYGMSANNLPPASTVIDMYKANGISAMRLYAPDQGALQAVGGTGISVTVGAPNDVLSNIAASPAAAASWVRNNIQAYPSVSFRYICVGNEVAGGAAQNLAPAMENVHAALAAAGLGHIKVTTSVSQAILGVYSPPSAAEFTGEAKGYMGPVLSFLARTGSPLMANIYPYLAWAYNPSAMDMSYALFTSKGTVVQDGAYGYQNLFDTTVDAFYFAMGRHGGSGVXLVVSESGWPSGGGEQANAANARIYNQYLINHVGRGTPRXHPGGIETYLFSMFNENQKDSGVEQNWGLFYPNMQHVYPISF

SEQ ID NO: 93698 - protein, 321 aa, Setaria italica
  Transcript Sequence Number=SeqID_27724
MATELDVSKSRRFDMAMSRRTRRSTSLVACFQDQYVPSLAQQRHQELKEFLQCQDAELKALQQCEDAEQLALGLDEDEESKIPQAPLQYEDDEQKTPKQYQDEQEKKYQQYSGAEQKKPEHYQCEKEKKPEQHKDEEEKTPEQYQDEDEKASQYQEEVLMIPNQSENDEEMTAERYQLRQEADEKASEQSEEDEEQQKAEQEWCKAEQKEPEQFQSVKKLPLPPRAVDNVPRFSLQELIQQKQLQTGETKPTNKLGGHGESALPDHKVSGSGGGAAGGTTLAMVIKRPEGGKKSMGMIRRCVKALNQMIKTKHGSKKNLHL

SEQ ID NO: 93699 - protein, 78 aa, Setaria italica
  Transcript Sequence Number=SeqID_27725
  Gene Ontology: Mol. function=sterol 14-demethylase activity; Cellular component=integral to membrane; Biological process=steroid biosynthetic process
  Homolog annotation: Hit_ID=P93846; Match level="QueryCoverage=100%, HitCoverage=15%, E-value=1e-30, Identity=71%"; Hit description =Obtusifoliol 14-alpha demethylase
EDKAAGALSYIPFGGGKHWCIGQLFAYLEIETVWAHLLRNFELELVSPFPESEWNSMVVGVKGELLVKYKRRRLVVGN

SEQ ID NO: 93700 - protein, 91 aa, Setaria italica
  misc_feature (7)..(7): Xaa can be any naturally occurring amino acid
  misc_feature (27)..(27): Xaa can be any naturally occurring amino acid
  Transcript Sequence Number=SeqID_27726
  Gene Ontology: Mol. function=tetracycline:hydrogen antiporter activity; Cellular component=integral to membrane; Biological process=response to antibiotic
  Homolog annotation: Hit_ID=B6TYM8; Match level="QueryCoverage=89%, HitCoverage=30%, E-value=5e-16, Identity=53%"; Hit description =Tetracycline transporter protein
  Subcellular localization annotation: CTP_CleavageSite=22; ConfidenceScore=5.20e-01
TNVSKNXVASNEQGIAQGCISSFSSVXSILGPLIFTPLTAWFLSETGPFNFKGFSILCAGLCTLIAFIISLRMRGAQSSASKKSTVEHEQA

SEQ ID NO: 93701 - protein, 44 aa, Setaria italica
  Transcript Sequence Number=SeqID_27727
TLRCMCECVCHRSCVIGHLLPTQRIPHRLQRFSYDVLDDLIRAN

SEQ ID NO: 93702 - protein, 52 aa, Setaria italica
  Transcript Sequence Number=SeqID_27728
TPGNPINGNPRLVVVIIFPVTNSMTRSVTAATEVPDLLCCRHHLSLLYLTSL

SEQ ID NO: 93703 - protein, 109 aa, Setaria italica
  Transcript Sequence Number=SeqID_27729
FLGNSVACCYGVQIDIPQLPMDRHICKFTSYFTKSTSITCPSLLLLSFFHSSIAVILRFFSSSVFLLASSFSLALPGSYCSTLKRHDSLIEDTNTTPSNTHVTFTYPSH

SEQ ID NO: 93704 - protein, 82 aa, Setaria italica
  Transcript Sequence Number=SeqID_27730
  Subcellular localization annotation: CTP_CleavageSite=43; ConfidenceScore=5.48e-01
TSRHSAAPHVRSQGQLGYSFIAYFFGFFNFTFLSVTSAVLPCRGAQIGRSGVQHDQICYRCDRSSRFALLLVTGKMMTTTNL

SEQ ID NO: 93705 - protein, 137 aa, Setaria italica
  misc_feature (73)..(73): Xaa can be any naturally occurring amino acid
  Transcript Sequence Number=SeqID_27731
MADFSWLTALGFLFLTFNSGMAVYRSNGDTGSIIFVVVSYLDLVALFACLRYYERLDRHSPKRETVKAAVWGXTTLLTVMFSYKVAEIMTLAVKLVVWAMAAATSCGGFYAFFIHEEKPALPAAGVPAAAHKEGAAN

SEQ ID NO: 93706 - protein, 106 aa, Setaria italica
  misc_feature (89)..(89): Xaa can be any naturally occurring amino acid
  Transcript Sequence Number=SeqID_27732
  Gene Ontology: Mol. function=protein serine/threonine kinase activity; Cellular component=plasma membrane; Biological process =protein amino acid phosphorylation
  Homolog annotation: Hit_ID=B4FZS4; Match level="QueryCoverage=99%, HitCoverage=36%, E-value=4e-47, Identity=89%"; Hit description =Calcium-dependent protein kinase 2
DYVAPEVVAGGEYGEKVDVWSAGVVAYVLLSGGALPFGGETPAEVFAAVLRGSLRFPPALFAGVSPAAKDLMRRMMCRDASRRFSAEQXHPWIQSGGGAREVVQPT

SEQ ID NO: 93707 - protein, 31 aa, Setaria italica
  Transcript Sequence Number=SeqID_27733
AKHIFKVLFTLNGTVFSILSRCYVYVYIYLC

SEQ ID NO: 93708 - protein, 105 aa, Setaria italica
  Transcript Sequence Number=SeqID_27734
DDGRRYSALTKLGFGALAFNSVVALYNSWGGAGSAAFVLAADAALVLLFLCLREFERTRGGAARDRNIIKAAVWALATLLTAMFASRVAPLMPPVIGTAVWIVAV

SEQ ID NO: 93709 - protein, 112 aa, Setaria italica
  Transcript Sequence Number=SeqID_27735
VHEEMMDNWVLASLPHTSNPISFNSLLPMHHLLVILSFMPSIPVRLLTPGNRHILFRVFSSPEGHHCSRIAKLHHESSRVRPHRAVQRLPKRKSSVDHKRYSMYQVRNYANI

SEQ ID NO: 93710 - protein, 47 aa, Setaria italica
  Transcript Sequence Number=SeqID_27736
KKIPRVHTRVCFLTSAILNMKFKSLVQTEHQFKLNTVFTLEFKVCCS

SEQ ID NO: 93711 - protein, 66 aa, Setaria italica
  Transcript Sequence Number=SeqID_27737
  Gene Ontology: Mol. function=protein kinase activity
  Homolog annotation: Hit_ID=Q2RBL3; Match level="QueryCoverage=95%, HitCoverage=7%, E-value=2e-12, Identity=60%"; Hit description =Leucine Rich Repeat family protein, expressed
PGSGDELMDTLKLALHCVDPAPSVRPEAREVLRQLEQIRPGSDGGAGPSEEGAGAHVPVASAGDDE

SEQ ID NO: 93712 - protein, 281 aa, Setaria italica
  misc_feature (4)..(4): Xaa can be any naturally occurring amino acid
  misc_feature (275)..(275): Xaa can be any naturally occurring amino acid
  Transcript Sequence Number=SeqID_27738
  Gene Ontology: Mol. function=metal ion binding; Cellular component =cellular_component
  Homolog annotation: Hit_ID=Q7XQ90; Match level="QueryCoverage=100%, HitCoverage=35%, E-value=1e-149, Identity=70%"; Hit description =OSJNBa0018M05.18 protein
SEVXFLLDKTQYGTSSILSPEMAEWQGPALYCFNDSVFSPQDLYAISRIGQDSKLEKPFAIGRFGLGFNCVYHFTDIPGFVSGENIVMFDPHACYLPGISPSHPGLRIKFVGRRILDQFPDQFAPFLHFGCNLQQPFPGTLFRFPLRNEAAASRSQIKQEQYAPQDVEMLFSSFSEVVSEALLFLRNVKKVTLYVKENNSQEMRLVHCASKHNSSQMDKEPHALNTMLAYIHGNQPSGMDRNQFFSKLNRTKDSDLPWSCQKVAILEQNPFCALXVHSWIL

SEQ ID NO: 93713 - protein, 258 aa, Setaria italica
  Transcript Sequence Number=SeqID_27739
  Homolog annotation: Hit_ID=Q656N0; Match level="QueryCoverage=98%, HitCoverage=7%, E-value=4e-47, Identity=52%"; Hit description =Putative STH1 protein
SDTSCVSSYTQVNTPPSQGSAVAVAGIQKDLVTVKLDTLLPDSGKRISPVHEGDKGATITTPVAKDICAETVMSDNATTLAPNTLNENVRLLQVESAPTMPVVSGGLVETSHVVADKPVEKQPASRRRRKKTSGSEDTGVSTRQRSAMKKSCYSTSVTIDDVGSGMVPSEKSGIMKERDDGSLQNTSNELPNINLPSHEKSGYDSQPSTPIAVPINEATLPSGFKDNRATHSEITLATSANPHVDGKPVDSHLDAPVS

SEQ ID NO: 93714 - protein, 70 aa, Setaria italica
  Transcript Sequence Number=SeqID_27740
SAPIQKSICTGSVNRSRGLPSQCTLENLGPCLQQFPTLWKTLYSACFGQGEYGCLNYSPANVFGKSSISE

SEQ ID NO: 93715 - protein, 89 aa, Setaria italica
  Transcript Sequence Number=SeqID_27741
  Gene Ontology: Mol. function=flavin-containing monooxygenase activity; Cellular component=intrinsic to endoplasmic reticulum membrane; Biological process=oxidation reduction
  Homolog annotation: Hit_ID=Q93WI6; Match level="QueryCoverage=95%, HitCoverage=19%, E-value=9e-26, Identity=68%"; Hit description =P0560B06.15 protein
AVRDNRVGPLYEHTFPPALAPSLSFVGIPTRVFAPWFFEAQARWIALVLSGKKALPPEEEMLRAVQEDYRAREAAGVPVRRTHAIPAID

SEQ ID NO: 93716 - protein, 76 aa, Setaria italica
  Transcript Sequence Number=SeqID_27742
  Subcellular localization annotation: CTP_CleavageSite=66; ConfidenceScore=5.86e-01
SWLPTRCTASSPARGPGGICSAAPTPGSTARSSSPGSSPSRRSPRSPPYGAPSSASSSACATPPPRSSCGSSSDTT

SEQ ID NO: 93717 - protein, 75 aa, Setaria italica
  Transcript Sequence Number=SeqID_27743
  Gene Ontology: Mol. function=binding; Cellular component=chloroplast
  Homolog annotation: Hit_ID=Q53NS3; Match level="QueryCoverage=100%, HitCoverage=11%, E-value=3e-23, Identity=73%"; Hit description =Pentatricopeptide, putative, expressed
  Pfam annotation: Domain name=PPR; Domain location=14-48; Score=26.3; E_value=0.00012; Accession=PF01535.12; Description=PPR repeat
EVLGVESEVRFGAESYNEVVDALGQNGRLEDALKLFDRMLGEHDPPLRIAVDLRSFRVMVDAYCAAGRFEDAIAV

SEQ ID NO: 93718 - protein, 133 aa, Setaria italica
  Transcript Sequence Number=SeqID_27744
  Gene Ontology: Mol. function=exonuclease activity; Cellular component= intracellular
  Homolog annotation: Hit_ID=B6THB1; Match level="QueryCoverage=68%, HitCoverage=20%, E-value=7e-28, Identity=62%"; Hit description =Histone mRNA exonuclease 1
  Subcellular localization annotation: CTP_CleavageSite=24; ConfidenceScore=5.19e-01
MASQQQRQSFPHASTATRGMLSFSSAAPSGPADPAAQQQDFRMREFDYFVVVDFEATCEKDSRIYPQEIIEFPAVLVDAATGGLLSSFRTYVKPRHHPVLTAFCSELTGIQQEQVNGGVDLATALALHDKWLA

SEQ ID NO: 93719 - protein, 346 aa, Setaria italica
  Transcript Sequence Number=SeqID_27745
  Gene Ontology: Mol. function=exonuclease activity; Cellular component= intracellular
  Homolog annotation: Hit_ID=B6THB1; Match level="QueryCoverage=80%, HitCoverage=70%, E-value=9e-80, Identity=51%"; Hit description =Histone mRNA exonuclease 1
  Pfam annotation: Domain name=Exonuc_X-T; Domain location=75-247; Score=109.8; E_value=9.1e-30; Accession=PF00929.16; Description =Exonuclease
  Subcellular localization annotation: CTP_CleavageSite=57; ConfidenceScore=5.74e-01
MLCLPSSSAFRPADPAARGAMASQQQRQSFPHASTATRGMLSFSSAAPSGPADPAARGAMAAQQQDFRMREFDYFVVVDFEATCEKDSRIYPQEIIEFPAVLVDAATGGLLSSFRTYVKPRHHPVLTAFCSELTGIQQEQVDGGVDLATALALHDKWLAAAGVAKNRLAIVTWGDWDCRTMLKFECNFKNISKPSYFNQWVNLRIPFETAFGAGRRNLQEAVREAGLQWDGRLHCGLDDARNTARLLVELMRRGVRISITGSLVPPPLPEPEPEPEPELQPQAQLSPANRNLSWCDDGAATTDCFYCYCSVPIRGGVVTMPGPMQGRFFFTCGNWMPTCRFFHWAA

SEQ ID NO: 93720 - protein, 184 aa, Setaria italica
  Transcript Sequence Number=SeqID_27746
  Gene Ontology: Mol. function=exonuclease activity; Cellular component= intracellular
  Homolog annotation: Hit_ID=B6THB1; Match level="QueryCoverage=32%, HitCoverage=13%, E-value=5e-15, Identity=65%"; Hit description =Histone mRNA exonuclease 1
LGTSVILFVLYLRFSINLLTSSFLLLLLLVVVYCLSGSGIPFETAFGAGRRNLQEAVREAGLQWDGRLHCGLDDARNTARLLVELMRRGVRISITGSLVPPPLPEPEPEPEPEPELQPQRSYQRRRGDHAGTNARAILLRLWELDADMSFLPLGSLIAGHLDSASSMLRLDSYYSLIHTHGVHA

SEQ ID NO: 93721 - protein, 51 aa, Setaria italica
  Transcript Sequence Number=SeqID_27747
ARHLTCFVNFKLHLTWEDREDKRELQFIDALKVLDPLLYSTGPHDYAHLDA

SEQ ID NO: 93722 - protein, 191 aa, Setaria italica
  misc_feature (14)..(14): Xaa can be any naturally occurring amino acid
  Transcript Sequence Number=SeqID_27748
  Gene Ontology: Mol. function=inositol or phosphatidylinositol phosphatase activity; Biological process=abscisic acid mediated signaling
  Homolog annotation: Hit_ID=B6SWI5; Match level="QueryCoverage=98%, HitCoverage=29%, E-value=1e-99, Identity=91%"; Hit description=Type I inositol-1,4,5-trisphosphate 5-phosphatase CVP2
  Pfam annotation: Domain name=Exo_endo_phos; Domain location=6-189; Score=-14.3; E_value=0.036; Accession=PF03372.15; Description =EndonucleaseExonucleasephosphatase family
DLDLDLDGALRKKXRSPFVRIVSKQMVGIFLTVWVRRGLRKCVQNLKVSTVGVGAMGYIGNKGAVSVSMSIYQTMFCFVCCHLAAGEKPGDVHKRNADVQEIHRRTRFPAPGDQQLLRDIHDHDRIFWLGDLNYRLDVSYERAHELISTKSWSKLAETDQLKRELKKGRAFDGWTEGVLEFAPTYKYEVGS

SEQ ID NO: 93723 - protein, 127 aa, Setaria italica
  Transcript Sequence Number=SeqID_27749
  Gene Ontology: Mol. function=inositol or phosphatidylinositol phosphatase activity; Biological process=abscisic acid mediated signaling
  Homolog annotation: Hit_ID=B6SWI5; Match level="QueryCoverage=98%, HitCoverage=20%, E-value=4e-57, Identity=83%"; Hit description=Type I inositol-1,4,5-trisphosphate 5-phosphatase CVP2
TKSWSKLAETDQLKRELKKGRAFDGWTEGVLEFAPTYKYEVGSGRYTGDEHRGGRRTPAWCDRVLSYGNGLRLLGYRRSELALSDHRPVTATYAAEVEVFCSRKLQKALTLTDAEVEGGQVVPDLDF

SEQ ID NO: 93724 - protein, 44 aa, Setaria italica
  misc_feature (30)..(30): Xaa can be any naturally occurring amino acid
  Transcript Sequence Number=SeqID_27750
  Homolog annotation: Hit_ID=B6T4C2; Match level="QueryCoverage=100%, HitCoverage=19%, E-value=2e-13, Identity=84%"; Hit description=CBS domain containing protein
VMDAAVLMLKKKIHRVPIVNQDEQVIGIIXRADVLRELEGLLKI

SEQ ID NO: 93725 - protein, 78 aa, Setaria italica
  Transcript Sequence Number=SeqID_27751
RKQCNTESKFPGVVLLQGKDLKLFRAYFCRFWSALLLIVDLPAATQKHHGHIYKKFWLLSMDCCPSKSSAGLPTREEH

SEQ ID NO: 93726 - protein, 123 aa, Setaria italica
  Transcript Sequence Number=SeqID_27752
  Homolog annotation: Hit_ID=Q6V9H6; Match level="QueryCoverage=71%, HitCoverage=30%, E-value=2e-31, Identity=71%"; Hit description=Brown planthopper-induced resistance protein 1
  Subcellular localization annotation: CTP_CleavageSite=50; ConfidenceScore=5.55e-01
ATHQRVIANSFLPSMACINTLQSCSIARGAKINTGTRRSAAKRSPTFQCRASTFVDASVRLELDENPEAIISGEWPENSFLLSYDDLRAYLESQEAVQEGDQVLDLELLKLSLLSVLISFSSS

SEQ ID NO: 93727 - protein, 81 aa, Setaria italica
  Transcript Sequence Number=SeqID_27753
RKQCNTESKFPGVVLLQGKDLKLFRAYFCRFWSALLLIVDLLAATQKHHGHIYKKFWLPSMDCCPSKSSAGLPTREEHQHG

SEQ ID NO: 93728 - protein, 126 aa, Setaria italica
  Transcript Sequence Number=SeqID_27754
  Gene Ontology: Mol. function=catalytic activity; Biological process =metabolic process
  Homolog annotation: Hit_ID=B6T4C2; Match level="QueryCoverage=84%, HitCoverage=47%, E-value=5e-48, Identity=85%"; Hit description=CBS domain containing protein
  Pfam annotation: Domain name=CBS; Domain location=9-121; Score=86.9; E_value=7e-23; Accession=PF00571.20; Description=CBS domain
CSCSTYCSNYLVVLVGPTSLEQTLEEVECHFEAVSGLPVVDSSLRCVGVVVKNDRAKASHGPQTKIEEVMTSPAITLASDKTVMDAAVLMLKKKIHRVPIVNQDEQVIGIITRADVLRELEGLLKI

SEQ ID NO: 93729 - protein, 77 aa, Setaria italica
  misc_feature (35)..(35): Xaa can be any naturally occurring amino acid
  Transcript Sequence Number=SeqID_27755
  Gene Ontology: Cellular component=cytoskeleton; Biological process =phagocytosis
  Homolog annotation: Hit_ID=A2Q1V0; Match level="QueryCoverage=96%, HitCoverage=25%, E-value=1e-15, Identity=62%"; Hit description =Engulfment and cell motility, ELM
  Subcellular localization annotation: CTP_CleavageSite=52; ConfidenceScore=5.29e-01
MDGSAGSFVAVRRLSGSDRAAAFHHSSSGASRRLXEVVTGSTAWIGRGLSCVCAQRRDSDARLSFDLTPMQYKCQHL

SEQ ID NO: 93730 - protein, 70 aa, Setaria italica
  Transcript Sequence Number=SeqID_27756
TEVIVWSGFPKVSFRYNLYFRTLFWNGDGNLQELSAANFFHLNSQLFLVLLRCYLCLDLGCFLVMIAMIK

SEQ ID NO: 93731 - protein, 266 aa, Setaria italica
  Transcript Sequence Number=SeqID_27757
  Gene Ontology: Cellular component=cytoskeleton; Biological process =phagocytosis
  Homolog annotation: Hit_ID=B6TBE5; Match level="QueryCoverage=99%, HitCoverage=99%, E-value=1e-127, Identity=81%"; Hit description=ELMO domain-containing protein 2
  Pfam annotation: Domain name=ELMO_CED12; Domain location=67-237; Score=284.7; E_value=2.1e-82; Accession=PF04727.5; Description =ELMOCED-12 family
  Subcellular localization annotation: CTP_CleavageSite=46; ConfidenceScore=5.01e-01
MDGSAGSFVAVRRLSGSDRAAAFHHSSSAEVVTGSTAWIGRGLSCVCAQRRDSDARLSFDLTPMQEECLQRLQNRIEVQYDSSNREHQEALHALWCASFPGTELRGLISEQWKEMGWQGKDPSTDFRGGGFISLENLLFFARNYPKSFQELLRKQNGDRAIWEYPFAVAGVNITFMLIQMLDLQAVKPRSLFGAVFLKFLSENDQAFDIIYCITFKLMDQQWLDMHATYMDFNTVMKSTRRQLERELLIEDIQRIEDLPSYRLLAR

SEQ ID NO: 93732 - protein, 91 aa, Setaria italica
  Transcript Sequence Number=SeqID_27758
YMKTFLLTNHFISRIFRSWEIFPTITCGPLTTPLNPPFLGDQRSTHQLAEESAVYPSPVQLHGLSAKGRELNLSICRDEENITILCLFPSR

SEQ ID NO: 93733 - protein, 368 aa, Setaria italica
  Transcript Sequence Number=SeqID_27759
  Gene Ontology: Cellular component=nucleus
  Pfam annotation: Domain name=SET; Domain location=98-341; Score= -15.2; E_value=0.053; Accession=PF00856.20; Description=SET domain
WGENAEEKDAEEIIDLASKASVTDQQKQVQDNVHYQLSDICQTMDSILRPHVTNDPSNNPSEAESHSRRSGLSFAVGGAASANKQSAAIPATRPLTRAELSNKFRDHFGYTLDIRPSGIPHKDAGQGLFLSGEANVGAVLAIYPGVIYSPAYYRYIPGYPRIDACNNYLITRYDGTIIDAKPWCLGGETRELWDGSDLVDYNAVPPKGSENNSDRVWRMLSKPLEKSVRESFGEVLERRNPLAFGHFANHPPKGSSPNVMICPYDFPLTEKEMRVHIPNVTFGGEEPIKMKRFGSFYFKSGSSDNQAGHSLVLKTLVLVSTRSIHDEELFLNYRYSNSKRRPEWYSPVDEEEDKRRWGVVQHFCTILA

SEQ ID NO: 93734 - protein, 68 aa, Setaria italica
  Transcript Sequence Number=SeqID_27760
LLYCKLLMLATLHSEFSYCGHVVRRNCCIPCSTKTYDSYVGRTVLRGGKEGKIICIVICDILARTADG

SEQ ID NO: 93735 - protein, 386 aa, Setaria italica
  Transcript Sequence Number=SeqID_27761
  Gene Ontology: Mol. function=transferase activity, transferring glycosyl groups; Biological process=glucan biosynthetic process
  Homolog annotation: Hit_ID=B2Z4A6; Match level="QueryCoverage=97%, HitCoverage=41%, E-value=0.0, Identity=93%"; Hit description=Starch synthase IV
  Pfam annotation: Domain name=Glyco_transf_5; Domain location=1-133; Score=52.7; E_value=1e-14; Accession=PF08323.3; Description=Starch synthase catalytic domain
  Pfam annotation: Domain name=Glycos_transf_1; Domain location=179 -357; Score=4.4; E_value=0.00029; Accession=PF00534.12; Description =Glycosyl transferases group 1
  Pfam module annotation: Pfam domain module=Glyco_transf_5::Glycos _transf_1; Domain location=1-133::179-357
FKRFSYFSRVALELLYQSGKKVDIIHCHDWQTAFVAPLYWDVYANLGFNSARICFTCHNFEYQGTAPAQDLAYCGLDVEHLDRPDRMRDNSHGRINVVKGAIVYSNIVTTVSPTYAQEVRSEGGRGLQDTLKIHSKKFVGILNGIDTDTWNPSTDRFLKVQYSANDLYGKSANKASLRKQLKMSSANASQPLVGCITRLVPQKGVHLIRHAIYKTAELGGQFVLLGSSPVPNIQREFEGIADQFQNNNNIRLLLKYDDALSHMIFAASDMFIVPSMFEPCGLTQMIAMRYGSVPVVRKTGGLNDSVFDFDDETIPMELRNGFTFLKADEQGFDSALERAFNYYHRKPEVWKQLVQKDMKIDFSWDTSASQYEDIYQRAAARARAAA

SEQ ID NO: 93736 - protein, 445 aa, Setaria italica
  misc_feature (52)..(52): Xaa can be any naturally occurring amino acid
  misc_feature (161)..(161): Xaa can be any naturally occurring amino acid
  Transcript Sequence Number=SeqID_27762
  Homolog annotation: Hit_ID=B6U1H1; Match level="QueryCoverage=93%, HitCoverage=70%, E-value=0.0, Identity=95%"; Hit description=Auxin -independent growth promoter-like protein
  Pfam annotation: Domain name=DUF246; Domain location=51-409; Score =542.4; E_value=5.4e-160; Accession=PF03138.6; Description=Plant protein family
GITLHCPETKEPPSLWENPRAATASWKPCAERRSDEPSDVPSEKETSGYIFXHAEGGLNQQRIAICNAVAIARIMSATLILPVLKQDQIWKDQTKFEDIFDVDHFINYLKDDVRIVRDIPDWFTEKDELFTSIKRTVKNIPKYASAQFYIDNVLPRIKEKXIMSIKPFVDRLGYDNVPMEINRLRCRVNYHALKFLPHIEEMADKLAARMRNRTGSINPYMALHLRFEKGMVGLSFCDFAGTREEKAMMAAYRQKEWPRRYKNGSHLWPLALQKRKEGRCPLEPGEIAVILRALGYTSGTQIYVASGQVYGGKNRMAPLRNMFPNLVTKEELASAEELAPFRRHVTSLAALDFLVCLRSDVFVMTHGGNFAKLIIGARRYAGHRLKSVKPDKGLMSKSLGDPDMGWASFAEDVAVMHRTRTGLPEPTFPSYDLWENPLTPCMCRA

SEQ ID NO: 93737 - protein, 134 aa, Setaria italica
  Transcript Sequence Number=SeqID_27763
  Gene Ontology: Mol. function=protein serine/threonine kinase activity; Biological process=protein amino acid phosphorylation
  Homolog annotation: Hit_ID=Q2R0X3; Match level="QueryCoverage=97%, HitCoverage=11%, E-value=6e-30, Identity=54%"; Hit description =Leucine Rich Repeat family protein
  Pfam annotation: Domain name=LRR_1; Domain location=31-52; Score =10.8; E_value=2.6; Accession=PF00560.25; Description=Leucine Rich Repeat
  Pfam annotation: Domain name=LRR_1; Domain location=55-78; Score =10.5; E_value=2.9; Accession=PF00560.25; Description=Leucine Rich Repeat
  Pfam annotation: Domain name=LRR_1; Domain location=7-29; Score=12.2; E_value=1.4; Accession=PF00560.25; Description=Leucine Rich Repeat
  Pfam module annotation: Pfam domain module=LRR_1::LRR_1::LRR_1; Domain location=31-52::55-78::7-29
TLGSCELLQSLRLGGNFLEGQIPISLATLRGIEEVDFSQNDLSGDIPEFFELFNSLEYLNLSFNNLDGPIPTGGVFANATCRLFLQGNPSLCTTTHLLDFPLCANEHSERKTRTEVHVLAIVIPCGAISLLFVL

SEQ ID NO: 93738 - protein, 111 aa, Setaria italica
  Transcript Sequence Number=SeqID_27764
  Gene Ontology: Mol. function=binding
  Homolog annotation: Hit_ID=Q10CT3; Match level="QueryCoverage=100%, HitCoverage=33%, E-value=7e-36, Identity=69%"; Hit description=TPR Domain containing protein, expressed
  Pfam annotation: Domain name=TPR_1; Domain location=31-66; Score=1.4; E_value=4; Accession=PF00515.20; Description=Tetratricopeptide repeat
  Pfam annotation: Domain name=TPR_1; Domain location=78-111; Score =24.7; E_value=0.00038; Accession=PF00515.20; Description =Tetratricopeptide repeat
  Pfam annotation: Domain name=TPR_2; Domain location=31-66; Score=4.4; E_value=9.6; Accession=PF07719.9; Description=Tetratricopeptide repeat
  Pfam annotation: Domain name=TPR_2; Domain location=78-111; Score =18.2; E_value=0.033; Accession=PF07719.9; Description=Tetratricopepti de repeat
  Pfam module annotation: Pfam domain module=TPR_1::TPR_1::TPR_2::TPR _2; Domain location=31-66::78-111::31-66::78-111
MALLMEPGTEPLTESEQADLAGIAAIKESAAREFKEQGNQFVRMGRKHYAEAVSCYTKAIAQMEPLTSLDAAAAADASVLFANRAHVNLLLGNHRRALDDAEQAIALSPSS

SEQ ID NO: 93739 - protein, 231 aa, Setaria italica
  Transcript Sequence Number=SeqID_27765
  Gene Ontology: Mol. function=iron ion binding; Cellular component =integral to membrane; Biological process=transport
  Homolog annotation: Hit_ID=Q7XKF4; Match level="QueryCoverage=100%, HitCoverage=31%, E-value=1e-108, Identity=80%"; Hit description =Probable metal-nicotianamine transporter YSL13
  Pfam annotation: Domain name=OPT; Domain location=1-231; Score= -273.3; E_value=0.031; Accession=PF03169.7; Description=OPT oligopeptide transporter protein
AKLARKQVKKLGTFFVLSFVWGFFQWFYTANIEECGFQKFPSLGMQAFDNRFYFDFSPTYVGVGMICSHIVNVSILLGAILSWGIMWPLIAKKKGIWFSADLADTNLHGMQGYRVFMAIALILGDGIYNVLKISILTAVSLRSQLKKSNASTLPISDDAIVTDTAPVSYDEERRNELFTKDQIPWYVALGGYVVIAAISIGTVPQIFPQLKWYHILVAYIFAPLLAFCNAY

SEQ ID NO: 93740 - protein, 297 aa, Setaria italica
  Transcript Sequence Number=SeqID_27766
  Gene Ontology: Cellular component=integral to membrane; Biological process=transport
  Homolog annotation: Hit_ID=Q7XKF4; Match level="QueryCoverage=99%, HitCoverage=40%, E-value=1e-139, Identity=83%"; Hit description =Probable metal-nicotianamine transporter YSL13
  Pfam annotation: Domain name=OPT; Domain location=1-273; Score=-79.7; E_value=8.8e-09; Accession=PF03169.7; Description=OPT oligopeptide transporter protein
TTWLRFFISYVVIAAISIGTVPQIFPQLKWYHILVAYIFAPLLAFCNAYGSGLTDWSLVTTYGKLAIFAFGAWVGASHGGVLAGLAACGVMMNIVGTAADLMGDFKTGYLTLASPRSMFISQVIGTAMGCVIAPCVFWLFYKAFGNIGVDRSEYPAPNAAVFRSMAILGVDGFSSLPKNCLTLCYVFFAAAIVINLIRDLVPKKVSRFIPIPMAMAIPFYIGAYFAVDMFVGTVILFVWQRLDRAKADAFAPAVASGMICGDGIWVLPQSLLALAKVKPPICMKFLSTTMNDKVDAF

SEQ ID NO: 93741 - protein, 117 aa, Setaria italica
  Transcript Sequence Number=SeqID_27767
  Homolog annotation: Hit_ID=B4FAK0; Match level="QueryCoverage=91%, HitCoverage=28%, E-value=9e-55, Identity=94%"; Hit description =Lysine ketoglutarate reductase trans-splicing related 1
  Pfam annotation: Domain name=DUF707; Domain location=1-117; Score =31.5; E_value=1.4e-16; Accession=PF05212.4; Description=Protein of unknown function (DUF707)
GDETNKGLYHTQCCNFLKENYAVMLFHYDGNVDGWHHLEWSDKAIHILAHNQTKWWFAKRFLHPDVMAIYDFIFLWDEDLGVDNFNPRRYLDIMVSEGLEITQPALDPDLSTDIHHR

SEQ ID NO: 93742 - protein, 175 aa, Setaria italica
  Transcript Sequence Number=SeqID_27768
  Homolog annotation: Hit_ID=B4FAK0; Match level="QueryCoverage=98%, HitCoverage=46%, E-value=4e-88, Identity=89%"; Hit description =Lysine ketoglutarate reductase trans-splicing related 1
  Pfam annotation: Domain name=DUF707; Domain location=1-166; Score =186.5; E_value=7.2e-53; Accession=PF05212.4; Description=Protein of unknown function (DUF707)
LVGILAEALEITQPALDPDLSTDIHHRITIRNKLSKVHRRIYDNRPSMNCSDESKGPPCTGWVEGMAPVFSRAAWKCVWHLIQNDLIHGWGLDMKLGYCAQGDRTEKVGVIDSEYVVHQGIPSLGGPSLSSKTPRRSLDLRTHIRRQSSAELEKFKERWNRAVREDEGWRDPFES

SEQ ID NO: 93743 - protein, 124 aa, Setaria italica
  Transcript Sequence Number=SeqID_27769
  Gene Ontology: Mol. function=transferase activity
  Homolog annotation: Hit_ID=Q5QPY9; Match level="QueryCoverage=79%, HitCoverage=19%, E-value=2e-24, Identity=53%"; Hit description =Glycosyltransferase
  Pfam annotation: Domain name=DUF563; Domain location=28-124; Score= -100.1; E_value=0.0081; Accession=PF04577.6; Description=Protein of unknown function (DUF563)
RVVTTEAEWLVNKQLIGAPSETEKPTKVLCSTEERLSDYCELDGDVRIRGRAWSVDVVPSTWSERREWKIRPYSRRSATHVDMVNVTQLQGPSAAAPACTVTYDVPAIIFALGGYSGNVFHDHA

SEQ ID NO: 93744 - protein, 101 aa, Setaria italica
  Transcript Sequence Number=SeqID_27770
  Gene Ontology: Mol. function=NAD+ ADP-ribosyltransferase activity; Cellular component=nucleus
LLHLKGLWFRPSPKEVAVDISTLQPAPCEIGEAPTTPWISFKVLFGLVQDNISSIARELLFHHYEEFKESKITREEMVKKMMIIVGQKILLEALDKLHYCP

SEQ ID NO: 93745 - protein, 115 aa, Setaria italica
  Transcript Sequence Number=SeqID_27771
AIHLPIRFPTPIEAGSDGGQRGREGSLASKPVKTARGRGGDEGWRRCRVAWLTERPRRRLGRGGGIGFRLESMNPATGGGGKGSRGQMDGLPTSLGWVRWVGRRKEGWLYGVDRR

SEQ ID NO: 93746 - protein, 175 aa, Setaria italica
  Transcript Sequence Number=SeqID_27772
TAMAEALQGLTSVDGIDEIGTTLCLPTPGRSAMKSAAMMAGMAGEEQHGSPLPRGRRVSVKSPEAIRMEVEEGEDEMKRDLVKEIVRTPGVALRSTSRRARATPAPLPTPVPASSARATTRRTAARKEEEVAPTPATLRRSQRTAGRKAAAPVEVKQPADDVSAEKRPTRSEISK

SEQ ID NO: 93747 - protein, 107 aa, Setaria italica
  misc_feature (92)..(92): Xaa can be any naturally occurring amino acid
  Transcript Sequence Number=SeqID_27773
  Subcellular localization annotation: CTP_CleavageSite=49; ConfidenceScore=5.24e-01
SSLHISSRFETNSNHDSCDSPAVMRRCGLCPVARAAGCRRRPAAQACCRAACRSNPLDPWRSCRRGSGRPSAGGYKNRTKPAHRKILAKRKXFFFFRINIHNSSKKK

SEQ ID NO: 93748 - protein, 175 aa, Setaria italica
  Transcript Sequence Number=SeqID_27774
  Homolog annotation: Hit_ID=B6T306; Match level="QueryCoverage=98%, HitCoverage=100%, E-value=1e-80, Identity=86%"; Hit description=Cp protein
  Pfam annotation: Domain name=DUF538; Domain location=55-166; Score =160.3; E_value=5.7e-45; Accession=PF04398.4; Description=Protein of unknown function, DUF538
MEGVEKALTKLGSFTISRKAKKELSSIGGDISRFSSTVEEKAKWVFEKLKGHKKSLPDLLREHNLPPGLFPRNIICYEYDESNSKLVVHLSKPCEVSFKDSSIIRYAPRVKATLSRGKLSGIEGMKTKVVVWVKVASVSLESYKSDKVCFIAGVKKLRQKDAYEVPREAVSVEEF

SEQ ID NO: 93749 - protein, 84 aa, Setaria italica
  Transcript Sequence Number=SeqID_27775
  Gene Ontology: Mol. function=sequence-specific DNA binding; Cellular component=nucleus; Biological process=regulation of transcription, DNA-dependent
  Homolog annotation: Hit_ID=Q9SSX9; Match level="QueryCoverage=97%, HitCoverage=16%, E-value=6e-22, Identity=65%"; Hit description =Transcription factor NtWRKY4
MQIHDAGGLDVTSAVSDEVDGGDRVTHGSMSQGGADAEGDELESKRRKLESYTIDMSTASRAVREPRVVIQTTSEVDILDDGLP

SEQ ID NO: 93750 - protein, 103 aa, Setaria italica
  Transcript Sequence Number=SeqID_27776
  Gene Ontology: Mol. function=protein binding; Cellular component =plasma membrane
  Homolog annotation: Hit_ID=Q75I37; Match level="QueryCoverage=78%, HitCoverage=17%, E-value=2e-29, Identity=77%"; Hit description =Lipase, putative, expressed
  Pfam annotation: Domain name=DUF620; Domain location=1-100; Score= -19.1; E_value=1.4e-10; Accession=PF04788.4; Description=Protein of unknown function (DUF620)
EFETATRVVKNRGPTGRGAAAVEQGGFVLWQMAPDMWYVELAVGGSKVHAGSNGRLVWRHTPWLGAHAAKGPVRPLRRVLQVPPSLPNLTSSSSASNKSPHND

SEQ ID NO: 93751 - protein, 70 aa, Setaria italica
  misc_feature (22)..(22): Xaa can be any naturally occurring amino acid
  Transcript Sequence Number=SeqID_27777
PRGGRPRAEARRGSIQICIWGXQQARGGNCITCKNLLVEGHTDDALARYAVAASSFLPPFARTSKIKSFL

SEQ ID NO: 93752 - protein, 41 aa, Setaria italica
  Transcript Sequence Number=SeqID_27778
RMEQSLTPDCQTNGEAQQLTVSSSPTHLHAVIKLNPIQFIP

SEQ ID NO: 93753 - protein, 74 aa, Setaria italica
  Transcript Sequence Number=SeqID_27779
  Gene Ontology: Cellular component=chloroplast
MGNSLRCCLACVLPCGALDLVRIVHLSGRVDEYGRAVSAGEVLAAHPNHVLSRPCSSPQGVVRRILIVSPDSEL

SEQ ID NO: 93754 - protein, 150 aa, Setaria italica
  Transcript Sequence Number=SeqID_27780
  Gene Ontology: Mol. function=transferase activity, transferring groups other than amino-acyl groups
  Homolog annotation: Hit_ID=B6SRZ2; Match level="QueryCoverage=96%, HitCoverage=34%, E-value=3e-32, Identity=50%"; Hit description =Anthranilate N-benzoyltransferase protein 1
ALRARAGAVSTFRALVAHVWRCACAARALDPETESRLYTMVDMRARLSPPLPDAFFGNAVARTSTSARVGDLLGNPLGFGARRLRAATGHGDEYARSLVDYLETADLAALPRGGLPGTDLRVISWLGMPSYDADFGWGEPALLAPALMYY

SEQ ID NO: 93755 - protein, 189 aa, Setaria italica
  Transcript Sequence Number=SeqID_27781
  Gene Ontology: Mol. function=oxidoreductase activity; Biological process=DNA integration
  Homolog annotation: Hit_ID=Q5Z7I6; Match level="QueryCoverage=99%, HitCoverage=35%, E-value=8e-51, Identity=48%"; Hit description =Putative CPRD2
SYGLSIDNILDAKLVNADGDLVDRAAMGEDLFWAIRGGGGGNFGIVVSWKVSLVKVPSTVTAFNIVRTVDQGAIDVLTRWQEVGPTLPFDINMRVIIMGQQVTFQSLYLGKCSDVVPMLSNLFPELGMTGGDCLEMTWLQSVVFFNSWNPNAPVESLLSRGTSLSTFTKNKSDYVRRAIAKDDWNKIFP

SEQ ID NO: 93756 - protein, 106 aa, Setaria italica
  Transcript Sequence Number=SeqID_27782
RRSAAWAHHRSGVRRLTESSGWLGTAGWKSWKFTLALPLFRFFHPFSFQFFFFYFNPLEVKWWGWIEFGGGVCHLVSPFASFSSFFGGALVMVNFCGSALEGEDGG

SEQ ID NO: 93757 - protein, 111 aa, Setaria italica
  Transcript Sequence Number=SeqID_27783
  Gene Ontology: Mol. function=protein serine/threonine kinase activity; Cellular component=integral to membrane; Biological process=protein amino acid phosphorylation
  Homolog annotation: Hit_ID=B9RC79; Match level="QueryCoverage=100%, HitCoverage=10%, E-value=3e-21, Identity=44%"; Hit description =Leucine-rich repeat receptor protein kinase EXS, putative
  Pfam annotation: Domain name=LRR_1; Domain location=22-43; Score=7.0; E_value=14; Accession=PF00560.25; Description=Leucine Rich Repeat
  Pfam annotation: Domain name=LRR_1; Domain location=75-97; Score =13.1; E_value=0.95; Accession=PF00560.25; Description=Leucine Rich Repeat
  Pfam module annotation: Pfam domain module=LRR_1::LRR_1; Domain location=22-43::75-97
ALRVGNNQMGGQVAPEIGGLRQLQFLSLTINSFTNISGMFWNLRGCDNLTALLVSYNFYGEALPDAGWVGDHVRNLRLLVMKNCELTGQIPTWLSKLQDLNILNLAENRLT

SEQ ID NO: 93758 - protein, 130 aa, Setaria italica
  Transcript Sequence Number=SeqID_27784
  Gene Ontology: Mol. function=oxidoreductase activity; Cellular component=cytoplasm; Biological process=metabolic process
  Homolog annotation: Hit_ID=Q49HE1; Match level="QueryCoverage=96%, HitCoverage=32%, E-value=4e-62, Identity=90%"; Hit description=12 -oxo-phytodienoic acid reductase
  Pfam annotation: Domain name=Oxidored_FMN; Domain location=5-130; Score=-172.4; E_value=0.095; Accession=PF00724.12; Description =NADH:flavin oxidoreductase  NADH oxidas
MEAVPLLTPYKMGQFELSHRVVLAPLTRQRSYGNVPQPHAAVYYSQRATSGGLMITEATGVSDTAQGYADTPGVWTAEQVAAWRPIVDAVHARGAVFFCQLWHVGRVSTTAFQPGGAAPISSTDRAVPPQ

SEQ ID NO: 93759 - protein, 75 aa, Setaria italica
  Transcript Sequence Number=SeqID_27785
  Subcellular localization annotation: CTP_CleavageSite=46; ConfidenceScore=5.02e-01
GSSRRGRRRWRSWRGAHCHCHQPFARPQSVGSLRFRRPAANELTKRGAAKQSAQRAEHASDRSDAVPCWAAGGPL

SEQ ID NO: 93760 - protein, 459 aa, Setaria italica
  Transcript Sequence Number=SeqID_27786
  Gene Ontology: Mol. function=protein kinase activity; Cellular component=plasma membrane; Biological process=protein amino acid phosphorylation
  Homolog annotation: Hit_ID=Q7XVM0; Match level="QueryCoverage=86%, HitCoverage=63%, E-value=0.0, Identity=79%"; Hit description =OSJNBa0072K14.3 protein
  Pfam annotation: Domain name=APH; Domain location=85-264; Score=-9.5; E_value=0.0094; Accession=PF01636.15; Description=Phosphotransferase enzyme family
  Pfam annotation: Domain name=Pkinase; Domain location=83-357; Score =151.1; E_value=3.5e-42; Accession=PF00069.17; Description=Protein kinase domain
  Pfam annotation: Domain name=Pkinase_Tyr; Domain location=83-357; Score=120.1; E_value=7.4e-33; Accession=PF07714.9; Description =Protein tyrosine kinase
  Pfam module annotation: Pfam domain module=APH::Pkinase::Pkinase_Tyr; Domain location=85-264::83-357::83-357
  Subcellular localization annotation: CTP_CleavageSite=33; ConfidenceScore=5.49e-01
KRTKRKEASRRHRPPPPLRSSPSPSPLRSPPPRAERSPPGSNKSKAKGNGSKKELAVLKDANGNVISAQTFTFRQLAAATKNFRDECFIGEGGFGRVYKGRLDGTGQVVAIKQLNRDGNQGNKEFLVEVLMLSLLHHQNLVNLVGYCADGDQRLLVYEYMPLGSLEDHLHDLPPGKEALDWNTRMKIAAGAAKGLEYLHDKADPPVIYRDFKSSNILLGEGFHAKLSDFGLAKLGPVGDKSHVSTRVMGTYGYCAPEYAMTGQLTVKSDVYSFGVVLLELITGRKAIDSTRPAAEQNLVSWARPLFNDRRKLPKMADPGLEGRFPTRGLYQALAVASMCIQSEAASRPLIADVVTALSYLANQIYDPNTASTSKKGGGDQRSRVSDSGRALSRNDDTGSSGHRSPSKDLDDSPRERHATGTAHKGERERMVAEAKMWGENWREKQRAAQGSLDSPTGGG

SEQ ID NO: 93761 - protein, 457 aa, Setaria italica
  misc_feature (173)..(173): Xaa can be any naturally occurring amino acid
  misc_feature (187)..(187): Xaa can be any naturally occurring amino acid
  Transcript Sequence Number=SeqID_27787
  Gene Ontology: Mol. function=oxidoreductase activity; Biological process=metabolic process
  Homolog annotation: Hit_ID=A1YKE1; Match level="QueryCoverage=99%, HitCoverage=73%, E-value=1e-160, Identity=66%"; Hit description =Oxidoreductase
  Pfam annotation: Domain name=2OG-FeII_Oxy; Domain location=146-244; Score=34.0; E_value=6e-07; Accession=PF03171.12; Description=2OG -Fe(II) oxygenase superfamily
EVGRPKVQLTREQREQRRFKNVVRKKDFICLERVNGRLVNILAGLELHSGVFSSAEQRRIVECVYDLQERGRRGELGDRTYTEPQKWMRGKGRVTIQFGCCYNYATDKNGNPPGIIRTIVSDPMPDLFKTMIKRLVRWQVLPTNCVPDSCIVNIYEPADCIPPHIDSHDFVRXLFCTVSFLSECNIXFGSNLRVSAPGEFTGSVAIPLPVGSVLVLNGNGADVAKHCVPAVPTKRISITFRKMDPAKRPFKFKDDPELLNLTPLGTVVQEAGRSSDEGKGKLPDVQITNLSKVSRGKRSKGRTSAGKIGSGILGEQPPGHEQAPAVEVLSLQSLHGQRPVSASSSERESYSGGRSREPRYQTNVLGMQPRVDNIREWPRRLAQDRRHGNGVSSSEDGAESGERRPRVEHRQISLINRTINDDIDSLSISSRESGDQPRASVRTLYNKPRRTRVSLDD

SEQ ID NO: 93762 - protein, 281 aa, Setaria italica
  Transcript Sequence Number=SeqID_27788
  Gene Ontology: Mol. function=ATP-dependent helicase activity; Cellular component=intracellular
  Homolog annotation: Hit_ID=B9S326; Match level="QueryCoverage=99%, HitCoverage=22%, E-value=1e-109, Identity=67%"; Hit description=ATP -dependent RNA helicase, putative
  Pfam annotation: Domain name=DEAD; Domain location=8-182; Score=15.1; E_value=3.6e-06; Accession=PF00270.21; Description=DEADDEAH box helicase
  Pfam annotation: Domain name=NACHT; Domain location=22-213; Score= -33.4; E_value=0.031; Accession=PF05729.4; Description=NACHT domain
  Pfam module annotation: Pfam domain module=DEAD::NACHT; Domain location=8-182::22-213
DRSKLPISSFKDAITSTLENHQVVLISGETGCGKTTQVPQYILDHMWGKGESCKIICTQPRRISAISVAERISAERGEAVGDTVGYKIRLESKGGKNSSVMFCTNGVLLRVLIGRGTNTSKTRNPKRSLDDAILGISHIIVDEIHERDRFSDFMLTILRDLLPVYPHLRLVLMSATIDAERFSQYFNGCSVIQVPGFTYPVKTYYLEDVLSILQSVGDNHLNTTTSDKKQSSVLTDDFKSSMDDSINLALLNDEFDPLLELISAEQNPEIYNYQHSETGVT

SEQ ID NO: 93763 - protein, 114 aa, Setaria italica
  Transcript Sequence Number=SeqID_27789
  Gene Ontology: Mol. function=electron carrier activity; Biological process=oxidation reduction
  Homolog annotation: Hit_ID=Q8LQ07; Match level="QueryCoverage=99%, HitCoverage=21%, E-value=3e-21, Identity=46%"; Hit description =Putative cytochrome P450
THDAVVSDRPLYVTADILTYGGQNITFAPSGSRHWKEVRRLCATELLGPKRVLSFRPIREEAAASLVRSVAAASPAAVNLSERIKVLMNDILMRCAVGDTCPMRDEYIAELDKG

SEQ ID NO: 93764 - protein, 73 aa, Setaria italica
  Transcript Sequence Number=SeqID_27790
MDKGHLLAFLGLPLHLHGRMSADDPGGSRRSVEVDFFSDDNKQTCVVERDEPRAASSGLAINKEDLTINLLPA

SEQ ID NO: 93765 - protein, 142 aa, Setaria italica
  misc_feature (59)..(59): Xaa can be any naturally occurring amino acid
  Transcript Sequence Number=SeqID_27791
  Gene Ontology: Mol. function=DNA-directed DNA polymerase activity; Cellular component=apoplast; Biological process=nucleobase, nucleoside, nucleotide and nucleic acid metabolic process
  Homolog annotation: Hit_ID=Q6K777; Match level="QueryCoverage=93%, HitCoverage=6%, E-value=1e-58, Identity=86%"; Hit description=DNA polymerase
KEEEPNNGQKKNDYYHIKRQIESELIQSGGIASSKPVLDLSKPEHLLKLKDRLKKYCQXVDKPITEVREAGICMRENSFYVDTVRSFRDRRYEYKGLNKTWKGKLAEAKASGNSIKIQEAQDLVVLYDSLQLAHKCILNSFY

SEQ ID NO: 93766 - protein, 60 aa, Setaria italica
  Transcript Sequence Number=SeqID_27792
LAILPIFYSCENQYVPIFRHVCSYQIHVINLQLLIGTYLCVSCSCELLHCSSFTHRLPNC

SEQ ID NO: 93767 - protein, 117 aa, Setaria italica
  misc_feature (37)..(37): Xaa can be any naturally occurring amino acid
  Transcript Sequence Number=SeqID_27793
  Gene Ontology: Mol. function=nutrient reservoir activity
  Homolog annotation: Hit_ID=Q6KB71; Match level="QueryCoverage=59%, HitCoverage=36%, E-value=6e-12, Identity=52%"; Hit description=Beta -kafirin
MKMFVVLAVLALAAAASSAQQVSWDWLQSGMYGAAGXYHCAELLRQPQCSPAAAPYYLRREQTMWQPSAVCQPLRQRCCQQLSLMDPMSRCQAMCGVAQSVAQQLQGGAGTVTVLTG

SEQ ID NO: 93768 - protein, 104 aa, Setaria italica
  misc_feature (22)..(22): Xaa can be any naturally occurring amino acid
  Transcript Sequence Number=SeqID_27794
  Gene Ontology: Mol. function=protein serine/threonine kinase activity; Biological process=protein amino acid phosphorylation
  Pfam annotation: Domain name=LRR_1; Domain location=12-34; Score=7.5; E_value=11; Accession=PF00560.25; Description=Leucine Rich Repeat
  Pfam annotation: Domain name=LRR_1; Domain location=36-58; Score =16.7; E_value=0.096; Accession=PF00560.25; Description=Leucine Rich Repeat
  Pfam annotation: Domain name=LRR_1; Domain location=60-82; Score =22.8; E_value=0.0014; Accession=PF00560.25; Description=Leucine Rich Repeat
  Pfam annotation: Domain name=LRR_1; Domain location=84-104; Score =3.8; E_value=56; Accession=PF00560.25; Description=Leucine Rich Repeat
  Pfam module annotation: Pfam domain module=LRR_1::LRR_1::LRR_1::LRR _1; Domain location=12-34::36-58::60-82::84-104
GPSLQYRIPIAFPKGLDLSSNXLTGAIPPEIGQLKALVSLDISFNNLTGPIPPSICNLTNLQVLDLSNNNLTGEIPAVLENLYFLAVFNVSNNNLEGPIPTGGQ

SEQ ID NO: 93769 - protein, 110 aa, Setaria italica
  Transcript Sequence Number=SeqID_27795
SRSPSLLLPAAALSLLCLVMRPPLISLSFSVLACRGSREGGQLGMGGNEEKAHTAHIPAAIQILGGYPVLSASSDGRGSSDPSAPATYCLRPAASSPSTTAPLPEPNLAS

SEQ ID NO: 93770 - protein, 181 aa, Setaria italica
  Transcript Sequence Number=SeqID_27796
  Gene Ontology: Mol. function=protein serine/threonine kinase activity; Cellular component=membrane; Biological process=protein amino acid phosphorylation
  Homolog annotation: Hit_ID=B6TWE9; Match level="QueryCoverage=72%, HitCoverage=35%, E-value=3e-59, Identity=89%"; Hit description =Receptor protein kinase CRINKLY4
  Pfam annotation: Domain name=Pkinase_Tyr; Domain location=69-181; Score=-154.3; E_value=0.0018; Accession=PF07714.9; Description =Protein tyrosine kinase
MLLQRRGLLCCGCGGSAAAVAAGGRGGFGDTADRPGTKDPAGDGKMMAAPASARQLSWAQVEAMTGGFTSAVVGEGGFSTVYLARLAGSLAAVKVHRSSERLHRAFRQELDALLRVRHPHIVRLLAFCDQRDEGVLVLEFAPNGNLHDQLHGGGGGKGAVPMLWARRVSVALQVARALEYL

SEQ ID NO: 93771 - protein, 415 aa, Setaria italica
  Transcript Sequence Number=SeqID_27797
  Gene Ontology: Mol. function=phosphotransferase activity, alcohol group as acceptor; Cellular component=cytosol; Biological process =nucleobase, nucleoside, nucleotide and nucleic acid metabolic process
  Homolog annotation: Hit_ID=B6U6Y9; Match level="QueryCoverage=99%, HitCoverage=84%, E-value=0.0, Identity=92%"; Hit description=ATP binding protein
  Pfam annotation: Domain name=dNK; Domain location=162-309; Score =95.9; E_value=1.4e-25; Accession=PF01712.11; Description =Deoxynucleoside kinase
RIQAVGTSVELLAIPGVGPRNLRKLVDNGFEGVAQLKQLYRDKFFGKSSEQMVEFLQSSVGIVHKNHAESITSFIKESVDEELKDTDSSKPTQKKRLTFCVEGNISVGKTTFLQRIANETIELRDLVEIVPEPIDKWQDVGPDHFNILDAFYAEPHRYAYTFQNYVFVTRVMQERESQAGIKPLRLMERSVFSDRMVFVRAVHEANWMNEMEISIYDSWFDPVVSSLPGLIPDGFIYLRASPDTCHKRMMHRRRSEEGGVTLDYLQGLHEKHESWLLPSKGSGPGVLSVSQLPMHMEGSLPPEIRDRVFYLEGNHMHSSIQKVPALVLDCEPDIDFNKDIEAKRQYARQVAEFFEFVKKKKEEAPSDQTSADKDRMNPHVMLPNRGRLWVPDGNPFTGSPMNLDFRRAMSSYLST

SEQ ID NO: 93772 - protein, 319 aa, Setaria italica
  Transcript Sequence Number=SeqID_27798
  Gene Ontology: Cellular component=chloroplast
  Homolog annotation: Hit_ID=B9S1U2; Match level="QueryCoverage=94%, HitCoverage=75%, E-value=1e-112, Identity=65%"; Hit description=Prli- interacting factor l, putative
  Pfam annotation: Domain name=CobW_C; Domain location=224-318; Score =143.0; E_value=9.5e-40; Accession=PF07683.6; Description=Cobalamin synthesis protein cobW C-termina
  Pfam annotation: Domain name=cobW; Domain location=14-169; Score =133.1; E_value=9e-37; Accession=PF02492.11; Description=Cobalamin synthesis proteinP47K
  Pfam module annotation: Pfam domain module=CobW_C::cobW; Domain location=224-318::14-169
KRKGNNELSNNTKNRVWTKVDIDSSLVASHSSVAEDIVMVNNGCLCCTVRGDLVKMLLKLVKQKGDKFDHIVIETTGLAKPGPVIETFCSDELVSKYVKLDGVVTMVDCKHAMKHLNEVKARWVVNEAVEQVAYADRIILNKIDLVNDAELEALTKKIKLINGMAQMKKAKFGDVDMDFVLGIGGYDLDRIEAEVQLQQSKETGHCHHGDAHGHHHDHVHDSAVTSVSIVSEGVLDLDEVNDWLERLVDEKGEDLYRLKGVISVNESTGRFVFQGVHSMLEGCPAKPWEPDEKRINKLVFIGRNLDEAALRKAFYGCLL

SEQ ID NO: 93773 - protein, 178 aa, Setaria italica
  Transcript Sequence Number=SeqID_27799
  Gene Ontology: Mol. function=structural constituent of cell wall
  Homolog annotation: Hit_ID=B6UBA8; Match level="QueryCoverage=94%, HitCoverage=50%, E-value=7e-61, Identity=67%"; Hit description =Transposon protein
  Pfam annotation: Domain name=Root_cap; Domain location=109-165; Score= 135.0; E_value=2.3e-37; Accession=PF06830.3; Description=Root cap
LGVTFGGGRHRLYVGARRAAEWDEDEDHVVVALDGEPVDLEPAENARWVSKAVRGLSVTRTGAAANAVTVELAGVFIISANAVPITDEDSRVHSYGKTERDTLVHLDVGYKFHGLTGGVDGVLGQTYRPDYVNKLDIAAKMPVMGGEDKYRSSGLFATDCAVSRFQRAAGDGFTSFAS

SEQ ID NO: 93774 - protein, 173 aa, Setaria italica
  Transcript Sequence Number=SeqID_27800
  Gene Ontology: Mol. function=nutrient reservoir activity; Cellular component=extracellular region; Biological process=auxin mediated signaling pathway
  Homolog annotation: Hit_ID=B6T6K1; Match level="QueryCoverage=100%, HitCoverage=77%, E-value=2e-60, Identity=65%"; Hit description =Germin-like protein 1
  Pfam annotation: Domain name=Cupin_1; Domain location=13-160; Score =103.4; E_value=7.7e-28; Accession=PF00190.14; Description=Cupin
  Pfam annotation: Domain name=Cupin_2; Domain location=48-124; Score =41.8; E_value=2.8e-09; Accession=PF07883.3; Description=Cupin domain
  Pfam module annotation: Pfam domain module=Cupin_1::Cupin_2; Domain location=13-160::48-124
  Subcellular localization annotation: CTP_CleavageSite=49; ConfidenceScore=5.06e-01
PKALFNANDFYTDDLSRSGPVFSPFNTGLAPANVKQVPGLNGLGISATRVDIGVGGVVPLHTHPEGSELIFVVEGTISVGFISAETNTAYTKTLNKGDLFVFPLGLLHFQINIGNTTAVAINAYSSSNPGLQITPYALFGDTLRADVVSKVTFINEAEVRKEKAEFGIRAVPS

SEQ ID NO: 93775 - protein, 65 aa, Setaria italica
  Transcript Sequence Number=SeqID_27801
AIAGAPDTNKEAAGRVLGVRCSAVPGEGSEGRREEDAAQGRCHCSISSIRQTDCGCKRRLFSFQM

SEQ ID NO: 93776 - protein, 91 aa, Setaria italica
  Transcript Sequence Number=SeqID_27802
HSIKANFLINNPSGFLRSEHEKKDIVKHKPPNVQFGNSTSNLSGVKCSQCYFMMYQIIYNSWYQHDRPSVRCFPPQKHGKLVLTRIEQMAS

SEQ ID NO: 93777 - protein, 45 aa, Setaria italica
  Transcript Sequence Number=SeqID_27803
  Gene Ontology: Mol. function=electron carrier activity; Biological process=metabolic process
  Homolog annotation: Hit_ID=B9SXD9; Match level="QueryCoverage=93%, HitCoverage=11%, E-value=1e-14, Identity=80%"; Hit description =Oxidoreductase, putative
GRSGFCDAIIVSSPNMTHYEILMDIISHREPHHILVEKPLCTTVQ

SEQ ID NO: 93778 - protein, 118 aa, Setaria italica
  Transcript Sequence Number=SeqID_27804
  Gene Ontology: Mol. function=electron carrier activity; Biological process=metabolic process
  Homolog annotation: Hit_ID=B9SXD9; Match level="QueryCoverage=99%, HitCoverage=31%, E-value=2e-48, Identity=79%"; Hit description =Oxidoreductase, putative
RGMLDLCMFAEGSRNEQEISVVGDIGKGEAFVPESIVRFGKRTEGRDGVVTIMAEDERIKYQGLHHGSSYLEHLNFLSAIRAQGASGPSVNLSDGLLSVAIGVAGQLSIEQGRFVLVR

SEQ ID NO: 93779 - protein, 108 aa, Setaria italica
  Transcript Sequence Number=SeqID_27805
  Gene Ontology: Mol. function=electron carrier activity; Biological process=metabolic process
  Homolog annotation: Hit_ID=B9SXD9; Match level="QueryCoverage=78%, HitCoverage=22%, E-value=7e-36, Identity=83%"; Hit description =Oxidoreductase, putative
  Pfam annotation: Domain name=GFO_IDH_MocA_C; Domain location=7-108; Score=16.2; E_value=0.023; Accession=PF02894.9; Description =Oxidoreductase family, C-terminal alphabeta domain
ILYPKLIDIVKSGTLRQVRMVAIREHRFPFLVKVLESNRFNCNSGGTLVEKCCHLFDLMRLFAAANPVRVVASGAIDVNHKDEMYDGKVRMSHCLIQIFKCVSSQKAW

SEQ ID NO: 93780 - protein, 67 aa, Setaria italica
  Transcript Sequence Number=SeqID_27806
MDLHNNADQVLPFPNSFDHVSTISEHQVLIFILNIFSIFIQENACACLLSPSLLFTDTFINDSPSLL

SEQ ID NO: 93781 - protein, 376 aa, Setaria italica
  Transcript Sequence Number=SeqID_27807
  Gene Ontology: Mol. function=electron carrier activity; Biological process=metabolic process
  Homolog annotation: Hit_ID=B9SXD9; Match level="QueryCoverage=98%, HitCoverage=96%, E-value=1e-163, Identity=74%"; Hit description =Oxidoreductase, putative
  Pfam annotation: Domain name=GFO_IDH_MocA; Domain location=6-142; Score=106.1; E_value=1.2e-28; Accession=PF01408.14; Description =Oxidoreductase family, NAD-binding Rossmann fold
  Pfam annotation: Domain name=GFO_IDH_MocA_C; Domain location=154-264; Score=60.9; E_value=4.7e-15; Accession=PF02894.9; Description =Oxidoreductase family, C-terminal alphabeta domain
  Pfam annotation: Domain name=ox_reductase_C; Domain location=145-280; Score=-62.1; E_value=0.081; Accession=PF08635.2; Description=Putative oxidoreductase C terminal
  Pfam module annotation: Pfam domain module=GFO_IDH_MocA::GFO_IDH_MocA_ C::ox_reductase_C; Domain location=6-142::154-264::145-280
MAAAAVRYGIVGVGMMGREHLHNLAHLAAEVEGEQSVKVRVTGLADPHQESLRLGLQLANELGLPAPQTFSGHRDLLDSGFCDAIIVSSPNMTHYEILMDIISHREPHHILVEKPLCTTVQDCKKVIEAAKNRPDIIVQVGLEYRYMPPVAKLIDIVKSGTLGQVRMVAIREHRFPFLVKVNNWNRFNCNSGGTLVEKCCHFFDLMRLFAAANPVRVMASGAIDVNHKDEMYDGKVPDIIDNAYVIVEFDNGSRGMLDLCMFAEGSRNEQEISVVGDIGKGEAFVPESIVRFGKRTEGRDGVVTIMAEDERIKYQGLHHGSSYLEHLNFLSAIRAQGASGPSVNLSDGLLSVAIGVAGQLSIEQGRFVTMEEVLGS

SEQ ID NO: 93782 - protein, 92 aa, Setaria italica
  Transcript Sequence Number=SeqID_27808
  Gene Ontology: Mol. function=protein serine/threonine kinase activity; Biological process=protein amino acid phosphorylation
  Pfam annotation: Domain name=LRR_1; Domain location=1-24; Score=14.8; E_value=0.37; Accession=PF00560.25; Description=Leucine Rich Repeat
  Pfam annotation: Domain name=LRR_1; Domain location=27-49; Score=5.4; E_value=28; Accession=PF00560.25; Description=Leucine Rich Repeat
  Pfam annotation: Domain name=LRR_1; Domain location=51-73; Score =19.0; E_value=0.02; Accession=PF00560.25; Description=Leucine Rich Repeat
  Pfam module annotation: Pfam domain module=LRR_1::LRR_1::LRR_1; Domain location=1-24::27-49::51-73
NLLALNLSSNILSGPIPDGLFGKLNQLSWWLDLSHNQLTDSIPDDVGSFINLKSLNISNNNISGQIPSTLGSCELLQSLRLGGNFLEGQIRF

SEQ ID NO: 93783 - protein, 99 aa, Setaria italica
  Transcript Sequence Number=SeqID_27809
  Gene Ontology: Mol. function=nucleic acid binding
LDLLAGNMNNENIIDLISDSDDDFDQQPASASTRFGQKCAPAPSSSRNIHNNNGQYRTLPPSFTNGRPMESARHTFGSGDMTRSHPSSYMPMRQARGLS

SEQ ID NO: 93784 - protein, 58 aa, Setaria italica
  Transcript Sequence Number=SeqID_27810
MARRGAQLLAARRISSSPCLARRINQTESEIVRMFHPPVRQSEEAIATIGPRYTHSVR

SEQ ID NO: 93785 - protein, 101 aa, Setaria italica
  Transcript Sequence Number=SeqID_27811
  Gene Ontology: Mol. function=binding
  Homolog annotation: Hit_ID=Q5N857; Match level="QueryCoverage=100%, HitCoverage=11%, E-value=3e-23, Identity=57%"; Hit description =Cyclin-like
TARQVANVPVSANPVPYDQMKSQCEALVMEKQQKMSVLLSFKHSRTDSHGSTGSSLRSEHELQSTWKGRMRRSDSASSESDCSFRLPPASPYDKFLKAAGR

SEQ ID NO: 93786 - protein, 86 aa, Setaria italica
  Transcript Sequence Number=SeqID_27812
  Gene Ontology: Mol. function=binding
  Homolog annotation: Hit_ID=Q5N857; Match level="QueryCoverage=88%, HitCoverage=7%, E-value=5e-27, Identity=73%"; Hit description=Cyclin- like
PFHCNKDDLQPSRRRCLHTMASAMLIFSAKIADLHQIIPLVKAAAPEKMVDPHLCVMDDCQLINTSAESANSEMVYGSEEDVKLIV

SEQ ID NO: 93787 - protein, 105 aa, Setaria italica
  Transcript Sequence Number=SeqID_27813
  Gene Ontology: Mol. function=binding
  Homolog annotation: Hit_ID=Q5N857; Match level="QueryCoverage=99%, HitCoverage=10%, E-value=1e-32, Identity=70%"; Hit description =Cyclin-like
YANVPELATSVPYDQMKSQCEALVMEKQQKMSVLLSFKHSRTDSHGSTGVNGLETNESSLRSEHELQSTRKGRMRRSDSASSESDCSFRLPPASPYDKFLKAAGR

SEQ ID NO: 93788 - protein, 307 aa, Setaria italica
  Transcript Sequence Number=SeqID_27814
  Homolog annotation: Hit_ID=A8HNA8; Match level="QueryCoverage=86%, HitCoverage=71%, E-value=3e-20, Identity=29%"; Hit description=ATP synthase I-like protein
  Pfam annotation: Domain name=Bac_ATP_syn_I; Domain location=174-299; Score=26.7; E_value=9.4e-05; Accession=PF05468.3; Description =Bacillus ATP synthase I
MEPGEYGGGPATIKPRKYWWGKEDRDPVGNTDDFIWNKDFLPHMERVIANGGAAAEPTITRRSPVDEEESGFLSINRAMSLDSVEVDLSKELQAPTRPILQTQVEAARRGRAIGAEAVNGATSARWRLVPTRREQAKWDRAAKAATGGSDVILRESKSRVQQGDPKELAARAREDYLKLKQRLQLLTLGIGGVGVVSAYVSYSPEIAVSFGAGLIGSLVYLRMLGTSVDSLAGGTGETVKSAAAQPRLLIPVVLVMMYNRWNGILVPDYGFMHLELIPMLVGFFTYKIATFAQAIQDSIPAVEKREV

SEQ ID NO: 93789 - protein, 600 aa, Setaria italica
  Transcript Sequence Number=SeqID_27815
  Gene Ontology: Mol. function=binding; Cellular component=nucleus
  Homolog annotation: Hit_ID=Q5N857; Match level="QueryCoverage=100%, HitCoverage=60%, E-value=0.0, Identity=77%"; Hit description=Cyclin -like
MFNLEGLIPKLCEIGQELREDDKGLRLRSAALQALASMVQYMGDHSHISMELDEVVSVIISCYEVNQTLSIKEVVRLQDDDDLVINGNLAVVPVSGQNSAKVASDTMSVSENPAHWARVCLRNMANIAKEATTVRRVLDPLFRLFDNHDYWSPENGIALSVLQEMQKLMDKSGQHGHLLLSFTIKHIDHKVIAKKPAKQINIVKVASNLARHAKLKASVTIATAISDLIKHLRKCMHFAIEASNAHADDDKWNSALHVALEDCLVQLTEKVGDVSPILDMVGVMLENLSHTATIARSTISSVYRTSQIAASVYKSSYHQKAFPEALFHQLLLAMLHPDNKTRIGSHRVLSTIVAPSLLCPWSAMSFPIPAKGDDLQNLRLLALSAFSSEAIINEMRTKNKIQESLQKNDKSEAIVGPENGYALTEPNTRQYLGSPCLNEHHLTAFNDENLKFMKLNNHQIDLLLSSIWSQASLEDNSPANFEAMGHTYNIALFCSKSKSSSHVALVRCFQLAFSIRKKSLSQENDLQPSRRRCLHTMASAMLIFSAKIADLHQIIPLVKAAAPEKMVDPHLCVMDDCQLINTSAESANSEMVYGSEEDES

SEQ ID NO: 93790 - protein, 324 aa, Setaria italica
  Transcript Sequence Number=SeqID_27816
  Gene Ontology: Mol. function=binding; Cellular component=nucleus
  Homolog annotation: Hit_ID=Q5N857; Match level="QueryCoverage=95%, HitCoverage=31%, E-value=1e-141, Identity=78%"; Hit description =Cyclin-like
  Subcellular localization annotation: CTP_CleavageSite=60; ConfidenceScore=5.37e-01
VSYLVGHTYNIALFCSKSKSSSHVALVRCFQLAFSIRKKSLSQENDLQPSRRRCLHTMASAMLIFSAKIADLHQIIPLVKAAAPEKMVDPHLCVMDDCQLINTSAESANSEMVYGSEEDESNAHAFLSAINKDDVELIEIVMSHFKKKFENLPEKFNGIEEQLLQEFSLDDSFPLGAPLFMETPHSCSMYAEKDDHCFDEDGVPSELDDADDIIFEHSGSQSDRKTSGSMASSDVLTVNQLIESVHETARQVANVPVSANPVPYDQMKSQCEALVMEKQQKMSVLLSFKHSRTDSHGSTGVNGLETNEASISAESRYHMYHSDF

SEQ ID NO: 93791 - protein, 158 aa, Setaria italica
  misc_feature (4)..(4): Xaa can be any naturally occurring amino acid
  misc_feature (126)..(126): Xaa can be any naturally occurring amino acid
  misc_feature (138)..(138): Xaa can be any naturally occurring amino acid
  Transcript Sequence Number=SeqID_27817
  Gene Ontology: Mol. function=protein binding
  Homolog annotation: Hit_ID=Q2RBG8; Match level="QueryCoverage=99%, HitCoverage=56%, E-value=1e-44, Identity=62%"; Hit description =BTB/POZ domain containing protein, expressed
  Pfam annotation: Domain name=BTB; Domain location=71-158; Score=-5.6; E_value=0.04; Accession=PF00651.23; Description=BTBPOZ domain
PCYXGAKAIIGFLLNKDEQEADDGHGSAKSPVSTKPNSSTMGMRHAWEQVKKEMRSREETSQRAAFLEQGLALAWKEELHTDIVVRPGTGAPIPAHKAILAARSEVLRHVLSGDEQCKAPAGDSIXSLPELSHDEPLXLLLAFLYTGALEQDLPERHL

SEQ ID NO: 93792 - protein, 405 aa, Setaria italica
  misc_feature (41)..(41): Xaa can be any naturally occurring amino acid
  Transcript Sequence Number=SeqID_27818
  Gene Ontology: Mol. function=aspartic-type endopeptidase activity; Cellular component=membrane; Biological process=RNA-dependent DNA replication
  Homolog annotation: Hit_ID=B9RXM4; Match level="QueryCoverage=98%, HitCoverage=77%, E-value=1e-142, Identity=63%"; Hit description =Multidrug resistance pump, putative
  Pfam annotation: Domain name=MatE; Domain location=1-115; Score=43.2; E_value=1e-09; Accession=PF01554.10; Description=MatE
  Pfam annotation: Domain name=MatE; Domain location=176-339; Score =153.5; E_value=6.6e-43; Accession=PF01554.10; Description=MatE
  Pfam module annotation: Pfam domain module=MatE::MatE; Domain location=1-115::176-339
GMGSAVETLCGQAYGAQKYEMLGIYLQRSAVLLCGTGIPLXAVIYAFSEPILVLLGQSPEIARAASIFVYGLIPQIFAYAINFPIQKFMQAQSIVLPSAYISTGTLLLHVLLSWVVVYKAGLGLLGASLALSMSWWVIVAAQFAYIVMSPKCRHTWTGFSFQAFSGLWDFLKLSAASALMLCLETWYFQVLVLIAGLLPNPELALDALSVCMTISGWVFMISVGFNAAASVRVSNELGAGNPKSAYFSVWVVTAVSTLITIILSIVILCLRNYVSYLFTEGEVVSNAVADLCPLLAITIILNGIQPVLSGVAVGCGWQQFVAYVNIGCYYVVGVPLGALLGFVFKLGVKGIWGGMIGGTVMQTAILLWVTLRTDWSKEVEEAQKRLNKWEDKKTEPLLAGVSNGN

SEQ ID NO: 93793 - protein, 283 aa, Setaria italica
  Transcript Sequence Number=SeqID_27819
  Gene Ontology: Cellular component=plasma membrane
  Homolog annotation: Hit_ID=B6TF42; Match level="QueryCoverage=98%, HitCoverage=66%, E-value=1e-150, Identity=91%"; Hit description=CBS domain containing protein
  Pfam annotation: Domain name=CBS; Domain location=72-175; Score=28.2; E_value=3.4e-05; Accession=PF00571.20; Description=CBS domain
NTRLYRLAYPISKLLDYVLGHGQTALFRRAELKTLVTLHGNEAGKGGELTHDETTIIAGALELTEKKAKDAMTPLCQTFAIDINAKLDRELMQQVLEKGHSRVPVYYEKKKNIIGLILVKNLLSVNPDDEVPIKSVTVRKIPRVFEDMPLYDILNEFQKGHSHMAVVIRKNIPNEPAEQPANDGGTFEVSIAIDDKNNEKVVKNLPPPLRRWKSYPNTQNTSNRGSKPKKWSKDQSDVLQIHEEPLPTLSEDEEAVGIITMEDVIEELLQEEIYDETDVHEEQ

SEQ ID NO: 93794 - protein, 70 aa, Setaria italica
  Transcript Sequence Number=SeqID_27820
STYMNCLHLLYWLKSWALLLWLCSCRVTSDANNICFRMTWNPEIAPCCYQLPRSFVNLLDVVHYFWYKQH

SEQ ID NO: 93795 - protein, 103 aa, Setaria italica
  Transcript Sequence Number=SeqID_27821
  Homolog annotation: Hit_ID=Q84NP6; Match level="QueryCoverage=92%, HitCoverage=18%, E-value=3e-25, Identity=60%"; Hit description=Leaf senescence related protein-like
  Pfam annotation: Domain name=DUF231; Domain location=3-94; Score =14.5; E_value=4.7e-08; Accession=PF03005.7; Description=Arabidopsis proteins of unknown function
LEWHGPLWLGMDWDMFHEAKIVSRAASPRVPITFVDITTMSERRKDGHTSVHTIRQGKVLGPEEQADPGTYADCIHWCLPGVPDIWNLVLYTRILSRPAIQFG

SEQ ID NO: 93796 - protein, 57 aa, Setaria italica
  Transcript Sequence Number=SeqID_27822
  Homolog annotation: Hit_ID=Q84NP6; Match level="QueryCoverage=77%, HitCoverage=8%, E-value=7e-14, Identity=77%"; Hit description=Leaf senescence related protein-like
EIGRKGSFDQGSTEYVEVDRPVAYKEVLKTWAKWVDRNIDPNKTTVFFMGMSPNHIT

SEQ ID NO: 93797 - protein, 697 aa, Setaria italica
  Transcript Sequence Number=SeqID_27823
  Gene Ontology: Mol. function=AMP deaminase activity; Cellular component=integral to membrane; Biological process=purine ribonucleoside monophosphate biosynthetic process
  Homolog annotation: Hit_ID=Q84NP7; Match level="QueryCoverage=100%, HitCoverage=85%, E-value=0.0, Identity=90%"; Hit description =Probable AMP deaminase
  Pfam annotation: Domain name=A_deaminase; Domain location=242-648; Score=752.6; E_value=2.9e-223; Accession=PF00962.14; Description =AdenosineAMP deaminase
SAFERIEDSDEEEDLVPDAKNDAAYLASNGAVASELLPDKTSQNGELKAVPSTQMIRSHSATGSLHVPQLNPIAADILRKEPEHETFSKINITAVETPSSDEIEAYKVLQKCLELRERYIFREEVAPWEKEIITDPSTPKPNPNPFNYEHQAKTEHHFEMVDGVVHVYPNKDSKERLYPVADATTFFTDMHYILRVLAAGDIRTVCHHRLNLLEQKFNLHLMVNADRELLAQKAAPHRDFYNVRKVDTHVHHSACMNQKHLLRFIKSKLRKEPDEVVIFRDGTYLTLKEVFESLDLTGYDLNVDLLDVHADKSTFHRFDKFNLKYNPCGQSRLREIFLKQDNLIQGRFLAELTKEVFSDLEASKYQMAEYRISIYGRKKSEWDQMASWIVNNELYSENVVWLIQIPRIYNIYREMGTINSFQNLLDNIFLPLYEVTIDPASHPQLHVFLEQVVGLDLVDDESKPERRPTKHMPTPEQWTNVFNPAYAYYVYYCYANLYTLNKLRESKGMTTIKLRPHCGEAGDIDHLAAAFLTSHNIAHGVNLRKSPVLQYLYYLAQIGLAMSPLSNNSLFIDYHRNPFPTFFLRGLNVSLSTDDPLQIHLTKEPLVEEYSIAASLWKLSSCDLCEIARNSVYQSGFSHRLKSHWIGRNYYRRGPEGNDIHQTNVPHIRVEFRHTIWKEEMELIHLRNVKLPEEIDR

SEQ ID NO: 93798 - protein, 456 aa, Setaria italica
  misc_feature (15)..(15): Xaa can be any naturally occurring amino acid
  misc_feature (423)..(423): Xaa can be any naturally occurring amino acid
  Transcript Sequence Number=SeqID_27824
  Homolog annotation: Hit_ID=Q84NP6; Match level="QueryCoverage=73%, HitCoverage=71%, E-value=1e-110, Identity=54%"; Hit description=Leaf senescence related protein-like
  Pfam annotation: Domain name=DUF231; Domain location=287-447; Score =224.5; E_value=2.8e-64; Accession=PF03005.7; Description=Arabidopsis proteins of unknown function
LTTRVPAPTVVPGVXSGGAGRRVVVPRRDISSSEKPAAVLHHSDQEKPKQQHAVTTTTEPKPQRAVTTEPAPAVEAPQKKVATKSKKKKPAGKKKARRQRAAKKTVVPPALGVPETCDLSKGRWVFDNTSYPLYREEECEFLTSQVTCMKNGRRDDTYQKWRWQPNDCSMPRFDAKLFMERLRGKRFMFVGDSLNRNQWESMVCLVQSAVSPGKKYVSWEGQRVVFHAWEFNATVEFYWAPFLVESNSDDPKIHSIQHRIIKADTIAAHAENWRGVDYLVFNTYIWWMNTLNMKVTRPGAQSWEEHDEVVRMEAYRKVLTTWANWVNENVDPARTSVFFMSMSPLHISPQVWGNPDGIRCAKETMPLLEWHGPLWLGMDWDMFHEAKNVSRAASPRVPITFVDITTMSERRKDGHTSVHTIRXYADCIHWCLPGVPDIWNLVLYTRILSRPAIQFG

SEQ ID NO: 93799 - protein, 424 aa, Setaria italica
  Transcript Sequence Number=SeqID_27825
  Homolog annotation: Hit_ID=Q84NP6; Match level="QueryCoverage=82%, HitCoverage=70%, E-value=1e-153, Identity=73%"; Hit description=Leaf senescence related protein-like
  Pfam annotation: Domain name=DUF231; Domain location=241-415; Score =296.5; E_value=5.6e-86; Accession=PF03005.7; Description=Arabidopsis proteins of unknown function
LRSKANANAVDVVQEKERDVTLPTVTGGGGADEARRRADEEAAEKASSAKAAAATAALRTVVSVPETCDLYRGNWVYDEVNAPVYKEGECEFLTEQVTCMRNGRRDDSYQKWRWQPTDCDLPRFDARLLLERLRNKRLMFVGDSLNRNQWESMVCLVQSVIPKGQKTLTKFVNGGSSNVFYAHAYNATVEFYWAPFLVESNSDNPKVHSVPDRVIQWHAIAKHARNWVGVDYLVFNTYIWWLNTLDMKVLKGSFDQGSTEYVEVDRPVAYKEVLKTWAKWVDRNIDPNKTTVFFMGMSPNHITPEAWGNQGGIKCAMETLPITNRSTSLDVGTDWRLYAGAQEVLPTLRRVPVHFVDITALSELRKDAHTSVHTLRQGKLLTPEQQADPKTYADCIHWCLPGLPDTWNQFLYARIASSPWPAQQ

SEQ ID NO: 93800 - protein, 163 aa, Setaria italica
  misc_feature (108)..(108): Xaa can be any naturally occurring amino acid
  misc_feature (145)..(145): Xaa can be any naturally occurring amino acid
  Transcript Sequence Number=SeqID_27826
  Gene Ontology: Mol. function=DNA binding; Biological process =regulation of programmed cell death
  Homolog annotation: Hit_ID=B9RZZ5; Match level="QueryCoverage=66%, HitCoverage=17%, E-value=3e-22, Identity=49%"; Hit description =Telomeric repeat binding protein, putative
  Pfam annotation: Domain name=Myb_DNA-binding; Domain location=112 -162; Score=29.5; E_value=1.3e-05; Accession=PF00249.23; Description =Myb-like DNA-binding domain
VVEDPLPAAKAAADKVLATRINRTVNLNAEGGQPAACGTAGPSVLNERNNGPNKGAPPSLMDWNPTARTFQWEESPDPEGSEPALRRPHLPSPRRIPVSPLPAAENKXRRRARKWCLLEEETLRKGVELYGSGNWKDILSNNPDXFIGRTPVDLKDKWRNMMR

SEQ ID NO: 93801 - protein, 148 aa, Setaria italica
  misc_feature (135)..(135): Xaa can be any naturally occurring amino acid
  Transcript Sequence Number=SeqID_27827
  Homolog annotation: Hit_ID=B6TM91; Match level="QueryCoverage=100%, HitCoverage=28%, E-value=2e-74, Identity=89%"; Hit description =PsRT17-1 like protein
  Pfam annotation: Domain name=DUF246; Domain location=59-148; Score= -188.8; E_value=0.0014; Accession=PF03138.6; Description=Plant protein family
EWNAPKPMHPSLLNEALRWAIPGEQKRELWSPLSYQGWKPCLKSSISHALPLEPSGYIQVFLDGGLNQQRMGICDAVAVAKILNATLVIPHLEVNPVWKDSSSFEEIFDVDHFINSLKDDVSIIKVLPKEFSWSXTREYYGTGIRATR

SEQ ID NO: 93802 - protein, 138 aa, Setaria italica
  Transcript Sequence Number=SeqID_27828
  Homolog annotation: Hit_ID=B6TM91; Match level="QueryCoverage=92%, HitCoverage=53%, E-value=3e-24, Identity=86%"; Hit description =PsRT17-1 like protein
  Pfam annotation: Domain name=DUF246; Domain location=1-130; Score= -134.8; E_value=9.8e-07; Accession=PF03138.6; Description=Plant protein family
MNIILHQQSYPSAVIASYGIAAIAPFSHRLAFDDLPADLQRLRCKVNFQALVFRPHIISLGETLVKRLRSPVFILVYCLLVVLFFISASPGNMHNALLAHRTYENLKTIRPNMALLGRIFVNKSMEWLDFQQAVQAGH

SEQ ID NO: 93803 - protein, 436 aa, Setaria italica
  Transcript Sequence Number=SeqID_27829
  Homolog annotation: Hit_ID=B6TM91; Match level="QueryCoverage=99%, HitCoverage=84%, E-value=0.0, Identity=89%"; Hit description=PsRT17 -1 like protein
  Pfam annotation: Domain name=DUF246; Domain location=59-431; Score =679.2; E_value=3.5e-201; Accession=PF03138.6; Description=Plant protein family
EWNAPKPMHPSLLNEALRWAIPGEQKRELWSPLSYQGWKPCLKSSISHALPLEPSGYIQVFLDGGLNQQRMGICDAVAVAKILNATLVIPHLEVNPVWKDSRCLWKIFDVDHFINSLKDDVSIIKVLPKEFSWSTREYYGTGIRATRIKTAPLHASAKWYLENVSPILQSYGIAAIAPFSHRLAFDDLPADLQRLRCKVNFQALVFRPHIISLGETLVKRLRSPVQGHSDESIHQVVEESTNQAGKYAVLHLRFDKDMAAHSSCDFGGGRAEKLALAKYRKVIWQGRVLNSQLTDEELRNTGRCPLTPEEIGLVLVALGFDSRTRLYLASHKVYGGEARISSLRKLFPLMEDKRSLASEEELADVEGKASVLAALDYYISMHSDIFISASPGNMHNALLAHRTYENLKTIRPNMALLGRIFVNKSMEWLDFQQACY

SEQ ID NO: 93804 - protein, 86 aa, Setaria italica
  Transcript Sequence Number=SeqID_27830
MITGILVCHWVRHCSYLSQISAMMQKKLTLLQTVAAAGVFSAVSCWYGFMFGRESARRELGGIIDDLRKSNTTSIASSEPDANSKP

SEQ ID NO: 93805 - protein, 62 aa, Setaria italica
  Transcript Sequence Number=SeqID_27831
MQAKKLTLLQTVAAAGVFSAVSCWYGFMFGRESARRELGGIIDDLRKSTTTASSEPDANSKP

SEQ ID NO: 93806 - protein, 133 aa, Setaria italica
  misc_feature (5)..(5): Xaa can be any naturally occurring amino acid
  Transcript Sequence Number=SeqID_27832
  Gene Ontology: Mol. function=protein binding
  Homolog annotation: Hit_ID=Q7XQF7; Match level="QueryCoverage=93%, HitCoverage=18%, E-value=9e-38, Identity=71%"; Hit description =OSJNBa0081L15.6 protein
QKKPXKGKEKTERKTVKGEEKRARREARKVGEEDDIDAILRSIQKEEAKKKEVHVEENVPAPSPRSNCSLTINPLKETELILYGGEFYNGSKTFVYGDLYRYDVDKNEWKLVSSPNSPPPRSAHQTVAWKNNI

SEQ ID NO: 93807 - protein, 116 aa, Setaria italica
  Transcript Sequence Number=SeqID_27833
  Gene Ontology: Mol. function=nucleoside-triphosphatase activity; Cellular component=chloroplast; Biological process=protein metabolic process
  Homolog annotation: Hit_ID=Q01L44; Match level="QueryCoverage=99%, HitCoverage=12%, E-value=1e-48, Identity=83%"; Hit description =H0502B11.7 protein
  Pfam annotation: Domain name=Clp_N; Domain location=38-90; Score =27.8; E_value=4.5e-05; Accession=PF02861.12; Description=Clp amino terminal domain
AREACRDALGKPGPAQAATGLATDVPFSAASKRVFEAAVEFSRNMACNFISPEHIALGLFNLGDPTTNSVLKSLGADPSQLTKQAFGRVQGELAKDGREPVGLSSFKLREKSAAGA

SEQ ID NO: 93808 - protein, 139 aa, Setaria italica
  misc_feature (124)..(124): Xaa can be any naturally occurring amino acid
  Transcript Sequence Number=SeqID_27834
  Gene Ontology: Mol. function=transferase activity, transferring glycosyl groups; Cellular component=integral to membrane; Biological process=cell wall organization and biogenesis
  Homolog annotation: Hit_ID=B9IPJ4; Match level="QueryCoverage=99%, HitCoverage=12%, E-value=5e-62, Identity=78%"; Hit description =Cellulose synthase-like protein
KGMCFMMDRGGDRLCYVQFPQRFEGIDPSDRYANHNTVFFDVNMRALDGLQGPVYVGTGCLFRRIALYGFDPPRSKDHSPGFCSCCLPRRRKASASNANPEETMALRMGDFDGDSMNLATFPKXFGNSSFLIDSIPVAV

SEQ ID NO: 93809 - protein, 67 aa, Setaria italica
  misc_feature (56)..(56): Xaa can be any naturally occurring amino acid
  Transcript Sequence Number=SeqID_27835
  Gene Ontology: Mol. function=hydrolase activity, acting on ester bonds; Biological process=lipid metabolic process
MAYEVAMKALVLSLVLGAVAGIRPSKLVRRQVPAIYVFGDSTLDVGNNNYLPGKDXVPRADKPYYGI

SEQ ID NO: 93810 - protein, 88 aa, Setaria italica
  Transcript Sequence Number=SeqID_27836
  Gene Ontology: Mol. function=transporter activity; Cellular component= membrane; Biological process=oligopeptide transport
  Homolog annotation: Hit_ID=B6TSV4; Match level="QueryCoverage=100%, HitCoverage=14%, E-value=1e-41, Identity=90%"; Hit description =Peptide transporter PTR2
SLPSHGAEQFDEHAPRGRKGRSTFFNYFVFCLSVGALIAVTFAVWVEDNKGWQWGFGISTIAILLSIPVFAAGYGMYRNKVPTGSPLT

SEQ ID NO: 93811 - protein, 123 aa, Setaria italica
  Transcript Sequence Number=SeqID_27837
PTKQTWGKDIETRGEDSCRTKIVTGEVDSLMPCKGARVPHVDTDLEAGKQAMTEEAEMARRRRWSRSVLISKVRDPVRAGDVNSYTPHSVPIGPYHASCSSPRIEKEKLCCVGFFQSLSEDQT

SEQ ID NO: 93812 - protein, 113 aa, Setaria italica
  Transcript Sequence Number=SeqID_27838
  Gene Ontology: Mol. function=catalytic activity; Biological process =metabolic process
  Homolog annotation: Hit_ID=Q5VSB9; Match level="QueryCoverage=81%, HitCoverage=46%, E-value=3e-41, Identity=90%"; Hit description=1 -deoxy-D-xylulose 5-phosphate synthase 1-like
  Pfam annotation: Domain name=Transketolase_C; Domain location=24-111; Score=47.2; E_value=6.2e-11; Accession=PF02780.12; Description =Transketolase, C-terminal domain
KKCSLVFKKKCSFLPGLCALFQIGKGEILVEGKEIAFLGYGEVVQRCLIARSLLSNFGIQATVANARFCKPLDIDLIRTLCQHHSFLITVEEGTVGGFGSHVSQFISLDDLLT

SEQ ID NO: 93813 - protein, 283 aa, Setaria italica
  Transcript Sequence Number=SeqID_27839
  Gene Ontology: Mol. function=catalytic activity; Biological process =metabolic process
  Homolog annotation: Hit_ID=B9RK10; Match level="QueryCoverage=100%, HitCoverage=38%, E-value=3e-99, Identity=62%"; Hit description=1 -deoxyxylulose-5-phosphate synthase, putative
  Pfam annotation: Domain name=Transket_pyr; Domain location=63-234; Score=88.1; E_value=3e-23; Accession=PF02779.16; Description =Transketolase, pyrimidine binding dom
NIDDLICVLKEVATLDSTGPVLVHVITGTENDTGGNISSEITPNEEGPSNSSHDLLKFLETGLSRTYNDCFVEALTAEAENDKCIVVVHGGMGMDRSLRLFQSSFPDRFLPKTDFDLGIAEQHAVTFSAGLACGGLKPFCIIPSTFLQRANEPIVEDVDMQKIPVRFAITNAGLVGSEGPTNSGPFDITFMSCLPNMIVMSPSNEDELVDMVATAAMVEDRPICIRYPRGAIVGTSGTLTYGNPLQIGKGEILVEGKEIAFLGYGEVVQRCLIARSLLSNFGI

SEQ ID NO: 93814 - protein, 142 aa, Setaria italica
  Transcript Sequence Number=SeqID_27840
  Gene Ontology: Mol. function=catalytic activity; Biological process =metabolic process
  Homolog annotation: Hit_ID=B9RK10; Match level="QueryCoverage=85%, HitCoverage=16%, E-value=5e-49, Identity=74%"; Hit description=1 -deoxyxylulose-5-phosphate synthase, putative
  Subcellular localization annotation: CTP_CleavageSite=43; ConfidenceScore=5.03e-01
VVILNDSCHSLLPKADDRPKMSVNAFSSALSKIQSSKGFRRFREAAKGLAKWFGKGMHEFAAKVDEYARGMIGPHGATLFEELGLYYIGPIDGHNIDDLICVLKEVATLDSTGPVLVHVITGTENDTGGNISSEITPNEEGL

SEQ ID NO: 93815 - protein, 58 aa, Setaria italica
  Transcript Sequence Number=SeqID_27841
EEMPTFLAMPAASRAVVELGAVPTAPGSCGGSGSGEEKKAPVQDDSGCAEQTSSQPRV

SEQ ID NO: 93816 - protein, 98 aa, Setaria italica
  Transcript Sequence Number=SeqID_27842
VPLYGLNNLIFAKLMKFKGHYFEMRLVSFLLRRATGLQKLLLVPPVGVGNYMEALEEPLDTSRFLETILDFEKASPDAQIVLSDSDPTAIQQVHSDAS

SEQ ID NO: 93817 - protein, 129 aa, Setaria italica
  misc_feature (59)..(59): Xaa can be any naturally occurring amino acid
  misc_feature (66)..(66): Xaa can be any naturally occurring amino acid
  Transcript Sequence Number=SeqID_27843
  Subcellular localization annotation: CTP_CleavageSite=83; ConfidenceScore=5.73e-01
WPLNFINFANIRLFKPYNGTSSSDCSPSGTSSSECSPSGTSSSNCSSSGTFSSGRSSSXHLHSTAXSLSIYSSESCSNNNSSSASYPSDSSSTGSSSSPSGSSSSYSSSSSSSSSDTSKEMSTGDIMAA

SEQ ID NO: 93818 - protein, 45 aa, Setaria italica
  Transcript Sequence Number=SeqID_27844
TCVTNTEYNHYMSSQKAGTLVIHLKHFKHLSHSSSSSIAFSSDKN

SEQ ID NO: 93819 - protein, 85 aa, Setaria italica
  Transcript Sequence Number=SeqID_27845
  Gene Ontology: Mol. function=electron carrier activity; Biological process=oxidation reduction
  Homolog annotation: Hit_ID=Q2RAT7; Match level="QueryCoverage=97%, HitCoverage=15%, E-value=4e-38, Identity=85%"; Hit description =Cytochrome P450 family protein, expressed
LTKKKPTTHGLKSHPLLGHLPAFLRNRHRFLDWSTELIVASPEQRMGFWIPGMRTGIVTGNPADVEHVLRANFANYPKGAHAISM

SEQ ID NO: 93820 - protein, 160 aa, Setaria italica
  Transcript Sequence Number=SeqID_27846
MPTTTKEEEVRALNSISEIVAIEDLTNKLDAMPSRPSKAKEYEELSMEHTLLQVVASSRQSITKDCVLPIIKEAVVAATPLAMTTTSCEDMMTEQMTKQVDTYFEDVVVVEDASEDEEIVSGMGITIESPIFLITIEDDPTHSTAEVKVEEAQLIEDPPL

SEQ ID NO: 93821 - protein, 115 aa, Setaria italica
  Transcript Sequence Number=SeqID_27847
  Subcellular localization annotation: CTP_CleavageSite=34; ConfidenceScore=5.23e-01
AKSEAATGKAKKPANSTADAGVKPAKSGKKAQVVADAKANATVVSEEETTVGAEVEEDVVFAEEAEGTGDLISEFRGLPARLQETLMPDLARLSHHSKAYLSAANAGIADGVRPI

SEQ ID NO: 93822 - protein, 99 aa, Setaria italica
  Transcript Sequence Number=SeqID_27848
  Gene Ontology: Cellular component=integral to membrane
  Homolog annotation: Hit_ID=B6T959; Match level="QueryCoverage=100%, HitCoverage=52%, E-value=2e-31, Identity=66%"; Hit description =UPF0497 membrane protein 2
  Pfam annotation: Domain name=DUF588; Domain location=1-99; Score =55.9; E_value=1.5e-13; Accession=PF04535.4; Description=Domain of unknown function (DUF588)
  Subcellular localization annotation: CTP_CleavageSite=77; ConfidenceScore=5.06e-01
MGTTNQTLPFFTQFLRFKAQYDDLPTLTFFVVANSIVAAYLVLSIPLSIVHTIRSRAKYSRLVLVFFDAAMLALVTSAASAAAAIVYLAHKGNARANWF

SEQ ID NO: 93823 - protein, 63 aa, Setaria italica
  misc_feature (13)..(13): Xaa can be any naturally occurring amino acid
  Transcript Sequence Number=SeqID_27849
MKEAAGIGDDHGXEGMDCTDAAMDGVRFGNQSQTSIAPCAELKDKGICLFPLSVLLHYHGRTN

SEQ ID NO: 93824 - protein, 172 aa, Setaria italica
  Transcript Sequence Number=SeqID_27850
MEDLVSSPSFCRSVLSCSEGQAQSGESSWTDYFVDFMLSEEERKRQDANSYSATEGGVEGEGEDDGDGSSREEEEEDSMISDAASRAPADALLPIRYRGLKKLKKAFKALDHDDSLEDTASSPVNSPKVSAVSQLELSPKRRCNIRDLTKEAAGIGDDHGREGMDCTDAAMD

SEQ ID NO: 93825 - protein, 74 aa, Setaria italica
  misc_feature (16)..(16): Xaa can be any naturally occurring amino acid
  Transcript Sequence Number=SeqID_27851
ALTKRRCNIRDLTKLXGIGDDHGREGMDCTDAAMDGVRFGNQSQTSIAPCAELKDKGICLFPLSVLLHYHGRTN

SEQ ID NO: 93826 - protein, 111 aa, Setaria italica
  Transcript Sequence Number=SeqID_27852
  Gene Ontology: Mol. function=pyridoxal phosphate binding
  Homolog annotation: Hit_ID=B9SJR4; Match level="QueryCoverage=72%, HitCoverage=20%, E-value=2e-27, Identity=72%"; Hit description =Adenosylmethionine-8-amino-7-oxononanoate aminotransferase, putative
RGCVDQWLMEEGVGEGGEVWKVLETAGGVASPSASGTLQCDLYRPFRLPAILVGDGRLGGISSTLSAYETLLLRGYDVSTVILEDRDLTNDTFLLSYLRNRVHVLALPQIP

SEQ ID NO: 93827 - protein, 48 aa, Setaria italica
  Transcript Sequence Number=SeqID_27853
YLGNCTLLALHKELRTDYVVRNALYIIVFFITWLAGTNMLGNCPRCCK

SEQ ID NO: 93828 - protein, 144 aa, Setaria italica
  misc_feature (126)..(126): Xaa can be any naturally occurring amino acid
  Transcript Sequence Number=SeqID_27854
  Gene Ontology: Mol. function=protein serine/threonine kinase activity; Cellular component=plasma membrane; Biological process =protein amino acid phosphorylation
  Homolog annotation: Hit_ID=C4P7U2; Match level="QueryCoverage=100%, HitCoverage=29%, E-value=2e-57, Identity=77%"; Hit description=CBL -interacting protein kinase 15
  Pfam annotation: Domain name=NAF; Domain location=98-144; Score=53.5; E_value=7.9e-13; Accession=PF03822.6; Description=NAF domain
EMYRKIGKADFKCPPWFPSDVRKLVSRILDPNPRTRMPITKIVECFWFKKGLDSKLIRKNIEMKGKVSALTHVDVVFASTGSSSGNNKMVDEKQDAAKVTNLNAFDIISLSEGFNLSALFEETEKXKEARFTSSQSASTIISKL

SEQ ID NO: 93829 - protein, 46 aa, Setaria italica
  Transcript Sequence Number=SeqID_27855
GDNDEDYDDEEDGDELDEEDMEAGVASEDEESDDDIDEDTGKQIAH

SEQ ID NO: 93830 - protein, 235 aa, Setaria italica
  Transcript Sequence Number=SeqID_27856
  Gene Ontology: Mol. function=binding
  Homolog annotation: Hit_ID=UPI00015057F5; Match level="QueryCoverage =99%, HitCoverage=30%, E-value=1e-44, Identity=40%"; Hit description =DNA binding / binding / protein binding / zinc ion binding
FGYLIEFVSFFVSHKRAIASKRVVMHILTYLTSSYDDTRARTQKEKEVLQLFNALPQNDWNSDFVLNLCSDAHFHQACGLIFTTRNQNLSALDSYMKDRDEPFHAFIFIDKRLFELADDEALSFRTTVISRFPELVKLSRECAFVLVIDHFCDNIQQILAELRSDPHSLFLFLKTAIEVHLSGKLDFSGLSLRSNQTVELHYSSSDLEDYQKRLSNPSKLDHNPVSVDDELVELY

SEQ ID NO: 93831 - protein, 193 aa, Setaria italica
  misc_feature (176)..(176): Xaa can be any naturally occurring amino acid
  Transcript Sequence Number=SeqID_27857
  Gene Ontology: Mol. function=amino acid transmembrane transporter activity; Cellular component=integral to membrane; Biological process=amino acid transport
  Homolog annotation: Hit_ID=B9SNC5; Match level="QueryCoverage=97%, HitCoverage=39%, E-value=1e-48, Identity=56%"; Hit description=Amino acid transporter, putative
MTGSPADPPARPRLTVLPLIALIFYDVSGGPFGIEDSVRAGGGALLPVLGFLVLPALWSLPEALVTAELASAFPTNAGYVAWVSAAFGPAAAFLVGFSKWASGTLDNALYPVLFLDYLRSGGGLVLPPVLRSLAILALTAALTYLNYRGLHLVGLSALVLTAFSLSPFVALAVLAXPKIRPSRWLALQTNRKQ

SEQ ID NO: 93832 - protein, 100 aa, Setaria italica
  Transcript Sequence Number=SeqID_27858
  Gene Ontology: Mol. function=receptor activity; Cellular component =integral to membrane; Biological process=protein amino acid phosphorylation
  Homolog annotation: Hit_ID=B9SRH2; Match level="QueryCoverage=98%, HitCoverage=18%, E-value=2e-13, Identity=45%"; Hit description=ATP binding protein, putative
  Pfam annotation: Domain name=B_lectin; Domain location=2-100; Score =20.9; E_value=3.2e-05; Accession=PF01453.16; Description=D-mannose binding lectin
  Subcellular localization annotation: CTP_CleavageSite=71; ConfidenceScore=5.03e-01
PSAFPLWRAIPDRPAPWSAAASLSFDGGLVLTDHAVNKVLWSTAAASASAGDRVLLLNTSNLQIQSASGSSADVVWQSFDYPSETIVQGQNFTSAAALYT

SEQ ID NO: 93833 - protein, 90 aa, Setaria italica
  Transcript Sequence Number=SeqID_27859
  Gene Ontology: Mol. function=phosphoinositide binding; Biological process=cell communication
  Homolog annotation: Hit_ID=B4FAI4; Match level="QueryCoverage=97%, HitCoverage=17%, E-value=3e-24, Identity=62%"; Hit description=PX domain containing protein
LGFDAVRRRREVEGLKETIRSAEAAKSDALREYESIKENNKIEIKRFDKERRRDFIEMLKGFVVNQVSYSDNFANMWTKVAEETEVYANR

SEQ ID NO: 93834 - protein, 136 aa, Setaria italica
  Transcript Sequence Number=SeqID_27860
  Homolog annotation: Hit_ID=B4F8C9; Match level="QueryCoverage=30%, HitCoverage=14%, E-value=3e-14, Identity=90%"; Hit description =Protein binding protein
RSGRPPSRVLGEASGSFRVYPGISFPRPDRFGLPEFLAVVRLGRRSPALLPYILSVTSSASGPGAVSLLRVRGAEGGRRLWSQLSALRWRWLVGAMSFVFRGSRADIEAGGFPGFAPDRRAMRIHAGGRPVHSNSL

SEQ ID NO: 93835 - protein, 66 aa, Setaria italica
  Transcript Sequence Number=SeqID_27861
  Gene Ontology: Mol. function=metal ion binding
  Homolog annotation: Hit_ID=B4F8C9; Match level="QueryCoverage=96%, HitCoverage=22%, E-value=2e-17, Identity=68%"; Hit description =Protein binding protein
MSFVFRGSRADIEAGGFPGFAPDRRAMRIHAGGRPVHSNSLAFLVTVLLLFMVLNSHQMSPNFLGS

SEQ ID NO: 93836 - protein, 94 aa, Setaria italica
  Transcript Sequence Number=SeqID_27862
NRGHTKLTQIMCLTLAWVLLQCIWTRGFALEFNDTCITTVVTVKKPFIITMSLYPSTKCIKCTSQPCWYTKILFWFHNMILGCWQTTCQVTIPC

SEQ ID NO: 93837 - protein, 286 aa, Setaria italica
  Transcript Sequence Number=SeqID_27863
  Gene Ontology: Mol. function=metal ion binding; Cellular component =transcriptional repressor complex; Biological process=ubiquitin -dependent protein catabolic process
  Homolog annotation: Hit_ID=B4F8C9; Match level="QueryCoverage=100%, HitCoverage=100%, E-value=1e-114, Identity=72%"; Hit description =Protein binding protein
  Pfam annotation: Domain name=zf-C3HC4; Domain location=224-264; Score= 38.9; E_value=2e-08; Accession=PF00097.17; Description=Zinc finger, C3HC4 type (RING finger)
  Pfam annotation: Domain name=zf-RING-like; Domain location=224-264; Score=2.2; E_value=0.085; Accession=PF08746.3; Description=RING-like domain
  Pfam module annotation: Pfam domain module=zf-C3HC4::zf-RING-like; Domain location=224-264::224-264
  Subcellular localization annotation: CTP_CleavageSite=25; ConfidenceScore=5.03e-01
MSFVFRGSRADIEAGGFPGFAPDRRAMRIHAGGRPVHSNSLAFLVTVLLLFMVLNSHQMSPNFLLWLVLGVFLMATSLRMYATCQQLQAQAQAHAAAANGFLGHTELRVHVPPTIALATRGRLQSLRLQLALLDREFDDLDYDALRALDADNSPHAPSMSEEEINSLPVFKYKVQAQKGNASARKSDGPSQLSTSSTGSGNEKKQDGFKAADGTSKTSEDELTCSVCLEQVAVGDLLRSLPCLHQFHVNCIDPWLRQQGTCPICKHQVSDGWHGTGNGEEDASYMV

SEQ ID NO: 93838 - protein, 441 aa, Setaria italica
  Transcript Sequence Number=SeqID_27864
  Gene Ontology: Mol. function=translation elongation factor activity; Cellular component=plasma membrane; Biological process=nuclear mRNA splicing, via spliceosome
  Homolog annotation: Hit_ID=Q0WW67; Match level="QueryCoverage=100%, HitCoverage=63%, E-value=0.0, Identity=71%"; Hit description =Elongation factor like protein (Fragment)
  Pfam annotation: Domain name=GTP_EFTU; Domain location=59-377; Score =159.9; E_value=7.5e-45; Accession=PF00009.19; Description=Elongation factor Tu GTP binding domain
  Pfam annotation: Domain name=MMR_HSR1; Domain location=62-195; Score =11.0; E_value=9.7e-05; Accession=PF01926.15; Description=GTPase of unknown function
  Pfam annotation: Domain name=Miro; Domain location=63-195; Score=0.2; E_value=0.01; Accession=PF08477.5; Description=Miro-like protein
  Pfam module annotation: Pfam domain module=GTP_EFTU::MMR_HSR1::Miro; Domain location=59-377::62-195::63-195
EEVYGPGVEALVMDEDEQPLEQPIVAPPRVVKFEVGTRAAATSTYASTDFLLGLAGNPALVRNVALVGHLQHGKTVFMDMLVEQTHEVDTFDSEGERHVRFTDTRVDEQERQVSIKAVPMSLVLEGGNGKSYLCNIMDTPGHVNFSDEMTAALRLADGAVLVVDAAEGVMVNTERAIRHAIQERLPIVVVINKVDRLITELKLPPNDAYFKLRHTLEAINDLISSCSTTVGGTQLVDPAAGNVCFASGAAGWSFTLQSFAHLYLKIHGIQFDHEKFASRLWGDVYFHPDSRTFKKKPPKEGANRSFVEFILEPLYKIYSLVVGEQKGNVESKLAELGVTLSNAAYKLNVRPLLRLACRSIFGTATGFTDMLVKHIPSVKDAAARKIDHIYTGPQDSSIVDAMKKCDPNGHLMVNVTKLYPKSDCSVFDAFGRVYSGTIQTG

SEQ ID NO: 93839 - protein, 109 aa, Setaria italica
  Transcript Sequence Number=SeqID_27865
  Homolog annotation: Hit_ID=Q01JK6; Match level="QueryCoverage=99%, HitCoverage=13%, E-value=1e-28, Identity=60%"; Hit description =H0112G12.14 protein
LQSSNDHMPFPMTGQQRETNHLLDRGPMVSPAQTFGSFPSTYEQEVSYNYSSAPGNGNNMLQYPSSQGQSFSTASTVQGGFPQAPLTELPPVGHERLSVDPSDQPLEFN

SEQ ID NO: 93840 - protein, 360 aa, Setaria italica
  Transcript Sequence Number=SeqID_27866
  Homolog annotation: Hit_ID=Q01JK6; Match level="QueryCoverage=91%, HitCoverage=39%, E-value=1e-100, Identity=60%"; Hit description =H0112G12.14 protein
  Subcellular localization annotation: CTP_CleavageSite=25; ConfidenceScore=5.22e-01
LCHVIAGNGNNMLQYPSSQGQSFSTASTVQGGFPQAPLTELPPVGHERLSVDPSDQPLEFNSRKAPDVAVHTNVNSTIPAAPTLGTNYDTVATSTHSWTPSATVGFLPRAPLPPQAAQMDPHAAPLFGAASSSNYAPPAAFGVGSVTEVFPTDPNTPFSVAEKSKKRPVPNWLREELLKKKSAPLSASAQHPTNLNSTESDNAEEPLGKPDQSDSRSNDSAKSTEDNEDDEDEIEATRMAAINQEIKRVLTEVLLKVTDDLFDEIATKVLNEDDSSAEANGPTDVSGSKEPGLGVSRTRTSAKVVLPAKPANISSSDHKGSTGLSSPKGALLGLASYDSDDDDDDDNGGDGKDKIPMSDL

SEQ ID NO: 93841 - protein, 69 aa, Setaria italica
  misc_feature (14)..(14): Xaa can be any naturally occurring amino acid
  Transcript Sequence Number=SeqID_27867
  Gene Ontology: Mol. function=isomerase activity; Cellular component =nucleus
  Homolog annotation: Hit_ID=B6TBM2; Match level="QueryCoverage=97%, HitCoverage=60%, E-value=1e-30, Identity=94%"; Hit description =Protein yippee-like OJ1003C07.11
  Pfam annotation: Domain name=Yippee; Domain location=1-68; Score =93.8; E_value=5.9e-25; Accession=PF03226.6; Description=Yippee putative zinc-binding protein
LVFLDHVVNICLGXNEDRYLVTGLHTVNDIYCSCCQQILGWRYEKAYDQSQKYKEGKYILERARMVKDG

SEQ ID NO: 93842 - protein, 108 aa, Setaria italica
  misc_feature (93)..(93): Xaa can be any naturally occurring amino acid
  Transcript Sequence Number=SeqID_27868
  Subcellular localization annotation: CTP_CleavageSite=32; ConfidenceScore=5.55e-01
RGPRARLHSSTAAACSSWSRPLLPELAAVSPRAGTRRGAGRAPPLFRPRALMTTSQIASAAFTWGTVAVLPFYTLMVVAPNANITKRTVESSXAPYVALGLLYAYLLY

SEQ ID NO: 93843 - protein, 411 aa, Setaria italica
  misc_feature (9)..(9): Xaa can be any naturally occurring amino acid
  misc_feature (12)..(12): Xaa can be any naturally occurring amino acid
  misc_feature (187)..(187): Xaa can be any naturally occurring amino acid
  misc_feature (222)..(222): Xaa can be any naturally occurring amino acid
  Transcript Sequence Number=SeqID_27869
  Gene Ontology: Mol. function=aspartic-type endopeptidase activity; Cellular component=mitochondrion; Biological process=DNA integration
  Homolog annotation: Hit_ID=Q7XK59; Match level="QueryCoverage=98%, HitCoverage=81%, E-value=1e-125, Identity=33%"; Hit description =OSJNBa0091C07.1 protein
  Pfam annotation: Domain name=PPR; Domain location=131-165; Score =41.0; E_value=4.6e-09; Accession=PF01535.12; Description=PPR repeat
  Pfam annotation: Domain name=PPR; Domain location=166-200; Score =44.3; E_value=4.8e-10; Accession=PF01535.12; Description=PPR repeat
  Pfam annotation: Domain name=PPR; Domain location=201-235; Score =37.3; E_value=6e-08; Accession=PF01535.12; Description=PPR repeat
  Pfam annotation: Domain name=PPR; Domain location=236-270; Score =24.6; E_value=0.00042; Accession=PF01535.12; Description=PPR repeat
  Pfam annotation: Domain name=PPR; Domain location=26-60; Score=44.9; E_value=3.1e-10; Accession=PF01535.12; Description=PPR repeat
  Pfam annotation: Domain name=PPR; Domain location=271-305; Score =21.8; E_value=0.0028; Accession=PF01535.12; Description=PPR repeat
  Pfam annotation: Domain name=PPR; Domain location=306-340; Score =36.5; E_value=1e-07; Accession=PF01535.12; Description=PPR repeat
  Pfam annotation: Domain name=PPR; Domain location=61-95; Score=34.3; E_value=4.8e-07; Accession=PF01535.12; Description=PPR repeat
  Pfam annotation: Domain name=PPR; Domain location=96-130; Score=29.1; E_value=1.8e-05; Accession=PF01535.12; Description=PPR repeat
  Pfam module annotation: Pfam domain module=PPR::PPR::PPR::PPR::PPR::PP R::PPR::PPR::PPR; Domain location=131-165::166-200::201-235::236 -270::26-60::271-305::306-340::61-95::96-130
PPWDSWKEXVRXFKEMKQQGVKPDVVSYSTVIAAFCRMGRLEDAMSIFSHMIDQGVPPNQAVYHCLIKGFCTHGSLVKVKELLSEMISKGMHLDVVFFNSVINDLCKEGKVVKAHQVFDFIRHIGLCPNIAMFCSLMEGYCLIGKMKEALRIFESMVSAGLQPNVVAYGTLINGYCKRGRIDNGLNXFREMLLKGVKPSTITYNIVIGGLFHAGRTFAAKEXFQEMIESGIPVDIGIYNTVLNGLLRNNCFDEADTLFKKLCSTNVKIDIVIVTTMISGMFKARRIEVAKYLFDSISANKLVPSIVTYSLMITNFINEGLLEEADDIFSAMEKAGCAPNSRLLNHATRLLLEKGEIIRAANYLAKIDKNNFSLEASTTEMLISLFSRKEAWQEHIKLLPAKYQFIVGASYS

SEQ ID NO: 93844 - protein, 249 aa, Setaria italica
  misc_feature (75)..(75): Xaa can be any naturally occurring amino acid
  misc_feature (94)..(94): Xaa can be any naturally occurring amino acid
  Transcript Sequence Number=SeqID_27870
  Gene Ontology: Mol. function=ATPase activity, coupled to transmembrane movement of substances; Cellular component=integral to membrane; Biological process=transport
  Homolog annotation: Hit_ID=Q7FMW2; Match level="QueryCoverage=100%, HitCoverage=67%, E-value=3e-89, Identity=49%"; Hit description=MDR -like ABC transporter
  Pfam annotation: Domain name=ABC_membrane; Domain location=1-227; Score=77.9; E_value=3.8e-20; Accession=PF00664.15; Description=ABC transporter transmembrane region
LAIGSWFACFLQVACWMITGERQAARIRGLYLEAVLRQDIAFLDKEITTGQLVERMSGDAILIQDAIGEKVGKFXQLTATFLGGFVVAFSKGWXLLAAVMLSSIPPIVIAGAAMSWTISKLSSQGQAKYNEAGNVFEQTIGAIRTVTSFNGENRAIALYNKYIRNAYISDVQEGTATGLGFGFVMFILFCSYGLTAWFGAKLIIDKGYEGGQVVSVWMAFMTGAMSLGEATPCVTGFVSGRAAGYRMLQ

SEQ ID NO: 93845 - protein, 312 aa, Setaria italica
  Transcript Sequence Number=SeqID_27871
  Gene Ontology: Mol. function=ATPase activity, coupled to transmembrane movement of substances; Cellular component=integral to membrane; Biological process=transport
  Homolog annotation: Hit_ID=Q7FMW3; Match level="QueryCoverage=99%, HitCoverage=75%, E-value=1e-131, Identity=60%"; Hit description=MDR -like ABC transporter
  Pfam annotation: Domain name=ABC_tran; Domain location=104-288; Score= 210.5; E_value=4.5e-60; Accession=PF00005.19; Description=ABC transporter
GAKLIIDKGYEGGQVVSVWMAFMTGAMSLGEATPCVTGFVSGRAAGYRMLQIIQRKPEIDPKGTDGIVLAIIKGDIELRNVYFSYPSRPDQLVFDGFSLHVLCGKTMAIVGEGGSGKSTVISLVERFYDPQAGEVLVDGVNIKSLRLEWLRGKIGLVSQEPLLFAISIWENITYGKEDATDEEIMAATKLANAANFIDKLPNGLDTMVGEHGAQLSGGQKQRIAITRAILKNPQILLLDEATSALDMESERVVQEALNRIMQGKTTIIVAHRLSTKKDADTISVVHHGIVVEQGTHTELLRNPNGAYFQLSN

SEQ ID NO: 93846 - protein, 145 aa, Setaria italica
  Transcript Sequence Number=SeqID_27872
  Gene Ontology: Cellular component=integral to membrane
  Pfam annotation: Domain name=DUF588; Domain location=17-128; Score =8.6; E_value=5.3e-05; Accession=PF04535.4; Description=Domain of unknown function (DUF588)
MRLVTAECPCDPPRRLPRPRASVMAHLRDYSFMALSMSLQLIWSFILACIDIHSLKTNWDLHNTRHVWKYLIGDWVLGIASMAAASSSAGVAILLVRDSQFCRVHDYQYLSCSRYEVSVILAFMAWSFIAASAGSTFWLLVSLVV

SEQ ID NO: 93847 - protein, 101 aa, Setaria italica
  Transcript Sequence Number=SeqID_27873
HTPIDLHRQWIELRPAESRSICRHRIELRPAESRSAGAGSSHRGLRSTRAAAKTSGYGLHRQSSAATNSFMRLVTAECPCDPPRRLPRPRASVMAHLRDYR

SEQ ID NO: 93848 - protein, 61 aa, Setaria italica
  Transcript Sequence Number=SeqID_27874
TLFINKKLEKQEHTQILNVNQTRVESLAKTSFALSHGCNQDDQKEISQNVILHKINAFSWR

SEQ ID NO: 93849 - protein, 165 aa, Setaria italica
  Transcript Sequence Number=SeqID_27875
  Gene Ontology: Mol. function=serine-type endopeptidase activity; Biological process=negative regulation of catalytic activity
  Homolog annotation: Hit_ID=B9SC83; Match level="QueryCoverage=98%, HitCoverage=24%, E-value=3e-53, Identity=60%"; Hit description =Cucumisin, putative
PTVLKPDVMAPGSLILASWAENISVATVGSQQLYSRFNIISGTSMACPHASGLAALIRAVHPEWSPAMVRSAMMTTASALDNTGASIKDMGNRNHPASPLAMGSGHIDPSRAVDPGLVYDAAPEDYVKLMCAMNFTAEQIRTVAQTSSSYAVDCAGASLDLNYPS

SEQ ID NO: 93850 - protein, 153 aa, Setaria italica
  Transcript Sequence Number=SeqID_27876
  Gene Ontology: Mol. function=transferase activity, transferring glycosyl groups
  Homolog annotation: Hit_ID=B9SEI8; Match level="QueryCoverage=94%, HitCoverage=41%, E-value=9e-29, Identity=48%"; Hit description =Transferase, transferring glycosyl groups, putative
  Pfam annotation: Domain name=Glyco_transf_8; Domain location=18-152; Score=-39.8; E_value=0.0015; Accession=PF01501.12; Description =Glycosyl transferase family 8
VAPAFRNGAACAGAPTIHIAMTLDATYLRGSLAGVLSVLRHAACPESIAFHFVASSASPARRLASLRRALAAAFPTLPATVHRFDARLVRGKISSSVRRALDQPLNYARIYLADLLPRSVSRVLYLDSDLLVVDDVARLWATDLGPDAALAAP

SEQ ID NO: 93851 - protein, 44 aa, Setaria italica
  misc_feature (41)..(41): Xaa can be any naturally occurring amino acid
  Transcript Sequence Number=SeqID_27877
MAGVGSKTLAVLTVLAAAALSVSAATEAPAPSPVSADSGNXSPT

SEQ ID NO: 93852 - protein, 57 aa, Setaria italica
  Transcript Sequence Number=SeqID_27878
ENDLKNTHSANMQIITQGVYVMKDYIKMMYPSIKKIRNVAIANQVRGCFKAALESSR

SEQ ID NO: 93853 - protein, 209 aa, Setaria italica
  Transcript Sequence Number=SeqID_27879
  Gene Ontology: Mol. function=small conjugating protein ligase activity; Biological process=ubiquitin-dependent protein catabolic process
  Homolog annotation: Hit_ID=Q943L1; Match level="QueryCoverage=68%, HitCoverage=85%, E-value=1e-68, Identity=85%"; Hit description =Ubiquitin carrier protein
  Pfam annotation: Domain name=UQ_con; Domain location=57-202; Score =258.8; E_value=1.2e-74; Accession=PF00179.18; Description=Ubiquitin -conjugating enzyme
  Subcellular localization annotation: CTP_CleavageSite=45; ConfidenceScore=5.51e-01
PDSKAALAPRNKAAPPGGGEPLPIAKTLAPIRSRSAASFPWREPRARRASCSRSSSRILRRIPWMGSPPGLVDDSNVFEWQVTIIGPPDTLYDGGYFNAIMTFPQNYPNSPPSVRFTSEMWHPNVYPDGRVCISILHPPGEDPNGYELASERWTPVHTVESIVLSIISMLSSPNDESPANIEAAKDWREKRDEFKKKVRRIVRKSQEML

SEQ ID NO: 93854 - protein, 37 aa, Setaria italica
  Transcript Sequence Number=SeqID_27880
IKRLNMLVAQGYEGNVKPEPKIKYKARRYPSHMDGLG

SEQ ID NO: 93855 - protein, 82 aa, Setaria italica
  misc_feature (17)..(17): Xaa can be any naturally occurring amino acid
  Transcript Sequence Number=SeqID_27881
  Gene Ontology: Mol. function=cysteine-type endopeptidase activity; Cellular component=plasma membrane; Biological process=proteolysis
  Homolog annotation: Hit_ID=B6U746; Match level="QueryCoverage=100%, HitCoverage=19%, E-value=6e-34, Identity=90%"; Hit description =Metacaspase type II
MGQKRAVLVGINYPGTXDGELKGCLNDVSRMRRCLVERFGFDEAGIRVLADADPSTPPPTGANIRLELERLVAGARAGDTLF

SEQ ID NO: 93856 - protein, 96 aa, Setaria italica
  Transcript Sequence Number=SeqID_27882
  Gene Ontology: Mol. function=hydrolase activity, hydrolyzing O -glycosyl compounds; Cellular component=plasma membrane; Biological process=carbohydrate metabolic process
  Homolog annotation: Hit_ID=Q0WQK4; Match level="QueryCoverage=88%, HitCoverage=28%, E-value=3e-39, Identity=84%"; Hit description =Xylosidase
SDTGPGVKFGGAFPGATAFPQVIGTAAALNASLWELIGRAVSDEARAMYNGGQAGLTFWSPNVNIFRDPRWGRGQETPGEDPAVARVEMGVDVCEG

SEQ ID NO: 93857 - protein, 67 aa, Setaria italica
  Transcript Sequence Number=SeqID_27883
  Subcellular localization annotation: CTP_CleavageSite=51; ConfidenceScore=5.46e-01
HMLSPTPSVSALAGRGNWGSSKRRVPLPLPSTSKCQPLYIQLPPPAFPPSPASKFAHAPTLCRDRSR

SEQ ID NO: 93858 - protein, 109 aa, Setaria italica
  Transcript Sequence Number=SeqID_27884
  Subcellular localization annotation: CTP_CleavageSite=68; ConfidenceScore=5.61e-01
ALSSSCACLLHVFFSWLSCSSSSALKRMSSSIHLHLSVAGNALQHRPFHPTKTSRTSPKRLHGSFVTLASLVALASVLLDGGDDDLQPGRVALLGQPRRRVCVRVHPGV

SEQ ID NO: 93859 - protein, 166 aa, Setaria italica
  Transcript Sequence Number=SeqID_27885
RRRSDPLRVEVPPPRLPVQEPPLRSASAPRDCCAAPGGLNLQQRLRAPPGRRLRIHHIAGTSSSSSASIYLPAPRSTPCSSPLDIVCLAMSTERAAWSYMHEKGLVDILKELANLPMLKGQNGWTAEGWRSITNKFNDMFPMANFTKQQVQEKEKGVKKGDYKIIK

SEQ ID NO: 93860 - protein, 308 aa, Setaria italica
  Transcript Sequence Number=SeqID_27886
  Gene Ontology: Mol. function=transposase activity; Biological process= transposition, DNA-mediated
  Homolog annotation: Hit_ID=Q2QT97; Match level="QueryCoverage=95%, HitCoverage=41%, E-value=3e-35, Identity=34%"; Hit description =Transposon protein, putative, CACTA, En/Spm sub-class
MSTERAAWSYMHEKGLVDILKELANLPMLKGQNGWTAEGWRSITNKFNDMFPMANFTKQQVQEKEKELKRSYKIIKEARKSGVGWNDTLGMIIADPKGWEKLIKDNHRVGKFRKKAFPLYNSLELLYEGNSGSVATGDLNFTSIEPPPQRTELQVEPTPQRSISEQSNHNTTPSSGYNGMASRLDGIESTEVQSAPSNHNSEDQDVVGGKKRKQSQMAAKLGDFIDFRKNQNEKTLEKIKEKKRREEDYSVEKCIDIVDTMEELSDEQKADANELFQSEMNRKIFVSTKNPSVRLIWLMKKIARINEC

SEQ ID NO: 93861 - protein, 63 aa, Setaria italica
  Transcript Sequence Number=SeqID_27887
NRNMDMRCSRNYYFGTILFRLLLIYFCLKDCQLNSTNRDCCVVKYVMQACIQWVTCFTLWLNF

SEQ ID NO: 93862 - protein, 82 aa, Setaria italica
  Transcript Sequence Number=SeqID_27888
  Subcellular localization annotation: CTP_CleavageSite=74; ConfidenceScore=5.43e-01
YNSPLLLSSSSHPSSSRLEPLPILPLTSMVPPPSVLPHPFGDSSRSGDARAQFTELVGSSGGGTLGAAIGQAVEASAAACTP

SEQ ID NO: 93863 - protein, 159 aa, Setaria italica
  Transcript Sequence Number=SeqID_27889
  Gene Ontology: Mol. function=protein binding; Cellular component=cell soma; Biological process=cerebellar Purkinje cell layer development
  Homolog annotation: Hit_ID=Q84S70; Match level="QueryCoverage=98%, HitCoverage=28%, E-value=5e-29, Identity=37%"; Hit description=Kelch- like protein
  Pfam annotation: Domain name=Kelch_1; Domain location=102-147; Score =14.0; E_value=0.07; Accession=PF01344.17; Description=Kelch motif
  Pfam annotation: Domain name=Kelch_1; Domain location=55-100; Score =57.4; E_value=5.5e-14; Accession=PF01344.17; Description=Kelch motif
  Pfam annotation: Domain name=Kelch_1; Domain location=8-53; Score =48.8; E_value=2.1e-11; Accession=PF01344.17; Description=Kelch motif
  Pfam annotation: Domain name=Kelch_2; Domain location=102-147; Score =0.2; E_value=41; Accession=PF07646.7; Description=Kelch motif
  Pfam annotation: Domain name=Kelch_2; Domain location=55-100; Score =28.1; E_value=3.6e-05; Accession=PF07646.7; Description=Kelch motif
  Pfam annotation: Domain name=Kelch_2; Domain location=8-53; Score =19.8; E_value=0.011; Accession=PF07646.7; Description=Kelch motif
  Pfam module annotation: Pfam domain module=Kelch_1::Kelch_1::Kelch _1::Kelch_2::Kelch_2::Kelch_2; Domain location=102-147::55-100::8 -53::102-147::55-100::8-53
DSLSMRQNRFAPAAAVFNGSLYVTGGYDGNMYLQSAERYDPREGFWALLPSMSVRRGSHSVAVLGEALYAVGGYDGSNRISTVEIFDSRANSWRMGSPFSIARGYGCAITMDDNLFYIGGINDAGETIDTVEVYNERQGWSVSGCQSVGGRGFACAIAV

SEQ ID NO: 93864 - protein, 77 aa, Setaria italica
  Transcript Sequence Number=SeqID_27890
  Subcellular localization annotation: CTP_CleavageSite=50; ConfidenceScore=5.36e-01
SSSLISRESISKWNQSRVRTDLQSTPLQHSGRQRRRCSTSIALRSGRRARQQDAGDAGTDEVDDGGAGAWRGAGAGE

SEQ ID NO: 93865 - protein, 77 aa, Setaria italica
  Transcript Sequence Number=SeqID_27891
  Gene Ontology: Mol. function=nucleoside-triphosphatase activity; Cellular component=nucleus; Biological process=cell cycle
LILFEDVDTVFDEDRGFISTILKMAETTKWPIILTSNRKDPSLPNLLDQFALDFKYPLTSELLSHVAMICKSEGVDV

SEQ ID NO: 93866 - protein, 181 aa, Setaria italica
  Transcript Sequence Number=SeqID_27892
  Gene Ontology: Mol. function=aspartic-type endopeptidase activity; Cellular component=chromatin
  Homolog annotation: Hit_ID=Q7XP97; Match level="QueryCoverage=99%, HitCoverage=5%, E-value=1e-50, Identity=61%"; Hit description =OSJNBa0060B20.14 protein
SVLKDTVIFGGITAIYLEKQSSASDIALNIIRTAVKRADVLPSLELEWRQGAVAPSVILSILDPHMPLPPDIDLCRSSVHEINNASLAVLDNPAPQTCNPENIDGRDASETTIRAESFEQYNFLFAPEELNQSELTGLCTLKEKGCDVITQTSLDQDNPEGRRTNEKLSSEPFLLDNIAAA

SEQ ID NO: 93867 - protein, 133 aa, Setaria italica
  Transcript Sequence Number=SeqID_27893
  Gene Ontology: Mol. function=ATPase activity, coupled to transmembrane movement of ions, phosphorylative mechanism; Cellular component=integral to membrane; Biological process=phospholipid transport
  Homolog annotation: Hit_ID=B9RLA0; Match level="QueryCoverage=100%, HitCoverage=11%, E-value=8e-53, Identity=77%"; Hit description =Phospholipid-transporting ATPase, putative
ERDLILLGATAVEDKLQKGVPECVDKLAQAGIKIWVLTGDKMETAINIGYACSLLRQGMKQITITLETADIIALEKGSDKAAITKASKDSVVRQINEGKKLANASAGETYALIIDGKSLTYALEDDTKAMFLD

SEQ ID NO: 93868 - protein, 92 aa, Setaria italica
  Transcript Sequence Number=SeqID_27894
SQANPIRISIHKTTSMQTSFESMFMLPQIIAAHLSHEHPCAPIEMTSYRCAHINIDRLGDYKVRVPCIGEKMSTEFRHNGGSEGQFLQSFYA

SEQ ID NO: 93869 - protein, 77 aa, Setaria italica
  Transcript Sequence Number=SeqID_27895
  Gene Ontology: Mol. function=protein phosphatase type 2A regulator activity; Cellular component=protein phosphatase type 2A complex; Biological process=signal transduction
  Homolog annotation: Hit_ID=B6SWX8; Match level="QueryCoverage=79%, HitCoverage=11%, E-value=9e-28, Identity=95%"; Hit description =Transposon protein
FFFSCLLLIFLCQVAERALFLWNNDHIVSLIAQNRGVIFPIIFEALERNIQSHWNQAVHGLTTNVRKMFLDMELVVV

SEQ ID NO: 93870 - protein, 268 aa, Setaria italica
  misc_feature (260)..(260): Xaa can be any naturally occurring amino acid
  Transcript Sequence Number=SeqID_27896
  Gene Ontology: Mol. function=protein phosphatase type 2A regulator activity; Cellular component=protein phosphatase type 2A complex; Biological process=signal transduction
  Homolog annotation: Hit_ID=B6SWX8; Match level="QueryCoverage=100%, HitCoverage=50%, E-value=1e-127, Identity=83%"; Hit description =Transposon protein
  Pfam annotation: Domain name=B56; Domain location=1-255; Score=352.5; E_value=7.7e-103; Accession=PF01603.12; Description=Protein phosphatase 2A regulatory B subunit (B56 family)
TVLHRIYGKFMVHRPFIRKAINNVFYRFIFETQRHNGIGELLEILGSIINGFALPMKEEHKLFLARALIPLHKPKSVAIYHQQLSYCIVQFVEKDYKLADTVIRGLLKYWPVTNCQKEVLFLGELEEVLEATQPAEFQRCMVPLFKQIGRCLNSSHFQVAERALFLWNNDHIVSLIAQNRGVIFPIIFEALERNIQSHWNQAVHGLTTNVRKMFLDMDSELFEECQQQYMEKQAKAKEMQEQRESAWRQLEAVVAAKAAXGDDMVLVN

SEQ ID NO: 93871 - protein, 114 aa, Setaria italica
  Transcript Sequence Number=SeqID_27897
  Gene Ontology: Mol. function=transferase activity, transferring glycosyl groups; Biological process=metabolic process
  Homolog annotation: Hit_ID=Q6Z381; Match level="QueryCoverage=76%, HitCoverage=16%, E-value=3e-25, Identity=66%"; Hit description =Putative UDP-glucosyltransferase
MTMEEAAGGDKLNVVLFPWLAFGHLIPYLELGKRLAARGHAVTFLSTPRNVARLPPVPAHLAPRIRLVALPAPIVEGLPEGAESTADVPPEKNELIKKALDGLAAPFAAFLADA

SEQ ID NO: 93872 - protein, 63 aa, Setaria italica
  Transcript Sequence Number=SeqID_27898
IINCPYTGKHFVVQAVEMQTVQSLEFRLEMERQWLLLHLRSITTGVITTTTSSSNGSFILGTS

SEQ ID NO: 93873 - protein, 127 aa, Setaria italica
  Transcript Sequence Number=SeqID_27899
  Gene Ontology: Cellular component=plasma membrane
  Homolog annotation: Hit_ID=Q67VB5; Match level="QueryCoverage=100%, HitCoverage=35%, E-value=5e-26, Identity=52%"; Hit description =Transducin family protein-like
  Pfam annotation: Domain name=WD40; Domain location=19-56; Score=24.3; E_value=0.0005; Accession=PF00400.24; Description=WD domain, G-beta repeat
  Pfam annotation: Domain name=WD40; Domain location=65-103; Score =23.2; E_value=0.0011; Accession=PF00400.24; Description=WD domain, G- beta repeat
  Pfam module annotation: Pfam domain module=WD40::WD40; Domain location=19-56::65-103
MYSVSWDRSLKAWRLPGLRCAESIAAAHDDAINAVAVSADGSVYTGSADRTVKAWRRRPGRQGKLALVGTMERHKAAVNALALGVGGRVLYSGACDRSVVVWECAGGGAMCATATLRGHMKAVLCVA

SEQ ID NO: 93874 - protein, 120 aa, Setaria italica
  Transcript Sequence Number=SeqID_27900
  Gene Ontology: Mol. function=electron carrier activity; Biological process=oxidation reduction
  Homolog annotation: Hit_ID=Q8LQ07; Match level="QueryCoverage=60%, HitCoverage=13%, E-value=4e-22, Identity=70%"; Hit description =Putative cytochrome P450
MAETAPAAFYTLLCLVGGVIVLLKLTKAVFSRRGAGLNLPPGPWPLPVIGNMHCLLGALPHHAMRGLARRYGAVVFLRLGHVPTVVVSSPEAAREVLKTHDAVVSDRPLYVTADILTYGG

SEQ ID NO: 93875 - protein, 171 aa, Setaria italica
  misc_feature (10)..(10): Xaa can be any naturally occurring amino acid
  Transcript Sequence Number=SeqID_27901
  Gene Ontology: Mol. function=(+)-abscisic acid 8'-hydroxylase activity; Cellular component=integral to membrane; Biological process=oxidation reduction
  Homolog annotation: Hit_ID=Q0J185; Match level="QueryCoverage=98%, HitCoverage=33%, E-value=2e-82, Identity=84%"; Hit description =Abscisic acid 8'-hydroxylase 3
TDGGRRPLTXAHTRSMALTHRVILESLRMASIISFTFREAVADVEYKGFLIPKGWKVMPLFRNIHHSPDYFQDPHKFDPSRFQVAPRPNTFLPFGNGLHACPGNELAKLEMLVLIHHLVTGYRWEIVGSSDEIEYSPFPVPKHGLPVRLWRENRTVERKGCESGNVEDIIV

SEQ ID NO: 93876 - protein, 100 aa, Setaria italica
  Transcript Sequence Number=SeqID_27902
  Gene Ontology: Mol. function=(+)-abscisic acid 8'-hydroxylase activity; Cellular component=integral to membrane; Biological process=oxidation reduction
  Homolog annotation: Hit_ID=Q0J185; Match level="QueryCoverage=41%, HitCoverage=8%, E-value=5e-17, Identity=90%"; Hit description =Abscisic acid 8'-hydroxylase 3
MLHTQVAPRPNTFLPFGNGLHACPGNELAKLEMLVLIHHLVTGYRCVPLLADPPYILSISLVLVDQNVERLPMAWCHLCSAQKSTPCMLQISNMSASIIP

SEQ ID NO: 93877 - protein, 58 aa, Setaria italica
  Transcript Sequence Number=SeqID_27903
CNSHLIQFVEHYTDAVFTVCNNVAIVCLWLVSPPLGIWNFRILIVHLQGIAPFSCLPS

SEQ ID NO: 93878 - protein, 118 aa, Setaria italica
  Transcript Sequence Number=SeqID_27904
  Gene Ontology: Mol. function=transferase activity, transferring glycosyl groups; Cellular component=membrane; Biological process =cell wall biogenesis
MGSVRERDLSPEPDKRRPSGLGTVTVVFLIALPLLLVFFLFSDRAVVSIAADYRPVWQRMKLLGSGNASSFPNAEGSAHDRLLGGLLSPDFDTATCLSRYEASRRWKPSPFPVTPYLV

SEQ ID NO: 93879 - protein, 132 aa, Setaria italica
  Transcript Sequence Number=SeqID_27905
  Gene Ontology: Mol. function=transferase activity, transferring glycosyl groups; Cellular component=membrane; Biological process =cell wall biogenesis
  Homolog annotation: Hit_ID=Q9SWH5; Match level="QueryCoverage=87%, HitCoverage=20%, E-value=1e-28, Identity=51%"; Hit description =Galactoside 2-alpha-L-fucosyltransferase
MYWPFHVSIVSRMAGSGNASSFPNAEGSAHDRLLGGLLSPDFDTATCLSRYEASRRWKPSPFPVTPYLVQKLRQYEANHRRCGPGTANYREAIVQLMSGRNADLAECKYVVWVPLAGLGNRMLSIVSTFLYA

SEQ ID NO: 93880 - protein, 76 aa, Setaria italica
  misc_feature (59)..(59): Xaa can be any naturally occurring amino acid
  Transcript Sequence Number=SeqID_27906
  Gene Ontology: Cellular component=integral to membrane
  Homolog annotation: Hit_ID=B4FU25; Match level="QueryCoverage=86%, HitCoverage=23%, E-value=9e-21, Identity=68%"; Hit description =Membrane protein
NNPHQGFVSKFPFFLGSLEKMGALNWAKVVHEHQGWRLISCIWLHAGLVHLVVNMLSLXFIGIRLEQQFGFGELLV

SEQ ID NO: 93881 - protein, 331 aa, Setaria italica
  Transcript Sequence Number=SeqID_27907
  Gene Ontology: Cellular component=integral to membrane
  Homolog annotation: Hit_ID=B4FU25; Match level="QueryCoverage=90%, HitCoverage=90%, E-value=1e-127, Identity=74%"; Hit description =Membrane protein
  Pfam annotation: Domain name=Rhomboid; Domain location=114-259; Score= 205.0; E_value=2e-58; Accession=PF01694.14; Description=Rhomboid family
MASGGEAKAAGAGYYQYPGSYGGGGGRGYGAGDDERRWWPWLVPTVLVACIAVFAAEMFVNDCPRHGSALGGRAGCVATGFLRRFAFQPLRENPLLGPSSATLEKMGALNWAKVVHEHQGWRLISCIWLHAGLVHLVVNMLSLVFIGIRLEQQFGFVRIGVIYLISGFGGSVLSALFLRSNYISVGASGALFGLLGSMLSELIMNWTIYSNKAAAIVTLLFIIAINLAIGILPHADNFAHIGGFASGFLLGFVLLARPQFGWMERNELPQTNQAPKYKLYQYVLWVAALILLVVGFVIILAMLFKGKNGNDSCHWCQYLNCVPTSRWKCNT

SEQ ID NO: 93882 - protein, 74 aa, Setaria italica
  misc_feature (42)..(42): Xaa can be any naturally occurring amino acid
  Transcript Sequence Number=SeqID_27908
FKNKNFLLPLFSSLVILDLILLSYYMLNIKKKLTEGEDVPAXVSICGDVECGPEPRWARQVLCSPTTRPMRVIC

SEQ ID NO: 93883 - protein, 195 aa, Setaria italica
  Transcript Sequence Number=SeqID_27909
  Gene Ontology: Cellular component=endoplasmic reticulum membrane; Biological process=vesicle-mediated transport
  Homolog annotation: Hit_ID=B6TCV1; Match level="QueryCoverage=100%, HitCoverage=49%, E-value=4e-88, Identity=80%"; Hit description=Sec12- like protein 2
  Pfam annotation: Domain name=WD40; Domain location=117-155; Score =22.0; E_value=0.0024; Accession=PF00400.24; Description=WD domain, G- beta repeat
  Pfam annotation: Domain name=WD40; Domain location=74-112; Score=2.3; E_value=21; Accession=PF00400.24; Description=WD domain, G-beta repeat
  Pfam module annotation: Pfam domain module=WD40::WD40; Domain location=117-155::74-112
FSTDEKFLAVNRSSGPCKVWDLLSSEVVANLPREAGEIFGFCRFSNKTDNSNVLFIAAMQGDYWKIISWDTTSWTRVGSKKITREAISAFAVSPDGALLAIGTIEGTVIVLGSKDMRTLITVKKAHLGIVTTLGFSQDSRTLLSTSFDSTARVTSVGSPKSNGSNVWPMILVIILAILVYYCMQHKAELLAILPR

SEQ ID NO: 93884 - protein, 267 aa, Setaria italica
  Transcript Sequence Number=SeqID_27910
  Gene Ontology: Mol. function=DNA binding; Cellular component =endoplasmic reticulum membrane; Biological process=vesicle-mediated transport
  Homolog annotation: Hit_ID=B6TCV1; Match level="QueryCoverage=78%, HitCoverage=53%, E-value=6e-95, Identity=79%"; Hit description=Sec12- like protein 2
  Pfam annotation: Domain name=WD40; Domain location=136-174; Score =5.7; E_value=8.4; Accession=PF00400.24; Description=WD domain, G -beta repeat
  Pfam annotation: Domain name=WD40; Domain location=95-132; Score =15.7; E_value=0.19; Accession=PF00400.24; Description=WD domain, G -beta repeat
  Pfam module annotation: Pfam domain module=WD40::WD40; Domain location=136-174::95-132
APDGGTGGRTGEGRSGVPNKLVVAALDPAAAAGEEAALSPEAVVEVNTEEEVPYRMAVHPRGDGVLCAFPNGCRLYRWESQEGDEPRNLALEADQEALAELTDVGLQLAVSFSGEGSILATGGEDGHLRVFKWPALESVLTEADTKTSIKDLSFSTDEKFLAVNRSSGPCKVWDLLSSEVVANLPREAGEIFGFCRFSNKTDNSNVLFIAAMQGDYWKIISWDTTSWTRVGSKKITREAISAFAVSPDGALLAIGTIEGTVIRYLGF

SEQ ID NO: 93885 - protein, 121 aa, Setaria italica
  Transcript Sequence Number=SeqID_27911
  Subcellular localization annotation: CTP_CleavageSite=35; ConfidenceScore=5.27e-01
TSMFLCANSFTRPQAHFPRETEMTPPSLPQHFRTSSSEVPPKRTVPKHDGSKERNCSRPAEQASSGRTTAGSGTPEAAPRSSAAIRIRACCFQGLALAGAIFEFCACVATVRIAIIMLVCC

SEQ ID NO: 93886 - protein, 86 aa, Setaria italica
  Transcript Sequence Number=SeqID_27912
  Gene Ontology: Mol. function=metal ion binding
MALPRQLFLPLLAVVLSAAACSAAAQPTTAEAAPDNNNTPGAGIKVSFRPSVAIVVGIFTMIFSLTFLLLMYAKFCHPSSSSPLPA

SEQ ID NO: 93887 - protein, 126 aa, Setaria italica
  Transcript Sequence Number=SeqID_27913
ILILFLFALQQHRLGENAFARKDVPITRDNMTYLGIKDGGPQGCLVLAWSATDENNMFMTTVHALEKLVGSVEVALFRIALDPGRKFGSILCPDDEMAKSLHAHYVTIGMEKIFDVVRSVKYLPFL

SEQ ID NO: 93888 - protein, 577 aa, Setaria italica
  Transcript Sequence Number=SeqID_27914
  Homolog annotation: Hit_ID=B6SWV7; Match level="QueryCoverage=100%, HitCoverage=100%, E-value=1e-168, Identity=58%"; Hit description =Transposon protein CACTA, En/Spm sub-class
MEDLLGSEIGKNDYDWLLTPPGTPRVPALEVAEKTPSPNILPKRTTTRSSSTTRASRLSVSQTENGHSTIPTRPARSNSVSRPSIQSTLMNGNNRTSVLNTSISSVTSRPTTPSRRNTTAAAPKQSVPASRPVPARSSTPVKTRPSTPAKTRPSTPTRTRPTAPNSSTESAAAKTTSAHNSRPSTPNSRSRIIPSSSSGPTHAISRPSASSGTMSRPGSSSGNVPGISRATSLSSSSVPSMSRSSSRSSTPTRQPAIRSSAPAIGRSPSVGRSSSISSFTSVSRSAISNGRNSAPSSAPSSRPSSPNPRPRAPVRPLDIPDFPNETPPNLRTKLPERPLSAGRSRPGMALGIRSTPNTEPSATSAHVKKVSVPAVTRSKFSDASSKTPSLTNGHQNRQAERSVIDSQPNRPSRPVTGTDNGFGRSISKRSLDMAIKHMDIRQNLGGIRGASLFPQSIRSAAAKARPARASDPGLGISNGDRHYTDNGSSVNGHLSGDSNGAPSRNGGSSTDSPDRASVGTKETLSELDIYGSSRYEAMLLREDVRNTSWLHGFDDKPDQSPLFDHRFEPLPEPFSPL

SEQ ID NO: 93889 - protein, 179 aa, Setaria italica
  Transcript Sequence Number=SeqID_27915
  Pfam annotation: Domain name=DUF2054; Domain location=1-62; Score =34.7; E_value=1.4e-09; Accession=PF10218.1; Description =Uncharacterized conserved protein (DUF2054)
CVSCCLNPSKTKKEDVLKLKVAKPVTAGTYTNVFDFCMGRCRHNSASVVHENAYASDFHHCFAMQQNSSGSTESSSVSKLLGINVVVGRPGESCSLVCKVRGQSCVPSRLSVLNKCEILQKYMRCKSGCFRSLGPDQPAEVVDEAPTSLNPGACLYMQMDERLTCDGSHQHTRRLCPCA

SEQ ID NO: 93890 - protein, 376 aa, Setaria italica
  Transcript Sequence Number=SeqID_27916
  Gene Ontology: Mol. function=hydroperoxide dehydratase activity; Cellular component=chloroplast; Biological process=fatty acid biosynthetic process
  Homolog annotation: Hit_ID=B6TT18; Match level="QueryCoverage=100%, HitCoverage=72%, E-value=0.0, Identity=91%"; Hit description =Cytochrome P450 CYP74A18
  Pfam annotation: Domain name=p450; Domain location=17-376; Score= -166.9; E_value=0.0013; Accession=PF00067.14; Description=Cytochrome P450
PSTDLTGGYRVLSYVDPSEANHGPLKTLLFYLLSHRRQHVIPKFREVYGDLFSLMENELSRVGKADFGHYNDAAAFSFLCQALLGRDPTESALQGDGPKLITKWVMFQISPLLNLGLPKLVEDSLLHSFRLPPALVKKDYDRLADFFRDAARGVVDEGERLGIPREEAVHNILFAMCFNSFGGMKILFPSLVKWLGRAGARTHGRLATEVRDAVRAHGGEVTMKALSEMPLVKSAVYEALRIEPPVAMQYGRAKRDMVVESHDYGFEVREGEMLFGYQPMATKDPRVFARPEEYVPDRFLGDDGARLLRHVVWSNGPETASPTLQDKQCAGKDFVVLIARLLVAEIFLRYDSFDVQVGASALGSSVTVTSLKKATF

SEQ ID NO: 93891 - protein, 231 aa, Setaria italica
  misc_feature (14)..(14): Xaa can be any naturally occurring amino acid
  Transcript Sequence Number=SeqID_27917
  Gene Ontology: Mol. function=catalytic activity; Cellular component =nucleus; Biological process=immune response
  Homolog annotation: Hit_ID=B9SHC0; Match level="QueryCoverage=98%, HitCoverage=26%, E-value=4e-84, Identity=66%"; Hit description =Catalytic, putative
ICYPAKDYLSIHKXFSTRADLHRTVYTHRKVKAVELMLVDALIEANDYLGISLHANDAEDFWKLDDTIIKSIETAPNDELKKAKEIIQRIRRRELYKFCNEYSVPKDKLEHFKNVTAQDIVCSQKSSEVLLKEEDIAVSNVKIDLTRGKDNPLESIKFFKDFGCDEKFTITDDRVSHLLPAYNEDRIVRVYAKKPELVEAVSKAFENLQVKMYGEKTQVHDTPKKKRLRSN

SEQ ID NO: 93892 - protein, 75 aa, Setaria italica
  misc_feature (34)..(34): Xaa can be any naturally occurring amino acid
  Transcript Sequence Number=SeqID_27918
  Gene Ontology: Mol. function=binding
  Homolog annotation: Hit_ID=Q4ABQ0; Match level="QueryCoverage=64%, HitCoverage=7%, E-value=4e-12, Identity=70%"; Hit description=80A08 _17
AEQLVKKQMRVTWLFREAALKHGGVHCEGNASNXFGQEADDSEWETASESDAENDARREADDETEWKNHDLPLPG

SEQ ID NO: 93893 - protein, 50 aa, Setaria italica
  Transcript Sequence Number=SeqID_27919
  Gene Ontology: Mol. function=binding
DASDAFGQEADDSEWETASESDAENDVRGEGDDETEWKNDGHQEDFCEKS

SEQ ID NO: 93894 - protein, 58 aa, Setaria italica
  Transcript Sequence Number=SeqID_27920
  Gene Ontology: Mol. function=nucleotide binding; Cellular component =cytoskeleton; Biological process=cell division
  Homolog annotation: Hit_ID=Q6I614; Match level="QueryCoverage=100%, HitCoverage=10%, E-value=1e-17, Identity=77%"; Hit description =Putative dynamin
MENLISLVNKLQRACTALGDHGEESALPTLWDSLPTIAVVGGQSSGKSSVLESVVGKD

SEQ ID NO: 93895 - protein, 257 aa, Setaria italica
  Transcript Sequence Number=SeqID_27921
  Gene Ontology: Mol. function=protein tyrosine/serine/threonine phosphatase activity; Cellular component=membrane; Biological process=protein amino acid dephosphorylation
  Homolog annotation: Hit_ID=B6TQ71; Match level="QueryCoverage=100%, HitCoverage=100%, E-value=1e-135, Identity=91%"; Hit description =Dual specificity protein phosphatase Diacylglycerol kinase, catalytic region
  Pfam annotation: Domain name=DSPc; Domain location=97-233; Score =21.5; E_value=3.9e-06; Accession=PF00782.12; Description=Dual specificity phosphatase, catalytic domain
MGWGISRLIGLKAAVLLSVAYFFQGLGATLISFPLIYVSMIAMLVSIASHPAIDLPLLLGKASDGSFPLWSWIIFSPFLLFIHLFVLLRRFVKNEPLYTEIADGVFVGGWPSSVERLPPGDPAVIDCTCELPKSSTLSNNAYLCIATWDTRAPQPSQIESAVRWAIRKRSQNKPVYVHCAYGHGRSVCVMCALLVALGLAEDWKAAEQMIRKKRPSISMNTLHRKSLEEWSKHLLPSSKRSAESDVSSVIHSDYKQK

SEQ ID NO: 93896 - protein, 65 aa, Setaria italica
  Transcript Sequence Number=SeqID_27922
  Gene Ontology: Mol. function=methyltransferase activity; Cellular component=integral to membrane; Biological process=vesicle-mediated transport
  Homolog annotation: Hit_ID=B9T1J5; Match level="QueryCoverage=96%, HitCoverage=6%, E-value=3e-14, Identity=56%"; Hit description =Nucleotide binding protein, putative
MFAKRLFHKALQHHHQGAAGDVPQMDAQIALHYGVPYTASLLAFDPVQRLLAVGTLDGRIKIFGG

SEQ ID NO: 93897 - protein, 125 aa, Setaria italica
  Transcript Sequence Number=SeqID_27923
PRGPAPSPATYGRKLDDEDDPRSRRDAGEWGRGREDHDRQPRRSTWDRRSQSFDARRKYNDAGDVDRGARRTRDYQEPKRPPMSRSYSHNDRRPSADSRLDRRRRSRSRSRSRSRKQDQEPPRWR

SEQ ID NO: 93898 - protein, 175 aa, Setaria italica
  Transcript Sequence Number=SeqID_27924
  Gene Ontology: Mol. function=protein serine/threonine kinase activity; Biological process=protein amino acid phosphorylation
  Homolog annotation: Hit_ID=Q9LY50; Match level="QueryCoverage=88%, HitCoverage=18%, E-value=8e-52, Identity=66%"; Hit description =Receptor kinase-like protein
  Pfam annotation: Domain name=Pkinase_Tyr; Domain location=57-172; Score=-143.2; E_value=0.00033; Accession=PF07714.9; Description =Protein tyrosine kinase
  Subcellular localization annotation: CTP_CleavageSite=26; ConfidenceScore=5.39e-01
GGAAGSPYGSPNGSRARGLFRRQLSRVMTRQRSGPSSFKDPAEEFTFAQLEAATKGFAAEAKIGEGSFGTVYRGKLPDGREVAIKRGESGTRAWRFQEKESAFRSELAFLSRLHHKHLVGLVGYCEENEERLLVYEYMKNGALYDNLHPKPGSAAQQSPVASSWKLRIKILLDAS

SEQ ID NO: 93899 - protein, 158 aa, Setaria italica
  Transcript Sequence Number=SeqID_27925
  Gene Ontology: Mol. function=GTPase activity; Cellular component =chloroplast; Biological process=immune response
  Homolog annotation: Hit_ID=UPI0001505854; Match level="QueryCoverage =89%, HitCoverage=13%, E-value=4e-73, Identity=88%"; Hit description =GTP binding / GTPase
  Pfam annotation: Domain name=GBP; Domain location=28-158; Score= -59.4; E_value=0.0021; Accession=PF02263.11; Description=Guanylate -binding protein, N-terminal domain
SPRSPFAAEAGGEGGGGRPLRLVYCDERGRFRMDPEALAALQLVKGPVGVVSVCGRARQGKSFILNQLLGRSSGFLVASTHRPCTKGLWMWSAPIKRTALDGTEYSLLLLDSEGIDAYDQTGTYSIQIFSLAVLLSSMFIYNQMGGIDEAALDRLSLV

SEQ ID NO: 93900 - protein, 88 aa, Setaria italica
  Transcript Sequence Number=SeqID_27926
  Homolog annotation: Hit_ID=Q8L4S1; Match level="QueryCoverage=97%, HitCoverage=9%, E-value=7e-30, Identity=74%"; Hit description=Crp1 -like protein
HVDAVSSRIMLRALCERKMVHEAEDVIEGILNSGGSVHEQSLPVVMKMYVDLGLLDEANTFFERHCRGKGVSSKNFAAIIDAFAVKGL

SEQ ID NO: 93901 - protein, 68 aa, Setaria italica
  Transcript Sequence Number=SeqID_27927
CGRHGAMLLAAEIKNFEHKVSWSCELPLFLKFVLPCKGQTILTKFLLVTCICLSLKLVFNAKIIRPKK

SEQ ID NO: 93902 - protein, 115 aa, Setaria italica
  misc_feature (89)..(89): Xaa can be any naturally occurring amino acid
  Transcript Sequence Number=SeqID_27928
  Gene Ontology: Mol. function=protein dimerization activity; Cellular component=nucleus; Biological process=regulation of transcription, DNA-dependent
  Homolog annotation: Hit_ID=Q03462; Match level="QueryCoverage=95%, HitCoverage=27%, E-value=7e-44, Identity=83%"; Hit description =Opaque2 heterodimerizing protein 1
  Pfam annotation: Domain name=bZIP_1; Domain location=4-61; Score =33.7; E_value=7.3e-07; Accession=PF00170.13; Description=bZIP transcription factor
  Pfam annotation: Domain name=bZIP_2; Domain location=6-52; Score =10.3; E_value=0.042; Accession=PF07716.7; Description=Basic region leucine zipper
  Pfam module annotation: Pfam domain module=bZIP_1::bZIP_2; Domain location=4-61::6-52
FLTIFRKQSNRESARRSRSRKAAHLNELEAQVAQLRVENSSLLRRLADVNQKFNEAAVDNRVLKADVETLRAKVKMAEDSVKRVTGMNXYPSVSDMSSLSMPFNGSPSDSTSDAA

SEQ ID NO: 93903 - protein, 239 aa, Setaria italica
  Transcript Sequence Number=SeqID_27929
  Gene Ontology: Mol. function=protein dimerization activity; Cellular component=nucleus; Biological process=regulation of transcription, DNA-dependent
  Homolog annotation: Hit_ID=Q03462; Match level="QueryCoverage=87%, HitCoverage=51%, E-value=4e-95, Identity=84%"; Hit description =Opaque2 heterodimerizing protein 1
  Pfam annotation: Domain name=bZIP_1; Domain location=44-107; Score =41.8; E_value=2.7e-09; Accession=PF00170.13; Description=bZIP transcription factor
  Pfam annotation: Domain name=bZIP_2; Domain location=44-98; Score =25.8; E_value=0.00017; Accession=PF07716.7; Description=Basic region leucine zipper
  Pfam module annotation: Pfam domain module=bZIP_1::bZIP_2; Domain location=44-107::44-98
SISAFCTTCGPDGPPGAPASSSSREQSDDDDMEGEAETTGNANPVQQRLQRRKQSNRESARRSRSRKAAHLNELEAQVAQLRVENSSLLRRLADVNQKFNEAAVDNRVLKADVETLRAKVKMAEDSVKRVTGMNALFPPVSDMSSLSMPFNGSPSDSTSDAAVPVQDDPSSYFASPSEMGGNGGYMPEIASSAQEDDDLVNAALAAGKMGRTASLQRVESLEHLQKRMCGGPASSGSTS

SEQ ID NO: 93904 - protein, 321 aa, Setaria italica
  Transcript Sequence Number=SeqID_27930
  Gene Ontology: Mol. function=protein dimerization activity; Cellular component=nucleus; Biological process=regulation of transcription, DNA-dependent
  Homolog annotation: Hit_ID=Q03462; Match level="QueryCoverage=93%, HitCoverage=71%, E-value=1e-91, Identity=63%"; Hit description =Opaque2 heterodimerizing protein 1
  Pfam annotation: Domain name=bZIP_1; Domain location=220-283; Score =42.4; E_value=1.8e-09; Accession=PF00170.13; Description=bZIP transcription factor
  Pfam annotation: Domain name=bZIP_2; Domain location=220-274; Score =25.4; E_value=0.00024; Accession=PF07716.7; Description=Basic region leucine zipper
  Pfam module annotation: Pfam domain module=bZIP_1::bZIP_2; Domain location=220-283::220-274
MERVFSVEEIPNPYWTPTQPQAAAAGAVAAPGGGGGGGGAGGAGDEVGAMNRCSSEWYFQKFLEEAVLDSPGPVPGVGRGGGGVGVGVEAAESKPLGVGAASNAVVDPVEYNAMLKQKLEKDLAAVAMWRASGATPPERPAAGSSLPNVDVSHAGPVNPIGGNVIPVQNKLAGAPGGPSGPQVVQNADMLVKQATSSSSREQSDDDDMEGEAETTGNANPVQQRLQRRKQSNRESARRSRSRKAAHLNELEAPVAQLRVENSSLLRRLADVNQKFNEAAVDNRVLKADVETLRAKVKMAEGTTSRKTGRTRTIETTLITLP

SEQ ID NO: 93905 - protein, 38 aa, Setaria italica
  Transcript Sequence Number=SeqID_27931
LDGIGSTVVHYSMHIQWVLNSRIWYMLDVALVPYNLAG

SEQ ID NO: 93906 - protein, 486 aa, Setaria italica
  Transcript Sequence Number=SeqID_27932
  Homolog annotation: Hit_ID=O80379; Match level="QueryCoverage=92%, HitCoverage=58%, E-value=4e-35, Identity=28%"; Hit description=184 (Fragment)
SQPSHECNPLLDLDGAGRKKTVKENGHAVQECPEEIAEAARSPRKSRKELSCVSQSSPRIEGKQNDAHDKGQLVNVDWNKILRTISDATEQVLLASISKLNLQQLDALSDKLDEVHMARKYKRLSTAVRIKDCCSAKQKRLEEARSLHEKLFYAKAKLQINNMKLAKLRNKAQLYQDGIQECCILKSKILGAAQMKDACLPAATSINASDGQEELAILTEKRLELNNIQQKVENLRNSLECFRNIEGDVSCESVMRRAEEQLKMRNQCHFIHQQAGLCELTGIVKRDNKRDLILNYHNLLFQRIILNMSDMSSIFVNNSLNGTKIGQIFPNLDASMAFNFLFKAEENQRVHDLQSLQQMTMETSLLLGNLIDVLEEIKLAKMELLNLTSAAFVLESQTCQLGLRACFMSFKSGKKFAFTIDMTDLNRSVYPSEPSELPIKVCEGQTTLAQASIDETMTSIRNLQPGRTVILRLCRRVSRLIHSLPG

SEQ ID NO: 93907 - protein, 245 aa, Setaria italica
  Transcript Sequence Number=SeqID_27933
  Gene Ontology: Cellular component=chloroplast
  Subcellular localization annotation: CTP_CleavageSite=36; ConfidenceScore=5.43e-01
MAASFLRPLLPPNPFLSARRPHLLAAPATITTATVRCTAAPKPATSTPKSIQEEASSNREQQLPQADPNGAATPDEASANPNSIPDDETPPSATATTSFAVARRVPSAISPDRRPRTALTQEEPPNYEIGWKRTKQLPLEKPRGWAIADFLEKLDGLMARGRYGSGQLLGTVAGVVTERAREEAEVLVAEGGVEERVVTELFRVLRLVEMDVEMVKAAVKEETVKERVETARARCRQAILVALSL

SEQ ID NO: 93908 - protein, 180 aa, Setaria italica
  Transcript Sequence Number=SeqID_27934
  Gene Ontology: Mol. function=kinase activity; Cellular component =plasma membrane
  Homolog annotation: Hit_ID=Q10RF6; Match level="QueryCoverage=97%, HitCoverage=6%, E-value=4e-75, Identity=75%"; Hit description=Viral A-type inclusion protein repeat containing protein, expressed
  Pfam annotation: Domain name=KIP1; Domain location=13-86; Score =172.2; E_value=1.5e-48; Accession=PF07765.4; Description=KIP1-like protein
MAALARHDSRQYSWLWVSHISPKNSKWLQENLSDMDTKVKSMIKLINEDADSFARRAEMYYKKRPELMKLVEEFYRAYRALAERYDQATGALRQAHRTMSEAFPNQMPSMSDESPSASGQEMEPHTPDMSTSTRAPFDSNEQKDGVGVSPQNFTSKRNGTHPEETSALSSRKRPKSLFQT

SEQ ID NO: 93909 - protein, 242 aa, Setaria italica
  Transcript Sequence Number=SeqID_27935
  Gene Ontology: Cellular component=plasma membrane
  Homolog annotation: Hit_ID=Q10RF6; Match level="QueryCoverage=99%, HitCoverage=8%, E-value=3e-65, Identity=54%"; Hit description=Viral A-type inclusion protein repeat containing protein, expressed
  Subcellular localization annotation: CTP_CleavageSite=57; ConfidenceScore=5.26e-01
HTPDMSTSTRAPFDSNEQKDGVGVSPQNFTSKRNGTHPEETSALSSRKGLKLFNDLSSSGENAPRAGFDGKVRKGLTFQSPEVKQKEDISKDMENLQQEVSRLLAESQNLKQQMLSESERADKAENEIQILKETVLQLNSDKDTSLLQYNKSSEQISTLESELSKAQADLKKLTDEMAADVQKLINAETLNIAIQSEVEGLDQKMKMQQQELDRKLKELESFRFSFQEEHEKRMQARQGLLS

SEQ ID NO: 93910 - protein, 51 aa, Setaria italica
  Transcript Sequence Number=SeqID_27936
LYRLVIMHHYRVIYKADQDDQATVGVWIKLLRTASTWFVQWRAMNTQGFLT

SEQ ID NO: 93911 - protein, 129 aa, Setaria italica
  Transcript Sequence Number=SeqID_27937
  Gene Ontology: Cellular component=extracellular region; Biological process=plant-type cell wall organization and biogenesis
  Homolog annotation: Hit_ID=Q4PR48; Match level="QueryCoverage=100%, HitCoverage=51%, E-value=7e-55, Identity=76%"; Hit description =Expansin-A18
  Pfam annotation: Domain name=DPBB_1; Domain location=1-55; Score =35.5; E_value=2.1e-07; Accession=PF03330.10; Description=Rare lipoprotein A (RlpA)-like double
  Pfam annotation: Domain name=Pollen_allerg_1; Domain location=66-129; Score=88.1; E_value=3.1e-23; Accession=PF01357.13; Description=Pollen allergen
  Pfam module annotation: Pfam domain module=DPBB_1::Pollen_allerg_1; Domain location=1-55::66-129
RPGKWVAVSATNFCPPNWSLPGGGWCGPPRPHFDMSQPAWENIGIYSAGIIPVLYQRIKCWRDGGVRFTIAGFNYFELVLVTNVAGSGSIQSMAVKGTSTDWIPMSRNWGANWQCLAALAGQGLSFALT

SEQ ID NO: 93912 - protein, 138 aa, Setaria italica
  misc_feature (107)..(107): Xaa can be any naturally occurring amino acid
  Transcript Sequence Number=SeqID_27938
  Gene Ontology: Mol. function=protein binding; Cellular component =extracellular region
  Homolog annotation: Hit_ID=A1YKE8; Match level="QueryCoverage=91%, HitCoverage=36%, E-value=4e-23, Identity=49%"; Hit description =Polygalacturonase inhibitor
  Pfam annotation: Domain name=LRR_1; Domain location=112-136; Score =8.9; E_value=6.1; Accession=PF00560.25; Description=Leucine Rich Repeat
  Pfam annotation: Domain name=LRR_1; Domain location=16-38; Score=5.5; E_value=26; Accession=PF00560.25; Description=Leucine Rich Repeat
  Pfam annotation: Domain name=LRR_1; Domain location=40-62; Score =16.7; E_value=0.1; Accession=PF00560.25; Description=Leucine Rich Repeat
  Pfam annotation: Domain name=LRR_1; Domain location=64-87; Score =11.9; E_value=1.6; Accession=PF00560.25; Description=Leucine Rich Repeat
  Pfam module annotation: Pfam domain module=LRR_1::LRR_1::LRR_1::LRR _1; Domain location=112-136::16-38::40-62::64-87
  Subcellular localization annotation: CTP_CleavageSite=23; ConfidenceScore=5.02e-01
QGLTGVIPESLAQLSGLSQLTISYTGVSGPVPAFLSQLTELTLLDLSFNALTGSIPASLADLPALASIDLSRNRLEGPVPALLLSKCAGEAELWLSHNNLSGAIPPXFAAVNFTHLDLSRNSLSGDALPRPRAGGSRC

SEQ ID NO: 93913 - protein, 102 aa, Setaria italica
  Transcript Sequence Number=SeqID_27939
  Gene Ontology: Cellular component=membrane
  Homolog annotation: Hit_ID=B6T9F8; Match level="QueryCoverage=93%, HitCoverage=24%, E-value=8e-31, Identity=67%"; Hit description =Nodulin protein
  Subcellular localization annotation: CTP_CleavageSite=50; ConfidenceScore=5.09e-01
MELAGTWRKVKPYMAMVFLQFGFAGMFLISVASLRQGMSHYVLVVYRNAVAAVVMAPFALWFERKTRPKMTLSIFFKILALGLLEPVLDQNFIYMGVNNTSA

SEQ ID NO: 93914 - protein, 87 aa, Setaria italica
  Transcript Sequence Number=SeqID_27940
HLSQAFNSYIAISPMTYKIKHEASLNREWDRDGNRYETFLLHCYQISKYYLALSMCLKVWTRHRSESHITHTHIYARTLNPTNVCTQ

SEQ ID NO: 93915 - protein, 558 aa, Setaria italica
  Transcript Sequence Number=SeqID_27941
  Gene Ontology: Mol. function=nucleocytoplasmic transporter activity; Cellular component=nuclear pore; Biological process=transport
  Homolog annotation: Hit_ID=Q2R0I9; Match level="QueryCoverage=86%, HitCoverage=44%, E-value=0.0, Identity=80%"; Hit description=Nuclear pore protein 84/107 containing protein, expressed
  Pfam annotation: Domain name=Nup84_Nup100; Domain location=198-558; Score=-85.2; E_value=0.00011; Accession=PF04121.5; Description =Nuclear pore protein 84  107
  Subcellular localization annotation: CTP_CleavageSite=40; ConfidenceScore=5.10e-01
MEVDPSPSPPPSRPPPLPGYFDPESSGRREEYRRYRKRLSSSNVSPLLGSSLSKSSEARLLYDGDSIPRRPNAGCRLEDIKQEAEDYSNFEGLDGSRMFSSAKRRAPFDGGSASDAAYSSGRQAVRQTLKPVKMEDDMYAAHEGETSFSMFASLLDSAIQGLMPFPDVILQFERTCRNASESIRSSATGKLRVVEDKLMQQKAQLLLDEAASWSLLWYLYGKGNEELSGELFVSPTTSHQEACRFVAADLTAQLCLRIVLWLEGLASEALDLEKKVRGSHVGSYLPSSGVWHRTQRYLKRNNNDSTIVKHVDFDAPTREGAQLLPDDKKQDELLLEDIWTLLRAGRLEEASELCRSAGQAWRAATLCPFGGIDMFPSLDALLKNGKSRTLQAIELEGGIGRQWRLWKWASYCASEKIAEQDGGRYEMAVYALQCSNLKRILPICTDWESACWAMARSWLDVQVDLELSQYQTSRPDEKQLDDDMNGAQSSVGPESWPYHVLDQQPRDITALLQKLHSSDLVHETVSRACREQHRQIEMNLMSGNISHLLDLLWSWLSP

SEQ ID NO: 93916 - protein, 63 aa, Setaria italica
  Transcript Sequence Number=SeqID_27942
CNYSHYMNHCDYYEKNHHLSAEIAQPKLHFLKLHTICFFTFCNQCHLVSDAQFFFGCVSRNVA

SEQ ID NO: 93917 - protein, 76 aa, Setaria italica
  Transcript Sequence Number=SeqID_27943
CFAHGSSNSLECYEPGANTWRRVGALPGIPDGHILKGFAVVALGESVYVIGGRLCKRERGAAGVFHDTDVSVRADV

SEQ ID NO: 93918 - protein, 93 aa, Setaria italica
  Transcript Sequence Number=SeqID_27944
  Gene Ontology: Mol. function=solute:hydrogen antiporter activity; Cellular component=integral to membrane; Biological process =regulation of pH
  Homolog annotation: Hit_ID=Q10B66; Match level="QueryCoverage=88%, HitCoverage=10%, E-value=2e-24, Identity=67%"; Hit description =Cation/hydrogen exchanger, putative
RQDVTSAIKTLGRGKNLVVAGRSAPTTTPLVEKSDCPELGPVGSYLATPEFSTTASVLVVQRYNPRSDPTCRRPAGEEDTEDAVAQFPSSSSR

SEQ ID NO: 93919 - protein, 145 aa, Setaria italica
  Transcript Sequence Number=SeqID_27945
LVTACQGRNFLMIRPAQGCQGGNGRTDGELSKELHQVLDQMVLDLDDMTEISIRYAKGNREATTPAVRFTATLMVGHFVVKLKLARQRSKGMIVQSMGHLKEISHLDASFKAEPEEIEAVASESISLTSSSNLLPDEPSLLQGGT

SEQ ID NO: 93920 - protein, 119 aa, Setaria italica
  misc_feature (18)..(18): Xaa can be any naturally occurring amino acid
  Transcript Sequence Number=SeqID_27946
  Gene Ontology: Mol. function=DNA binding; Cellular component=nucleus; Biological process=regulation of transcription, DNA-dependent
  Homolog annotation: Hit_ID=Q9LX82; Match level="QueryCoverage=89%, HitCoverage=41%, E-value=2e-43, Identity=76%"; Hit description =Transcription factor MYB48
  Pfam annotation: Domain name=Myb_DNA-binding; Domain location=20-67; Score=46.9; E_value=8e-11; Accession=PF00249.23; Description=Myb -like DNA-binding domain
  Pfam annotation: Domain name=Myb_DNA-binding; Domain location=73-118; Score=47.3; E_value=5.9e-11; Accession=PF00249.23; Description=Myb -like DNA-binding domain
  Pfam module annotation: Pfam domain module=Myb_DNA-binding::Myb_DNA -binding; Domain location=20-67::73-118
KDGERSSSGGGGSKQAGXRKGPWTEEEDAQLVWFVRLFGERRWDFLAKVSGLRRTGKSCRLRWVNYLHPGLRRGRITADEERLILELHAQYGSRWSRIARSLPGRTDNEIKNYWRTRTR

SEQ ID NO: 93921 - protein, 180 aa, Setaria italica
  misc_feature (51)..(51): Xaa can be any naturally occurring amino acid
  Transcript Sequence Number=SeqID_27947
  Gene Ontology: Mol. function=DNA binding; Cellular component=nucleus; Biological process=regulation of transcription, DNA-dependent
  Homolog annotation: Hit_ID=Q9LX82; Match level="QueryCoverage=49%, HitCoverage=42%, E-value=3e-31, Identity=61%"; Hit description =Transcription factor MYB48
  Pfam annotation: Domain name=Myb_DNA-binding; Domain location=74-119; Score=47.3; E_value=5.9e-11; Accession=PF00249.23; Description=Myb -like DNA-binding domain
MDHRSMAAATMSMCCRNKQKKDGERSSSGGGGSKQAGMRKGPWTEEEDAQXGLRRTGKSCRLRWVNYLHPGLRRGRITADEERLILELHAQYGSRWSRIARSLPGRTDNEIKNYWRTRTRKQKAAKTAASAASVSSSSTVTTTTASCSGSPSSGCGTAASSSAVTGSALRESGGGGGAED

SEQ ID NO: 93922 - protein, 243 aa, Setaria italica
  misc_feature (68)..(68): Xaa can be any naturally occurring amino acid
  misc_feature (136)..(136): Xaa can be any naturally occurring amino acid
  Transcript Sequence Number=SeqID_27948
  Gene Ontology: Mol. function=DNA binding; Cellular component=nucleus; Biological process=regulation of transcription, DNA-dependent
  Homolog annotation: Hit_ID=Q9LX82; Match level="QueryCoverage=30%, HitCoverage=28%, E-value=1e-26, Identity=74%"; Hit description =Transcription factor MYB48
  Pfam annotation: Domain name=Myb_DNA-binding; Domain location=39-85; Score=40.5; E_value=6.7e-09; Accession=PF00249.23; Description=Myb -like DNA-binding domain
PFASSSPSALLRHRAAGLRRTGKSCRLRWVNYLHPGLRRGRITADEERLIVQLHAQWGTRWSRIARSXLPGRTDNEIKNFWRTRTRKKALEERRHGGDKTATAASPLSSSVTTASCCPGSPTTPSSSAAASSDDSXCGKAAARGSGGDDAELEEASTATAASQHQQPQEYCCTMDQLWNEIAAADAAASYVLDGWGAAGHCYYGAAAEPPPMPSSPVWEYSSDYSLWRIDDEEYYRETMLDAS

SEQ ID NO: 93923 - protein, 517 aa, Setaria italica
  Transcript Sequence Number=SeqID_27949
  Homolog annotation: Hit_ID=O64609; Match level="QueryCoverage=87%, HitCoverage=92%, E-value=3e-97, Identity=45%"; Hit description =F17O7.19 protein
  Pfam annotation: Domain name=NHL; Domain location=146-173; Score =29.1; E_value=1.7e-05; Accession=PF01436.13; Description=NHL repeat
  Subcellular localization annotation: CTP_CleavageSite=59; ConfidenceScore=5.68e-01
MAAKGGSAPVAALLVAALLLVACAPASASSYPARVVSGFVSNAASAVVKRLWSLKSTTKTATGSKSMVKYEGGYTVETVFDGSKLGIEPYSVEVTQGGELLVMDSMNSNIYRMALPLSRYSRPKLVAGSPEGFPGHVDGKLREARMNHPKGFTVDDRGNIYVADAMNMAIRKISDTGVTTVAGGKSGRGGHVDGPSDEAKFSTDFEIRYIGSSCSLLVIDRGNQAIREIQLNFDDCVYQYEAGFPLGVALLLAAAFFGYMLALLQRRALGMYSNGDEQEVVSPVKAKLSSIPPPYQKPLKPSLRPPLIPSEDEPVKQEEEEGLFTSIGKLVGGAKSSITEIVRAAFSRKKHVNIHHHQLGLGRPASWPVQESYAIPRDETPPPLDTRTPTPRKNYAFMSKEPEKIHHIRHGRPQLHGWTAGEAPQQQPPQPQQPPPQQQVHHQQYLQRHQQYSAGPQTFYEPSCEATNEIVFGAVQEADTGRRAVEIKAVNHGDPPPYEQNGLRYRSSYGMGYSGNN

SEQ ID NO: 93924 - protein, 306 aa, Setaria italica
  misc_feature (226)..(226): Xaa can be any naturally occurring amino acid
  misc_feature (295)..(295): Xaa can be any naturally occurring amino acid
  Transcript Sequence Number=SeqID_27950
  Gene Ontology: Mol. function=kinase activity; Biological process =phosphatidylcholine biosynthetic process
  Homolog annotation: Hit_ID=B6UIG4; Match level="QueryCoverage=100%, HitCoverage=85%, E-value=1e-157, Identity=86%"; Hit description =Choline/ethanolamine kinase
  Pfam annotation: Domain name=APH; Domain location=30-262; Score=20.1; E_value=3.7e-05; Accession=PF01636.15; Description=Phosphotransferase enzyme family
  Pfam annotation: Domain name=Choline_kinase; Domain location=53-257; Score=279.1; E_value=1e-80; Accession=PF01633.12; Description =Cholineethanolamine kinase
  Pfam module annotation: Pfam domain module=APH::Choline_kinase; Domain location=30-262::53-257
IERIPEDARRILHRLAGELWGGDVDPGALTVSQLKGAMTNEVFRITWPGGEGDPRKVLVRIYGQGVEVFFDRADEVRTFECMSRHGQGPRLLGRFANGRVEEFINARTLSAADLRDPEISALIAKKLREFNDLDMPGPKNVSLWQRLRRWLEEARGRCSEEESKQFQLNKVGDEIAVLEKALSRVDQTVGFCHNDLQYGNIMIYEETRQVTLIDYEYASFNPVAFXLFANHFCEMAADYHTATPHVLDFTKYPDTEEQRRFVQTYLSSSGEKPSDEEVENLLGLIAKYTLASHLXWGLWGIISAHV

SEQ ID NO: 93925 - protein, 52 aa, Setaria italica
  Transcript Sequence Number=SeqID_27951
LLSEEERAKESVYIQKMERERQEKLKKKLEQEKANADKTKPADADKKPEGSN

SEQ ID NO: 93926 - protein, 78 aa, Setaria italica
  Transcript Sequence Number=SeqID_27952
  Subcellular localization annotation: CTP_CleavageSite=27; ConfidenceScore=5.28e-01
HKRATQQRHKFQQQQSLKLRMMPSLTRPSNRKTQHISSAVEPLTFYRIYSSIARHVNTKLVHRRQVKLDCLRAAPCQF

SEQ ID NO: 93927 - protein, 51 aa, Setaria italica
  misc_feature (13)..(13): Xaa can be any naturally occurring amino acid
  Transcript Sequence Number=SeqID_27953
  Subcellular localization annotation: CTP_CleavageSite=40; ConfidenceScore=5.34e-01
PNPPPPRLRTPPXPPPPPPPLLPLPRRRRPHGGARRGDPRGTPRRNTNESW

SEQ ID NO: 93928 - protein, 97 aa, Setaria italica
  Transcript Sequence Number=SeqID_27954
  Gene Ontology: Cellular component=membrane
  Homolog annotation: Hit_ID=B9RWP5; Match level="QueryCoverage=100%, HitCoverage=27%, E-value=2e-33, Identity=73%"; Hit description =Transmembrane protein TPARL, putative
  Pfam annotation: Domain name=UPF0016; Domain location=27-92; Score =58.7; E_value=2.2e-14; Accession=PF01169.11; Description =Uncharacterized protein family UPF0016
  Subcellular localization annotation: CTP_CleavageSite=19; ConfidenceScore=5.09e-01
CALAAGFFVLFKGQPSAVVSMLARSGFTAAFALIFVSEIGDKTFFIAALLAMQYQKALVLLGSMAALSLMTIVSVIIGRVFQSVPAQFQTTLPIGEY

SEQ ID NO: 93929 - protein, 62 aa, Setaria italica
  Transcript Sequence Number=SeqID_27955
  Gene Ontology: Cellular component=membrane
CVFKYSPIDHIDLSFFSKAFVSFCEFYEQVLLGSMAALSLMTIVSVIIGRVFQSVPAQFQTS

SEQ ID NO: 93930 - protein, 316 aa, Setaria italica
  misc_feature (79)..(79): Xaa can be any naturally occurring amino acid
  misc_feature (135)..(135): Xaa can be any naturally occurring amino acid
  Transcript Sequence Number=SeqID_27956
  Gene Ontology: Cellular component=membrane
  Homolog annotation: Hit_ID=B9RWP5; Match level="QueryCoverage=87%, HitCoverage=78%, E-value=3e-77, Identity=61%"; Hit description =Transmembrane protein TPARL, putative
  Pfam annotation: Domain name=UPF0016; Domain location=103-184; Score =63.4; E_value=8.5e-16; Accession=PF01169.11; Description =Uncharacterized protein family UPF0016
  Pfam annotation: Domain name=UPF0016; Domain location=234-308; Score =94.5; E_value=3.7e-25; Accession=PF01169.11; Description =Uncharacterized protein family UPF0016
  Pfam module annotation: Pfam domain module=UPF0016::UPF0016; Domain location=103-184::234-308
TARFVKYRLLSWMKPMRHDVRVQMSNVNVGAGAYEGDGATNHGEHMDNSATKDSNKPTKPLSGSSYLQSIGAVLLLCAXGSWFFVLFKGQPSAVVSMLARSGFTAAFALIFVSEIGDKTFFIAALLAMQYQKALXVLLGSMAALSLMTIVSVIIGRVFQSVPAQFQTTLPIGEYAAVALLAFFGFKSIKDALALPDSSSGNLEGNSESGELAEAEELVKEKVSKKLISPLEVVWKSFSLVFFAEWGDRSMLATIALGAAQSPLGVASGAIAGHLIATVFAILGGAFLAKYLSEKLVGLLGGVLFLLFAAATLFGVF

SEQ ID NO: 93931 - protein, 156 aa, Setaria italica
  Transcript Sequence Number=SeqID_27957
ENHVQTRPAPRFTLLGQHPNQTETGTARPVPHSLNSESYKDQVKSGSCQSSSYLFLHDAVQPVGCLATKPRQIQKQNSLNSSRMYITTHKICTAAIHMYSQCAAIQNRDLLVSSCTASRQSLRNQAAYWILERRNGIQRSQWLKIYCTGHTRICTL

SEQ ID NO: 93932 - protein, 312 aa, Setaria italica
  misc_feature (12)..(12): Xaa can be any naturally occurring amino acid
  misc_feature (260)..(260): Xaa can be any naturally occurring amino acid
  Transcript Sequence Number=SeqID_27958
  Homolog annotation: Hit_ID=B9SX25; Match level="QueryCoverage=98%, HitCoverage=50%, E-value=2e-80, Identity=46%"; Hit description=S -adenosylmethionine-dependent methyltransferase, putative
  Pfam annotation: Domain name=DUF248; Domain location=1-305; Score =154.2; E_value=3.9e-43; Accession=PF03141.8; Description=Putative methyltransferase
  Pfam annotation: Domain name=Methyltransf_11; Domain location=167 -263; Score=3.9; E_value=0.04; Accession=PF08241.4; Description =Methyltransferase domain
  Pfam module annotation: Pfam domain module=DUF248::Methyltransf_11; Domain location=1-305::167-263
PGGYWVSLGHPXSWKSAYNISNQATEDEDKQLTMDDMANKLNWTKLSENGTISVWRKPTCHLHCDQEAKFLGSPPLCREDPDSAWYANISMCISCLPRAELVNFCAGGVIEKWPKRLDAVPPRITSGEMKWLSIQTYKQDSLIWEKRVNFYVTYLKYLSNGTNRNVMDMSAGFGGFAAAMSKYPVWVMNVVPTNVTDNTLGVIYERGLIGTYTDWCEAFSTYPRTYDLIHANGIFSSHIHKCAIIDILVEMDRILRPGGXAAIVRDRADVVHKVKKDADRLRWHSRIVDTENGPLDPEKLLIVDNSLPLPGS

SEQ ID NO: 93933 - protein, 94 aa, Setaria italica
  Transcript Sequence Number=SeqID_27959
  Gene Ontology: Mol. function=hydrolase activity, hydrolyzing O -glycosyl compounds; Biological process=carbohydrate metabolic process
  Homolog annotation: Hit_ID=Q5Z791; Match level="QueryCoverage=98%, HitCoverage=24%, E-value=2e-30, Identity=74%"; Hit description =Putative beta-1,3-glucanase
MAFTLLSRSPRLVICALLCIFLFSEVGVPRRASALGINYGQVGNNLPSPPHVVQLLTSLRIGKVRIYDVNPQVLSAFAGTGIELIVTVPDDLVP

SEQ ID NO: 93934 - protein, 50 aa, Setaria italica
  misc_feature (19)..(19): Xaa can be any naturally occurring amino acid
  Transcript Sequence Number=SeqID_27960
  Gene Ontology: Mol. function=hydrogen ion transporting ATP synthase activity, rotational mechanism; Cellular component=proton -transporting two-sector ATPase complex; Biological process=ATP synthesis coupled proton transport
  Homolog annotation: Hit_ID=B3TLP5; Match level="QueryCoverage=100%, HitCoverage=29%, E-value=4e-17, Identity=82%"; Hit description =Mitochondrial F0 ATP synthase D chain
RKSERIEKEIAEMKEMRKXISTMTADEYFAKHPELKQKFDDEIRNDYWGY

SEQ ID NO: 93935 - protein, 119 aa, Setaria italica
  Transcript Sequence Number=SeqID_27961
  Gene Ontology: Mol. function=hydrolase activity, hydrolyzing O -glycosyl compounds; Cellular component=extracellular region; Biological process=cell wall organization and biogenesis
  Homolog annotation: Hit_ID=Q6YXT7; Match level="QueryCoverage=100%, HitCoverage=22%, E-value=4e-41, Identity=68%"; Hit description =Endoglucanase 19
  Pfam annotation: Domain name=Glyco_hydro_9; Domain location=1-119; Score=-249.1; E_value=0.0035; Accession=PF00759.11; Description =Glycosyl hydrolase family 9
TTTMLAWSVADFGKFMGAELPHARAAVRWGADYLLKAATSTPDTLYVQVGDPNQDHRCWERPEDMDTPRSVYAVTKDTPGSDVAAETAAALAASAVAFRRADPAYSSRLLHAAMRAFEL

SEQ ID NO: 93936 - protein, 42 aa, Setaria italica
  Transcript Sequence Number=SeqID_27962
AKDPCKLFEDMAFYQGKLYALANDENLLIVSISQDPTTGDPQ

SEQ ID NO: 93937 - protein, 145 aa, Setaria italica
  misc_feature (132)..(132): Xaa can be any naturally occurring amino acid
  Transcript Sequence Number=SeqID_27963
LSQQESKPLEHNAYSPAGLVNGLATSNSMFTPENSQPGGTINDIVPDLTGDLFTNFNNLLFAQGCQQGNPVHHYYYPMPPLPPPQYQNMRPSNGLGRKKSYGYAGMNGAIPSPPYQPGYVVWRPVYQTDDHXLTQNHGTGTYFLI

SEQ ID NO: 93938 - protein, 68 aa, Setaria italica
  Transcript Sequence Number=SeqID_27964
YALTTLVFKVESMLVQLEMYSFSLMYHIHPVDLALSFQSLQWLTPNCKIYRNAQPYSLKDSGDFPPLP

SEQ ID NO: 93939 - protein, 152 aa, Setaria italica
  misc_feature (9)..(9): Xaa can be any naturally occurring amino acid
  misc_feature (59)..(59): Xaa can be any naturally occurring amino acid
  Transcript Sequence Number=SeqID_27965
  Gene Ontology: Mol. function=transferase activity
  Homolog annotation: Hit_ID=Q2RBE2; Match level="QueryCoverage=78%, HitCoverage=14%, E-value=3e-41, Identity=73%"; Hit description =Nucleotidyltransferase family protein, putative, expressed
LSSLPDLVXDPPDTHDDGFLPREEFLKECAEAFSVPNKNSEKDAQVFSRKFFNIVDPLXKQSNNLGRSVSKGNFYRIRSAFDFGARKLGKILQVPACSTVNEVNQFFRNTLKRNRTGLRLDVLVSSSDDGLLSDHATNDSLSLGLNVESIKG

SEQ ID NO: 93940 - protein, 706 aa, Setaria italica
  misc_feature (14)..(14): Xaa can be any naturally occurring amino acid
  misc_feature (145)..(145): Xaa can be any naturally occurring amino acid
  misc_feature (454)..(454): Xaa can be any naturally occurring amino acid
  Transcript Sequence Number=SeqID_27966
  Gene Ontology: Mol. function=transferase activity
  Homolog annotation: Hit_ID=Q2RBE2; Match level="QueryCoverage=99%, HitCoverage=80%, E-value=0.0, Identity=52%"; Hit description =Nucleotidyltransferase family protein, putative, expressed
  Pfam annotation: Domain name=PAP_assoc; Domain location=65-155; Score= 12.4; E_value=0.0036; Accession=PF03828.11; Description=PAP25A associated domain
LFFFEKVDQNFGKXNLFKRSIMLIKDWCYYESRILGAHHGLISTYALETLVLYIFHIFHKSLDGPLAVLYRFLDYYSKFDWDNKGISLFGPVSLSSLPDLVTDPPDTHDDGFLPREEFLKECAEAFSVPPKNSEKDAQVFSRKFXNIVDPLKQSNNLGRSVSKGNFYRIRSAFDFGARKLGKVLQVPACSTVNEVNQFFRNTLKRNRTGLRLDVLVSSSDDGLLSDHATNDSLSLGLNVESIKGSSPLYSNSCGDLSSQFSHIDTSDSNNHGSIKQKQCNSVAGHKEVVSVSGGLIGTNATDYATTDSGTERNGGDFYEASQITSETCTLPSGRRCAPHQFYQSENGKDVDVRDGTDLPHHGMPANQFTDKSYHSFEAPLEHNAYSPAGLVNGLATSNSMFTPENSQPGGTINDIVPDLTGDLFTNFNNLLFAQGCQQGNPVHHYYYPMPPLEXSGTMSLMVPPPQYQNMRPSNGLGRKKSYGYAGMNGAIPSPPYQPGYVVWRPVYQTDDHIPMRGHGTGTYFPDPNLRKDRPPVGRGERGRNHFSSNNYQKFHHHVRTDMPIDMVPLQESRHDVPLQIYVPGANDHAIPSPMNMPMPSPSSQSPRDPLKVPAHSPSSQVRRDNFHGNGFMVPQDSKLEFGTLGTLPLEVTSKDHANRSDSASSNQVSESVSRMPATKNTVTGLNGMRNAQPYSLKDSGDFPPLP

SEQ ID NO: 93941 - protein, 79 aa, Setaria italica
  Transcript Sequence Number=SeqID_27967
  Subcellular localization annotation: CTP_CleavageSite=45; ConfidenceScore=5.46e-01
TSPLPSLSTFSLFPSSSQEDLGFARSAFVLLGPSPNPAAPPPPSRAPGRVVVGLDRLRCALCVLSPLPWVPLACIPQHG

SEQ ID NO: 93942 - protein, 72 aa, Setaria italica
  Transcript Sequence Number=SeqID_27968
EDADPPEPRRRHRQVHYHLIHSCLFLLLDDLHVIFSIHRLATPLLPLYMSACLQQQWWHCRIERYPTTTCNG

SEQ ID NO: 93943 - protein, 118 aa, Setaria italica
  misc_feature (54)..(54): Xaa can be any naturally occurring amino acid
  Transcript Sequence Number=SeqID_27969
  Gene Ontology: Mol. function=nucleic acid binding
VSPAVSLKEREAAYRAARERIFSGDDAKGNGRSYAKCRQVPVVAQRMIAHALGXQKVQNSTETIASTAGRGKQLPNRPNIPTRSRNNYYPVAPDNREENNVRNGKPNSASRNSYQTAS

SEQ ID NO: 93944 - protein, 111 aa, Setaria italica
  misc_feature (26)..(26): Xaa can be any naturally occurring amino acid
  Transcript Sequence Number=SeqID_27970
  Gene Ontology: Mol. function=phosphotransferase activity, alcohol group as acceptor; Cellular component=chromosome; Biological process= response to DNA damage stimulus
  Homolog annotation: Hit_ID=Q5Z987; Match level="QueryCoverage=98%, HitCoverage=3%, E-value=1e-42, Identity=77%"; Hit description =Serine/threonine-protein kinase ATR
MEMQGGESEVCIQAIFTLLDNLGQWXVDDLKQEIALSQPSHATAGKHGGKLKDGTYSGYEQDQMLVQCSYVAGLLAAIPKVTLARASLRCQAHARALMYFESHVQENSGSS

SEQ ID NO: 93945 - protein, 285 aa, Setaria italica
  Transcript Sequence Number=SeqID_27971
  Gene Ontology: Mol. function=hydrolase activity, acting on ester bonds; Cellular component=vacuole; Biological process=metabolic process
  Homolog annotation: Hit_ID=O81020; Match level="QueryCoverage=86%, HitCoverage=48%, E-value=2e-99, Identity=67%"; Hit description =Phosphatidylglycerol specific phospholipase C
  Pfam annotation: Domain name=Phosphoesterase; Domain location=40-285; Score=144.5; E_value=3.4e-40; Accession=PF04185.6; Description =Phosphoesterase family
MAGRTCSARRRSPSLGTAAVLLLLLLLAAWPPRLHAAGPIKTVVVVVMENRSFDHMLGWMKRLNPEIDGVTGAEWNPANTTDPGAGRVYFGEGAQYVDPDPGHSFQEIRQQIFGSDDASGPARMDGFVQQARSLGGNMTDAVMHGFAPDSVAVYRELVAQFAVCDRWFASVPSSTQPNRLFVHSGTSGGATSNNPQLLAKGYPQRTIFDNIHDAGLSFGVYFQDVPAVLFYRNLRKLKYLLDFHPFHPTFRDHARRGSLPNYAVIEQHYLDSKLDPANDDHPSHD

SEQ ID NO: 93946 - protein, 89 aa, Setaria italica
  Transcript Sequence Number=SeqID_27972
LYKDLVRCQPRPEIHFNFTRRLPWKEYPIVQFTMRPPLYKPINTRILSTQKHKRHTCAATHRSRAHPHRPPITAKMRHGRCRLSHAIKP

SEQ ID NO: 93947 - protein, 88 aa, Setaria italica
  Transcript Sequence Number=SeqID_27973
AKMEEAGVTFKRKAAPRDVFDASFRYGVLHMPAFVVDEGAKVLLANLVAFEQGGGRAARQLDGGNLVTGLVALVGSLVNSRRDLEVLR

SEQ ID NO: 93948 - protein, 91 aa, Setaria italica
  Transcript Sequence Number=SeqID_27974
  Gene Ontology: Mol. function=hydrolase activity, hydrolyzing O -glycosyl compounds; Cellular component=extracellular region; Biological process=carbohydrate metabolic process
  Homolog annotation: Hit_ID=Q01L59; Match level="QueryCoverage=67%, HitCoverage=20%, E-value=1e-20, Identity=78%"; Hit description =OSIGBa0111I14.7 protein
MGKMASHLALAAVYCAVVLLSSLGPAAATGKTGRITVYWGQTASEGSLHKACQSNLYSTVILSFLTHFGGGRYKLDLTGHSWSAVGPDVKY

SEQ ID NO: 93949 - protein, 98 aa, Setaria italica
  Transcript Sequence Number=SeqID_27975
FFQIMTNPVHQFLESATGLNAEQAFPAIISTVTILLQSYPLLVFLILPSNFFPLLFLSSRLSSTQTSSPFMLFFFFPSSIFPFLFFLLPIPFTSISFL

SEQ ID NO: 93950 - protein, 300 aa, Setaria italica
  Transcript Sequence Number=SeqID_27976
  Gene Ontology: Mol. function=structural molecule activity; Cellular component=chloroplast
  Homolog annotation: Hit_ID=B6TD12; Match level="QueryCoverage=100%, HitCoverage=78%, E-value=1e-110, Identity=71%"; Hit description =Plastid-lipid associated protein 3
  Pfam annotation: Domain name=PAP_fibrillin; Domain location=73-290; Score=370.4; E_value=3.3e-108; Accession=PF04755.4; Description=PAP _fibrillin
DEWGGDTAEGNSRPIVVDEWGEPAEPEPEPEPEPPSAADPPSPSADNEWGKDPSAPAPAPAAEEVDEQAERREDLKRCLVDTVYGSELGFRASTEVRGEVVELVTQLEAVNPTPAPVEAPDLLDGNWILIYTAYSELLPILAAGATPFVKVKQISQEIDSKSMTIVNASTLTTPFASFSFSATASFEVQSPSRIEVQFKEGSFQPPAISSTVDLPEQVDIFGQKISLGPVQQVLNPLQQTFASIAGSISGQPPLKVQIPGNNRGRSWLLTTYLDKDFRISRGDGGLFILAKEGSPFLDQL

SEQ ID NO: 93951 - protein, 190 aa, Setaria italica
  Transcript Sequence Number=SeqID_27977
  Gene Ontology: Mol. function=structural constituent of cell wall
PPPHIHPPPTPVPPPPSPPHHIVIIVVFVSLGGLLLLGCLAAFFCWHKKKGRKRETKAEVLNYSDHVHVHKETMSGPHGADVVKLSIDEDIKFQEAVKKQEAIGESSSAAAAGKTAHHLPWTWHKKHESKEEKKAELINVTKHKHIDEKIMPGPLGEKIEVLSEDEDIRFEEAGQKEEEFEKSKAHITKS

SEQ ID NO: 93952 - protein, 105 aa, Setaria italica
  Transcript Sequence Number=SeqID_27978
  Subcellular localization annotation: CTP_CleavageSite=43; ConfidenceScore=5.28e-01
LHRHHASAGAPRRRHPLPPRWRRGRPRRRRCRRRPQPPPRPLSAALTSPDPPRKWEYHPPKSWFRHYRRRAPSRPWRCRLLPPFRPSRAGTRRSRSTPASTPAKP

SEQ ID NO: 93953 - protein, 130 aa, Setaria italica
  Transcript Sequence Number=SeqID_27979
  Gene Ontology: Mol. function=oxidoreductase activity; Biological process=oxidation reduction
  Homolog annotation: Hit_ID=B6TF29; Match level="QueryCoverage=100%, HitCoverage=35%, E-value=5e-30, Identity=58%"; Hit description =Gibberellin 20 oxidase 2
MSLVAAPMAIVDLANTQLQQQATEEAVDQEELSYSSLMKGVRHLSDSGITRLPDSYVLPAPDRPRSSSGGGRVRLPVVDLACLRDPSRHAGALATLDAACREYGFFQVVNHGVDGGVISGMLDVARRFFE

SEQ ID NO: 93954 - protein, 164 aa, Setaria italica
  misc_feature (9)..(9): Xaa can be any naturally occurring amino acid
  misc_feature (101)..(101): Xaa can be any naturally occurring amino acid
  Transcript Sequence Number=SeqID_27980
  Homolog annotation: Hit_ID=B8YIE8; Match level="QueryCoverage=98%, HitCoverage=10%, E-value=4e-20, Identity=36%"; Hit description=DNA glycosylase/lyase 701
LSLSSGIPXNFVDGISSASYQQLGSNFDLERSLTGNNAISEIECQRLQTAAINDYGFAKPGVPSSSAMPFILTVDPQQLNLRNEPNVSSTSSNSPSDSASXKIKNGTSPLFMPFDSYVPEWSGNRTAGTTLNSTKTSTELPGEITAETARKEDEYTLKSGLTYL

SEQ ID NO: 93955 - protein, 755 aa, Setaria italica
  misc_feature (126)..(126): Xaa can be any naturally occurring amino acid
  misc_feature (154)..(154): Xaa can be any naturally occurring amino acid
  misc_feature (589)..(589): Xaa can be any naturally occurring amino acid
  Transcript Sequence Number=SeqID_27981
  Gene Ontology: Mol. function=4 iron, 4 sulfur cluster binding; Cellular component=nucleus; Biological process=base-excision repair
  Homolog annotation: Hit_ID=B8YIE8; Match level="QueryCoverage=98%, HitCoverage=42%, E-value=0.0, Identity=63%"; Hit description=DNA glycosylase/lyase 701
  Pfam annotation: Domain name=EndIII_4Fe-2S; Domain location=395-411; Score=20.7; E_value=0.0061; Accession=PF10576.1; Description=Iron -sulfur binding domain of endonucle
  Pfam annotation: Domain name=HhH-GPD; Domain location=225-360; Score =29.1; E_value=1.8e-05; Accession=PF00730.17; Description=HhH-GPD superfamily base excision DNA repair protein
  Pfam module annotation: Pfam domain module=EndIII_4Fe-2S::HhH-GPD; Domain location=395-411::225-360
SYNPTQSVTLETIQSRLSLSSGIPNKILVDGISSASYQQLGSNFDLERSLTGNNAISEIECQRLQTAAINDYGFAKPGVPSSSAMPFILTVDPQQLNLRNEPNVSSTSSNSPSDSASTGNRTAGTXHSGNIGIKWHEKRTGTRVEVVIGQLGTXLNSTKTSTELPGEITSETAGLEDEYTLKSGLTSCNEVPDSAQASRPKKTRTTSKRNTENFDWDKLRRGACSEGHMKKRSRERRDSVDWEAVRCADVQRISHAIRERGMNNILAERIQNFLNRLVRDHGSIDLEWLRDIPPDSAKDYLLSVRGLGLKSVECVRLLTLHHLAFPVDTNVGRICVRLGWVPIQPLPESLQLHLLELYPVLETIQKYLWPRLCKLDQQTLYELHYQMITFGKVFCTKNKPNCNACPMRSECKHFASAFASARLALPAPQEKSIVRSRNQFGSQNSSMYTMDSTHLPRLEGSIHAREFRPKNSEPIIEEPASPREEESPETMENDIEDFYEDGEIPTIKLNMEAFAQNLESCIKESNKELQSDDIAKALVAISTEEASIPVPKLKNVHRLRTEHYVYELPDSHPLLQQLDLDQREPDDPXPYLLAIWTPDEINEISKAPKPCCDPQMEGSLCNNEMCHNCTAEQENQSRYVRGTILVPCRTAMRGSFPLNGTYFQVNEVFADHSSSHNPIHVEREQLWNLQRRMVFFGTSVPTIFKGLTTEEIQQCFWRGFVCVRGFDMETRAPRPLCPHLHVVARPKSRKTAATG

SEQ ID NO: 93956 - protein, 87 aa, Setaria italica
  Transcript Sequence Number=SeqID_27982
  Homolog annotation: Hit_ID=B6TC53; Match level="QueryCoverage=100%, HitCoverage=31%, E-value=1e-23, Identity=71%"; Hit description =Imidazoleglycerol-phosphate dehydratase
  Subcellular localization annotation: CTP_CleavageSite=54; ConfidenceScore=5.85e-01
MTTPQFVSTSPARLSYTPTSPVPKSSGKGCGRVPAFPARPRGFSLRLRDSSPVMAAAGVGGNGSPTAPGDSTGSSRIGEVKRVTKET

SEQ ID NO: 93957 - protein, 219 aa, Setaria italica
  Transcript Sequence Number=SeqID_27983
  Gene Ontology: Mol. function=imidazoleglycerol-phosphate dehydratase activity; Cellular component=cytoplasm; Biological process=amino acid biosynthetic process
  Homolog annotation: Hit_ID=B6TC53; Match level="QueryCoverage=100%, HitCoverage=80%, E-value=1e-118, Identity=95%"; Hit description =Imidazoleglycerol-phosphate dehydratase
  Pfam annotation: Domain name=IGPD; Domain location=52-196; Score =348.4; E_value=1.4e-101; Accession=PF00475.10; Description =Imidazoleglycerol-phosphate dehydratase
MAAAGVGGNGSPTAPGDSTGSSRIGEVKRVTKETNVHVKINLDGTGVADCSTGIPFLDHMLDQLASHGLFDVYVKATGDTHIDDHHSNEDIALAIGTALLQSLGDRKGINRFGHFTAPLDEAAVEVILDLSGRPHLSCGLDIPTQRVGTYDTQLVEHFFQSLVNTSGMTLHIRQLAGKNSHHIIEACFKAFARALRQATEYDLRRHGTVPSSKGVLSRS

SEQ ID NO: 93958 - protein, 95 aa, Setaria italica
  Transcript Sequence Number=SeqID_27984
  Gene Ontology: Mol. function=imidazoleglycerol-phosphate dehydratase activity; Cellular component=cytoplasm; Biological process=amino acid biosynthetic process
  Homolog annotation: Hit_ID=B6TC53; Match level="QueryCoverage=53%, HitCoverage=18%, E-value=2e-20, Identity=96%"; Hit description =Imidazoleglycerol-phosphate dehydratase
  Pfam annotation: Domain name=IGPD; Domain location=1-72; Score=-70.9; E_value=0.0015; Accession=PF00475.10; Description=Imidazoleglycerol -phosphate dehydratase
FFSLLKVNLLNLSYLILFLSFVKVVGLVGKLNGSLGLVLLLLVLTLHIRQLAGKNSHHIIEACFKAFARALRQATEYDLRRHGTVPSSKGVLSRS

SEQ ID NO: 93959 - protein, 185 aa, Setaria italica
  misc_feature (26)..(26): Xaa can be any naturally occurring amino acid
  Transcript Sequence Number=SeqID_27985
  Subcellular localization annotation: CTP_CleavageSite=66; ConfidenceScore=5.28e-01
LGGVRDRGGGQSPTCATYAWDVDTVXPTASVSAGSAAFTSAPNVSALVSFTEPCPGNGGFVCNDTYCNLVVYGPGRVEPSTLQELRPGLLYSVAVAISPEAQYGRIILLMGRGFCTDAAGHPFTRTANSTFTLHFDRRDDSMNITATVPEKMLQIQGVTRLVQATNDEKDLRVYLSFAQPVLNSS

SEQ ID NO: 93960 - protein, 37 aa, Setaria italica
  Transcript Sequence Number=SeqID_27986
  Gene Ontology: Mol. function=Rho guanyl-nucleotide exchange factor activity
  Homolog annotation: Hit_ID=Q01H97; Match level="QueryCoverage=94%, HitCoverage=7%, E-value=3e-10, Identity=91%"; Hit description =B0103C08-B0602B01.6 protein
DKAILESYSRVLESLAYNIVTCIDDVLFADEAARKIA

SEQ ID NO: 93961 - protein, 192 aa, Setaria italica
  Transcript Sequence Number=SeqID_27987
  Gene Ontology: Mol. function=structural constituent of ribosome; Cellular component=ribonucleoprotein complex; Biological process =translation
  Homolog annotation: Hit_ID=Q8LJU5; Match level="QueryCoverage=100%, HitCoverage=100%, E-value=5e-99, Identity=89%"; Hit description=40S ribosomal protein S7
  Pfam annotation: Domain name=Ribosomal_S7e; Domain location=6-191; Score=292.6; E_value=8.8e-85; Accession=PF01251.10; Description =Ribosomal protein S7e
MFTARRKIQKDKGVEPTEFEDTVAQAFFDLENGNQELKSDLKDLYINGAVQMDVPGNRKAVIIHVPYMLQKSYKKIHVRLIRELEKKFSGKDVVLIATRRIVRPPKKGSAVVRPRSRTLTTVHDGILEDVVYPAEIVGKRVRYHLDGAKVMKVFLDPKERTNTEYKLDTFSTVYRRLCGKEVVFDYPVAESA

SEQ ID NO: 93962 - protein, 130 aa, Setaria italica
  Transcript Sequence Number=SeqID_27988
  Gene Ontology: Mol. function=nucleotide binding; Biological process =defense response
  Homolog annotation: Hit_ID=Q84KC6; Match level="QueryCoverage=93%, HitCoverage=10%, E-value=7e-28, Identity=49%"; Hit description=NBS -LRR disease resistance protein homologue
FPKGHNIAEDDLIHQWIALGFIKPSKGKDYTRQLLGMSFLQVSKLPKTSGDRMEQYTMHDLVHDLATLVMGDELIVSNVASKNNKAHSQKYCRYASFTKYDHTTRLSNVLPSKVRALHFSDNGKLDLSCG

SEQ ID NO: 93963 - protein, 81 aa, Setaria italica
  Transcript Sequence Number=SeqID_27989
MAMGAAAARAAAADAVVTFLWVLCASALGATTAAVTSLLGVAQEEGGGGHYALLVTASLLAALLFAFDLLCGALGGASFNP

SEQ ID NO: 93964 - protein, 103 aa, Setaria italica
  Transcript Sequence Number=SeqID_27990
GRGGGGAAAELMAAGGGARPGLWRTPTPYLFLGFALMMGLIVVALLVLICTRRKHSPSRREAEKAASLHGVLVPLDREPPRVVVIMAGDDLPSFLASAKPLAL

SEQ ID NO: 93965 - protein, 51 aa, Setaria italica
  Transcript Sequence Number=SeqID_27991
  Gene Ontology: Mol. function=hydroperoxide dehydratase activity; Cellular component=chloroplast; Biological process=fatty acid biosynthetic process
  Homolog annotation: Hit_ID=B6TT18; Match level="QueryCoverage=100%, HitCoverage=9%, E-value=3e-21, Identity=100%"; Hit description =Cytochrome P450 CYP74A18
HGSTVVRLNMPPGPFVARDPRVVALLDAASFPVLFDTSLVDKTDLFTGTFM

SEQ ID NO: 93966 - protein, 73 aa, Setaria italica
  Transcript Sequence Number=SeqID_27992
MRKVCANLDREDGLDTVLEVPVPESHHEPSARGGRRRRRTVTAWVRSHMDQRHRRDGAPPSRADVQLMLGVIG

SEQ ID NO: 93967 - protein, 80 aa, Setaria italica
  Transcript Sequence Number=SeqID_27993
GRRFLSTLWVSKYTRGINNDWPQHEAWLVQSRPSHCDDRSGEVKFPAVTDRPMRCNPEGKITDKMRRRVVTTTSSRSFEA

SEQ ID NO: 93968 - protein, 323 aa, Setaria italica
  Transcript Sequence Number=SeqID_27994
  Gene Ontology: Mol. function=transferase activity, transferring nitrogenous groups; Cellular component=mitochondrial matrix; Biological process=biosynthetic process
  Homolog annotation: Hit_ID=Q94HC6; Match level="QueryCoverage=96%, HitCoverage=65%, E-value=1e-134, Identity=75%"; Hit description =Putative alanine aminotransferase 2
  Pfam annotation: Domain name=Aminotran_1_2; Domain location=1-310; Score=-61.1; E_value=0.00038; Accession=PF00155.13; Description =Aminotransferase class I and II
KVIRSTITTYLIPSHYLYTSSMVLQGATLVPYYLDESRGWGVRMSDLKKQLDGARSKGVNVRGLVVINPGNPTGHVLVEENQREIVEFCRKEDLVLLADEVYQENIYTADKKFKSFKKIARSMGFSEGDISLVSFHSVSNGYYGECGRRGGYMEVTGFNSEVKKQVYKVASLSSCSNISGQILMSLVMNPPMVEDESYTSYQAERNGILSTFSRCAESMACALNCLEGVTCCKAEGAMFVFPSVHLPKRAIAAAEERNTEPDVFYALRLLENTGIVVAPGSVFGQVHGTWHFRCTILPKEEKIPLFISRFTAFHEGFMEEFRN

SEQ ID NO: 93969 - protein, 118 aa, Setaria italica
  misc_feature (98)..(98): Xaa can be any naturally occurring amino acid
  Transcript Sequence Number=SeqID_27995
  Gene Ontology: Cellular component=plasma membrane
  Homolog annotation: Hit_ID=B6SQB7; Match level="QueryCoverage=97%, HitCoverage=26%, E-value=1e-31, Identity=64%"; Hit description =Nucleotide binding protein
  Pfam annotation: Domain name=WD40; Domain location=49-86; Score=31.8; E_value=2.8e-06; Accession=PF00400.24; Description=WD domain, G-beta repeat
  Pfam annotation: Domain name=WD40; Domain location=7-45; Score=27.5; E_value=5.5e-05; Accession=PF00400.24; Description=WD domain, G-beta repeat
  Pfam module annotation: Pfam domain module=WD40::WD40; Domain location=49-86::7-45
NHVAVRRHHRRLWIEHADTVSGVAASADGRLLFSVSWDKTLKVWALPSLRCLQSLPAHDDAVNAVAVALDGTVYTASADKRVRVWAPRPAPDDKPPAXARGKKHRPAYHLVATLSPAH

SEQ ID NO: 93970 - protein, 90 aa, Setaria italica
  Transcript Sequence Number=SeqID_27996
  Gene Ontology: Mol. function=metal ion binding; Biological process =cobalamin biosynthetic process
  Homolog annotation: Hit_ID=B6T3E3; Match level="QueryCoverage=100%, HitCoverage=42%, E-value=4e-31, Identity=74%"; Hit description =Sirohydrochlorin ferrochelatase
  Subcellular localization annotation: CTP_CleavageSite=47; ConfidenceScore=5.63e-01
MHPASVSLQPFTATPASILIPRRAAARNSIDFTELRRAGRSSGNLVMSSMPNPASGSETSGREDFNVGDKDAVVIVDHGSRRQESNLMLN

SEQ ID NO: 93971 - protein, 77 aa, Setaria italica
  misc_feature (30)..(30): Xaa can be any naturally occurring amino acid
  Transcript Sequence Number=SeqID_27997
  Homolog annotation: Hit_ID=Q10BA3; Match level="QueryCoverage=81%, HitCoverage=14%, E-value=2e-16, Identity=66%"; Hit description =Protein kinase domain containing protein, expressed
QNLARFLGFFERSNDSLIVLGGYSTSSQMXKTAESCGNGLELTQRLNIAINVAHAITYLHEYKGMNSIRYMFFDQTV

SEQ ID NO: 93972 - protein, 87 aa, Setaria italica
  Transcript Sequence Number=SeqID_27998
  Gene Ontology: Mol. function=protein tyrosine kinase activity; Biological process=protein amino acid phosphorylation
  Homolog annotation: Hit_ID=B6TE55; Match level="QueryCoverage=95%, HitCoverage=18%, E-value=2e-20, Identity=65%"; Hit description =Receptor protein kinase TMK1
FRVAEHPIIHGGIRSSVVLLTDALEAKVTGFGLLGMAASASGSGTGSGSDATPAKGAAGYVDPEYLSTYQLTDKSDVYSFGVLLAEL

SEQ ID NO: 93973 - protein, 90 aa, Setaria italica
  Transcript Sequence Number=SeqID_27999
  Homolog annotation: Hit_ID=B6TT91; Match level="QueryCoverage=100%, HitCoverage=20%, E-value=8e-35, Identity=77%"; Hit description=BSD domain containing protein
  Pfam annotation: Domain name=BSD; Domain location=1-49; Score=33.4; E_ value=9.2e-07; Accession=PF03909.9; Description=BSD domain
QDHALAVESVAPELADLRIELCPSHMSEGCFWKIYFVLLHPKLMKEDADILSTPQILEARGKLSHNLRYQTKLQSSNEDTVPVPFSNVDG

SEQ ID NO: 93974 - protein, 172 aa, Setaria italica
  Transcript Sequence Number=SeqID_28000
  Gene Ontology: Mol. function=molecular_function; Cellular component =nucleus; Biological process=biological_process
  Homolog annotation: Hit_ID=Q6H899; Match level="QueryCoverage=99%, HitCoverage=22%, E-value=3e-79, Identity=82%"; Hit description =Nuclear protein ZAP-like
PRIHSMDDYFMIEVEKKLEDKEGSKSSGASKGRRQLTKKVIEYCYEPEMEETYRSSMLKAFKKTLDEGNFTFVIVDDRNLRVADFAQFWATAKHSGYEVYLLEAPYKDPTGCAARNVHGFTLDEIKKMATDWEEAPPLYLQLDIRSLFHDDNLHGHSIQEVDMDTEDIDDAI

SEQ ID NO: 93975 - protein, 297 aa, Setaria italica
  misc_feature (221)..(221): Xaa can be any naturally occurring amino acid
  Transcript Sequence Number=SeqID_28001
  Gene Ontology: Mol. function=molecular_function; Cellular component =nucleus; Biological process=biological_process
  Homolog annotation: Hit_ID=Q6H899; Match level="QueryCoverage=94%, HitCoverage=39%, E-value=1e-112, Identity=68%"; Hit description =Nuclear protein ZAP-like
  Subcellular localization annotation: CTP_CleavageSite=18; ConfidenceScore=5.36e-01
PPEPPFPSHRDYRAAPPRPAANSSLFPVLSGSPAMAVIPPSSRTLPQAQSMPNANCYDGHINDEGQGLIYRPLSEQHLIDGRSANAHHSLEDSKVTIINACDLFKQPHRASRPDHIVIILRGLPGSGKSYLAKALRDLEVENGANAPRIHSMDDYFMIEVEKKLEDKEGSKSSGASKGRRQLTKKVIEYCYEPEMEETYRSSMLKAFKKTLDEGNFTFVIXSGYEVYLLEAPYKDPTGCAARNVHGFTLDEIKKMATDWEEAPPLYLQLDIRSLFHDDNLHGHSIQEVDTFVIGMKL

SEQ ID NO: 93976 - protein, 192 aa, Setaria italica
  misc_feature (169)..(169): Xaa can be any naturally occurring amino acid
  Transcript Sequence Number=SeqID_28002
  Gene Ontology: Mol. function=hydrolase activity, acting on acid anhydrides, catalyzing transmembrane movement of substances; Cellular component=integral to membrane; Biological process =metabolic process
  Homolog annotation: Hit_ID=Q43002; Match level="QueryCoverage=97%, HitCoverage=19%, E-value=1e-98, Identity=95%"; Hit description =Plasma membrane H+-ATPase
  Pfam annotation: Domain name=E1-E2_ATPase; Domain location=2-176; Score=125.1; E_value=2.2e-34; Accession=PF00122.12; Description=E1 -E2 ATPase
AAILVPGDIVSIKLGDIIPADARLLDGDPLKIDQSALTGESLPVTKGPGDGVYSGSTVKQGEIEAVVIATGVHTFFGKAAHLVDSTNQVGHFQKVLTAIGNFCICSIAVGMFVEIIVMYPIQHRAYRPGIDNLLVLLIGGIPIAMPTVLSVTMAIGSHRLAQQGAITKXRMTAIEEMAGMDVLCSDKNWNLD

SEQ ID NO: 93977 - protein, 157 aa, Setaria italica
  misc_feature (117)..(117): Xaa can be any naturally occurring amino acid
  Transcript Sequence Number=SeqID_28003
  Gene Ontology: Mol. function=hydrolase activity, acting on acid anhydrides, catalyzing transmembrane movement of substances; Cellular component=integral to membrane; Biological process =metabolic process
  Homolog annotation: Hit_ID=Q43241; Match level="QueryCoverage=94%, HitCoverage=50%, E-value=2e-70, Identity=76%"; Hit description =Plasma-membrane H+ ATPase (Fragment)
  Pfam annotation: Domain name=E1-E2_ATPase; Domain location=1-154; Score=78.2; E_value=3e-20; Accession=PF00122.12; Description=E1-E2 ATPase
AALMARLAPKAKVLRDGRWTEEEAAILVPGDIVSIKLGDIIPADARLLDGDPLKIDQSALTGESLPVTKGPGDGVYSGSTVKQGEIEAVVIATGVHTFFGKAAHLVDSTNQVGHFQXFQHRAYRPGIDNLWCFSFGGIPIAMPTVLSVTMAIGSHRL

SEQ ID NO: 93978 - protein, 78 aa, Setaria italica
  Transcript Sequence Number=SeqID_28004
  Gene Ontology: Cellular component=membrane
  Homolog annotation: Hit_ID=Q01JQ1; Match level="QueryCoverage=100%, HitCoverage=26%, E-value=2e-17, Identity=57%"; Hit description =H0523F07.12 protein
TGAGIAKVIGTTVGFTGAIILALYQGPSLTKPQQPMELSTMGVGHGHGAHTWVTGSVALLAGAACWSFWFILQSRLGK

SEQ ID NO: 93979 - protein, 255 aa, Setaria italica
  misc_feature (122)..(122): Xaa can be any naturally occurring amino acid
  Transcript Sequence Number=SeqID_28005
  Gene Ontology: Mol. function=acid phosphatase activity; Cellular component=cytosol; Biological process=inositol metabolic process
  Homolog annotation: Hit_ID=A2Q2R2; Match level="QueryCoverage=99%, HitCoverage=25%, E-value=1e-94, Identity=66%"; Hit description =Histidine acid phosphatase
PAQPSDSVRCHERGTVGISRPSEELRCVIAVIRHGDRTPKQKVKLKVTEEKLLKLMLKYNGGKAHTEAKLKSALQLQDLLDATRILVPRARSGRESDSDVEVEHAEKLRQVRAVLEEGGHFXGIYRKVQLKPSNWVRIPKDNSQGEEEYPVEALMVLKYGGVLTHAGRKQAEELGRYFRNNMYPSEGPGLLRLHSTYRHDLKIYSSDEGRVQILTPILVSLVSKDSSMLDGLQDGTTYINEAKAQLHDIITSSKV

SEQ ID NO: 93980 - protein, 146 aa, Setaria italica
  Transcript Sequence Number=SeqID_28006
  Gene Ontology: Mol. function=ion channel activity; Cellular component= integral to membrane; Biological process=ion transport
  Homolog annotation: Hit_ID=Q69KL7; Match level="QueryCoverage=95%, HitCoverage=20%, E-value=9e-54, Identity=70%"; Hit description =Putative cyclic nucleotide and calmodulin-regulated ion channel
MKPAIPLHQKQAGLAASKLGVGTSKKHRAFVAGDEQWYKKIFDPSSDFILTWNRVFLVSCFAALFIDPLYFYVPKITYGSSVSCVGTDIHLAVIVTFLRSVADLLYVLHIIIKFRTAYINPSATLRVFGRGDLVTNPKEIAWKLFE

SEQ ID NO: 93981 - protein, 65 aa, Setaria italica
  Transcript Sequence Number=SeqID_28007
VFESESEGDLGKTGLSCMVRWWSLPVLLIGSLIVISKEALLPHSDVSSFSFLAIHIVCVLFIHLD

SEQ ID NO: 93982 - protein, 204 aa, Setaria italica
  misc_feature (36)..(37): Xaa can be any naturally occurring amino acid
  misc_feature (196)..(196): Xaa can be any naturally occurring amino acid
  Transcript Sequence Number=SeqID_28008
  Gene Ontology: Mol. function=metal ion binding; Cellular component =intracellular; Biological process=DNA repair
  Homolog annotation: Hit_ID=Q5TKH9; Match level="QueryCoverage=100%, HitCoverage=25%, E-value=6e-88, Identity=76%"; Hit description =Putative BRCT domain-containing protein
AEFNGGTGVIHSHKNCLEWAPDVYFKDDSVFNLTTXXARSRRIKCACCGIKGAALGCFDMSCRKSFHFTCAKLIPECRWDDENFVMLCPLHQSSKLPIETSESKKKSQRRLTPKGSAQVRPCQVYGNKWTWPSGSPQKWVLCCSALSPAEKGIVSEFAKIAGVPISTSWNPSVTHVIASTDLSGACKRTLKFLNGXSLNGKWVV

SEQ ID NO: 93983 - protein, 55 aa, Setaria italica
  Transcript Sequence Number=SeqID_28009
GRTRAHLCSILAIYFLKEISSKHIKQGHEGHYHQVYHSLPTTPLPLSATADASTT

SEQ ID NO: 93984 - protein, 216 aa, Setaria italica
  Transcript Sequence Number=SeqID_28010
  Gene Ontology: Mol. function=sequence-specific DNA binding; Cellular component=nucleus; Biological process=regulation of transcription, DNA-dependent
PCLQAAGAGGGVKEEGGLGNFSADSSTVTALDSCSNSFSGLADGDFPGEFCEPYDQLAELEWLSNYMGEGDDAFATEDLQKLKLISGGYSPAVNVPPAPLAPAAAASAVSAAQPGMFIPEAPVPAKARSKRSRAAPGNWSSRLLVLPPPPASPPSPASMAISPAESGVSAQAFPAKKPSKPSKKKDAPPAPQALPSSASAVQSAGSAASAEGRRCL

SEQ ID NO: 93985 - protein, 139 aa, Setaria italica
  misc_feature (25)..(25): Xaa can be any naturally occurring amino acid
  Transcript Sequence Number=SeqID_28011
QLASGCPIIIAQVGELTRNRNVDPXHVSIGPYHRINNPHLARDDEKLRSLGALLSAASAGMTLEVYRDELARLEGQARSCYAHTFEQIVSAEFVRMLLLDACYVLVRFGRVARRRRNGGGEAPSVGGDMMEAVAVVRDV

SEQ ID NO: 93986 - protein, 60 aa, Setaria italica
  Transcript Sequence Number=SeqID_28012
  Gene Ontology: Mol. function=ribonuclease H activity; Biological process=RNA metabolic process
  Homolog annotation: Hit_ID=Q53QG3; Match level="QueryCoverage=98%, HitCoverage=19%, E-value=1e-21, Identity=84%"; Hit description =Ribonuclease
RETDEVDEDATNNGSAKRQVKLSSLGFTGFKRKTEEIESSGKGRCKFFQARKLELVRKFQ

SEQ ID NO: 93987 - protein, 221 aa, Setaria italica
  misc_feature (17)..(17): Xaa can be any naturally occurring amino acid
  Transcript Sequence Number=SeqID_28013
  Gene Ontology: Mol. function=ribonuclease H activity; Cellular component=nucleus; Biological process=RNA metabolic process
  Homolog annotation: Hit_ID=Q53QG3; Match level="QueryCoverage=100%, HitCoverage=74%, E-value=1e-116, Identity=89%"; Hit description =Ribonuclease
  Pfam annotation: Domain name=RNase_HII; Domain location=1-150; Score =51.6; E_value=3.1e-12; Accession=PF01351.10; Description =Ribonuclease HII
EVDVICPKDLSAKMLKXSKVNLNEISHNSAMGLVRKVLDMGVLLAEVYIDTVGDPEKYRIKLTEKFPGIKFVVAKKADSLYPVVSGASIVAKVTRDRALRNWVFDETALNMHMKTGSGYPGDPDTKQWLEDHKHPVFGFPTLVRFSWGTCTPFFKDAVEVTWETDEIDEDATNNGSAKRQVKLSSLGFTGFKRKTEEIESSGKGRCKFFQARKLELVRKFQ

SEQ ID NO: 93988 - protein, 71 aa, Setaria italica
  Transcript Sequence Number=SeqID_28014
KICPKKKSKMYEMHYWRQIGPREIYEHKINCVSDLSSMICFLDGCLNVALGLFGFLLPQVMICMHYYAPNT

SEQ ID NO: 93989 - protein, 82 aa, Setaria italica
  Transcript Sequence Number=SeqID_28015
  Gene Ontology: Mol. function=double-stranded RNA binding; Cellular component=intracellular
  Homolog annotation: Hit_ID=B6TPY5; Match level="QueryCoverage=100%, HitCoverage=19%, E-value=3e-31, Identity=79%"; Hit description=BcpLH protein
  Pfam annotation: Domain name=dsrm; Domain location=36-81; Score=14.4; E_value=0.081; Accession=PF00035.17; Description=Double-stranded RNA binding motif
MDGGGAAPHDAATNISPAPNVAAAPTGIRVENCYVFKSRLQEYAQKAGLPTPEYHTLKEGPSHEPVFKSTVVVNNTKYDSLP

SEQ ID NO: 93990 - protein, 103 aa, Setaria italica
  Transcript Sequence Number=SeqID_28016
TNYVGSHAPICSFPEFTLNWKSQFFACRYTINIGRSLQLESTTTIYFMLIYLPWTYLHPAMCLIYFGLLVQKDLQFSKNTSLVRWLLQFTTLRCFLLYGSVSS

SEQ ID NO: 93991 - protein, 426 aa, Setaria italica
  Transcript Sequence Number=SeqID_28017
  Gene Ontology: Mol. function=double-stranded RNA binding; Cellular component=intracellular
  Homolog annotation: Hit_ID=B6TPY5; Match level="QueryCoverage=99%, HitCoverage=93%, E-value=1e-128, Identity=58%"; Hit description =BcpLH protein
  Pfam annotation: Domain name=dsrm; Domain location=11-77; Score=68.6; E_value=2.4e-17; Accession=PF00035.17; Description=Double-stranded RNA binding motif
  Pfam annotation: Domain name=dsrm; Domain location=98-162; Score =61.2; E_value=3.9e-15; Accession=PF00035.17; Description=Double -stranded RNA binding motif
  Pfam module annotation: Pfam domain module=dsrm::dsrm; Domain location=11-77::98-162
FGTGVENCYVFKSRLQEYAQKAGLPTPEYHTLKEGPSHEPIFKSTVVVNNTKYDSLPGFFSRKAAEQSAAEVALMEIVKSVPATEAKSIPAVQETGLCKNLLQEYAQKMNYAIPSYICTKQASGVAPFICTVEIGGIQYIGAAARTKKEAEIKAARTALLAIQGQSEGCANGATKYIVVPGQREVKETDKKPTETPKSLKVKKSGGRKKWNKRKFMRKTDQIVDAEKDGTREVGDVHDSDVPMQATIITEEPSRDSIMLHLDGEARRVELELLRGTATQQPDEEAISVKQGLAMLLHSEEAIRVEHDLSRDTAMVESNKEVVMLQSDEEARMIELEAPRDPATVQPNEEARSVEQEPLNIAEVVKPNMEARSAEQESASAYVALQFNGSATDAKEELPSNTAMMQREETETIKQEAPQSGELVQPN

SEQ ID NO: 93992 - protein, 84 aa, Setaria italica
  Transcript Sequence Number=SeqID_28018
  Gene Ontology: Mol. function=peptidase activity; Cellular component =nucleus
  Subcellular localization annotation: CTP_CleavageSite=27; ConfidenceScore=5.10e-01
EAMKIASKENGRTRRKGTRGKRPQQINNSTKSCSCRQRRIASCLSEVVFACRLQLLIGASPVCYGVPTIIRKKVTTDSATGDER

SEQ ID NO: 93993 - protein, 294 aa, Setaria italica
  misc_feature (41)..(41): Xaa can be any naturally occurring amino acid
  misc_feature (72)..(72): Xaa can be any naturally occurring amino acid
  misc_feature (230)..(230): Xaa can be any naturally occurring amino acid
  misc_feature (274)..(274): Xaa can be any naturally occurring amino acid
  Transcript Sequence Number=SeqID_28019
  Gene Ontology: Mol. function=DNA-directed DNA polymerase activity; Cellular component=nucleus; Biological process=DNA replication
  Homolog annotation: Hit_ID=B9RMM9; Match level="QueryCoverage=100%, HitCoverage=46%, E-value=1e-74, Identity=49%"; Hit description=Alpha DNA polymerase, putative
MEAEIRAELESSGFSIGGAGPEDAAQILSTLLTYCINYKMXPADLVSNWEVYYLNRQLDGLKLERSYLDGFXAPSKNEVKERIIEEEADLHIYSSNDVDMLLNNSHADEAAFLETPGSKQEKTPGEPFNSELTLTSDRPSSSRVAKTNCDRITPFATRVNKFTQQYVLNADNAASMPSTHEAETTDDEVIKRIQPSQRCSLQVQRSQPEPGCRFMYDRMEDRFNYLEDWXVKSATLFSASGFCGEPADATLASEEKMFAVGMVTCDGEGRLNEXSILLQGSVEHSEGQRVRLDL

SEQ ID NO: 93994 - protein, 281 aa, Setaria italica
  misc_feature (7)..(7): Xaa can be any naturally occurring amino acid
  Transcript Sequence Number=SeqID_28020
  Gene Ontology: Mol. function=protein serine/threonine kinase activity; Biological process=protein amino acid phosphorylation
  Homolog annotation: Hit_ID=B6SVD4; Match level="QueryCoverage=89%, HitCoverage=37%, E-value=2e-53, Identity=48%"; Hit description =Protein kinase
  Pfam annotation: Domain name=DUF26; Domain location=36-88; Score =72.4; E_value=1.7e-18; Accession=PF01657.9; Description=Domain of unknown function DUF26
  Pfam annotation: Domain name=Pkinase_Tyr; Domain location=197-281; Score=-176.2; E_value=0.051; Accession=PF07714.9; Description =Protein tyrosine kinase
  Pfam module annotation: Pfam domain module=DUF26::Pkinase_Tyr; Domain location=36-88::197-281
VGTLFGXMAMYAAYNSSAARMFASAAMYVNPQLPTVYGFVQCTPDLSRGQCWDCFQDLQNLNRRWYDGREGGRILGVRCSFRYEAYHFFAGMPEVRIGLEGDPSTSSTPRSNGSNHKKVVIVALIVSITAFCAILAAGLFIIRTHRQRAEKRKQQLQAQSRNSSATEEALKLWRVEESSTEFTLYDFAELAAATGDFSDENLLGRGGFGPVYKGKLADGTEIAVKRLAAHSGQGLEEFKNEIQLIAKLQHTNLVRLVGCCVQDEEKLLVYEYMRNRSLDCF

SEQ ID NO: 93995 - protein, 84 aa, Setaria italica
  Transcript Sequence Number=SeqID_28021
  Gene Ontology: Mol. function=inositol or phosphatidylinositol phosphatase activity
MGEHRKIILPRLVTSKLLHRQQLHGHGSASEVSSVVDENLGQKHLNGHKDTFVYRVFASTWNVGGIAPSDDLDLEDFRLGITKG

SEQ ID NO: 93996 - protein, 217 aa, Setaria italica
  Transcript Sequence Number=SeqID_28022
  Gene Ontology: Mol. function=protein serine/threonine kinase activity; Cellular component=plasma membrane; Biological process =protein amino acid phosphorylation
  Homolog annotation: Hit_ID=Q7XUH4; Match level="QueryCoverage=100%, HitCoverage=19%, E-value=1e-112, Identity=90%"; Hit description =OSJNBa0020J04.8 protein
  Pfam annotation: Domain name=Pkinase; Domain location=61-217; Score= -82.9; E_value=0.0015; Accession=PF00069.17; Description=Protein kinase domain
  Pfam annotation: Domain name=Pkinase_Tyr; Domain location=61-217; Score=-130.0; E_value=4.4e-05; Accession=PF07714.9; Description =Protein tyrosine kinase
  Pfam module annotation: Pfam domain module=Pkinase::Pkinase_Tyr; Domain location=61-217::61-217
LLRWRRRFIESRDGVKKRRRSPGRGSGSSGTSTENGVSQPKLIMFNSRITYADTVEATRQFDEENVLSRGRHGLVFKACYSDGTVLAILRLPSTSADGAVIIEEGSFRKEAESLGKVKHRNLTVLRGYYAGPPPDVRLLVYDYMPNGNLATLLQEASHQDGHILNWPMRHLIALGVSRGLAFLHQSGVVHGDVKPQNILFDADFEPHLSDFGLEPMV

SEQ ID NO: 93997 - protein, 231 aa, Setaria italica
  Transcript Sequence Number=SeqID_28023
  Homolog annotation: Hit_ID=Q2HVC5; Match level="QueryCoverage=97%, HitCoverage=76%, E-value=2e-46, Identity=43%"; Hit description=Cupin, RmlC-type
  Pfam annotation: Domain name=DUF1637; Domain location=16-226; Score =420.8; E_value=2.2e-123; Accession=PF07847.4; Description=Protein of unknown function (DUF1637)
PSSPAPPDAVRSISSLMDTITPADVGLRDDSVEDDRGHGFFESNFLKGSARVARWAQPITYLHIYECDAFSIGIFCLPTSAVIPLHDHPGMTVLSKILYGSMHVKSYDWIEPTVIASTQPARLAKLHTDDVRTAPCPTSVLYPQSGGNMHCFTSVSSCAVLDVLAPPYSEDVGRFCTYFHDYPFSSLSAAGDIKVVGNPDNYAWLETINTPVNIYMRTGMYTGPTVQELQT

SEQ ID NO: 93998 - protein, 154 aa, Setaria italica
  Transcript Sequence Number=SeqID_28024
ISEEARSSDARSAGSSKGYNSEVDIYVDALTTMDSEAETDSEQRDHRDHHAFARMDPDNACSDAQNATAPRSSSFEKKDLSDVASTNRDMSNQHEEEAIVSTPQIKPVVGEHERTSSLEELFEQEKPASWDHERSSSLEELLTEDFHGPASSSG

SEQ ID NO: 93999 - protein, 225 aa, Setaria italica
  misc_feature (109)..(109): Xaa can be any naturally occurring amino acid
  Transcript Sequence Number=SeqID_28025
  Gene Ontology: Mol. function=catalytic activity; Cellular component =chloroplast; Biological process=metabolic process
  Homolog annotation: Hit_ID=B6U0V0; Match level="QueryCoverage=100%, HitCoverage=44%, E-value=2e-79, Identity=66%"; Hit description=Male sterility protein 2
  Pfam annotation: Domain name=NAD_binding_4; Domain location=1-155; Score=-12.3; E_value=1.8e-08; Accession=PF07993.4; Description=Male sterility protein
ILENPMKPGESLRDGVRLDIDAELRLVSDAKKDLPTTASGDDGNATERKAMKELGLQRARHFGWSNTYVFTKAMGEMVLEQHRGDGDLPAAAVVIVRPSIITSVRADPXLPGWMQGTRTIDTLIIGYAKQSISCFLADLRMVMDVIPGDMVVNAMLAAAAAARSEEQPPQAVSIYQVTSSLRNPATYAVLYRAGSRHFDEHPRVRDNGEVIPNTEMRFFPTIPEF

SEQ ID NO: 94000 - protein, 241 aa, Setaria italica
  Transcript Sequence Number=SeqID_28026
  Gene Ontology: Mol. function=receptor activity; Cellular component =integral to membrane; Biological process=cell wall catabolic process
  Homolog annotation: Hit_ID=A0EJF3; Match level="QueryCoverage=99%, HitCoverage=34%, E-value=1e-102, Identity=74%"; Hit description=Beta- glucan-binding protein 4
  Pfam annotation: Domain name=Glyco_hydro_81; Domain location=1-241; Score=-221.0; E_value=5.2e-08; Accession=PF03639.5; Description =Glycosyl hydrolase family 81
LRFGIFNDHHYHLGYFLYAIAVLAKTDPCWGRKYMPQAYSMVADFILFVGNRPGGSFTRLRMFDLWKLHSWAGGLTEFADGRNQESTSEAVNAYYSAALVGLSYGDAHLVSVGATLTAFEALAAQTWCHVRAGEGIYEEDFAGSNRVVGVLWANKRDSGLWFAPPEWKECRLGIQLLPLLPVSEALFPDAAFVRDLVAWTLPALARDGVGEGWKGFVYALEGVYDREGALAKTRALTGHDD

SEQ ID NO: 94001 - protein, 100 aa, Setaria italica
  Transcript Sequence Number=SeqID_28027
  Gene Ontology: Mol. function=DNA binding; Cellular component=nucleus; Biological process=regulation of transcription
  Homolog annotation: Hit_ID=Q7XBH4; Match level="QueryCoverage=89%, HitCoverage=32%, E-value=7e-13, Identity=53%"; Hit description=Myb -related protein Myb4
SSSVTESSVTEQGNTGSSSGFPKEESFTSSPPDAEEFQFDESFWSETLSMPLESFDVPMEPVDAFGAAATSSAVGAADDMDYWLRVFMESGDVHQELPQI

SEQ ID NO: 94002 - protein, 67 aa, Setaria italica
  misc_feature (28)..(28): Xaa can be any naturally occurring amino acid
  misc_feature (46)..(46): Xaa can be any naturally occurring amino acid
  Transcript Sequence Number=SeqID_28028
  Gene Ontology: Mol. function=transferase activity, transferring glycosyl groups; Cellular component=integral to membrane; Biological process=cell wall organization and biogenesis
  Homolog annotation: Hit_ID=Q6AU53; Match level="QueryCoverage=100%, HitCoverage=11%, E-value=3e-12, Identity=56%"; Hit description =Probable xyloglucan glycosyltransferase 9
ESSNLKKDFRKKKHNRIYRKELALSFLXLTAAARSLLSVQGIHFYXLLFQGVSFLVVGLDLIGEQVE

SEQ ID NO: 94003 - protein, 274 aa, Setaria italica
  misc_feature (15)..(15): Xaa can be any naturally occurring amino acid
  misc_feature (268)..(268): Xaa can be any naturally occurring amino acid
  Transcript Sequence Number=SeqID_28029
  Gene Ontology: Mol. function=solute:hydrogen antiporter activity; Cellular component=integral to membrane; Biological process =potassium ion transport
  Homolog annotation: Hit_ID=B9RX36; Match level="QueryCoverage=99%, HitCoverage=35%, E-value=9e-93, Identity=66%"; Hit description =Glutathione-regulated potassium-efflux system protein kefB, putative
  Pfam annotation: Domain name=Na_H_Exchanger; Domain location=1-273; Score=1.8; E_value=6.4e-05; Accession=PF00999.13; Description =Sodiumhydrogen exchanger family
IRNLTDVKLLSEWGXILFLLFEMGLELSLSRLKALARFAFGMGLPQVLLSTLAFTAFELPPNGAIGTKILQFLFNSRPDLVNIRSIDEAIVIGAALSLSSSAFVLQLLAEKGELPTRFGSATLGILLLQDIAVVPLLVILPVLESQNIVEQSVWPILLAESLKALGGLGLLSLGGKYLMRRVFEFVAESRSSEAFVALCLLTVAGTSLITQQLGFSDTLGAFLAGAILAETNFRTQIEADIRPFRGLLLGLFFVTTGTSIDMQLLIRXWPNVHH

SEQ ID NO: 94004 - protein, 390 aa, Setaria italica
  misc_feature (10)..(10): Xaa can be any naturally occurring amino acid
  Transcript Sequence Number=SeqID_28030
  Gene Ontology: Mol. function=solute:hydrogen antiporter activity; Cellular component=integral to membrane; Biological process =potassium ion transport
  Homolog annotation: Hit_ID=B9RX36; Match level="QueryCoverage=96%, HitCoverage=49%, E-value=1e-118, Identity=57%"; Hit description =Glutathione-regulated potassium-efflux system protein kefB, putative
  Pfam annotation: Domain name=TrkA_N; Domain location=117-242; Score =79.5; E_value=1.2e-20; Accession=PF02254.10; Description=TrkA-N domain
REWPNVLSLXGGLIAIKTLIITAIGPRVGLTLQESVRIGLLLSQGGEFGFVVFSLANRLGVLPLELNKLLIIVVVLSMALTPLLNEVGRRVAGIIDENAEEKEKPAEMVNYGATEPIVILGFGEMGQVLANFLSAPLSFGLDQDAEGWPYVAFDLNPAVVKSARKSGFPVLYGDGSRPGVLQSAGITFPKAIMVMYTGKEKTIESVNRLRQAFTAVPIYARAQDLSHLLDLKKAGATDVVLENAETSLQLGSLLLRGLGVMSDDVSFLSKLVRNSMEVQAQEALKDVGDKELDIMMPLQVRVSDLVESDGNGSRMIAQEQSLSLSSRPNLNIIKPPVGSRIPDMKVEKDQPGYDFDGIDSADGVRYCLLEADDETDEASGASKEMIDQSA

SEQ ID NO: 94005 - protein, 674 aa, Setaria italica
  misc_feature (163)..(163): Xaa can be any naturally occurring amino acid
  misc_feature (334)..(334): Xaa can be any naturally occurring amino acid
  Transcript Sequence Number=SeqID_28031
  Pfam annotation: Domain name=TolA; Domain location=279-581; Score= -149.2; E_value=0.057; Accession=PF06519.3; Description=TolA protein
SEKPPGSAALPGGAARPPSYGFAEKAVVLRGEDFPSLKAAVAPPTPPQPSQRQKDADGARLATPEARPGPLGMRPQVTSSRASEPPASSGGLGAGGRASAERPQKPDLGPLPMVRLRYDSDWADDERDTGLSLPERDSRERGFGRTEAMIPGRGLYGAVREPXKKEPFGRDVVATNKEVVQDGLWRSPMLSQHDRDRTDGRPYSGGRGSSGQLYRESIAAGGSKDLWSNSREPPMRANGQNGVELYGTTRVGEIASDRYGDSSNNWPRLNSFQNNIGSKAQPFGGNKGPLINDPVAKFGREKRLTSSPAKPLIEDGGFDCISAVNLTAIKKKKXEAAKPADFHDPVRESFEAELDRILRVQEQERQRVMEEQVRAREIARKQEEERERLIREEEERQRLVEEQAKQAAWQAEQERLEAAKRAEEQRIAREEERKRIALEEERRREAARQKLLELEARIARRQAESNIGSARGGQLTSAVSDELTPGGFKDRDLPRSANFVDRKDIDRMGEHINTSAPLESSSHNKYNETVPRVHTLRDGPSSFIDRENAYYGSRAAFPEQENVHHSPRRDPFAARRGNFPKKDLNDGFGSVPVRPSSRGRTTDSPWALEDFRHEKVPRWDAPREIDRFEKQSDFDTELFNSDRFGDAAWLPSGSHGSPNAQQGDRMFQSSDFNE

SEQ ID NO: 94006 - protein, 164 aa, Setaria italica
  Transcript Sequence Number=SeqID_28032
  Gene Ontology: Cellular component=mitochondrion
  Homolog annotation: Hit_ID=B9R8Z2; Match level="QueryCoverage=100%, HitCoverage=33%, E-value=2e-44, Identity=50%"; Hit description =Pentatricopeptide repeat-containing protein, putative
  Pfam annotation: Domain name=PPR; Domain location=18-52; Score=47.7; E_value=4.6e-11; Accession=PF01535.12; Description=PPR repeat
  Pfam annotation: Domain name=PPR; Domain location=53-87; Score=9.5; E_ value=0.67; Accession=PF01535.12; Description=PPR repeat
  Pfam module annotation: Pfam domain module=PPR::PPR; Domain location =18-52::53-87
AVAVFDDMVGKGYVPNVVTYTVLIRGLCHAKKIDRAMKLLERMKSEGCEHNVQAHNVLIRYSFEEGEIEKALDLFERMSKGMECLPNQDTYNIIISAMFVRKRAEDMAVAARMVVDMVDRGYLPRRFMFNRVLNGLMLTGNQELSRELLRMQEKYARLRREIRL

SEQ ID NO: 94007 - protein, 162 aa, Setaria italica
  misc_feature (145)..(145): Xaa can be any naturally occurring amino acid
  Transcript Sequence Number=SeqID_28033
  Gene Ontology: Mol. function=DNA-directed RNA polymerase activity; Cellular component=chloroplast; Biological process=transcription, DNA-dependent
  Homolog annotation: Hit_ID=Q01923; Match level="QueryCoverage=100%, HitCoverage=10%, E-value=2e-86, Identity=98%"; Hit description=DNA -directed RNA polymerase subunit beta''
SFVLRAAKPYLATIGATVHGQYGKILYKGDRLVTFIYEKSRSSDITQGLPKVEQIFEARSIDSLSPNLERRIEDWNERIPRILGVPWGFLIGAELTVAQSRISLVNKIQKVYRSQGVQIHNRHIEIIIRQVTSKVRVSEDGMSNXVFLPGELIGLLRAERAG

SEQ ID NO: 94008 - protein, 233 aa, Setaria italica
  misc_feature (213)..(213): Xaa can be any naturally occurring amino acid
  misc_feature (224)..(224): Xaa can be any naturally occurring amino acid
  Transcript Sequence Number=SeqID_28034
  Gene Ontology: Mol. function=DNA-directed RNA polymerase activity; Cellular component=chloroplast; Biological process=transcription, DNA-dependent
  Homolog annotation: Hit_ID=Q01923; Match level="QueryCoverage=99%, HitCoverage=14%, E-value=3e-69, Identity=66%"; Hit description=DNA -directed RNA polymerase subunit beta''
PGEGKYETLEDEYGILEDEYGPLEKDSEEEYGSPENEYKTREGEGKYEILEDKYRTLEDDSEEEYGSSEDGSEKEYGTLEEDSEEDSEDEYGSPEEDSILKKESFIEHRGTKEFSLKYQKEVDQFFFILQELHILPRSSSLKVLDNSIIGVDTQLTKNTRSRLGGLVRVKRKKSHTELKIFSGDIHFPEEADKILGGSLIPPERRKKKILRNXKKKKNWVYVQXRKKILKSKE

SEQ ID NO: 94009 - protein, 152 aa, Setaria italica
  misc_feature (108)..(108): Xaa can be any naturally occurring amino acid
  Transcript Sequence Number=SeqID_28035
  Gene Ontology: Mol. function=DNA-directed RNA polymerase activity; Cellular component=chloroplast; Biological process=transcription, DNA-dependent
  Homolog annotation: Hit_ID=Q01923; Match level="QueryCoverage=97%, HitCoverage=9%, E-value=2e-79, Identity=97%"; Hit description=DNA -directed RNA polymerase subunit beta''
VLYGFLPGELIGLLRAERAGRALDESIYYRAILLGITRASLNTQSFISEASFQETARVLAKAALRGRIDWLKGLKENVVLGGIIPVGTGFQKFVHRSPQDKNLYFEIXKKNLFASEMRDILFLHTELVSSDSDVTNNFYETSEAPFTPIYMI

SEQ ID NO: 94010 - protein, 129 aa, Setaria italica
  Transcript Sequence Number=SeqID_28036
  Gene Ontology: Mol. function=phosphotransferase activity, alcohol group as acceptor; Cellular component=histone acetyltransferase complex; Biological process=regulation of transcription
  Homolog annotation: Hit_ID=UPI0000162BA0; Match level="QueryCoverage =100%, HitCoverage=3%, E-value=3e-50, Identity=79%"; Hit description =FAT domain-containing protein / phosphatidylinositol 3- and 4-kinase family protein
TESPLVVMFLFQLYAKLVQTNIPNLLPLMVSAISIKGPDKVPPHLKTPFNDLKGAQVKTLSFLTYLLKSNADYIKSYEESICKSIVNLLVTCPPDSVSIRKELLVGLKQVLNTEYKRGLFPLIDTLLDE

SEQ ID NO: 94011 - protein, 107 aa, Setaria italica
  Transcript Sequence Number=SeqID_28037
  Gene Ontology: Cellular component=plasma membrane
  Homolog annotation: Hit_ID=Q6Z2G9; Match level="QueryCoverage=80%, HitCoverage=20%, E-value=7e-19, Identity=62%"; Hit description=Tubby- like F-box protein 5
  Pfam annotation: Domain name=F-box; Domain location=48-103; Score =24.9; E_value=0.00033; Accession=PF00646.25; Description=F-box domain
SRRAGASDGRAGHGRAGSRHSWPGLWSEQPQPQRHGHGQEGSQQQHQGRWANLPPELLLDVIQRVEASEATWPARRQVVLCAHVCRSWREVTKEVVKTLEECGRITF

SEQ ID NO: 94012 - protein, 105 aa, Setaria italica
  Transcript Sequence Number=SeqID_28038
  Gene Ontology: Mol. function=phosphotransferase activity, alcohol group as acceptor; Cellular component=nucleus; Biological process =chromatin assembly or disassembly
  Homolog annotation: Hit_ID=Q5N7M9; Match level="QueryCoverage=100%, HitCoverage=32%, E-value=4e-38, Identity=79%"; Hit description=Anti -silencing function 1A-like
  Pfam annotation: Domain name=ASF1_hist_chap; Domain location=1-70; Score=59.9; E_value=9.5e-15; Accession=PF04729.5; Description=ASF1 like histone chaperone
REEDIIGVTVLLLTCSYMGQEFMRVGYYVNNDYDDEQLREEPPAKVLIDRVQRNILADKPRVTKFPINFHPEPSTSAGQQQQEPQTASPENHTGNGDASKPEADQ

SEQ ID NO: 94013 - protein, 1450 aa, Setaria italica
  misc_feature (133)..(133): Xaa can be any naturally occurring amino acid
  Transcript Sequence Number=SeqID_28039
  Gene Ontology: Mol. function=DNA-directed RNA polymerase activity; Cellular component=chloroplast; Biological process=transcription
  Homolog annotation: Hit_ID=B9F2S6; Match level="QueryCoverage=96%, HitCoverage=72%, E-value=0.0, Identity=54%"; Hit description=DNA -directed RNA polymerase
  Pfam annotation: Domain name=RNA_pol_Rpb1_5; Domain location=196-627; Score=-100.0; E_value=0.00011; Accession=PF04998.9; Description=RNA polymerase Rpb1, domain 5
EKHILVRDGNIIKLDLDKDHVQDSFNDLVSSVLSEKGPGEALQFLNVLQPLLMEFLLLDGFSVTLKDFNVPKAILEEVHKNIQKQSLILEQSRFSKSQIAEMRVENNLKGVKQQISEFVIKCSDLGLLIDPKXEASMSKVVQQLGFVGLQLYHEGKLYSSRLVEDCFSNFVNKHSDIGDEHPPEAYGLVQSSYFHGLNPYEELVHSISTREAIVRSSRGLTEPGTLFKNLMAILRDVVICYDGTVRNTCSNSIIQLKYKEDDETDFPSALPPGEPVGVLAATAISTPAYRAVLDSSQSNNASWESMKEILQTKVGYKNDMKDRKVILFLNDCSCPKKFCKERAALTVQSCLRRVTLADCATDISIEHQKQINLDETSEAAPTLVGHIHLDKAQLERINISTQDILQKCEEISGRYGKKKGHLCHLFKKITFSTCDCSFAQNTIDGYLHVAPCVQFSFSDDNTILSESVERAVNVIADSVCSVLLDTIIKGDPRIQSAKIIWVESEATSWVKNTQNTLKGEPTLEIIVEKDEAVRNGYAWRTVMDACIPVLNLIDTRRSIPYGIQQVKELLGISCAFDQVVQRLSTTVKMVAKGVLKDHLILVANSMTCTGNLIGFNTSGYKATFRSLKVQVPFTESTLFTPMKCFEKAAEKCDSDSLGCVVSSCSWGKHAAIGTGSSFQILWNENQLKSNKEYGDGLYDFLALVRTDQEKAGYAFLDDVDYLVEENAVDDVCLSPEPDGTHGKPTFEDNVEEQGIQNGSSWENDTTMNSSWEQNASAGNDSGDWGGWSNGAAAATKPLDQDNSCWDAHATVENNSTDWGGWGTEKQTNGEQAEINTWADKGAGMESSAGDDNWEMKSSAPEKSKKNLDHDTWGNMPAPASASASENTWGEQKGDGGDGAWEKQTGSCKEQGMDVDQDSWGKKTMPPSSNMWDKKKSDGVHGNWEEQPSSWNEQMLNVDQDSTNADAGSWDNMAMAPSNNAWDAGEGFGRSITKSDAGSSWGNKDKMETDEHSKIPKEFDPWNTGKSNESSWEKTDALQDSWGNSAADNNNTQEGSWDKIAVKDTNSQQDSWGNVAVQNKNTQNGSWDNGAEKVPTSDAQDSWGNLAATPAGNSDAKQSDSWDGWNAAPAENSQGKCNETTDSGDNKGWKSEGWGGKSGNWSGQRNNSGRPPRGPDERGPPPPRQRFELTAEEKNILLEIEPIMMRVRRIFREACNGVRLQPEDEKFILEKVLENHPEKQSKVSSAIDYITVDKHETFQDTRCFYVVSTDGSRADFSYFKCLENFVRKSFKEDADTFCMKYLRPRRRQAPPADGGVAPGAPAEAPPSAAAETEQWTPVPPAEVPLSAAAETEQVTPASPSEVQQETLGSPASALEETPEPDSTGDAGIQEKQPDPTHPASPAAAAPEEAPEQDPTDNGGILAKGPDSTPASPVVALQVAPDPDSTGPDLND

SEQ ID NO: 94014 - protein, 122 aa, Setaria italica
  Transcript Sequence Number=SeqID_28040
  Gene Ontology: Mol. function=DNA binding; Cellular component=integral to membrane
  Homolog annotation: Hit_ID=B6UE85; Match level="QueryCoverage=86%, HitCoverage=41%, E-value=1e-43, Identity=85%"; Hit description =Transcription regulator
AYALLVLLVLAEVTSLLQNVWTARRDLADQSPAAARVYGALSPPFYVLYTLVRGVAGPLFLLKMTVFYLSGQAVDVIPWWVRISWIVVVGTAIAVSNLWIWNLWKELFRERNQAISKAKKDT

SEQ ID NO: 94015 - protein, 388 aa, Setaria italica
  misc_feature (120)..(120): Xaa can be any naturally occurring amino acid
  Transcript Sequence Number=SeqID_28041
  Gene Ontology: Mol. function=electron carrier activity; Cellular component=integral to membrane; Biological process=microtubule bundle formation
  Homolog annotation: Hit_ID=B6UCA5; Match level="QueryCoverage=100%, HitCoverage=83%, E-value=0.0, Identity=92%"; Hit description =Cytochrome P450 CYP85A1
  Pfam annotation: Domain name=p450; Domain location=1-384; Score=39.8; E_value=1.4e-13; Accession=PF00067.14; Description=Cytochrome P450
TVVCMDPELNRRTLASEGAGFVPGYPQSMLDILGPNNIAAVHGPLHRAMRGAMLALTRPTMIRAALLPKIDAFMRAHLHGWAGRRVDIQEMTKEMALLSALMQIAGISAGPLSDALKAEXYTLVLGTFSLPINIPGTNYSKGLQARKKLVAMLRQMIADRRSSGCAQDDMLDALLSGNEGTRAKLNDDQIIDLLITLIYSGYETVSTTSMMAVKYLSDNPKALEQIRKEHLDIRKGKSPEDALDWNDYKSMTFTRAVIYETLRLATVVNGLLRKTTQDVEMNGYVIPKGWRIYVYTREINYDPFLYPEPMVFNPWRWLEKGLESHPHFMLFGGGARMCPGKEVGTVEIATFLHYFVTRYRWEEEGNNTISKFPRVAAPNGLHIRVQDY

SEQ ID NO: 94016 - protein, 175 aa, Setaria italica
  Transcript Sequence Number=SeqID_28042
  Gene Ontology: Mol. function=transferase activity, transferring glycosyl groups
  Homolog annotation: Hit_ID=Q339E2; Match level="QueryCoverage=100%, HitCoverage=25%, E-value=1e-89, Identity=90%"; Hit description =Glycosyltransferase QUASIMODO1, putative, expressed
LNIDAVKKQNSFLVQHAAKTVPMPLHCLHMQLTTDYYFRDGVTKEQFHDAALKEEENIAKLEDRSLYHYAIFSDNVLAASVVVRSTVTNANKPEKHVFHIVTDKLNFAAMKMWFITHPPQLATVHVENIDNFKWLNSSYCSVLRQLESARLKEYYFKAHDLSSLSDGNENLKYRN

SEQ ID NO: 94017 - protein, 61 aa, Setaria italica
  misc_feature (23)..(23): Xaa can be any naturally occurring amino acid
  Transcript Sequence Number=SeqID_28043
  Subcellular localization annotation: CTP_CleavageSite=49; ConfidenceScore=5.09e-01
PKGAGALPLAAFVPVILAGLVGXGKLPAVALTVLCAVFFTSVERAPDVSVAQASGHGSDPR

SEQ ID NO: 94018 - protein, 42 aa, Setaria italica
  Transcript Sequence Number=SeqID_28044
STALFIKLKHHNRVTYILWSYLVTNDGGGGCFSTRFIYIKEK

SEQ ID NO: 94019 - protein, 61 aa, Setaria italica
  Transcript Sequence Number=SeqID_28045
SSRTIKEADWHPGYVLNSGLKKEHDNSRRRKKTALGSKTGPSLRCFKLRIQSLYLERKHEG

SEQ ID NO: 94020 - protein, 129 aa, Setaria italica
  Transcript Sequence Number=SeqID_28046
MAAPPLLRQWRRIAVLAAVLALHLGAAVAQSPTTPAAPTTPAAPTTPAAPTTPAAPTTPATPTTPAAPTTPAAPTTPAAPTTPAAPTTPAAPTTPAAPTTPAAPTTPAALAPTATPAAPANSPPTPATP

SEQ ID NO: 94021 - protein, 151 aa, Setaria italica
  misc_feature (86)..(86): Xaa can be any naturally occurring amino acid
  Transcript Sequence Number=SeqID_28047
  Gene Ontology: Mol. function=aspartic-type endopeptidase activity; Cellular component=small-subunit processome; Biological process=DNA integration
  Homolog annotation: Hit_ID=Q6I5B6; Match level="QueryCoverage=99%, HitCoverage=12%, E-value=2e-34, Identity=52%"; Hit description =Putative polyprotein
  Subcellular localization annotation: CTP_CleavageSite=55; ConfidenceScore=5.16e-01
TGLLVGDSQCLWELDWLRLPSAASTSLVGSVASSTSSTSSFAQWHHRLGHLCGLRLSTLGRRGLLGSISGDVSLDQCQGCQLGKQXYSSSESVSKHPFDLVHSDVWVRLPSFLKGVYRYYIIFIDDFSRHTWIYFMKHRSEALSLYKNFAT

SEQ ID NO: 94022 - protein, 195 aa, Setaria italica
  misc_feature (157)..(157): Xaa can be any naturally occurring amino acid
  Transcript Sequence Number=SeqID_28048
  Gene Ontology: Mol. function=phosphoprotein phosphatase activity; Biological process=actin cytoskeleton organization and biogenesis
  Homolog annotation: Hit_ID=Q7G6K7; Match level="QueryCoverage=62%, HitCoverage=9%, E-value=4e-59, Identity=92%"; Hit description=Formin- like protein 3
  Subcellular localization annotation: CTP_CleavageSite=52; ConfidenceScore=5.70e-01
SKVPLSKPVHLATPPQAPKPPGTVPPPPPSTKISNAAAPPPPLLGRGRGNTTGSTKGRGIGLAQQSNPPKKASLKPLHWVKVTRAMQGSLWADAQKQGNQARAPDIDLSELESLFSTASVTSTSEKGATKRGSAISKPEIVHLVDMRRANNCEIMLXTKIKMPLPDMISAILAWPPHVELSLAPGRTVRISQAFL

SEQ ID NO: 94023 - protein, 323 aa, Setaria italica
  Transcript Sequence Number=SeqID_28049
  Gene Ontology: Mol. function=phosphoprotein phosphatase activity; Biological process=actin cytoskeleton organization and biogenesis
  Homolog annotation: Hit_ID=Q7G6K7; Match level="QueryCoverage=92%, HitCoverage=24%, E-value=1e-166, Identity=95%"; Hit description =Formin-like protein 3
  Pfam annotation: Domain name=FH2; Domain location=1-294; Score=354.4; E_value=2.2e-103; Accession=PF02181.15; Description=Formin Homology 2 Domain
DMRRANNCEIMLTKIKMPLPDMISAILALDSSVLDNDQVENLIKFCPTKEEIEMLKGYNGNKEMLGKCEQFFLELMKVPRVEAKLRVFAFRITFSTQVDDLRTNLTTINDATKEVKESLKLRQIMQTILTLGNSLNQGTARGSAVGFRLDSLLKLSDTRARNNKMTLMHYLCKLLAEKMPELLDFDKDLIHLEAASKIQLKLLAEEMQAINKGLEKVEQELAASENDGAISIGFRKALKSFLDAAEAEVRSLISLYAEVGRNADSLAQYFGEDPARCPFEQVTSILVIFVNMFKKSRDENARNAEAEKKKLEKEKEKASVSAK

SEQ ID NO: 94024 - protein, 48 aa, Setaria italica
  misc_feature (31)..(31): Xaa can be any naturally occurring amino acid
  Transcript Sequence Number=SeqID_28050
  Gene Ontology: Mol. function=protein binding
AAVQYMTEHVAKRATRSQPTKTKKTWAQFCXFFSRPNKRKHDRIDTAS

SEQ ID NO: 94025 - protein, 465 aa, Setaria italica
  Transcript Sequence Number=SeqID_28051
  Gene Ontology: Mol. function=protein binding; Cellular component =plasma membrane; Biological process=small GTPase mediated signal transduction
  Homolog annotation: Hit_ID=B9T2K7; Match level="QueryCoverage=86%, HitCoverage=68%, E-value=1e-143, Identity=62%"; Hit description =Leucine-rich repeat-containing protein, putative
  Pfam annotation: Domain name=LRR_1; Domain location=162-183; Score =9.6; E_value=4.4; Accession=PF00560.25; Description=Leucine Rich Repeat
  Pfam annotation: Domain name=LRR_1; Domain location=185-206; Score =12.4; E_value=1.3; Accession=PF00560.25; Description=Leucine Rich Repeat
  Pfam annotation: Domain name=LRR_1; Domain location=208-229; Score =16.6; E_value=0.1; Accession=PF00560.25; Description=Leucine Rich Repeat
  Pfam annotation: Domain name=LRR_1; Domain location=231-252; Score =15.2; E_value=0.28; Accession=PF00560.25; Description=Leucine Rich Repeat
  Pfam annotation: Domain name=LRR_1; Domain location=254-275; Score =5.1; E_value=32; Accession=PF00560.25; Description=Leucine Rich Repeat
  Pfam annotation: Domain name=LRR_1; Domain location=277-298; Score =8.1; E_value=8.6; Accession=PF00560.25; Description=Leucine Rich Repeat
  Pfam annotation: Domain name=LRR_1; Domain location=300-321; Score =8.6; E_value=6.9; Accession=PF00560.25; Description=Leucine Rich Repeat
  Pfam annotation: Domain name=LRR_1; Domain location=323-344; Score =13.6; E_value=0.76; Accession=PF00560.25; Description=Leucine Rich Repeat
  Pfam annotation: Domain name=LRR_1; Domain location=346-369; Score =4.9; E_value=35; Accession=PF00560.25; Description=Leucine Rich Repeat
  Pfam annotation: Domain name=LRR_1; Domain location=371-392; Score =17.6; E_value=0.05; Accession=PF00560.25; Description=Leucine Rich Repeat
  Pfam annotation: Domain name=LRR_1; Domain location=394-412; Score =1.0; E_value=2e+02; Accession=PF00560.25; Description=Leucine Rich Repeat
  Pfam module annotation: Pfam domain module=LRR_1::LRR_1::LRR_1::LRR _1::LRR_1::LRR_1::LRR_1::LRR_1::LRR_1::LRR_1::LRR_1; Domain location =162-183::185-206::208-229::231-252::254-275::277-298::300-321::323 -344::346-369::371-392::394-412
  Subcellular localization annotation: CTP_CleavageSite=61; ConfidenceScore=5.85e-01
QRASQCVPSSSTSTRAAPRITASAAAASAASSSASSSAAVAAGSNADRYSSTGTNGFSAARTATGTGRVSMDDSYVKKAKAAVWDDGVVAAGSHMPRGAVAANLVAARGDGGYGDNDEKLTLIKLASMIEVAAKKGSRDLNLQGKLMNQIEWLPDSIGKLTGLVTLDISENRILALPDAIGRLSSLAKLDLHSNRIAQLPESIGDLCNLIYLDLRGNQLASLPSTLGRLVKLEELDVSVNHLTSLPDSIGSLARLKKLIVETNNLDELPYTIGQCVSLVELRAGYNHLKALPEAVGKLESLEILSVRYNSIRGLPTTMASLTKLKELDASFNELESIPENFCFVTSLVKLNVGNNFADLQYLPRSIGNLEMLEELDISNNQIRVFPDSFGNLQRLRVLRAEENPLQVPPRDVALKGAQAAVQYMTEHVAKRATRSQPTKTKKTWAQFCFFSRPNKRKHDRIDTAS

SEQ ID NO: 94026 - protein, 167 aa, Setaria italica
  Transcript Sequence Number=SeqID_28052
  Gene Ontology: Mol. function=hydrolase activity, hydrolyzing O -glycosyl compounds; Cellular component=extracellular region; Biological process=carbohydrate metabolic process
  Homolog annotation: Hit_ID=Q2R4T2; Match level="QueryCoverage=99%, HitCoverage=36%, E-value=7e-75, Identity=77%"; Hit description =Glycosyl hydrolases family 18 protein, expressed
  Pfam annotation: Domain name=Glyco_hydro_18; Domain location=1-167; Score=-50.9; E_value=0.023; Accession=PF00704.20; Description =Glycosyl hydrolases family 18
PDSNLDYPIDDISNNLDWVNILTFGFHGGSNVTTVDAPLYDTTSHFSVSYGVISWLDAGLPPCKLVMGIPLFGRSWFLRNKAKNGIGSPTAAAGTKQRKSNQTGIIAYTEVEDYMNSASTVVTYDNQSVAEYFYNGDLWVSFDSAQVVQHKIEFAVRSQLLGYFLWT

SEQ ID NO: 94027 - protein, 41 aa, Setaria italica
  Transcript Sequence Number=SeqID_28053
RHVKHQWKLVLLVFPVTGKQPYSSISFNTLHFWIHSFTFNL

SEQ ID NO: 94028 - protein, 58 aa, Setaria italica
  Transcript Sequence Number=SeqID_28054
  Subcellular localization annotation: CTP_CleavageSite=51; ConfidenceScore=5.21e-01
TIVHTQTITVGRNNTLFGNKTVAAFCSSDPARLCLSCRLTLLPYTYNSASQCMSSPHT

SEQ ID NO: 94029 - protein, 217 aa, Setaria italica
  Transcript Sequence Number=SeqID_28055
  Homolog annotation: Hit_ID=B4FZ90; Match level="QueryCoverage=98%, HitCoverage=51%, E-value=2e-99, Identity=82%"; Hit description=F-box domain containing protein
FSFSFLPPPAADWLVRDCRDGRFLLDRARDGSTAFTEVSICDPRFRRYRLLPPIPDDLAASVENPYVQCGGDGDLQSRSSEIFLASRSDDSASEEDPAFTVIWMACCRGKLVSFFYSSESQQWRVLSPPEHYALSTRRVMGVRLGQRNHAHGCFYWMVALTHRWLVLDTRKMEFSIVDISPVLSGRAMMFSNQIITLESSDGRTTVVVSDVFRQIKD

SEQ ID NO: 94030 - protein, 79 aa, Setaria italica
  Transcript Sequence Number=SeqID_28056
  Gene Ontology: Mol. function=metal ion binding
  Homolog annotation: Hit_ID=B1PVT0; Match level="QueryCoverage=100%, HitCoverage=81%, E-value=4e-31, Identity=65%"; Hit description=LIM domain protein 2b
  Pfam annotation: Domain name=LIM; Domain location=10-66; Score=58.5; E_value=2.6e-14; Accession=PF00412.14; Description=LIM domain
MSFTGTQDKCKTCDKTVHFIDLLTADGVSYHKTCFKCSHCKGTLSISSYSSMDGVLYCKTHFEQLFKETGTFSKKFQGG

SEQ ID NO: 94031 - protein, 369 aa, Setaria italica
  misc_feature (14)..(14): Xaa can be any naturally occurring amino acid
  misc_feature (115)..(115): Xaa can be any naturally occurring amino acid
  Transcript Sequence Number=SeqID_28057
  Gene Ontology: Mol. function=protein serine/threonine phosphatase activity; Cellular component=protein serine/threonine phosphatase complex; Biological process=protein amino acid dephosphorylation
  Homolog annotation: Hit_ID=B6SY45; Match level="QueryCoverage=93%, HitCoverage=91%, E-value=1e-174, Identity=88%"; Hit description =Ca2+/calmodulin-dependent protein kinase phosphatase
  Pfam annotation: Domain name=PP2C; Domain location=71-327; Score =289.0; E_value=1e-83; Accession=PF00481.13; Description=Protein phosphatase 2C
  Subcellular localization annotation: CTP_CleavageSite=43; ConfidenceScore=5.12e-01
GEWSPETPPGSSRXGGTTPVGGKPPRHHLTSIRHCASSARIASASAEFELDSGTLSLISPTDIRPGFLPVFRSGSCADIGPKSYMEDEHVCVDNLVEHLGLRGPGIPAPGAFYGXVFDGHGGTDAACFVRKNILKFITEDCHFPNNMEKAIRSAFVKADHAIADSHSLDRNSGTTALTVLIFGRTLLVANAGDCRAVLGKRGRAVELSRDHKPNCTVERLRIENLGGTVFDGYLNGQLAVARAIGDWHMKGSKGSICPLTPEPEFREVRLTEEDEFLIVGCDGLWDVMSSQCAVSMVRKELMAHNDPQRCSHELVQEALRRDCCDNLTVVVVCFSADPPPQIEVPRFRVRRSISMEGLHTLKGALDSNV

SEQ ID NO: 94032 - protein, 65 aa, Setaria italica
  misc_feature (42)..(65): Xaa can be any naturally occurring amino acid
  Transcript Sequence Number=SeqID_28058
SSCCCSVMKLLKRFGSNVWLMPYCVSDSMINLHHNFKKKKKXXXXXXXXXXXXXXXXXXXXXXXX

SEQ ID NO: 94033 - protein, 99 aa, Setaria italica
  Transcript Sequence Number=SeqID_28059
QSSTRHLALIRVEGCSLREAAAEVRSAGPPSPSRRIASDQFEGDIRKQSQFLVISTRRRTPTREEPWFSTTMTRISPDGAFTSSSPLHMDALPIITPKP

SEQ ID NO: 94034 - protein, 194 aa, Setaria italica
  Transcript Sequence Number=SeqID_28060
  Gene Ontology: Mol. function=peptidase activity
  Homolog annotation: Hit_ID=B6T6Y3; Match level="QueryCoverage=100%, HitCoverage=56%, E-value=1e-61, Identity=64%"; Hit description =Cysteine-type peptidase
MVFYDHDPDITRWGLHLLLPAAHGCSAHHHTQTTATTPYTAYTPQHPSSSSAEIKVEHVPHCSDDAVDNDEIIAQALQEELSHVALAEASGASSSHDDNHSAVLTQHWFRPRTIHVASASQEAETREEPFSSCSSPGDDNVQHGEACLIDLMDDFSVIDGEVGKRLNDMVPVPHVPKTNGEIPSVDEAVSDHQR

SEQ ID NO: 94035 - protein, 129 aa, Setaria italica
  misc_feature (117)..(117): Xaa can be any naturally occurring amino acid
  Transcript Sequence Number=SeqID_28061
  Gene Ontology: Mol. function=hydrolase activity, acting on ester bonds; Cellular component=plasma membrane
  Homolog annotation: Hit_ID=Q7F2F1; Match level="QueryCoverage=100%, HitCoverage=21%, E-value=3e-29, Identity=58%"; Hit description =P0402A09.15 protein
VDGLTGAECNPNSANSTTTSSSSSICVSADADLVVPDDPGHSFEDVLEQVFGNISSGAGAAAAQPSMSGFVRSALSVNALLSSAVMRAFRPSLLPTFSALAPAFAVFDRWFSSIPGXPTQPNRLFLYSA

SEQ ID NO: 94036 - protein, 73 aa, Setaria italica
  Transcript Sequence Number=SeqID_28062
MAAAEAEAAPAPEASGSYAGAGGLSTGRKLVPWSSWEEWRFVRDGLFSPFPAAALRRISAWRSRGSLLIPVDR

SEQ ID NO: 94037 - protein, 272 aa, Setaria italica
  Transcript Sequence Number=SeqID_28063
MFSIDKQSMAAPMAADGGLRRLFEKPLPENPTLLEALSACNRNVHPNKSIDPSSFTEIFGELHFQEKQQPERAVLMSQPPPRPPPRTASWVDIAAEAEMSNLSKDDSSLDGLLRPKPASTVKRSASFCMKKSSASLLLCTEGLGSESTVDADDMLKDGDAEAEASAAAALSGHSKNTDTDTDTERSSDVKDAGAGAVEHGKAEKQPPSFPPPIRSIGRGGGKSRVCFRSFREDGRFVLLEVVIPGKDLLQATREGGRLRLQFTKGAAAAMAG

SEQ ID NO: 94038 - protein, 520 aa, Setaria italica
  Transcript Sequence Number=SeqID_28064
  Gene Ontology: Mol. function=RNA binding
  Homolog annotation: Hit_ID=B9SY71; Match level="QueryCoverage=97%, HitCoverage=50%, E-value=1e-74, Identity=39%"; Hit description =Pumilio, putative
  Pfam annotation: Domain name=NABP; Domain location=289-520; Score =104.0; E_value=5.3e-28; Accession=PF07990.4; Description=Nucleic acid binding protein NABP
DLERDLQAVLMDQNHMSSPDDLSIFRSGSAPPTVEGSRTAIGALFSGPPLHVNTLGGGSSSGVGVDMLTEEEIRSHPAYLSYYYSNEHLNPRLPPPMVSKEDWRAAQRFQAVSGGIGDRRRRPSEVGGGNSLFSMQPGAHESGGEKVLLNDRMGRGERNGLARQQSSEWLGRGTDGLIGLSDVNGLGSRRKSFADALQENITRPATPGHLSRSNSRNALESPNPIRSSDSPKPHLQNRSESMNGLRSGSTSPSLVRVQSLGSSMSHTFASAVGSSVSRSTTPDPQLIRRTPSPCLPPVGVRMGSSDKKVEATAVASLNHDGADIAATLSSLSLSGNKMSNMETEVQNHVYHNFGDQTDMLFNVPKEHRQFSQQSLTQNTDEDSLNAPEYAVFPNGGSNFSNLHVSKLASHSNSKFPMQSPHGNANKKGPLMSSAGSISHYQNLNGDSPGIDLSGRHMKTHAGGFTSSMLNNQLNPDGDYGHVLSNGSNFQGQPSETMYAQYLQANPDSPLGATASMGPFQ

SEQ ID NO: 94039 - protein, 148 aa, Setaria italica
  Transcript Sequence Number=SeqID_28065
  Gene Ontology: Mol. function=DNA binding; Biological process =transposition, DNA-mediated
  Homolog annotation: Hit_ID=Q6ZIA2; Match level="QueryCoverage=90%, HitCoverage=39%, E-value=3e-48, Identity=67%"; Hit description =Regulatory protein-like
RRSSGSSLPWYLLSFESFRLGEGTARLLDHLLIVAVDPGALATCRSLHRHCYLLRPDDGAAADLGTEKHFMTPEYLDMMWTRNRFQQTILELGFNFLFTDIDIMWFRDPMRHIGITSDIAIASDFFNGDPDSMHNQPTGRSWYVRSKN

SEQ ID NO: 94040 - protein, 438 aa, Setaria italica
  Transcript Sequence Number=SeqID_28066
  Gene Ontology: Mol. function=sequence-specific DNA binding; Cellular component=cytoplasm; Biological process=regulation of transcription, DNA-dependent
  Homolog annotation: Hit_ID=B6SWQ2; Match level="QueryCoverage=95%, HitCoverage=82%, E-value=1e-170, Identity=72%"; Hit description=Heat shock factor protein 2
  Pfam annotation: Domain name=HSF_DNA-bind; Domain location=55-220; Score=201.6; E_value=2.1e-57; Accession=PF00447.9; Description=HSF -type DNA-binding
ALLLEPKLEDEELPLQQLASPAPFVSLDQLMPATGPALPEPPRPLEALLQGQQLPPFLSKTYDLVSEPALDGVISWGAAGNSFVVWDPSTFARDVLPHNFKHNNFSSFVRQLNTYGFRKVHADRWEFAHEDFLRDSKHLLKRIVRRRSSPAQQSSIQPGSSSGESSLDPELHTLRREKNALLEEVARLKQEHRQTIEQMSTLNHRLESAEDRQKQMVSFLAKLLQNPSFVRQLKLHREQKEIDSTRVKRKFLKHVPHGSIESGESSSQHGGESGSHFPASSPMATCVQDDIAELQNFLLEDDDLNFGMDPDNIGLDRVEAPDDIGALVQGFDTQEELELGSGIELLEMPPASGPLGQDPTIGRSKGKSVLCPGLDATSSEASYLGSISDTMGVLSPSTMLGTASTMMDADEEQMWGVDASAPLQSTCSGSSQQTFSSL

SEQ ID NO: 94041 - protein, 125 aa, Setaria italica
  Transcript Sequence Number=SeqID_28067
  Gene Ontology: Mol. function=catalytic activity; Cellular component =peroxisome; Biological process=metabolic process
  Homolog annotation: Hit_ID=Q0DV32; Match level="QueryCoverage=97%, HitCoverage=22%, E-value=6e-20, Identity=52%"; Hit description=4 -coumarate--CoA ligase-like 1
  Subcellular localization annotation: CTP_CleavageSite=49; ConfidenceScore=5.49e-01
ASPAAGYGSDGVYRSPRSAAPIPSDPALSLSDFVLSRAAVCPSALALVDAATGRALTFEALRSAVLATAAALSSRARVRRGDVVLLLAPNSVLYPVCFLAVTAIGAVATTANPLYTPREIAKQVD

SEQ ID NO: 94042 - protein, 123 aa, Setaria italica
  misc_feature (14)..(14): Xaa can be any naturally occurring amino acid
  misc_feature (38)..(38): Xaa can be any naturally occurring amino acid
  Transcript Sequence Number=SeqID_28068
  Gene Ontology: Cellular component=outer membrane
  Homolog annotation: Hit_ID=B6SPX1; Match level="QueryCoverage=99%, HitCoverage=23%, E-value=1e-33, Identity=59%"; Hit description=Outer membrane protein, OMP85 family protein
PLPYNLTWRTLKEXARMSSNSIQEQLGHSLLPSIKYAXKVDKRDSTIRPTCGYAFLSSSQVGALAPGSKYPWYLRQEVDLQVALPLGVLNGALNAGVAAGIIHPFLRGSTGSVLPLSERFYLG

SEQ ID NO: 94043 - protein, 94 aa, Setaria italica
  Transcript Sequence Number=SeqID_28069
PSSPATANDEIAVVAERGKVACRDYPHPRSACAKNPFGTTPHERHCDKCFCYVCDIAAPCVSWKGHGGHCHASDKDKKWKTMRLIKKRAQVKPS

SEQ ID NO: 94044 - protein, 87 aa, Setaria italica
  Transcript Sequence Number=SeqID_28070
  Gene Ontology: Mol. function=protein serine/threonine kinase activity; Cellular component=chloroplast; Biological process=protein amino acid phosphorylation
  Homolog annotation: Hit_ID=B6SXS7; Match level="QueryCoverage=78%, HitCoverage=12%, E-value=1e-33, Identity=91%"; Hit description =Serine/threonine-protein kinase SNT7
GAVEIWMNERVRRACASSCADFLYGFRESKVKGKGAEEYWIIWRFEGEDTLYDLMQSKEFPYNVETKVRDPSENITFCRFYISVNNS

SEQ ID NO: 94045 - protein, 529 aa, Setaria italica
  Transcript Sequence Number=SeqID_28071
  Gene Ontology: Mol. function=protein serine/threonine kinase activity; Cellular component=chloroplast; Biological process=protein amino acid phosphorylation
  Homolog annotation: Hit_ID=B6SXS7; Match level="QueryCoverage=100%, HitCoverage=94%, E-value=0.0, Identity=92%"; Hit description =Serine/threonine-protein kinase SNT7
  Pfam annotation: Domain name=Pkinase; Domain location=99-420; Score =60.1; E_value=8.4e-15; Accession=PF00069.17; Description=Protein kinase domain
  Pfam annotation: Domain name=Pkinase_Tyr; Domain location=99-383; Score=-151.2; E_value=0.0011; Accession=PF07714.9; Description =Protein tyrosine kinase
  Pfam module annotation: Pfam domain module=Pkinase::Pkinase_Tyr; Domain location=99-420::99-383
SFRPVTAELGGVATELGRQLVEAVGVGLPCTVMQCGDVIYRSTLPRNDGLTITAPGVALALAAASYLWATPGVAPGFFDMFVLAFAERLFRPTFRKDDFVLGKKLGEGAFGVVYKASLANPEAAEKQGDVVVKKATEYGAVEIWMNERVRRACASSCADFLYGFRESKVKGKGAEEYWIIWRFEGEDTLYDLMQSKEFPYNVETKILGGVQNLPKGIGRENKIIQTVMRQLLFALDGLHSTGIVHRDIKPQNVIFSEGSRTFKIIDLGAAADLRVGINYIPKEFLLDPRYAAPEQYIMSTQTPSAPSVPVATTLSPVLWQLNLPDRFDIYSLGLIFLQMAFPSLRTDSSLIQFNRQLKRCNYDLEAWRNLVEPRATAELRRGFDIMDLDDGIGWELLTSMVRYKARQRISAEAALAHPYFNREGLLGLSVMQNVRLQLFRATQKDYSEAARWVVGLMARSGTEDVGGFTEAQLQELREIKPKKGSAQRNVLASLLRVQRKIVRTINESMDDLTSQRKSIWWSRWIPREE

SEQ ID NO: 94046 - protein, 43 aa, Setaria italica
  Transcript Sequence Number=SeqID_28072
  Gene Ontology: Mol. function=catalytic activity
  Homolog annotation: Hit_ID=Q53PH5; Match level="QueryCoverage=90%, HitCoverage=7%, E-value=7e-14, Identity=89%"; Hit description =Neutral/alkaline invertase, putative, expressed
DKPRFTLERKRSFDEQSWSELSHRQNDGFDSVLQSPAFPLRGG

SEQ ID NO: 94047 - protein, 83 aa, Setaria italica
  Transcript Sequence Number=SeqID_28073
THHRTIEVFVVGNGKTYVSISLIKYGRKKAQAINRFAIRPNYEFMVAAVMDAAPYPLHLKPYHFQIPGIQRALTTDHASRPVK

SEQ ID NO: 94048 - protein, 44 aa, Setaria italica
  Transcript Sequence Number=SeqID_28074
NRLSIEDSTQVNIRNEVLTYLFTLKLTASLNKQHLLEICPDRLD

SEQ ID NO: 94049 - protein, 107 aa, Setaria italica
  Transcript Sequence Number=SeqID_28075
  Gene Ontology: Mol. function=hydrolase activity; Cellular component =membrane; Biological process=auxin mediated signaling pathway
  Homolog annotation: Hit_ID=B9S1R2; Match level="QueryCoverage=99%, HitCoverage=25%, E-value=4e-27, Identity=62%"; Hit description=Auxin- induced protein 5NG4, putative
MASRERDGEGRRAHAAMVGVQLVYAGYHVIAKQALNVGVNRVVFCVFRDLLALSVLAPLAFFQHRGSPAQARPPPLTWRLVGSFFLLGLTGVFGNQLLFLLGLSYTN

SEQ ID NO: 94050 - protein, 121 aa, Setaria italica
  Transcript Sequence Number=SeqID_28076
  Subcellular localization annotation: CTP_CleavageSite=77; ConfidenceScore=5.32e-01
MAAVLWWPMAAWISPATAWFIFFNTVVAAIALMSSAHRADGGALTPSGAARRRLCRSGSSMVLDRLWSFSIFAVHPVAATGAPIGDDATAAASESQFIATARAKQRRRAAPRRRARLSRWH

SEQ ID NO: 94051 - protein, 97 aa, Setaria italica
  Transcript Sequence Number=SeqID_28077
  Subcellular localization annotation: CTP_CleavageSite=55; ConfidenceScore=5.05e-01
WRDKMDRSIPTTALSALQLIDLQASAVATSLFPRFYRSVCLHAARSIGTLRLYIPSSTIVGSIASWKNFFMKHITRIYGSDQANGVSTASCCGGRSR

SEQ ID NO: 94052 - protein, 200 aa, Setaria italica
  Transcript Sequence Number=SeqID_28078
  Gene Ontology: Mol. function=molecular_function; Cellular component =cellular_component; Biological process=biological_process
  Homolog annotation: Hit_ID=Q55FJ2; Match level="QueryCoverage=66%, HitCoverage=17%, E-value=2e-20, Identity=41%"; Hit description=WD repeat-containing protein 91 homolog
LFSTLVKLELSVLRYYVINALKSGRQEKVVEFFGESSNYLMQKREDWLPWFAIPYIKNPSFDPQFRVYFSKEWLDTLVLSFRNFLSGIFNDTRIPALLRISTEKNTIKSLKNDIKQLNNKLAELQASLEAKEDELSQLRRNSSGAGYGNKNLVGTSTAGFLLEQEMSENYEESSASGNVIQGFDSRSSSSVKSSSRGGKL

SEQ ID NO: 94053 - protein, 84 aa, Setaria italica
  Transcript Sequence Number=SeqID_28079
  Gene Ontology: Mol. function=electron carrier activity; Biological process=oxidation reduction
  Homolog annotation: Hit_ID=B6SWV0; Match level="QueryCoverage=100%, HitCoverage=14%, E-value=2e-36, Identity=90%"; Hit description =Cytochrome P450 CYP734A7
LAVCGADELPSKDHLPKLKTLGMILNETLRLYPPAVATIRRARRDVTLGDGGVSVPRDTELLIPIMAMHHDVALWGHDATEFNP

SEQ ID NO: 94054 - protein, 99 aa, Setaria italica
  Transcript Sequence Number=SeqID_28080
  Homolog annotation: Hit_ID=Q9SPP7; Match level="QueryCoverage=84%, HitCoverage=27%, E-value=5e-12, Identity=45%"; Hit description =Fertilin alpha subunit
MAPDSGSPGSHKGIHTAIKQVQWNDFGSSTSAGGADPFGDLLPEGAEDDLFGATVPGDQGMQASVVGTNNVSTTDHSFSAGVDNKAAIGAGLTDYSFYG

SEQ ID NO: 94055 - protein, 86 aa, Setaria italica
  Transcript Sequence Number=SeqID_28081
  Gene Ontology: Mol. function=phosphotransferase activity, alcohol group as acceptor; Biological process=nucleobase, nucleoside, nucleotide and nucleic acid metabolic process
  Homolog annotation: Hit_ID=Q71F76; Match level="QueryCoverage=100%, HitCoverage=23%, E-value=7e-41, Identity=88%"; Hit description =DCK/dGK-like deoxyribonucleoside kinase
EPQRYAYTFQNYVFVTRLMQEKESSGGIKPLRLVERSIFSDRMVFVRAVHEANWLNGMELSIYDSWFDPVLSSLPGLIPDGFIYLR

SEQ ID NO: 94056 - protein, 109 aa, Setaria italica
  misc_feature (95)..(95): Xaa can be any naturally occurring amino acid
  misc_feature (98)..(98): Xaa can be any naturally occurring amino acid
  Transcript Sequence Number=SeqID_28082
  Gene Ontology: Cellular component=chloroplast
  Subcellular localization annotation: CTP_CleavageSite=20; ConfidenceScore=5.01e-01
MASFASLRGAILQGPLLAPRLAVRRAPTARRRAVPAKISCIGWDPEGILGAPTGGHISRLEFRRRLERDSEAREAFERQVREEKERRRSDREARXIPXTDAGLVEFFLD

SEQ ID NO: 94057 - protein, 120 aa, Setaria italica
  misc_feature (76)..(76): Xaa can be any naturally occurring amino acid
  Transcript Sequence Number=SeqID_28083
  Gene Ontology: Cellular component=chloroplast
  Homolog annotation: Hit_ID=Q9SI71; Match level="QueryCoverage=98%, HitCoverage=47%, E-value=5e-18, Identity=44%"; Hit description =F23N19.15
REIEVEIGRLRPRLNEGFFNHVSREIAQFKFAVTRTAEMEDRLIELEAMQKVLLEGVGPLNPAATLPTQVWTEYVXLCLTETTLAEAYDKLQNDLVTAKERLMKILQSSDRKATVRSMKS

SEQ ID NO: 94058 - protein, 215 aa, Setaria italica
  Transcript Sequence Number=SeqID_28084
  Gene Ontology: Cellular component=chloroplast
  Homolog annotation: Hit_ID=Q9SI71; Match level="QueryCoverage=71%, HitCoverage=81%, E-value=1e-48, Identity=62%"; Hit description =F23N19.15
KKKEKNVTNRTKNEDDEGRRGGHISRLEFRRRLERDSEAREAFERQVREEKERRRSEREARVIPDTDAGLVEFFLDTEAREIEVEIGRLRPRLNEGFFNHVSREIAQIKFAVTRTAEMEDRLIELEAMQKVLLEGVEAYDKLQNDLVTAKERLMKILQSSDRKATLLEMVERNELNISILTLLDENIASAKTSNQDEAVAFMENVRSSIVKYITV

SEQ ID NO: 94059 - protein, 58 aa, Setaria italica
  Transcript Sequence Number=SeqID_28085
GPRPSSERTTEPAGRPAAQPHPPDAGRQPSPYYYPHFTGCLDLAGRASQLHVREQASR

SEQ ID NO: 94060 - protein, 76 aa, Setaria italica
  Transcript Sequence Number=SeqID_28086
  Gene Ontology: Mol. function=hydrolase activity, hydrolyzing O -glycosyl compounds; Cellular component=extracellular region; Biological process=cell wall organization and biogenesis
  Homolog annotation: Hit_ID=Q6L4I2; Match level="QueryCoverage=64%, HitCoverage=7%, E-value=5e-19, Identity=87%"; Hit description =Endoglucanase 15
MAKNVLALLGLILALASVVGMASGAGGHDYALALKKSILYFEAQRSGVLPPNQRVTWRENSGLFDGKANGVDLVGG

SEQ ID NO: 94061 - protein, 36 aa, Setaria italica
  Transcript Sequence Number=SeqID_28087
APSLLALHCIYIILHLVHFELDELLLYILSISLCYL

SEQ ID NO: 94062 - protein, 143 aa, Setaria italica
  Transcript Sequence Number=SeqID_28088
  Homolog annotation: Hit_ID=B9G5N1; Match level="QueryCoverage=100%, HitCoverage=16%, E-value=8e-47, Identity=68%"; Hit description =Coiled-coil protein
SPPSPTEDEGTKSSKPSFAKGNKSHKWLSDIDGPDKSHIEHVGRKSNLNEDRMRKRRLSSATAFASSGTQETIISEKEQEQYPENYLTRAFDQLVVVLGRFQTKIKSETSKKSSEILAATGEIIRQQLEGVEVQMQADVDKLV

SEQ ID NO: 94063 - protein, 101 aa, Setaria italica
  Transcript Sequence Number=SeqID_28089
  Gene Ontology: Mol. function=microtubule motor activity; Cellular component=microtubule associated complex; Biological process =microtubule-based movement
  Homolog annotation: Hit_ID=Q2R2P7; Match level="QueryCoverage=100%, HitCoverage=15%, E-value=4e-30, Identity=65%"; Hit description =Centromeric protein E, putative, expressed
MEKISVAVRFRPPNPAAADPSPAGAGGGGDREWRIDDNRVTLVHRSAGPVPGAPFVFDHVFDRTATNERVYGTVVRDLIGAVVDGFNATAFAYGQTSSGKT

SEQ ID NO: 94064 - protein, 112 aa, Setaria italica
  Transcript Sequence Number=SeqID_28090
  Gene Ontology: Mol. function=DNA-directed RNA polymerase activity; Cellular component=chloroplast; Biological process=transcription, DNA-dependent
  Homolog annotation: Hit_ID=A1EA00; Match level="QueryCoverage=60%, HitCoverage=4%, E-value=6e-33, Identity=97%"; Hit description=DNA -directed RNA polymerase subunit beta''
SDLLAKKRRNRFVVPLQYHQEQEKELISCLGISIEIPFMGVLRRNTIFAYFDDPRYRKDKRGSGIVKFRYRTLEEEYRTREEEYRTREEDSEDEYESPENEYRTREGEGKYE

SEQ ID NO: 94065 - protein, 195 aa, Setaria italica
  Transcript Sequence Number=SeqID_28091
  Homolog annotation: Hit_ID=B9SRQ3; Match level="QueryCoverage=96%, HitCoverage=14%, E-value=3e-50, Identity=50%"; Hit description =Protein binding protein, putative
TLHDYLLRCLFRLLEVQNLEKSESAYFEKLRRVKKFAPLQELFRPISEAICAEFFSAIEVSQGCLEYIAWGSLTTLLLDVFRAREPHDLSCLDQILDLFLQFPGCTSLLQELIVALSCMCKVAPLVLTECPYSGSYPFLALVCHLLRHKDVMCLWWNSEDFSFSFEGFLTRKIPNKHDLQCLVPSVWWPGSSEDE

SEQ ID NO: 94066 - protein, 52 aa, Setaria italica
  Transcript Sequence Number=SeqID_28092
DANACGDTTILSCVHNSSSLVLMRASVLCTKFLHYMLVTKCQQCTYGPPFLF

SEQ ID NO: 94067 - protein, 322 aa, Setaria italica
  Transcript Sequence Number=SeqID_28093
  Gene Ontology: Mol. function=protein binding; Cellular component =kinetochore; Biological process=anaphase-promoting complex-dependent proteasomal ubiquitin-dependent protein catabolic process
  Homolog annotation: Hit_ID=Q9LJN8; Match level="QueryCoverage=95%, HitCoverage=90%, E-value=1e-157, Identity=84%"; Hit description =Mitotic checkpoint protein
  Pfam annotation: Domain name=WD40; Domain location=1-28; Score=2.3; E_ value=21; Accession=PF00400.24; Description=WD domain, G-beta repeat
  Pfam annotation: Domain name=WD40; Domain location=118-153; Score =4.4; E_value=12; Accession=PF00400.24; Description=WD domain, G-beta repeat
  Pfam annotation: Domain name=WD40; Domain location=214-252; Score =24.5; E_value=0.00044; Accession=PF00400.24; Description=WD domain, G-beta repeat
  Pfam annotation: Domain name=WD40; Domain location=32-66; Score=2.7; E_value=19; Accession=PF00400.24; Description=WD domain, G-beta repeat
  Pfam annotation: Domain name=WD40; Domain location=71-109; Score =35.6; E_value=2e-07; Accession=PF00400.24; Description=WD domain, G -beta repeat
  Pfam module annotation: Pfam domain module=WD40::WD40::WD40::WD40::WD4 0; Domain location=1-28::118-153::214-252::32-66::71-109
DGISNLRFSNHSNNLLVSSWDKTVRLYDADANVLKGEFVHPGAVLDCCFHDDSSGFSAGADHTVRRLVFSSAKEDVLGRHDGPVRCVEYSYAAGQVITGSWDKTVKCWDPRGVSGPERTLVGTYTQPERVYSLSLVGNRLVVATAGRHVNIYDLRNMSQPEQKRDSSLKYQTRCVRCFPNGTGYALSSVEGRVSMEFFDLSESAQSKKYAFKCHRKSEAGRDTVYPVNAIAFHPIYGTFATGGCDGFVNVWDGINKKRLYQYSKYTSSIAALSFSKDGHLLAVASSYTYEEGEKSHEPDAIFIRTVNEVEVKPKPKVLAAPQ

SEQ ID NO: 94068 - protein, 151 aa, Setaria italica
  Transcript Sequence Number=SeqID_28094
RSSSRKEGERGRGQAGQCASIPTAPEEEEGGGEAAYRQQGERRRRPRQLPVILSYSKGIIRGRSMASRKVPIIASLVPFLLLLLLVGLASARKDGGGGRARARVPFRAGDERDAYRRIMARMARMEKDCNKTIQSPDGDVIHCVPLHRQPA

SEQ ID NO: 94069 - protein, 74 aa, Setaria italica
  Transcript Sequence Number=SeqID_28095
EDLRGLVRACGDEGKAQEQEAWEQHRGAVAPAASSRIDRAQDQSPPAGCTLFHCRLTTFFCIKRRDDWRRRRDE

SEQ ID NO: 94070 - protein, 230 aa, Setaria italica
  Transcript Sequence Number=SeqID_28096
  Gene Ontology: Cellular component=integral to membrane
  Homolog annotation: Hit_ID=Q5ZA66; Match level="QueryCoverage=85%, HitCoverage=72%, E-value=7e-50, Identity=39%"; Hit description =Embryogenesis transmembrane protein-like
GKKKVPSPIHESPSKWLKLKAIKSFLGSKHQPERDQTGSGNTQHEEAVEKARSLVLLLATLVVSITYQAGLDPPGGLWPADGRAANGRDYKNGDPILLTTHPNRYKVFFYSNSAAFVASLIVIIMVQSRFLLKRHTLEAAMILDLFGLIGAYAAGSCRDEITSIYVVALAGIVLVYVVIHIIFFTLDHEDNRRDAKKLENRREVLLLLAILAATLTYQAGLTPPGGFWLD

SEQ ID NO: 94071 - protein, 98 aa, Setaria italica
  Transcript Sequence Number=SeqID_28097
PDSALSSYGEASNMDIFESTMSLLSEGPHQIGEFRESSEDVLIDNQAAEEGYQNFEVISHPTKRLRVSVKREAGAHSEDESAAPLVAVKKEEAREEAS

SEQ ID NO: 94072 - protein, 59 aa, Setaria italica
  Transcript Sequence Number=SeqID_28098
  Gene Ontology: Mol. function=DNA binding
  Homolog annotation: Hit_ID=A2Q6F5; Match level="QueryCoverage=67%, HitCoverage=13%, E-value=2e-10, Identity=77%"; Hit description =Homeodomain-related
MREEEPSWFARCEEQLPRPDELMPLSQTLITPDLAVAFDIPTHGGGGAGGGAGGGGGAG

SEQ ID NO: 94073 - protein, 40 aa, Setaria italica
  Transcript Sequence Number=SeqID_28099
NPPFNRANNFLWPFKLKAPLGGLKKKRNHYVDVVLTVASI

SEQ ID NO: 94074 - protein, 57 aa, Setaria italica
  Transcript Sequence Number=SeqID_28100
  Gene Ontology: Mol. function=structural constituent of ribosome; Cellular component=ribonucleoprotein complex; Biological process =translation
  Homolog annotation: Hit_ID=Q5I7K6; Match level="QueryCoverage=89%, HitCoverage=20%, E-value=8e-16, Identity=72%"; Hit description =Ribosomal protein L7
LGKHNIICIEDLVHEIMTVGPHFKEANNFLWPFKLKAPLGGLKKKRNHYVDVVLTVA

SEQ ID NO: 94075 - protein, 94 aa, Setaria italica
  Transcript Sequence Number=SeqID_28101
  Gene Ontology: Mol. function=structural constituent of ribosome; Cellular component=ribonucleoprotein complex
  Homolog annotation: Hit_ID=Q7X8D0; Match level="QueryCoverage=65%, HitCoverage=24%, E-value=6e-09, Identity=54%"; Hit description =OSJNBa0035M09.3 protein
  Pfam annotation: Domain name=Ribosomal_L30_N; Domain location=14-65; Score=18.3; E_value=7.3e-05; Accession=PF08079.4; Description =Ribosomal L30 N-terminal domain
MSAAEAKAAVVPESVLRKRKREEQWAADKKEKALADKKKALESRKIIFARAKQYAQEYDAQVTEPAGFPSPYLDLIVPRFSLLVRRVIWSDCAA

SEQ ID NO: 94076 - protein, 41 aa, Setaria italica
  Transcript Sequence Number=SeqID_28102
KAPLGGLKKKRNQYAREPSSSFDELIDVVLTVTSVTTLNIV

SEQ ID NO: 94077 - protein, 63 aa, Setaria italica
  Transcript Sequence Number=SeqID_28103
  Gene Ontology: Mol. function=structural constituent of ribosome; Cellular component=ribonucleoprotein complex
  Homolog annotation: Hit_ID=Q7X8D0; Match level="QueryCoverage=100%, HitCoverage=25%, E-value=7e-15, Identity=69%"; Hit description =OSJNBa0035M09.3 protein
  Pfam annotation: Domain name=Ribosomal_L30_N; Domain location=13-63; Score=22.6; E_value=2.7e-05; Accession=PF08079.4; Description =Ribosomal L30 N-terminal domain
MSSEAAKVAVPESVLRKRKREEQWAADKKEKALAEKKKSIESRKLIFTRAKQYAEEYDAQEKE

SEQ ID NO: 94078 - protein, 179 aa, Setaria italica
  Transcript Sequence Number=SeqID_28104
  Gene Ontology: Mol. function=structural constituent of ribosome; Cellular component=ribonucleoprotein complex; Biological process =translation
  Homolog annotation: Hit_ID=Q5I7K6; Match level="QueryCoverage=60%, HitCoverage=44%, E-value=5e-48, Identity=81%"; Hit description =Ribosomal protein L7
MVPLLLQATERCLQLEWPEEVVGLLEVWANGHDLMDKILNADDVVLPKALLNDIVVAQRNPLLVQLPITSLAYGYPNLKSVRELIYKRGYGKLNKQRIPLSNNNVIEEGLGKHNIICIEDLVHEIMTVGPHFKEANNFLWPFKLKAPLGGLKKKRNHYVEGGDAGNRENYINELIKRMN

SEQ ID NO: 94079 - protein, 175 aa, Setaria italica
  misc_feature (109)..(109): Xaa can be any naturally occurring amino acid
  Transcript Sequence Number=SeqID_28105
  Gene Ontology: Mol. function=structural constituent of ribosome; Cellular component=ribonucleoprotein complex; Biological process =translation
  Homolog annotation: Hit_ID=Q7X8D0; Match level="QueryCoverage=96%, HitCoverage=69%, E-value=9e-70, Identity=78%"; Hit description =OSJNBa0035M09.3 protein
  Pfam annotation: Domain name=Ribosomal_L30; Domain location=14-65; Score=87.7; E_value=4.2e-23; Accession=PF00327.12; Description =Ribosomal protein L30pL7e
VEGWVSYVSPEAKLLFVIRIRGINAMHPKTRKILQLLRLRQIFNGVFLKVNKATINMLRRVEPYVAYGYPNLKSVRELIYKRGYGKLNKQRIPLSNNQVIEGRDLGTKXNIICIEDLVHEIMTVGPHFKEANNFLWPFKLKAPLGGLKKKRNHYVEGGDAGNRENYINELIKRMN

SEQ ID NO: 94080 - protein, 244 aa, Setaria italica
  Transcript Sequence Number=SeqID_28106
  Gene Ontology: Mol. function=structural constituent of ribosome; Cellular component=ribonucleoprotein complex; Biological process =translation
  Homolog annotation: Hit_ID=Q7X8D0; Match level="QueryCoverage=100%, HitCoverage=100%, E-value=1e-106, Identity=78%"; Hit description =OSJNBa0035M09.3 protein
  Pfam annotation: Domain name=Ribosomal_L30; Domain location=85-136; Score=87.7; E_value=4.2e-23; Accession=PF00327.12; Description =Ribosomal protein L30pL7e
  Pfam annotation: Domain name=Ribosomal_L30_N; Domain location=13-83; Score=105.0; E_value=2.5e-28; Accession=PF08079.4; Description =Ribosomal L30 N-terminal domain
  Pfam module annotation: Pfam domain module=Ribosomal_L30::Ribosomal _L30_N; Domain location=85-136::13-83
MSSEAAKVAVPESVLRKRKREEQWAADKKEKALAEKKKSIESRKLIFTRAKQYAEEYDAQEKELVQLKREARLKGGFYVSPEAKLLFVIRIRGINAMHPKTRKILQLLRLRQIFNGVFLKVNKATINMLRRVEPYVAYGYPNLKSVRELIYKRGYGKLNKQRIPLSNNQVIEEGLGKHNIICIEDLVHEIMTVGPHFKEANNFLWPFKLKAPLGGLKKKRNHYVEGGDAGNRENYINELIKRMN

SEQ ID NO: 94081 - protein, 260 aa, Setaria italica
  misc_feature (158)..(158): Xaa can be any naturally occurring amino acid
  Transcript Sequence Number=SeqID_28107
  Gene Ontology: Mol. function=structural constituent of ribosome; Cellular component=ribonucleoprotein complex; Biological process =translation
  Homolog annotation: Hit_ID=Q7X8D0; Match level="QueryCoverage=93%, HitCoverage=99%, E-value=1e-100, Identity=75%"; Hit description =OSJNBa0035M09.3 protein
  Pfam annotation: Domain name=Ribosomal_L30; Domain location=100-151; Score=87.7; E_value=4.2e-23; Accession=PF00327.12; Description =Ribosomal protein L30pL7e
  Pfam annotation: Domain name=Ribosomal_L30_N; Domain location=28-98; Score=100.7; E_value=4.9e-27; Accession=PF08079.4; Description =Ribosomal L30 N-terminal domain
  Pfam module annotation: Pfam domain module=Ribosomal_L30::Ribosomal _L30_N; Domain location=100-151::28-98
RPLLPPPTHTQVIEMSAAEAKAAVVPESVLRKRKREEQWAADKKEKALADKKKALESRKIIFARAKQYAQEYDAQEKELVQLKREARLKGGFYVSPEAKLLFVIRIRGINAMHPKTRKILQLLRLRQIFNGVFLKVNKATINMLRRVEPYVAYGYPNXLKSVRELIYKRGYGKLNKQRIPLSNNNVIEEGLGKHNIICIEDLVHEIMTVGPHFKEANNFLWPFKLKAPLGGLKKKRNHYVEGGDAGNRENYINELIKRMN

SEQ ID NO: 94082 - protein, 129 aa, Setaria italica
  Transcript Sequence Number=SeqID_28108
VRPRTGPPLKIAKRMGYKEGYFRQPKDRLYSSVSDFITAELVSASSKVENVDFSSYRSFTKDYWASRTALRDECRRRGEVRRSLRRSPFDASVLLWHIATDICFRCRPPKHFGERPPRAEVVREVCTEA

SEQ ID NO: 94083 - protein, 81 aa, Setaria italica
  Transcript Sequence Number=SeqID_28109
  Gene Ontology: Mol. function=hydrolase activity, hydrolyzing O -glycosyl compounds
  Homolog annotation: Hit_ID=Q2QZ84; Match level="QueryCoverage=83%, HitCoverage=8%, E-value=1e-15, Identity=60%"; Hit description =Glycosyl hydrolase family 3 C terminal domain containing protein
PPAEVGDAPLKQLVAFRRVFVPAGAVVEVPFTLNVCRDFAIVEETAYTVVPAGASAVIVGDDALALSFGGHVSTWQRRDYH

SEQ ID NO: 94084 - protein, 105 aa, Setaria italica
  Transcript Sequence Number=SeqID_28110
RPPSSLSLGAITIPQQQHPPLLRKEMKHTCWDSSPPQGVTEAFPDKFLYAAQLTFPSIQFRPLFKATPVCSLSCQASHMNTFSFSLQGQSALPHEYLWRYASMTT

SEQ ID NO: 94085 - protein, 101 aa, Setaria italica
  Transcript Sequence Number=SeqID_28111
  Gene Ontology: Mol. function=structural constituent of ribosome; Cellular component=intracellular; Biological process=translation
  Homolog annotation: Hit_ID=Q10LW6; Match level="QueryCoverage=100%, HitCoverage=36%, E-value=6e-42, Identity=81%"; Hit description=Plant acid phosphatase family protein, expressed
  Pfam annotation: Domain name=Acid_phosphat_B; Domain location=1-101; Score=-48.5; E_value=0.00093; Accession=PF03767.6; Description=HAD superfamily, subfamily IIIB (Acid
AWVFDIDDTCLSNLPYYETKQFGAYDPSAFKAWASKEACPGIPPVLGLFTALLDKGFKVFLLSGRDEETLGPCTTGNLEAEGFSGYERLIMRTPEYRGQSS

SEQ ID NO: 94086 - protein, 123 aa, Setaria italica
  misc_feature (115)..(115): Xaa can be any naturally occurring amino acid
  Transcript Sequence Number=SeqID_28112
  Gene Ontology: Mol. function=structural constituent of ribosome; Cellular component=intracellular; Biological process=translation
  Homolog annotation: Hit_ID=Q10LW6; Match level="QueryCoverage=100%, HitCoverage=54%, E-value=2e-42, Identity=61%"; Hit description=Plant acid phosphatase family protein, expressed
  Pfam annotation: Domain name=Acid_phosphat_B; Domain location=1-123; Score=-10.7; E_value=1.8e-06; Accession=PF03767.6; Description=HAD superfamily, subfamily IIIB (Acid
YMTRGQYLRDLAGVMEQASDYADQVDAGADGLDAWVFDIDDTCPGIPPVLGLFTALLDKGFKVFLLSGRDEETLGPCTTGNLEAEGFSGYERLIMRTPEYRGQSSSVFKSAMRKXLVDEGYRI

SEQ ID NO: 94087 - protein, 81 aa, Setaria italica
  Transcript Sequence Number=SeqID_28113
  Gene Ontology: Mol. function=protein serine/threonine kinase activity; Biological process=protein amino acid phosphorylation
  Homolog annotation: Hit_ID=Q2L3U3; Match level="QueryCoverage=100%, HitCoverage=7%, E-value=4e-29, Identity=82%"; Hit description =CLAVATA-like kinase
  Pfam annotation: Domain name=LRR_1; Domain location=29-51; Score =11.9; E_value=1.6; Accession=PF00560.25; Description=Leucine Rich Repeat
  Pfam annotation: Domain name=LRR_1; Domain location=53-75; Score =17.3; E_value=0.065; Accession=PF00560.25; Description=Leucine Rich Repeat
  Pfam module annotation: Pfam domain module=LRR_1::LRR_1; Domain location=29-51::53-75
ARGGVAGLSITSVDLQGPLPANLQPLAATLRTLVLSGTNLTGAIPAEIGGYGELTTLDLSKNQLTGAIPPELCRLAKLESL

SEQ ID NO: 94088 - protein, 78 aa, Setaria italica
  Transcript Sequence Number=SeqID_28114
  Gene Ontology: Mol. function=sequence-specific DNA binding; Cellular component=nucleus; Biological process=regulation of transcription, DNA-dependent
  Homolog annotation: Hit_ID=B6SYC5; Match level="QueryCoverage=100%, HitCoverage=15%, E-value=1e-17, Identity=56%"; Hit description=SPF1 -like DNA-binding protein
  Subcellular localization annotation: CTP_CleavageSite=46; ConfidenceScore=5.28e-01
DSPGLLFSPAMGGFGMSHQQALAQVTAQATHSPLRMFDHIEQPSFSAAAASSGALQHMNSSANMTGMPEMAITTANNE

SEQ ID NO: 94089 - protein, 374 aa, Setaria italica
  Transcript Sequence Number=SeqID_28115
  Gene Ontology: Mol. function=metal ion binding; Cellular component =integral to membrane; Biological process=ubiquitin-dependent protein catabolic process
  Homolog annotation: Hit_ID=B6KEQ4; Match level="QueryCoverage=70%, HitCoverage=76%, E-value=6e-24, Identity=29%"; Hit description=Zinc finger (C3HC4 RING finger) protein, putative
  Pfam annotation: Domain name=zf-C3HC4; Domain location=233-273; Score= 37.9; E_value=4.1e-08; Accession=PF00097.17; Description=Zinc finger, C3HC4 type (RING finger)
MAMRGVDFKWYDGFFLSMLATSVIIVSINWKRYRLCAHPLHIWIVVDYTTVFIFRLLMFLDNGLAAGMGLDLGWQQRYARFCGRIVVLSVLVLLLYPFLWVWTVIGTLWFSTARSCLPEEGQKWGFLIWLLFSYCGLACIACVAVGKWINRRHALQQRAQQGIPVSEYGVLVDMIRVPDWAFEAVGLEMRVGQDTAYHPGLYLTAAQREAVEALIQELPKFRLKAVPTDCSECPICLEEFHVGNEVRGLPCAHNFHVECIDQWLRLNVKCPRCRCSVFPNLDLSALNNLRSTSEPDHPSASASDVTTATSATRYVRSQPVGQSYLVRLQGLLLRPVRHESLESGGEPAVANSRSVGPEELPSIVVDDGHQLPDR

SEQ ID NO: 94090 - protein, 181 aa, Setaria italica
  Transcript Sequence Number=SeqID_28116
  Pfam annotation: Domain name=DUF2043; Domain location=49-156; Score =181.8; E_value=2e-51; Accession=PF09740.1; Description =Uncharacterized conserved protein (DUF2043)
VQSSVDVASTSRDTGKGKKKVVGGVKSDIGKAPVAGNGTRNLDPEKSKLFAEAPVVPWSSVLDRWGSSGDAHVNQRGLELESHWGRVDNDAVIPAAKIAELNVHSSVYREAPVEILPCHAPLKKGGLCQRRDLKVCPFHGPIVPRDAEGNPFEQHSGSFGAEVDPVEHCDIRGNSNELNGN

SEQ ID NO: 94091 - protein, 441 aa, Setaria italica
  misc_feature (14)..(14): Xaa can be any naturally occurring amino acid
  Transcript Sequence Number=SeqID_28117
  Gene Ontology: Mol. function=binding
  Homolog annotation: Hit_ID=B9REU1; Match level="QueryCoverage=99%, HitCoverage=27%, E-value=4e-94, Identity=43%"; Hit description =Guanine nucleotide-exchange, putative
DMYLRLMAIMHLMXKATMTPTDYDSELGSIPAVQRGILEIIPMLRPTATLSSMWAPLLLELLCYLNGQEGPLQKNSKKIHDQNSDAPVDGTKRALVERSKLNGSSTKLDSAVGCGWGLLFVEKLVPIIVNLFLEAPPNERFSASPEVIQGLGRCMNTRRDNPRGTLWRISAECFNRVVTDEVRQDNADCRSDVNSYKLSRARFWKEVADVYETFLVGSCGRVLSSDVPSADSITADETLEMSVLSVFGDDILKLQKDAPVEVLQRLVNCLDRCASRTGSLPVETVGLLPLHCSRFSLSCLQMMFSLCSCIAKASTCAAASETSKVSISILMKRCEVILGQFLADENDQGEHPLPSVRVEETICVLQELARLIIDIDAANALNIPTYLKEALGENKSHGRAHLLSLLPTFSELVVSREARVRELVQVLLRLISSELGLQRLT

SEQ ID NO: 94092 - protein, 74 aa, Setaria italica
  Transcript Sequence Number=SeqID_28118
  Gene Ontology: Biological process=vesicle-mediated transport
  Homolog annotation: Hit_ID=Q7XIN7; Match level="QueryCoverage=45%, HitCoverage=14%, E-value=7e-10, Identity=94%"; Hit description =Putative MFP1 attachment factor 1
  Subcellular localization annotation: CTP_CleavageSite=55; ConfidenceScore=5.01e-01
VTLSRSHGGGRPNAAAEGTQPAPSEGSATAPASGAKAAEALLPSLSIWPPSQRTRDAVVRRLVQTLAAPSVLSQ

SEQ ID NO: 94093 - protein, 168 aa, Setaria italica
  Transcript Sequence Number=SeqID_28119
  Homolog annotation: Hit_ID=Q7XX33; Match level="QueryCoverage=100%, HitCoverage=43%, E-value=4e-72, Identity=50%"; Hit description =OSJNBa0060B20.9 protein
  Pfam annotation: Domain name=PPR; Domain location=11-45; Score=35.2; E_value=2.6e-07; Accession=PF01535.12; Description=PPR repeat
  Pfam annotation: Domain name=PPR; Domain location=126-160; Score =36.7; E_value=9.3e-08; Accession=PF01535.12; Description=PPR repeat
  Pfam module annotation: Pfam domain module=PPR::PPR; Domain location =11-45::126-160
MRKENIPLDVITWSAVISGYAQRGCGQEALDALRQMFLYGSEPNSVTIISVLSACASLGALSQGMETHAYSLKKCLLLLDNHFGGDGDGEDLMVHNALIDMYSKCRCLKAARSIFDCIPRNERNVVTWTVMIGGYAQYGDSNDALKLFSEMISKPYAVSPNAYTISCI

SEQ ID NO: 94094 - protein, 79 aa, Setaria italica
  Transcript Sequence Number=SeqID_28120
  Subcellular localization annotation: CTP_CleavageSite=59; ConfidenceScore=5.03e-01
GKDRDKDKDKDKDKDKDKDKDKNKNKSPPPPPPYHPPPPPPRVPSPPPPIVSYSPPPVVSSPPPPLPSSPPPPVVSSPP

SEQ ID NO: 94095 - protein, 73 aa, Setaria italica
  Transcript Sequence Number=SeqID_28121
  Gene Ontology: Mol. function=microtubule motor activity; Cellular component=microtubule associated complex; Biological process =microtubule-based movement
  Homolog annotation: Hit_ID=Q69LA8; Match level="QueryCoverage=67%, HitCoverage=8%, E-value=4e-22, Identity=97%"; Hit description=KIF4 -like
DNKLVLVGKKVSIAGQSGKLWRWKRSHHQWLLQFKWKWQKPWKLSEMIRHSDETITRTRPRPQLLPPKPHRVM

SEQ ID NO: 94096 - protein, 53 aa, Setaria italica
  Transcript Sequence Number=SeqID_28122
  Gene Ontology: Mol. function=microtubule motor activity; Cellular component=microtubule associated complex; Biological process =microtubule-based movement
  Homolog annotation: Hit_ID=Q69LA8; Match level="QueryCoverage=66%, HitCoverage=6%, E-value=2e-13, Identity=97%"; Hit description=KIF4 -like
WRWKRSHHQWLLQFKWKWQKPWKLSEMIRHSDETITRTRPRPQLLPPKPHRVM

SEQ ID NO: 94097 - protein, 308 aa, Setaria italica
  misc_feature (226)..(226): Xaa can be any naturally occurring amino acid
  misc_feature (306)..(306): Xaa can be any naturally occurring amino acid
  Transcript Sequence Number=SeqID_28123
  Gene Ontology: Mol. function=microtubule motor activity; Cellular component=microtubule associated complex; Biological process =microtubule-based movement
  Homolog annotation: Hit_ID=Q8GS71; Match level="QueryCoverage=98%, HitCoverage=30%, E-value=1e-130, Identity=72%"; Hit description =Kinesin-like protein
  Pfam annotation: Domain name=Kinesin; Domain location=16-306; Score =205.0; E_value=2e-58; Accession=PF00225.15; Description=Kinesin motor domain
MTMEHGEDCCVRVAVHVRPLIGDEKLQGCKDCVAVVPGKPQVQIGSHSFTFDHVYGSTGTPSAAMFDECVAPLVDGLFQGYNATVLAYGQTGSGKTYTMGTACKEGSHIGIIPRAMAALFDKIESLKNQVEFQLRVSFIEILKEEVRDLLDPTAATVGKVENGNGHTKLSVPGKPPVQIREASNGVITLAGSTEVHVSTQKEMTACLEQGSLSRATGSTNMNNQSXMRKTDPIMTADGMPIEEMNEDYLCAKLHLVDLAGSERAKRTGSDGLRFKEGVHINRGLLALGNVISALGDEEKRKEGAHXPY

SEQ ID NO: 94098 - protein, 886 aa, Setaria italica
  Transcript Sequence Number=SeqID_28124
  Gene Ontology: Mol. function=microtubule motor activity; Cellular component=microtubule associated complex; Biological process =microtubule-based movement
  Homolog annotation: Hit_ID=Q8GS71; Match level="QueryCoverage=97%, HitCoverage=84%, E-value=0.0, Identity=68%"; Hit description=Kinesin- like protein
  Pfam annotation: Domain name=Kinesin; Domain location=1-224; Score =184.7; E_value=2.6e-52; Accession=PF00225.15; Description=Kinesin motor domain
VRDLLDPTAATVGKVENGNGHTKLSVPGKPPVQIREASNGVITLAGSTEVHVSTQKEMTACLEQGSLSRATGSTNMNNQSSRSHAIFTITLEQMRKTDPIMTADGMPIEEMNEDYLCAKLHLVDLAGSERAKRTGSDGLRFKEGVHINRGLLALGNVISALGDEKKRKEGAHVPYRDSKLTRLLQDSLGGNSKTVMIACISPADINAEETLNTLKYANRARNIQNKPIVNRNPVADEMKRMRQQIEYLQAELVSARGGVGSDDVQGLRERISWLEQTNEDLCRELYDIRNRSQTDPCEPEMQKTSNGFTKSEGLKRSLQSTDPFDVPMTDSVRGNPKDIEDEVAKEWEHTMLQDSLGKELNELNRQLEQKESEMKMYGCDTVALKQHFGKKLMELEEEKRAVQQERDRLLAEVESLNADGQTHKLRDAQLQKLKSLEAQILDLKKKQENQVQLLKEKQKSDEAAKKLQEEIHFIKAQKVQLQHKIKQEAEQFRQWKATREKELLQLRKEGRRNEYERHKLQALNQRTKLVLQRKTEEAAMATKRLKEILEARKSSARDNSAGTNGTSPGSNMGERSLQKWLDQELEVMVHVHEVRNEYEKQSQLRAKLGEELAILKQEDIRAGASSPQRGKNGNSRPNTLSPNARQARIASLESMVTISSNTLVAMASQLSEAEERERAFSGRSRWNQLRSMGEAKSLLQYIFNVAADARCQVREKELEMKERMTELVGILRHSESRRREMEKQLKQREQTAPMATTPPRSGNGTAKHSADDPSTPLSPVAVPAQKQLKYSAGIVNSPSKGIAAFNKEQLKMVPIAQLSVGKKVSIAGQSGKLWRWKRSHHQWLLQFKWKWQKPWKLSEMIRHSDETITRTRPRPQLLPPKPHRVM

SEQ ID NO: 94099 - protein, 117 aa, Setaria italica
  Transcript Sequence Number=SeqID_28125
  Gene Ontology: Mol. function=molecular_function; Cellular component =cytoplasm; Biological process=vesicle docking during exocytosis
  Homolog annotation: Hit_ID=Q851W1; Match level="QueryCoverage=100%, HitCoverage=19%, E-value=7e-39, Identity=73%"; Hit description=SEC1 family transport protein SLY1
MALSLRRKQLDVIVRMLHLNQQQLPNGGEGQGEEEAYKLLVMDPACVSLLSPVLKVGDLRRHGVTLTLGIDRPRQAVPDAPAVYLVRPTPSNVDRIAADAAAGLYASFHVNFSTSRP

SEQ ID NO: 94100 - protein, 145 aa, Setaria italica
  misc_feature (116)..(116): Xaa can be any naturally occurring amino acid
  Transcript Sequence Number=SeqID_28126
  Gene Ontology: Mol. function=protein binding; Cellular component =extracellular region
  Homolog annotation: Hit_ID=A0MMC8; Match level="QueryCoverage=95%, HitCoverage=40%, E-value=4e-46, Identity=66%"; Hit description =Polygalacturonase inhibiting protein-like
  Pfam annotation: Domain name=LRR_1; Domain location=25-44; Score =10.0; E_value=3.7; Accession=PF00560.25; Description=Leucine Rich Repeat
  Pfam annotation: Domain name=LRR_1; Domain location=49-70; Score=1.8; E_value=1.4e+02; Accession=PF00560.25; Description=Leucine Rich Repeat
  Pfam annotation: Domain name=LRR_1; Domain location=72-94; Score =10.5; E_value=2.9; Accession=PF00560.25; Description=Leucine Rich Repeat
  Pfam annotation: Domain name=LRR_1; Domain location=96-117; Score =0.6; E_value=2.3e+02; Accession=PF00560.25; Description=Leucine Rich Repeat
  Pfam module annotation: Pfam domain module=LRR_1::LRR_1::LRR_1::LRR _1; Domain location=25-44::49-70::72-94::96-117
AGEAELWLSHNNLSGAIPAGFAAVNFTHLDLSRNSLSGDASPVLGRGKPLQHLDLSRNDFRFSLTAVEMPEGLTYLDLSHNAIRGRVPAQVADLAGLQLFNVSYNKLCNVLPTGRXMAKFDAYSYQHNKCLCGSPLPACHRRYLL

SEQ ID NO: 94101 - protein, 285 aa, Setaria italica
  misc_feature (184)..(184): Xaa can be any naturally occurring amino acid
  Transcript Sequence Number=SeqID_28127
  Gene Ontology: Mol. function=aspartic-type endopeptidase activity; Cellular component=chromatin; Biological process=RNA-dependent DNA replication
  Homolog annotation: Hit_ID=Q2QSH9; Match level="QueryCoverage=68%, HitCoverage=12%, E-value=8e-19, Identity=31%"; Hit description =Retrotransposon protein, putative, unclassified, expressed
MDWVQQRMQVNHDLATKALEHVLIDQSTLSRLDSSHRAGSGQADNGEDARRLFGCGLVVSTSHRDATHRPPLRPHPHRSGEIPPHCSRRGGGCIRQNYEEGTLAGGKQDIKHLPAPSQFNKERQKRDYCKANNLCYYCMESYATHSSKCSKHPRAQVNALVVSDLDVALTDEVLEQLAIEVSWXAEFCSLSINAISGTDEGDALKLKAMVEKQIMLLLVDSGSSHSFASSAFLQKYGITPTTMKSKLVKVANGDTLITDKEVLQMEWWIQGYTFRTDMKVNGHRC

SEQ ID NO: 94102 - protein, 194 aa, Setaria italica
  Transcript Sequence Number=SeqID_28128
  Gene Ontology: Mol. function=binding
  Homolog annotation: Hit_ID=B6SS76; Match level="QueryCoverage=95%, HitCoverage=30%, E-value=1e-45, Identity=58%"; Hit description =Microtubule-associated protein TORTIFOLIA1
HFLGTKQVKIVRESMNRMIEAWREIPDVDEEVCSSDVPSLSRARSSLTETVSDGRYPTDSLGSSSAPSITRRNSWPANRQLPPDALHNASNRKASPPSNASKKILPPPRRNADQAKNYEDKVDITVAPDATPIKMVTEEKLLKEGNVRERLEARRVLFQKTGEKGYKKLVGPKSGSRVVPYNGDGDLEETALDE

SEQ ID NO: 94103 - protein, 244 aa, Setaria italica
  Transcript Sequence Number=SeqID_28129
  Gene Ontology: Mol. function=ribonuclease H activity
  Homolog annotation: Hit_ID=B6SJ74; Match level="QueryCoverage=98%, HitCoverage=96%, E-value=1e-112, Identity=83%"; Hit description=FIP1
  Pfam annotation: Domain name=GRAM; Domain location=115-194; Score =54.6; E_value=3.9e-13; Accession=PF02893.12; Description=GRAM domain
  Subcellular localization annotation: CTP_CleavageSite=47; ConfidenceScore=5.61e-01
TPPSGYPVGHGQAYGNQQAAAPQPQSTAVPVTVASNGVGNPYVMVTPAAATPSTCQTVMKALGRYGKLLEDGTRKAADATGNIWHHLRTAPNMADAAVARLSQGTKVYAEGGHDRVFYQTFGAMPGEQLRKAYACYLSTSSGPVIGTLYLSTARLAFCSDSPVCYQGPAGQPIECMYYKVVLPLSQVRSVNPSSSTRNRAERYIQITTTDNHEFWFMGFVNYDKALKNLYEALQHRDVHGQKHS

SEQ ID NO: 94104 - protein, 29 aa, Setaria italica
  Transcript Sequence Number=SeqID_28130
IDLLECDLFICNHGIPVCCLRLKRITVYH

SEQ ID NO: 94105 - protein, 75 aa, Setaria italica
  misc_feature (57)..(57): Xaa can be any naturally occurring amino acid
  Transcript Sequence Number=SeqID_28131
  Gene Ontology: Mol. function=binding
  Homolog annotation: Hit_ID=Q69JJ7; Match level="QueryCoverage=89%, HitCoverage=11%, E-value=2e-27, Identity=85%"; Hit description =Putative pentatricopeptide (PPR) repeat-containing protein
DTSQVLLDIDDEDVKESSLALHSKKLAIAFGLTSTAPGTPIRVVNNLRICGDCHNAXKLLSEIYGRSIIVRDAIV

SEQ ID NO: 94106 - protein, 65 aa, Setaria italica
  Transcript Sequence Number=SeqID_28132
  Homolog annotation: Hit_ID=Q7XXD1; Match level="QueryCoverage=83%, HitCoverage=10%, E-value=1e-18, Identity=64%"; Hit description =OSJNBa0039G19.7 protein
QSPQIRRLFTTLIGVPRVVNNLRICGDCHNAIKLLSEIYGRSIIVRDANRFHHFREGSCSCGDYW

SEQ ID NO: 94107 - protein, 134 aa, Setaria italica
  Transcript Sequence Number=SeqID_28133
  Homolog annotation: Hit_ID=Q6F380; Match level="QueryCoverage=100%, HitCoverage=39%, E-value=2e-43, Identity=71%"; Hit description =Putative BT1 family protein
ILGSALGMTQVLLVTGLNRKLGISDEWFSIGDSLIITVLGQASFMPVLVLAAKLCPPGVEATLFATLMSISNAGSVAGGLVGAGLTQFLGVTRDNYENLALLIAVCNLTSLLPLPLLGLLPNESPTDSAPTKND

SEQ ID NO: 94108 - protein, 91 aa, Setaria italica
  misc_feature (24)..(24): Xaa can be any naturally occurring amino acid
  misc_feature (52)..(52): Xaa can be any naturally occurring amino acid
  Transcript Sequence Number=SeqID_28134
  Subcellular localization annotation: CTP_CleavageSite=75; ConfidenceScore=5.62e-01
LQSSFPAISLIWHPPPPPVRPLPXAARAAAARHVASGTGRSSPLFPRRGFAXPSPPPPPSQPPGLARCRPTPPPPAPMPSATRLVRRGLAK

SEQ ID NO: 94109 - protein, 519 aa, Setaria italica
  Transcript Sequence Number=SeqID_28135
  Gene Ontology: Mol. function=ubiquitin thiolesterase activity; Cellular component=cytoplasm; Biological process=ubiquitin-dependent protein catabolic process
  Homolog annotation: Hit_ID=B6SW43; Match level="QueryCoverage=99%, HitCoverage=80%, E-value=0.0, Identity=69%"; Hit description=UBP25
  Pfam annotation: Domain name=UCH; Domain location=37-216; Score=33.5; E_value=1.9e-09; Accession=PF00443.21; Description=Ubiquitin carboxyl- terminal hydrolase
ACHTAGLRMRKRLPAAIANGNCGEEEGRGQGACMVMRETFGGALLSQVKCLVCKGESNKTDEIMDISLDLPGSSSVADALARFFQPEILEGANKYSCERCKKLTSARKQMFILRSPKVLVIQLKRFEGINGGKINRNIEFKEALVLSDFMYNKNQDPQPAYNLFGCIVHSGLSPESGHYYAYVKDAIGRWFCCNDSHVSLSSSQNVLSEKVYILFYILNSKNQKPSTNGYSSTAAKSFSTNGIGISSTSSSETLKIPLVKQNGSCSTKGNALLPLKNGKIASGPLIKPIHFKNSVTEKVKSNGKENLPSKMNPEVNESATLSVSNGRMTGKFVEPSKKSADGTISCGKIDDHSERKLQDANGNGHPIHSQYLGEASNGNTTCAQQYSEKSSGALASKSPVLHHEIEESANSVKDVVISGKDRAHSKRQLEEDKFKEELAESASSELRLSVWVDDVCDFMRSQKRRRIQSSGIPQDVDSMRKHLKSDSERIFRSKVPESLVENLIKRLRPYFEGIYPPNA

SEQ ID NO: 94110 - protein, 61 aa, Setaria italica
  misc_feature (1)..(18): Xaa can be any naturally occurring amino acid
  Transcript Sequence Number=SeqID_28136
XXXXXXXXXXXXXXXXXXFLEIVIHRLQTQDEHTSQVELHYTLHPCRCQINVHSTNSCYTV

SEQ ID NO: 94111 - protein, 188 aa, Setaria italica
  Transcript Sequence Number=SeqID_28137
  Gene Ontology: Mol. function=receptor activity
  Homolog annotation: Hit_ID=Q7F2F7; Match level="QueryCoverage=99%, HitCoverage=48%, E-value=1e-97, Identity=90%"; Hit description =P0402A09.9 protein
FSAVPIYECTLEGLQAAYSGSTPYVKDGLLFYNKHAHYQAGITPLTLVWKDETCSQYVIDTDGKGEIPNEQHLVLELQEDGKLVTSDDPPVVFGSLDNEFIQKSNLRAGNLLRFAVRDESVKLVDGKMQIGELQFVGKPNRARAFADSHSKALFQYAARRAPLRIDDLVASIQSNNMELESTDVEMQD

SEQ ID NO: 94112 - protein, 144 aa, Setaria italica
  Transcript Sequence Number=SeqID_28138
  Gene Ontology: Mol. function=heat shock protein binding; Cellular component=vacuole
  Homolog annotation: Hit_ID=B9RNG2; Match level="QueryCoverage=51%, HitCoverage=12%, E-value=5e-25, Identity=68%"; Hit description=Heat shock protein binding protein, putative
  Pfam annotation: Domain name=TPR_4; Domain location=117-142; Score =8.2; E_value=4.5; Accession=PF07721.6; Description=Tetratricopeptide repeat
  Pfam annotation: Domain name=TPR_4; Domain location=30-55; Score =10.7; E_value=2.3; Accession=PF07721.6; Description=Tetratricopeptide repeat
  Pfam module annotation: Pfam domain module=TPR_4::TPR_4; Domain location=117-142::30-55
RTRFLCCFDVSELKRRLVAGFSKKSNTEAQWRYLVLGQACFHLGLMEDAVVLLQTGRRLASAAFRRESVCWSEDSFSPSNLTANAAKRRTSKSGTGSVAPASEAESVSQLLAHVKLLLRRRAAAAAALDAGLPAEAVRHFNKVL

SEQ ID NO: 94113 - protein, 103 aa, Setaria italica
  Transcript Sequence Number=SeqID_28139
  Gene Ontology: Mol. function=nucleotide diphosphatase activity; Cellular component=vacuole; Biological process=metabolic process
  Homolog annotation: Hit_ID=Q42974; Match level="QueryCoverage=81%, HitCoverage=17%, E-value=4e-34, Identity=82%"; Hit description =Nucleotide pyrophosphatase
  Subcellular localization annotation: CTP_CleavageSite=56; ConfidenceScore=5.22e-01
PHLLAVTAASAAATARPLSKLQKPVVLLISSDGFRFGYQFKAPLPHIRRLFANGTSAAEGLISVFPTLTFPNHYSIVTGLYPSSHGIINNYFPDPISGDHFNM

SEQ ID NO: 94114 - protein, 258 aa, Setaria italica
  misc_feature (15)..(15): Xaa can be any naturally occurring amino acid
  misc_feature (17)..(17): Xaa can be any naturally occurring amino acid
  misc_feature (30)..(30): Xaa can be any naturally occurring amino acid
  Transcript Sequence Number=SeqID_28140
  Homolog annotation: Hit_ID=B9SEZ8; Match level="QueryCoverage=93%, HitCoverage=53%, E-value=7e-51, Identity=43%"; Hit description=Cell cycle regulatory protein, putative
  Pfam annotation: Domain name=RCC1; Domain location=13-62; Score=5.4; E_value=0.22; Accession=PF00415.10; Description=Regulator of chromosome condensation (RCC1)
  Pfam annotation: Domain name=RCC1; Domain location=157-202; Score =8.5; E_value=0.098; Accession=PF00415.10; Description=Regulator of chromosome condensation (RCC1)
  Pfam module annotation: Pfam domain module=RCC1::RCC1; Domain location=13-62::157-202
SASGVVSAAIGSDGXLXFGEVKAGQLGLGXDIVEAAVPSRVEALSSYHVTKVSFGWGHAMALTKDGKLFGWGYSENGRLGEMGQSTRAPSAEEYIGKMVDKYSSSMMEAVEKMVEEKIRSEDNMPIIWEPSLVHEASPLEVSDVSCGIDHSLILLSDGVLLSGGDNTYGQLGRKAGLPKLLPVDMSYKPFSISASVGHSLALCHTSTEGTDGVETGVLSWGWNCSSQLGRSGQEDIPALVNCLSGVRPVSTSAGRVHS

SEQ ID NO: 94115 - protein, 124 aa, Setaria italica
  Transcript Sequence Number=SeqID_28141
  Gene Ontology: Mol. function=protein serine/threonine kinase activity; Biological process=protein amino acid phosphorylation
  Subcellular localization annotation: CTP_CleavageSite=50; ConfidenceScore=5.52e-01
QLAASTGFAWAKKPRPDATAAAAAAAVTKRSGSKGPGTNSNAGGDAERTTAAATATTPAPYEAEKQEMIKQWAQVADAFSTSEAYNNRLRQTLDAKHLKTGKKYKGKVDRVDFSGPLLSQPRRI

SEQ ID NO: 94116 - protein, 90 aa, Setaria italica
  Transcript Sequence Number=SeqID_28142
  Gene Ontology: Mol. function=sequence-specific DNA binding; Cellular component=nucleus; Biological process=regulation of transcription, DNA-dependent
MEVVEEANRAAVESCKKLVAFLSLSAGDPFRPMPVAVETDEAVAGFGKVVAVLSDRLGHARARVGKRSLAPPVDASCLLDHPSMAPRHPP

SEQ ID NO: 94117 - protein, 87 aa, Setaria italica
  Transcript Sequence Number=SeqID_28143
  Gene Ontology: Mol. function=translation initiation factor activity; Cellular component=chromatin; Biological process=proteolysis
  Homolog annotation: Hit_ID=B9SAK6; Match level="QueryCoverage=80%, HitCoverage=37%, E-value=7e-32, Identity=90%"; Hit description =Eukaryotic translation initiation factor 2 gamma subunit, putative
  Pfam annotation: Domain name=eIF2_C; Domain location=2-74; Score =104.8; E_value=3e-28; Accession=PF09173.3; Description=Initiation factor eIF2 gamma, C terminal
  Subcellular localization annotation: CTP_CleavageSite=48; ConfidenceScore=5.19e-01
SFSASVGLVAHRSRTSVVLMLNIGSMSTGARVLAVKNDLAKLQLTAPVCTSKGEKVALSRRVEKHWRLIGWGQIQAGSTLEVPPCPL

SEQ ID NO: 94118 - protein, 102 aa, Setaria italica
  misc_feature (36)..(36): Xaa can be any naturally occurring amino acid
  Transcript Sequence Number=SeqID_28144
  Gene Ontology: Mol. function=translation initiation factor activity; Cellular component=chromatin; Biological process=chromatin assembly or disassembly
  Homolog annotation: Hit_ID=O64490; Match level="QueryCoverage=96%, HitCoverage=20%, E-value=7e-40, Identity=83%"; Hit description =F20D22.6 protein
  Pfam annotation: Domain name=GTP_EFTU; Domain location=2-101; Score= -38.1; E_value=1.5e-06; Accession=PF00009.19; Description=Elongation factor Tu GTP binding domain
MNRGDDILMATMLNGAAIMDGALLLIAANESCPQPXQTSEHLAAVEIMRLQHIIILQNKIDLIQESAAMNQHEAIQKFIQGTIAQGAPVVPISAQLKYNIEC

SEQ ID NO: 94119 - protein, 187 aa, Setaria italica
  misc_feature (19)..(19): Xaa can be any naturally occurring amino acid
  Transcript Sequence Number=SeqID_28145
  Gene Ontology: Mol. function=translation initiation factor activity; Cellular component=membrane; Biological process=proteolysis
  Homolog annotation: Hit_ID=O64490; Match level="QueryCoverage=87%, HitCoverage=34%, E-value=2e-82, Identity=87%"; Hit description =F20D22.6 protein
  Pfam annotation: Domain name=GTP_EFTU; Domain location=2-172; Score =58.8; E_value=1.7e-14; Accession=PF00009.19; Description=Elongation factor Tu GTP binding domain
FKNELERNITIKLGYANAXKIYKCEDDRCPRPMCYKAYGSGKEDSPLCDVPGFENCRMKLLRHVSFVDCPGHDILMATMLNGAAIMDGALLLIAANESCPQPQTSEHLAAVEIMRLQHIIILQNKIDLIQESAAMNQHEAIQKFIQGTIAQGAPVVPISAQLKRGDSGVSPKKGSKRKHGRAVNASS

SEQ ID NO: 94120 - protein, 114 aa, Setaria italica
  Transcript Sequence Number=SeqID_28146
  Gene Ontology: Mol. function=translation initiation factor activity; Cellular component=membrane; Biological process=proteolysis
  Homolog annotation: Hit_ID=O64490; Match level="QueryCoverage=100%, HitCoverage=24%, E-value=4e-56, Identity=88%"; Hit description =F20D22.6 protein
  Pfam annotation: Domain name=GTP_EFTU; Domain location=30-108; Score=- 89.5; E_value=0.025; Accession=PF00009.19; Description=Elongation factor Tu GTP binding domain
MARRGLMEQDLSRLDVATLHPLSPEVISRQATINIGTIGHVAHGKSTVVKAISGVQTVRFKNELERNITIKLGYANAKIYKCEDDRCPRPMCYKAYGSGKEDSPHCDVPGFENT

SEQ ID NO: 94121 - protein, 113 aa, Setaria italica
  Transcript Sequence Number=SeqID_28147
  Gene Ontology: Mol. function=translation initiation factor activity; Cellular component=eukaryotic translation initiation factor 2 complex; Biological process=translational initiation
  Homolog annotation: Hit_ID=B9SAK6; Match level="QueryCoverage=90%, HitCoverage=53%, E-value=5e-44, Identity=81%"; Hit description =Eukaryotic translation initiation factor 2 gamma subunit, putative
  Pfam annotation: Domain name=eIF2_C; Domain location=1-92; Score =191.6; E_value=2.2e-54; Accession=PF09173.3; Description=Initiation factor eIF2 gamma, C terminal
YSVLQVNFFLLRRLLGVRTSGTERASRVSKLAKGEILMLNIGSMSTGARVVAVRNDLAKLQLTAPVCTSKGEKLALSRRIEKHWRLIGWGTIQAGNTLEVPPARSESYTTCLT

SEQ ID NO: 94122 - protein, 464 aa, Setaria italica
  Transcript Sequence Number=SeqID_28148
  Gene Ontology: Mol. function=translation initiation factor activity; Cellular component=membrane; Biological process=proteolysis
  Homolog annotation: Hit_ID=O64490; Match level="QueryCoverage=100%, HitCoverage=100%, E-value=0.0, Identity=89%"; Hit description =F20D22.6 protein
  Pfam annotation: Domain name=GTP_EFTU; Domain location=30-237; Score =194.0; E_value=4.1e-55; Accession=PF00009.19; Description=Elongation factor Tu GTP binding domain
  Pfam annotation: Domain name=GTP_EFTU_D2; Domain location=268-351; Score=47.2; E_value=6.3e-11; Accession=PF03144.17; Description =Elongation factor Tu domain 2
  Pfam annotation: Domain name=MMR_HSR1; Domain location=33-185; Score=- 7.4; E_value=0.0048; Accession=PF01926.15; Description=GTPase of unknown function
  Pfam annotation: Domain name=eIF2_C; Domain location=360-451; Score =209.3; E_value=1e-59; Accession=PF09173.3; Description=Initiation factor eIF2 gamma, C terminal
  Pfam module annotation: Pfam domain module=GTP_EFTU::GTP_EFTU_D2::MMR_ HSR1::eIF2_C; Domain location=30-237::268-351::33-185::360-451
MARRGLMEQDLSKLDVTKLHPLSPEVISRQATINIGTIGHVAHGKSTVVKAISGVQTVRFKNELERNITIKLGYANAKIYKCEDDRCPRPMCYKAYGSGKEDSPHCDVPGFENTRMKLLRHVSFVDCPGHDILMATMLNGAAIMDGALLLIAANESCPQPQTSEHLAAVEIMRLQHIIILQNKIDLIQESAAMNQHEAIQKFIQGTIAEGAPVVPISAQLKYNIDVICEYIVKKIPIPERNFTSPPNMIVIRSFDVNKPGSEVDEIRGGVAGGSILRGVLRVNQKIEVRPGIVMKDESGNIKCTPIYSRIVSLYAEQNELQFAVPGGLIGVGTTMDPTLTRADRLVGQVLGEVGSLPDVYVELEINFFLLRRLLGVRTKGTEKAGKVSKLTKGEILMLNIGSMSTGARVLAVKNDLAKLQLTAPVCTSKGEKVALSRRVEKHWRLIGWGQIQAGSTLEVPPCPL

SEQ ID NO: 94123 - protein, 36 aa, Setaria italica
  Transcript Sequence Number=SeqID_28149
FLTDLLSCCCCCYLVVSMLLSCCILLTCFFLDQLGW

SEQ ID NO: 94124 - protein, 187 aa, Setaria italica
  Transcript Sequence Number=SeqID_28150
  Gene Ontology: Mol. function=hydrolase activity, hydrolyzing O -glycosyl compounds; Biological process=carbohydrate metabolic process
  Homolog annotation: Hit_ID=Q9SM08; Match level="QueryCoverage=100%, HitCoverage=20%, E-value=1e-78, Identity=68%"; Hit description=Xylan endohydrolase
  Pfam annotation: Domain name=Glyco_hydro_10; Domain location=1-186; Score=-6.5; E_value=1.5e-11; Accession=PF00331.12; Description =Glycosyl hydrolase family 10
FPLGACIMRTNMDNEDFVDFFTKNFNWAVFGNELKWYWTEPQRGQVSYADADDLLRLCSDHGMCVRGHCIFWEVENTVQQWVKTLSTDDLSAAVKSRLDGLLTRYKGKFKHYDVNNEMLHGSFYQDKLGKDIRATMFKTAAELDPDALLFVNDYNVESMCDIRATPEAYIQQIIGLQEQGAPVGGVG

SEQ ID NO: 94125 - protein, 216 aa, Setaria italica
  Transcript Sequence Number=SeqID_28151
  Gene Ontology: Mol. function=hydrolase activity, hydrolyzing O -glycosyl compounds; Biological process=carbohydrate metabolic process
  Homolog annotation: Hit_ID=Q27U87; Match level="QueryCoverage=89%, HitCoverage=62%, E-value=1e-75, Identity=64%"; Hit description=Endo -1,4-beta-xylanase (Fragment)
  Pfam annotation: Domain name=Glyco_hydro_10; Domain location=2-160; Score=-127.6; E_value=2.6e-05; Accession=PF00331.12; Description =Glycosyl hydrolase family 10
WAVFGNELKWYWTEPQRGQVSYALLFVNDYNVESMCDIRATPEAYIQQIIGLQEQGAPVGGVGLQGHVSNPVGPVIRSVLDRLAVLGLPIWFTEVDVSSANEHVRADDLEVMLREAYAHPAVEGVMLWGFWELFMSRDDAHLVDAEGQVNEAGRRLLQLKREWLTHAHGHADDNGEFKFRGHHGEYHVDVTTPTGKISQTFTVDKDDAPLVLNIKV

SEQ ID NO: 94126 - protein, 93 aa, Setaria italica
  Transcript Sequence Number=SeqID_28152
  Gene Ontology: Mol. function=protein binding; Cellular component =chromatin; Biological process=RNA-dependent DNA replication
  Homolog annotation: Hit_ID=Q53M97; Match level="QueryCoverage=93%, HitCoverage=14%, E-value=1e-21, Identity=50%"; Hit description =Retrotransposon, putative, centromere-specific
  Pfam annotation: Domain name=Retrotrans_gag; Domain location=1-83; Score=44.2; E_value=5.2e-10; Accession=PF03732.9; Description =Retrotransposon gag protein
LQWKHICRRKKVLESWEDFKFLFRDAFIPEYYADYLLAKLDNLRQGSRTVKQYFHDFKICIMYGGLDECMEDVMSRFMRGLNSEIRTLLISKS

SEQ ID NO: 94127 - protein, 201 aa, Setaria italica
  Transcript Sequence Number=SeqID_28153
  Homolog annotation: Hit_ID=Q7XBC7; Match level="QueryCoverage=41%, HitCoverage=11%, E-value=4e-31, Identity=66%"; Hit description =Putative transposase protein
KGKATADIDFNPEDPPEAYSHPSIHSRVTEYTSMAREVHGPEFDPSSQDIDAEIVMRVGGGKKHGRYWIGDSVIDTASTPTLSQIRARSTDSSPAIRPRPTAAQLQMQALEAQVEVERKRREELEARIEADRQLERQRTEQMFQYMQSVFHSLGQTPPPMPPNLFPPPPPPPAATPNQSAASNAESSWGQWPPARPPHPSQ

SEQ ID NO: 94128 - protein, 580 aa, Setaria italica
  misc_feature (421)..(421): Xaa can be any naturally occurring amino acid
  misc_feature (518)..(518): Xaa can be any naturally occurring amino acid
  Transcript Sequence Number=SeqID_28154
  Gene Ontology: Mol. function=nucleoside-triphosphatase activity; Cellular component=intrinsic to membrane; Biological process=innate immune response
  Homolog annotation: Hit_ID=B9RCE1; Match level="QueryCoverage=99%, HitCoverage=57%, E-value=0.0, Identity=63%"; Hit description =Nucleoside-triphosphatase, putative
  Pfam annotation: Domain name=NB-ARC; Domain location=33-311; Score= -102.4; E_value=0.0051; Accession=PF00931.14; Description=NB-ARC domain
PVLWKETEKDIEMQRLDSPLRHGRPLRVKNGIRHGRKKRSRKILYGKGIACISGEPGIGKTELVLEYAYRFFQRYKMVLWVRGESRYIRQNYLALRTFLEVDLSVDSHLHEKGSDRCFEEQEEEAIAKIRQELMRDIPFLVIIDNLESEKDWWDKRVIMDLLPHFGGETHFIITTRLPRMINLEPMKLSYLSGAEAMTLMKGGVKDYPLVEIDALKIIEEKLGRLPLGLSIVGAILSELPITPTRLLDTLNRTPLVRNFSWNEREVLSLKNHEILVRLLDVCLSIFDHADGPRSLATRMVQVSGWFAPSAVPVHMLALAAHKVPKKHRRGPRWRKLWQTLTCGLATSRMKRSEAEAAAMLMRFGIARCSAKPDHVQFHDLIRLYARQRGGTRTAQAVVQSVYLQGSIKHSSEHLWSSCFMXFFGFGSDPLLVELRPSELMFFVKQIVVPLAIHTFITYSRCNAALELLRLCTDALERAAESMLAHAGKWRETSFSCFRQAQSEAQYTYLWQELAILKXASVLETRAKLMLRGGQYDIGDDLIRKAIFIRTSICGEHHPDTVSARETLSKLTRLLTTVQLS

SEQ ID NO: 94129 - protein, 49 aa, Setaria italica
  Transcript Sequence Number=SeqID_28155
NCIMVIGENYEELQNTTQNQCLKRYSRILFSYAKDKHDIRRILVHGILG

SEQ ID NO: 94130 - protein, 58 aa, Setaria italica
  Transcript Sequence Number=SeqID_28156
PFSLANTACSMDSAISQRCILLCLVPTMDNAISQHQVTTTSSHMVPCISTISLAFTHK

SEQ ID NO: 94131 - protein, 143 aa, Setaria italica
  Transcript Sequence Number=SeqID_28157
  Gene Ontology: Mol. function=protein serine/threonine kinase activity; Biological process=protein amino acid phosphorylation
  Homolog annotation: Hit_ID=Q69MN9; Match level="QueryCoverage=97%, HitCoverage=17%, E-value=9e-49, Identity=65%"; Hit description =Putative receptor kinase 5
  Pfam annotation: Domain name=PAN_2; Domain location=78-139; Score =76.1; E_value=1.3e-19; Accession=PF08276.3; Description=PAN-like domain
FQLQTWNSSSSAWTFLWDWTRGAGECSRYSYCGPNGYCDYIELPATCKCLDGFEPASLEDWKGGRFSQGCRRKEALRCGDGFLALPGMKSPDKFVLVQNRTFQECAAECTRNCSCVAYAYANLSTSRTNGDVTRCLVWAGRSD

SEQ ID NO: 94132 - protein, 115 aa, Setaria italica
  Transcript Sequence Number=SeqID_28158
  Subcellular localization annotation: CTP_CleavageSite=67; ConfidenceScore=5.18e-01
MSSVGSSSGTRATNGAAAISAAATAAGSADARFHSQLLQQDRRSRWAGCFSGLSCFGLQKGGKRIVPAARSDGNGSTTRGNGVQSGANSNQNVPLNLSLLAPPSSPASFSNSALA

SEQ ID NO: 94133 - protein, 493 aa, Setaria italica
  Transcript Sequence Number=SeqID_28159
  Gene Ontology: Cellular component=plasma membrane
  Subcellular localization annotation: CTP_CleavageSite=32; ConfidenceScore=5.23e-01
YVLPYKQRSRWAGCFSGLSCFGLQKGGKRIVPAARSDGNGSTTRGNGVQSGANSNQNVPLNLSLLAPPSSPASFSNSALASTAQSPNCFLSVSANSPGGPTSNMFAVGPYANEPQLVSPPVFSTYTTEPSTAPLTPPPELAHATTPSSPDVPYARFLSSSMDIKTASKEHNMSFLSTTYSGGSGLQASYPLYPESPCSSLISPASATPRTGLSSPIPEQEVPTAHWKTSRSACDTPYFRASPIPEQEATAQWKTSRSACDTPYARTSPANIFGLDSSTPRNYMLDSNFFRPAASAQFYLDQAQQTFPHNSGRVSVSREKQDADEIEAYRASFGFSADEIVQTQSYVEIPDALDESFSISPFGNIAPATEICAFNDLPNEAQKVDKSFVYVKDGTSPKKSANQLSIDSPNKVLHLDIFKGTKGGHQCEHEGIVKDSHPFRKATDEILLKPIEVRKKSPPGHSCSDAEIEYRRARSLRDANGVLSRRSALARQLH

SEQ ID NO: 94134 - protein, 97 aa, Setaria italica
  Transcript Sequence Number=SeqID_28160
  Gene Ontology: Mol. function=protein binding; Biological process =metabolic process
  Homolog annotation: Hit_ID=Q6Z1B8; Match level="QueryCoverage=85%, HitCoverage=25%, E-value=4e-19, Identity=57%"; Hit description =Putative N7 protein
ESFRAQLFVTSELLDYIESRANSLKSIQLTNCWYLWTQKLSRFASKCPLLEEIEFSYQKMLPELIRHLGSVHPNLKRLRISLPSIWQNGVHMDGSVH

SEQ ID NO: 94135 - protein, 243 aa, Setaria italica
  misc_feature (32)..(32): Xaa can be any naturally occurring amino acid
  misc_feature (191)..(191): Xaa can be any naturally occurring amino acid
  Transcript Sequence Number=SeqID_28161
  Gene Ontology: Mol. function=nucleoside-triphosphatase activity; Cellular component=mitochondrial inner membrane; Biological process =protein catabolic process
  Homolog annotation: Hit_ID=A2ZVG7; Match level="QueryCoverage=99%, HitCoverage=30%, E-value=1e-108, Identity=80%"; Hit description=Cell division protease ftsH homolog 9, chloroplastic/mitochondrial
  Pfam annotation: Domain name=FtsH_ext; Domain location=9-192; Score =7.5; E_value=0.0017; Accession=PF06480.7; Description=FtsH Extracellular
NDGTPNPNDAAKQSALLHELNKFSPEDVIKKXEQRSHAVDSKGVAEYLRALVLTNAIADYLPDEQSGRSASLPALLQELKQRVSGNEDKPFMNPGISEKQPLHVVMVDPKTTGRSTRFAQEIFSTILFTIAVGVMWVMGAAALQKYIGSLGGIGASGVGSSSSYSPKEINKDIMPEKNVKTFKDVKGCDDXKRELEEVVEYLKNPSKFTRLGGKLPKGILLTGAPGTGKTLLAKAIAGEAGSN

SEQ ID NO: 94136 - protein, 164 aa, Setaria italica
  misc_feature (147)..(147): Xaa can be any naturally occurring amino acid
  misc_feature (163)..(163): Xaa can be any naturally occurring amino acid
  Transcript Sequence Number=SeqID_28162
  Homolog annotation: Hit_ID=B9RJ40; Match level="QueryCoverage=100%, HitCoverage=23%, E-value=7e-44, Identity=53%"; Hit description=DNA double-strand break repair rad50 ATPase, putative
MDRRSWLWRRKSTDKSPADTETSASASSASERLTDEQDTAKSSPKSTQSPEISSKELEDDSNVKVKVLSERLSSVVQDIRAKDDLVKQHSKVAEEAVLGWEKAEKEIASLKTQLSAATAKNSALEDRLVHLDGALKECVWQLRRAKXEQDQMVQDALAQQARXW

SEQ ID NO: 94137 - protein, 211 aa, Setaria italica
  Transcript Sequence Number=SeqID_28163
  Homolog annotation: Hit_ID=Q9FYL7; Match level="QueryCoverage=97%, HitCoverage=10%, E-value=4e-17, Identity=33%"; Hit description =F21J9.12
MLASIDSVVGQDDANFEGAEQDGVSILERKISSLVEKYKQVSTGIEQLEQVLAEVKPDFVATAQGGLATILGIATEELVSCKRNEVDFLQKLNSFAEEKKALADELEEVKAARDAANSEASKAKAEFEQMEHKLSTTKEKLSMAVTKGKSLVQHRDSLKQALAEKTAELQSCMAELQKKSDALQAAEGRVEELRVSLDEKTIEHEKLSLVL

SEQ ID NO: 94138 - protein, 89 aa, Setaria italica
  misc_feature (28)..(28): Xaa can be any naturally occurring amino acid
  Transcript Sequence Number=SeqID_28164
  Gene Ontology: Mol. function=catalytic activity; Biological process =metabolic process
  Homolog annotation: Hit_ID=C3JP21; Match level="QueryCoverage=97%, HitCoverage=14%, E-value=6e-27, Identity=71%"; Hit description=Acyl -CoA synthetase
VADAIPDRVPLIFGSPDPAGAGPGRAEXRRSYAELERRANRLAHHLQSVGVQPGQHVGIHMRNSIEYVEGLLACLKIRAVPVNVNFRTP

SEQ ID NO: 94139 - protein, 80 aa, Setaria italica
  Transcript Sequence Number=SeqID_28165
  Subcellular localization annotation: CTP_CleavageSite=32; ConfidenceScore=5.04e-01
MATASGAPPPAMDEKARRTRDLLASFYNTDPSAASAAGAAAPASLARPSPTAAPASPLDSINSTSFDPEIYMNVLVQQSN

SEQ ID NO: 94140 - protein, 78 aa, Setaria italica
  Transcript Sequence Number=SeqID_28166
  Subcellular localization annotation: CTP_CleavageSite=64; ConfidenceScore=5.60e-01
IVAGVDHTSSHDPPTLSATRASYSSLNGITSSRNDGSSKERSSSPYLRNLSSELISGLSLPSLRSSGRSQDGSTMEEN

SEQ ID NO: 94141 - protein, 44 aa, Setaria italica
  Transcript Sequence Number=SeqID_28167
  Gene Ontology: Mol. function=aminoacyl-tRNA hydrolase activity; Cellular component=ribonucleoprotein complex; Biological process =mRNA processing
  Homolog annotation: Hit_ID=Q9M5P4; Match level="QueryCoverage=100%, HitCoverage=17%, E-value=1e-17, Identity=97%"; Hit description =Chloroplastic group IIB intron splicing facilitator CRS2, chloroplastic
SEERVQIDTALEQGVDAVRTLVLKGFSGSIERFNLVQKYKFHRV

SEQ ID NO: 94142 - protein, 150 aa, Setaria italica
  Transcript Sequence Number=SeqID_28168
  Gene Ontology: Mol. function=receptor activity; Cellular component =integral to membrane
  Homolog annotation: Hit_ID=Q8H399; Match level="QueryCoverage=100%, HitCoverage=26%, E-value=3e-55, Identity=70%"; Hit description =Putative membrane protein PTM1
TLNKLKARRMTAKLEMYRRLNNALIIAVAVSLGWITFEIHFKSTEEYNERWRAAWVIPAGWQLISFSLLCAICLIWAPSQTSTRYAYSGEEEKGEDVDRDLEDTRPLIRPGPLSYVDTWVISVSQDATKIILRTDSGVYAKAAGDGGKRV

SEQ ID NO: 94143 - protein, 56 aa, Setaria italica
  Transcript Sequence Number=SeqID_28169
WISCLPRLFLNKMQNSDGIKYVIWMKDIMYNRINNIRYAVPFYTEEIQFLQLNVQR

SEQ ID NO: 94144 - protein, 381 aa, Setaria italica
  Transcript Sequence Number=SeqID_28170
  Homolog annotation: Hit_ID=Q646W9; Match level="QueryCoverage=31%, HitCoverage=89%, E-value=3e-44, Identity=73%"; Hit description=Rwp34 (Fragment)
  Subcellular localization annotation: CTP_CleavageSite=31; ConfidenceScore=5.25e-01
LLFFVPVGFGRDRDRPRSRAPGGAAHGKNLRAARGRGASARAAASPVEAENSRSSVESNLRSSNAAHARRSSAGITSNGVHKVLFPDDHQSDDEAPSEEVRYTTGGFYKENGSVVGRLGNCDSDANNHIFDEASVGKFENGGTHSGLDPYIESIALLQSAQEALENEIQKFVEIRKESDENSTTHHSETEWSSSPHPDESVEELSEMIKVLESKLEEATMLINEQDSKILELGALSQKQPQDTAPCNNDLLSLQSDVDQLFLEKMETEIQCFILTRASQDWMPLTKDQFALYEAQKSLTGDYESLETKLRHTENRAMMLEEMVDKLESQCKELSETSEVLKLQARASRASLFCSIQFVLLCIAMGTLLVRFLPSSPEIVPT

SEQ ID NO: 94145 - protein, 73 aa, Setaria italica
  Transcript Sequence Number=SeqID_28171
  Gene Ontology: Mol. function=oxidoreductase activity
  Homolog annotation: Hit_ID=Q2R3Y8; Match level="QueryCoverage=100%, HitCoverage=14%, E-value=2e-17, Identity=59%"; Hit description =Reticuline oxidase, putative
SMVEETVTVVNLQRTLDEGAAAIVAKWETLILQPYVPDLTIRVVVQDNHAFFQTLFLGRCSRLLRTMRAYFPE

SEQ ID NO: 94146 - protein, 406 aa, Setaria italica
  Transcript Sequence Number=SeqID_28172
  Gene Ontology: Mol. function=metal ion binding; Cellular component =plasma membrane
  Homolog annotation: Hit_ID=B6TV66; Match level="QueryCoverage=100%, HitCoverage=99%, E-value=1e-165, Identity=73%"; Hit description =Protein binding protein
  Pfam annotation: Domain name=PHD; Domain location=332-376; Score= -2.1; E_value=0.045; Accession=PF00628.21; Description=PHD-finger
  Pfam annotation: Domain name=zf-C3HC4; Domain location=333-373; Score= 40.4; E_value=7e-09; Accession=PF00097.17; Description=Zinc finger, C3HC4 type (RING finger)
  Pfam module annotation: Pfam domain module=PHD::zf-C3HC4; Domain location=332-376::333-373
MDALPVESERESQTDIHPLLMEHAIGIPRDDVASSSTPRRENRDGMDQLARDSESSSGTIPISPLARRDDNRNNRRQSPLNSGFWISIELVVNLSQIIAAICVLYVSRNEHPHAPLFEWVIGYTIGCIATLPHLYWRYLQRNHLATVQESANQNYIPNNIPEGNSFTEISAPRVSEAGVITGTNGVSRNNVVTANTRAQAFADHFKMALDCFFAVWFVVGNVWVFGGHSSAHDAPNLYRLCIAFLTFSCIGYAMPFILCTLICCCLPCIISVMGFREDLNQNRGASSDAINALGTYKFKLKKPRNGEGNEGGGGVLAAGTDKERVVSAEDAVCCICLARYVDNDELRLLPCGHFFHKDCVDKWLKINALCPLCKAELDVVSTTVPAIGFGRRHSDNRVGNDIESQQ

SEQ ID NO: 94147 - protein, 64 aa, Setaria italica
  misc_feature (44)..(44): Xaa can be any naturally occurring amino acid
  Transcript Sequence Number=SeqID_28173
  Gene Ontology: Mol. function=catalytic activity; Biological process =metabolic process
STLSGTEEAAVVLDMEAGTVRCPANYAPLSPISFIERAAAVYGXRAAVVYGERRHTWAEARDRC

SEQ ID NO: 94148 - protein, 157 aa, Setaria italica
  misc_feature (45)..(45): Xaa can be any naturally occurring amino acid
  misc_feature (51)..(51): Xaa can be any naturally occurring amino acid
  misc_feature (71)..(71): Xaa can be any naturally occurring amino acid
  misc_feature (96)..(96): Xaa can be any naturally occurring amino acid
  misc_feature (111)..(111): Xaa can be any naturally occurring amino acid
  Transcript Sequence Number=SeqID_28174
  Gene Ontology: Mol. function=phosphatase activity; Biological process= metabolic process
  Homolog annotation: Hit_ID=B6TQ54; Match level="QueryCoverage=96%, HitCoverage=47%, E-value=2e-68, Identity=84%"; Hit description=4 -nitrophenylphosphatase
GLVTSKKFRSLGLEVTEEEIFTSSFAAAMFLKLNNFPPEKKGINXKTLTYXLYVVGEDGILEELKLAGFEXCFGGPEDGKKNIKLEADFYFEHDKXVGAVVVGLDQYFNYXKMQYARICISENPGCLFIATNRDPTGHMTSAQEWPGAGTYWFVLSS

SEQ ID NO: 94149 - protein, 116 aa, Setaria italica
  misc_feature (11)..(11): Xaa can be any naturally occurring amino acid
  Transcript Sequence Number=SeqID_28175
  Gene Ontology: Mol. function=phosphatase activity; Cellular component= cytoplasm; Biological process=metabolic process
  Homolog annotation: Hit_ID=B6TQ54; Match level="QueryCoverage=96%, HitCoverage=37%, E-value=5e-53, Identity=91%"; Hit description=4 -nitrophenylphosphatase
MVNGLPTLPCXLLTADAARSLVDSVDAFLFDCDGVIWKGDKLIEGVPETMELLRKMGKKLVFVTNNSRKSRRQYSKKFRSLGLEVTEEEIFTSSFAAAMFLKLNNFPPEKKVPWII

SEQ ID NO: 94150 - protein, 67 aa, Setaria italica
  misc_feature (31)..(31): Xaa can be any naturally occurring amino acid
  Transcript Sequence Number=SeqID_28176
  Gene Ontology: Mol. function=phosphatase activity; Biological process= metabolic process
  Homolog annotation: Hit_ID=B6TQ54; Match level="QueryCoverage=76%, HitCoverage=17%, E-value=2e-22, Identity=96%"; Hit description=4 -nitrophenylphosphatase
VLVGPFSSSPSTVELKLAGFECFGGPEDGKXNIKLEADFYFEHDKSVGAVVVGLDQYFNYYKMQLLL

SEQ ID NO: 94151 - protein, 157 aa, Setaria italica
  misc_feature (17)..(17): Xaa can be any naturally occurring amino acid
  misc_feature (34)..(34): Xaa can be any naturally occurring amino acid
  misc_feature (137)..(137): Xaa can be any naturally occurring amino acid
  Transcript Sequence Number=SeqID_28177
  Gene Ontology: Mol. function=phosphatase activity; Cellular component= cytoplasm; Biological process=metabolic process
  Homolog annotation: Hit_ID=B6TQ54; Match level="QueryCoverage=98%, HitCoverage=51%, E-value=6e-80, Identity=96%"; Hit description=4 -nitrophenylphosphatase
LVDSVDAFLFDCDGVIXKGDKLIEGVPETMELLXRKMGKKLVFVTNNSRKSRRQYSKKFRSLGLEVTEEEIFTSSFAAAMFLKLNNFPPEKKVYVVGEDGILEELKLAGFECFGGPEDGKKNIKLEADFYFEHDKSXGAVVVGLDQYFNYYKMQLLL

SEQ ID NO: 94152 - protein, 316 aa, Setaria italica
  Transcript Sequence Number=SeqID_28178
  Gene Ontology: Mol. function=phosphatase activity; Biological process= metabolic process
  Homolog annotation: Hit_ID=B6TQ54; Match level="QueryCoverage=91%, HitCoverage=96%, E-value=1e-157, Identity=92%"; Hit description=4 -nitrophenylphosphatase
  Pfam annotation: Domain name=Hydrolase; Domain location=35-284; Score= 39.1; E_value=1.7e-08; Accession=PF00702.18; Description=haloacid dehalogenase-like hydrolase
RAAAEKEEAAMVNGLPTPPCGLLTADAARSLVDSVDAFLFDCDGVIWKGDKLIEGVPETMELLRKMGKKLVFVTNNSRKSRRQYSKKFRSLGLEVTEEEIFTSSFAAAMFLKLNNFPPEKKVYVVGEDGILEELKLAGFECFGGPEDGKKNIKLEADFYFEHDKSVGAVVVGLDQYFNYYKMQYARICISENPGCLFIATNRDPTGHMTSAQEWPGAGTMVAAVSCSVQKEPIVVGKPSTFLMDFLLKSFSLETSRMCMVGDRLDTDILFGQSTGCKTLLVLSGCTSLPELQDASNNIYPDLYTNSVYDLVELLQK

SEQ ID NO: 94153 - protein, 45 aa, Setaria italica
  Transcript Sequence Number=SeqID_28179
NDTLFRTETYLYISEHLFINIQLSSDFCPSTLFIFYIMSFAMIKS

SEQ ID NO: 94154 - protein, 88 aa, Setaria italica
  Transcript Sequence Number=SeqID_28180
  Gene Ontology: Mol. function=ATP binding
  Homolog annotation: Hit_ID=Q84T10; Match level="QueryCoverage=100%, HitCoverage=3%, E-value=1e-43, Identity=82%"; Hit description=Unknow protein
WNQWLLSEFPSLFVNAQETFCALPCFQRCPGKAVTAFLSFIPLAGEVHGFFSHLPHLILSKLRLTRCMFLDGSTLQWVFPCNTLRGWD

SEQ ID NO: 94155 - protein, 48 aa, Setaria italica
  Transcript Sequence Number=SeqID_28181
SYICYIVVMVLDIDLVATCSLINRCGLSSFSTLKHVYLPHSSCYAYSA

SEQ ID NO: 94156 - protein, 95 aa, Setaria italica
  Transcript Sequence Number=SeqID_28182
  Gene Ontology: Mol. function=zinc ion binding
  Homolog annotation: Hit_ID=B9T2L4; Match level="QueryCoverage=88%, HitCoverage=11%, E-value=2e-26, Identity=63%"; Hit description=Zinc finger protein, putative
LGSATLSQTHAGWIFGAIAELIDNSRDAGASRLSISIESLFSKKAQRKIPVLSIIDDGHGMTYADMMRMISFGHKRPNEHRENQIGEYFGNLGIL

SEQ ID NO: 94157 - protein, 242 aa, Setaria italica
  Transcript Sequence Number=SeqID_28183
  Gene Ontology: Mol. function=protein binding
  Homolog annotation: Hit_ID=B9S8S6; Match level="QueryCoverage=96%, HitCoverage=42%, E-value=1e-72, Identity=54%"; Hit description =Protein binding protein, putative
  Subcellular localization annotation: CTP_CleavageSite=58; ConfidenceScore=5.12e-01
KYPRYLKLFKENNNSICTSNGSSAADSSSCVMTLYSSFQNCLDSLLALFRRASDPEVLAGQSSDDKEQMFRKITLEADNLLWLAEILSDRHAADELTVIWAGQGELAELHPRIPVMHRHLVSCVSARLLVAVGRGEALPSEGTRRRLLDVWLQPLMDDYRWLQHGCRWFDRAVVEDGVGQAILTLPLEDQRAVLMAWLGRFLKAGDGCPNLQRAFEVWWRRTFVRPYAEQPGSSSSARSGRH

SEQ ID NO: 94158 - protein, 63 aa, Setaria italica
  Transcript Sequence Number=SeqID_28184
FVLSTNKLHSHLRRSVQPIIQRRNCLSNDPSILLTSSHPIYERYMGHLISSLSQLLLIRVVQP

SEQ ID NO: 94159 - protein, 87 aa, Setaria italica
  Transcript Sequence Number=SeqID_28185
  Gene Ontology: Mol. function=oxidoreductase activity; Biological process=oxidation reduction
  Homolog annotation: Hit_ID=Q948K9; Match level="QueryCoverage=98%, HitCoverage=23%, E-value=3e-22, Identity=52%"; Hit description=CmE8 protein
AKAVKYNCNFDLYESPVANWRDTLYLRLAPDPPADGEMPENCRDAFFDYARHTKRLLGTLYRLLSEALGLGPTYLTDIDCNKGQMIL

SEQ ID NO: 94160 - protein, 91 aa, Setaria italica
  Transcript Sequence Number=SeqID_28186
  Pfam annotation: Domain name=SKG6; Domain location=17-52; Score=10.1; E_value=0.051; Accession=PF08693.2; Description=Transmembrane alpha -helix domain
  Subcellular localization annotation: CTP_CleavageSite=46; ConfidenceScore=5.54e-01
THSPAAVDSSATPPPSSSSGLSSGETAAVAVVVVIVVLGFAGVFVCLSKRRKRKQADGYYAGFAVPSYTPQHLSGEAPFLRPPSAPGSMNF

SEQ ID NO: 94161 - protein, 79 aa, Setaria italica
  Transcript Sequence Number=SeqID_28187
  Gene Ontology: Mol. function=DNA binding; Cellular component=nucleus; Biological process=regulation of transcription
  Homolog annotation: Hit_ID=B6U8A6; Match level="QueryCoverage=91%, HitCoverage=28%, E-value=1e-34, Identity=93%"; Hit description=Myb -related protein Myb4
  Pfam annotation: Domain name=Myb_DNA-binding; Domain location=21-66; Score=44.2; E_value=5e-10; Accession=PF00249.23; Description=Myb -like DNA-binding domain
LRCGKSCRLRWINYLRPDIKRGNFSKEEEDAIIRLHEQLGNRWSAIAARLPGRTDNEIKNVWHTHLKKRLEPTKQEEAQ

SEQ ID NO: 94162 - protein, 124 aa, Setaria italica
  Transcript Sequence Number=SeqID_28188
  Gene Ontology: Mol. function=DNA binding; Cellular component=nucleus; Biological process=regulation of transcription
  Homolog annotation: Hit_ID=Q7XBH4; Match level="QueryCoverage=72%, HitCoverage=35%, E-value=1e-44, Identity=93%"; Hit description=Myb -related protein Myb4
  Pfam annotation: Domain name=Myb_DNA-binding; Domain location=34-81; Score=53.1; E_value=1.1e-12; Accession=PF00249.23; Description=Myb -like DNA-binding domain
MAGGCGGNEQRLGRRRREIAMGRAPCCEKMGLKKGPWTPEEDKVLVAHIQRFGHGNWRALPKQAGLLRCGKSCRLRWINYLRPDIKRGNFSKEEEDAIIRLHEQLGNRYCFCSLTNSVCPLPFP

SEQ ID NO: 94163 - protein, 52 aa, Setaria italica
  misc_feature (33)..(33): Xaa can be any naturally occurring amino acid
  Transcript Sequence Number=SeqID_28189
NFLDFLLLKCNPVPFNLEKHEIAMSKWLGAISXVAKVRKGFLNDNKSQKLAM

SEQ ID NO: 94164 - protein, 32 aa, Setaria italica
  Transcript Sequence Number=SeqID_28190
MTSAVLAGRNEVHHAHPHHRHWGGARVPLMPK

SEQ ID NO: 94165 - protein, 248 aa, Setaria italica
  misc_feature (93)..(93): Xaa can be any naturally occurring amino acid
  Transcript Sequence Number=SeqID_28191
  Gene Ontology: Mol. function=RNA-directed DNA polymerase activity; Cellular component=mitochondrion
  Homolog annotation: Hit_ID=B9RFN9; Match level="QueryCoverage=100%, HitCoverage=48%, E-value=3e-82, Identity=55%"; Hit description =Pentatricopeptide repeat-containing protein, putative
  Pfam annotation: Domain name=PPR; Domain location=103-137; Score =35.6; E_value=1.9e-07; Accession=PF01535.12; Description=PPR repeat
  Pfam annotation: Domain name=PPR; Domain location=183-217; Score =32.5; E_value=1.7e-06; Accession=PF01535.12; Description=PPR repeat
  Pfam annotation: Domain name=PPR; Domain location=33-67; Score=4.6; E_ value=2.6; Accession=PF01535.12; Description=PPR repeat
  Pfam module annotation: Pfam domain module=PPR::PPR::PPR; Domain location=103-137::183-217::33-67
YDAVVDALGRARQFDAAWRVVVDASADGAASPRTFAVLARRYVAAGMTRQAIRTFDDMEAFVGREPDAGEFATLLDTLCKYKYPKVATEIFNXRKYKYGPNEKMYTILIYGWCKVNRSDMAQKFVKDMIDHGIEPNIVTYNILLNSICRHASLHPDNRFDRTVHAAENLLKEMRDKRIEPDVTSYSIILHVYSRAHKPELCLCMFRLMKERGICPTVATYTSVIKCLASCGRLEDAETLLDEMVAEGV

SEQ ID NO: 94166 - protein, 43 aa, Setaria italica
  Transcript Sequence Number=SeqID_28192
PVVWYHLRSIRINEEVAIDSDAKINKKLSIYRQQLQDYITYPR

SEQ ID NO: 94167 - protein, 100 aa, Setaria italica
  Transcript Sequence Number=SeqID_28193
RSIHGLNNDILVSYPDIWKEQAHLSYSRQFCNEQEALDGQSESSFSNLNAVSECREIGYGCHIYLDSRHTYIDRYLQQSEFQFYLIILSTYLFSVLLWKQ

SEQ ID NO: 94168 - protein, 45 aa, Setaria italica
  Transcript Sequence Number=SeqID_28194
LSAMQVLMVFSYGGKYVKGNEMFFMEFYIFLPKVETASWMLLNFL

SEQ ID NO: 94169 - protein, 95 aa, Setaria italica
  Transcript Sequence Number=SeqID_28195
  Gene Ontology: Mol. function=heat shock protein binding; Biological process=protein folding
  Homolog annotation: Hit_ID=C4T7Z2; Match level="QueryCoverage=71%, HitCoverage=15%, E-value=5e-17, Identity=58%"; Hit description=DnaJ -like protein
TKGRNKVSRKGKMSVKLDIMAGIDDNDIMKVFGKGGADVERNKPGDLYVTIKVREDPIFRRESNHVHVDSAIMSSLTDIFPLHYLFSFASLVKIT

SEQ ID NO: 94170 - protein, 410 aa, Setaria italica
  misc_feature (96)..(96): Xaa can be any naturally occurring amino acid
  Transcript Sequence Number=SeqID_28196
  Gene Ontology: Mol. function=heat shock protein binding; Cellular component=cytoplasm; Biological process=protein folding
  Homolog annotation: Hit_ID=B9RHH1; Match level="QueryCoverage=88%, HitCoverage=83%, E-value=1e-120, Identity=57%"; Hit description =Chaperone protein DNAj, putative
  Pfam annotation: Domain name=DnaJ; Domain location=61-122; Score =119.2; E_value=1.3e-32; Accession=PF00226.23; Description=DnaJ domain
  Pfam annotation: Domain name=DnaJ_C; Domain location=274-395; Score =174.1; E_value=4.1e-49; Accession=PF01556.10; Description=DnaJ C terminal region
  Pfam annotation: Domain name=DnaJ_CXXCXGXG; Domain location=181-261; Score=71.5; E_value=3.1e-18; Accession=PF00684.11; Description=DnaJ central domain (4 repeats)
  Pfam module annotation: Pfam domain module=DnaJ::DnaJ_C::DnaJ _CXXCXGXG; Domain location=61-122::274-395::181-261
  Subcellular localization annotation: CTP_CleavageSite=21; ConfidenceScore=5.08e-01
LAAAATSSPTRELFARHLAAAAATAWTGPSRLPEPGRERRSASWWCPSRSFHATRRMNTRDYYDVLGVSKDASAPDIKKAYYALAKKFHPDTNKDXPMLRKFQEVNRAYEVLKDDDKREIYDQLGSEAYERHAAGGDPAGQGFPQGNPFGDIFGDIFDNACRGGQDVKVSVELSFMEAVQGCRKTITYEADTFCGTCNGSGVPPGTVPKTCKTCKGSGVIYMKKGIFSLECTCSLCNGSGKIVKNFCKTCKGEQVVKGKMSVKLDIMAGIDDNDIMKVFGKGGADVERNKPGDLYVTIKVREDPIFRRESNHVHVDSVLSIAQAVLGGTVSVPTLTGNVTVKVRQGTQPGEKVVLRGKGIKAKNSSVFGNQYVHFNIRIPTEVTQRQRELIEEFDKEECTDRERVAAASG

SEQ ID NO: 94171 - protein, 120 aa, Setaria italica
  Transcript Sequence Number=SeqID_28197
  Gene Ontology: Mol. function=hydrolase activity, hydrolyzing O -glycosyl compounds; Cellular component=extracellular region; Biological process=cell wall organization and biogenesis
  Homolog annotation: Hit_ID=Q67UW5; Match level="QueryCoverage=100%, HitCoverage=21%, E-value=6e-51, Identity=81%"; Hit description =Endoglucanase 5
VVKNYYPSSSGYQDELLWAALWLHRATGRRDYLDYAIANAEAFGGTGWAVSEFSWDIKYAGLQVLASELLVEAKERRLRLSSEELAVVEQLRSKAEYYVCSCMNRNPGGAEHNAGRTPAG

SEQ ID NO: 94172 - protein, 148 aa, Setaria italica
  Transcript Sequence Number=SeqID_28198
RQLETLNYVTCQAHAQQSDHSVHAEHPSDHTIHVGETQNESANHGIHRGLGHVELIKEKPVGRHTNQVTGTAIGPKVVSVEKRQVQTLKQITRDRLQKTSPPKLPSPIEQDPEHSSDNIQAEQDEAEVGHQVTARLARKSTKRNLTSL

SEQ ID NO: 94173 - protein, 190 aa, Setaria italica
  Transcript Sequence Number=SeqID_28199
  Gene Ontology: Mol. function=sucrose synthase activity; Biological process=sucrose metabolic process
  Homolog annotation: Hit_ID=UPI000034F293; Match level="QueryCoverage =100%, HitCoverage=22%, E-value=1e-68, Identity=64%"; Hit description= SUS5; UDP-glycosyltransferase/ sucrose synthase
MSSKLGDKPETSMKPLLDYLLSLNYRGEKLMVNDIIDTVNKLQTALLLAEVYVSGLPRYTPFPKFEQRFQEWGLEKGWGDTAERCKETLNCLSEVLQAPDPINMEKFFSRVPTIFNIVVFSIHGYFGQEKVLGLPDTGGQVVYILDQVRALEEELLQRIKQQGLKVTPKILVLTRLIPDAKGTKCNVELE

SEQ ID NO: 94174 - protein, 89 aa, Setaria italica
  Transcript Sequence Number=SeqID_28200
GKFKSSCVNSKYLPAVYNTTHDHVHTSRRINNELYSRVGTGTAPTKPILKRTVQACGRAARIISQGRGAPRAGQARTRTRIPARPGRAT

SEQ ID NO: 94175 - protein, 349 aa, Setaria italica
  Transcript Sequence Number=SeqID_28201
  Gene Ontology: Mol. function=oxidoreductase activity; Biological process=oxidation reduction
  Homolog annotation: Hit_ID=B6TA62; Match level="QueryCoverage=96%, HitCoverage=99%, E-value=1e-116, Identity=64%"; Hit description =Naringenin,2-oxoglutarate 3-dioxygenase
  Pfam annotation: Domain name=2OG-FeII_Oxy; Domain location=197-298; Score=138.4; E_value=2.2e-38; Accession=PF03171.12; Description=2OG -Fe(II) oxygenase superfamily
MESLPVPSVQAMVAATGGAHVPPRYLRPEVAADAVAGDGEAAIPIIYFERLLHPEVCRDESARLHTACQEWGFFQLINHDVPDDVIEGMKANVEGFFGLPAETKKQVAQERGQLEGYGQLFVVSEDQKLDWADILYLNTQPPQHRNMRFWPDKPGTFRSTLDAYSAAVNNVADRLLGIMSTNLGLQPEAIASKCVGGIQSMRMNYYPPCAEADKVVGFSPHSDADLLTLVLQVNQVQGLQVKRDDGSWVPVRPLQGAFVVNVGDILQIFTNGRYRSIEHRAVINTERARLSVAAFHSPSIHATIGPLRELVTDQGPEMVMYKTVGHESFMRLFFSAKLEGKSFLQRMKL

SEQ ID NO: 94176 - protein, 67 aa, Setaria italica
  Transcript Sequence Number=SeqID_28202
NANGAMQCITSLLPIYPKEGGKEGGESCNHIIISQRALLYRYFPHQSGYGFFVCVNNMRMRMQDCNA

SEQ ID NO: 94177 - protein, 174 aa, Setaria italica
  Transcript Sequence Number=SeqID_28203
  Homolog annotation: Hit_ID=B6SLJ6; Match level="QueryCoverage=72%, HitCoverage=74%, E-value=6e-14, Identity=29%"; Hit description =Pollen proteins Ole e I family protein
  Pfam annotation: Domain name=Pollen_Ole_e_I; Domain location=43-172; Score=-29.6; E_value=0.015; Accession=PF01190.9; Description=Pollen proteins Ole e I family
MKKPRASLALEILVVFAALLCGAQCQSFQGGSGGGGTAANLTVVGAVFCDACSSSSFSKNSYFLPGVKVRLDCMIKVNSNSKEEIKITAEKVTNSYGTYQLDIPAIDGFECAAPGATAAESFCRAAVLDNPSALCNVPAVTTTVGHISFPSQEPNACFYSLNSLYYRHKEPNKT

SEQ ID NO: 94178 - protein, 147 aa, Setaria italica
  misc_feature (139)..(139): Xaa can be any naturally occurring amino acid
  Transcript Sequence Number=SeqID_28204
  Gene Ontology: Mol. function=protein serine/threonine kinase activity; Cellular component=integral to membrane; Biological process=protein amino acid phosphorylation
  Homolog annotation: Hit_ID=Q6ZAB5; Match level="QueryCoverage=98%, HitCoverage=14%, E-value=6e-52, Identity=62%"; Hit description =Putative receptor-like protein kinase
  Pfam annotation: Domain name=Pkinase_Tyr; Domain location=22-147; Score=-174.7; E_value=0.041; Accession=PF07714.9; Description =Protein tyrosine kinase
KEIEEEVTTMLEGSSSKLNEVIEATENFDDKYIIGTGAHGTVYKATLRSGEVYAIKKLVISAHKGSYKSMMRELKTIYKIKHRNLVKLKEFWLRSDDGFILYDYMDKGSLHDVLHVIQPAPVLDWCVRYEIALGTAQWXAYLHNDCR

SEQ ID NO: 94179 - protein, 49 aa, Setaria italica
  Transcript Sequence Number=SeqID_28205
QWNRIPYLNNIYTSLLSLLHRNQIQHPHRNLIMLPECNQTKRVITHCAA

SEQ ID NO: 94180 - protein, 400 aa, Setaria italica
  Transcript Sequence Number=SeqID_28206
  Gene Ontology: Mol. function=DNA photolyase activity; Cellular component=mitochondrion; Biological process=DNA repair
  Homolog annotation: Hit_ID=B6U742; Match level="QueryCoverage=100%, HitCoverage=89%, E-value=0.0, Identity=92%"; Hit description =Photolyase/blue-light receptor PHR2
  Pfam annotation: Domain name=DNA_photolyase; Domain location=61-237; Score=109.6; E_value=1.1e-29; Accession=PF00875.10; Description=DNA photolyase
  Subcellular localization annotation: CTP_CleavageSite=80; ConfidenceScore=5.86e-01
HLPTQISTLAVCLHPSGAQSPSRRPTRLNSATSSVISPLPASTPGLSRSFPSGAPAAAGRRRTLVWFRADLRLHDHEPFHAAAGASSSLLPVFVFDPRDFGKSPSGFDRTGPYRANFLLDSVADLRRSLRARGGDLLVRVGRPEVVIPELARAAGAEAVYAHGEVSRDECRAEERVQKAVEKEGINVKYFWGSTLYHVEDLPFRLEDMPSNYGGFREAVKGLEVRKVLEAPEEVKCVPMKNVLEPGDIPTLAELGLTAPPAMPQDSKPAVGSTLIGGEAEALERLKKFAAECSMQPNKVDKSNTRDSIYGANFSCKISPWLATGCLSPRFMYEELKKHATRAIPSGSTPKNDDGTSDAGTNWLMFELLWRDFFRFITKKYSSVQKTSEVATGCTPTPALA

SEQ ID NO: 94181 - protein, 73 aa, Setaria italica
  Transcript Sequence Number=SeqID_28207
LISLLWITVLLHLPNTVHNHLTVSSGEHYTCSFPMKKLIMQLFRVIQLVHTYTELDTYEKPKFSSSSSHTNRC

SEQ ID NO: 94182 - protein, 86 aa, Setaria italica
  Transcript Sequence Number=SeqID_28208
  Gene Ontology: Mol. function=transporter activity; Cellular component= membrane; Biological process=transport
  Homolog annotation: Hit_ID=Q84MA8; Match level="QueryCoverage=100%, HitCoverage=16%, E-value=3e-28, Identity=68%"; Hit description =Adenine/guanine permease AZG2
  Subcellular localization annotation: CTP_CleavageSite=29; ConfidenceScore=5.12e-01
LFRSFTGLQAHQGVGLVGASPSTLVTLTACSEVDPTTGACLDGTMRSPTFWLGAVGFLITATCLARDVKGSMIYGILFVTVVSWIR

SEQ ID NO: 94183 - protein, 60 aa, Setaria italica
  Transcript Sequence Number=SeqID_28209
MEVAARTAIALLLALAVLCGGAQGRHHRHTKHTRHNSAHAHAPSHSQAPGPSSARRHARP

SEQ ID NO: 94184 - protein, 52 aa, Setaria italica
  Transcript Sequence Number=SeqID_28210
GVNKHVHYHYYAPLNFERCFCNLFSSPPKLHSLPYLNCMKFMVGVAPLLLTC

SEQ ID NO: 94185 - protein, 132 aa, Setaria italica
  misc_feature (22)..(22): Xaa can be any naturally occurring amino acid
  Transcript Sequence Number=SeqID_28211
  Gene Ontology: Mol. function=protein binding
  Homolog annotation: Hit_ID=B6TGC4; Match level="QueryCoverage=71%, HitCoverage=24%, E-value=1e-35, Identity=86%"; Hit description =Growth-regulating factor
  Pfam annotation: Domain name=WRC; Domain location=56-101; Score=98.2; E_value=2.9e-26; Accession=PF08879.2; Description=WRC
PHGRRPVPPDLLLPVRPSPPLXAAAFSFAGPAATSPFYHHHHPSLSYYAYYGKKLDPEPWRCRRTDGKKWRCSKEAHPDSKYCERHMHRGRNRSRKPVESKTASPAHPSQPQLSTVTTTTRETAPLDSLTAG

SEQ ID NO: 94186 - protein, 323 aa, Setaria italica
  Transcript Sequence Number=SeqID_28212
  Homolog annotation: Hit_ID=B6TCS2; Match level="QueryCoverage=98%, HitCoverage=85%, E-value=1e-119, Identity=73%"; Hit description =Growth-regulating factor
  Pfam annotation: Domain name=QLQ; Domain location=1-37; Score=63.2; E_ value=1e-15; Accession=PF08880.3; Description=QLQ
  Pfam annotation: Domain name=WRC; Domain location=57-102; Score=97.2; E_value=5.5e-26; Accession=PF08879.2; Description=WRC
  Pfam module annotation: Pfam domain module=QLQ::WRC; Domain location =1-37::57-102
GALHAAQYEELEHQALIYKYLVAGVPVPPDLLLPIRRGFVYHQPALGYGPYFGKKVDPEPGRCRRTDGKKWRCAKEAAPDSKYCERHMHRGRNRSRKPVEAQLVTPPHAQQQPPVAAAGFQNQSLYPAVLAGNGGRAGGGGGGGGGLATGTFGLGSTAQLHMDSAAAYATATGGGSKDLRYSAYGVRSLSDEHSQLMPAAMDTSMDNSWRLLPSQTSTFQATSYPLFGTLSGLDESTIASLPKTQREPLSFFGSDFVTAAKQENQTLRPFFDEWPKARDSWPELGDDNSLASFSATQLSISIPMATSDFSNTSSRSPSGIPSR

SEQ ID NO: 94187 - protein, 126 aa, Setaria italica
  Transcript Sequence Number=SeqID_28213
MRSHEAEVAPAVMVSPCANVALAPAPAAAARKFDRNMFLETPLLELNSYSVLPSTAPMAAVPKSTSTVVTVPSPNPCTTISTHIQFQPQQAKKQKSFQFDQTPSGEQFHIEVPVPLPRGGGGAKEV

SEQ ID NO: 94188 - protein, 112 aa, Setaria italica
  Transcript Sequence Number=SeqID_28214
  Subcellular localization annotation: CTP_CleavageSite=67; ConfidenceScore=5.94e-01
PCAPSRAAATAPRRSTTASSSPAPPPRGRHRRPPPPRSPRRRPTSQPRPRKRTAGTGRTRGRMAGWRLSLKSPPPPATRALLLLLLAAAVAILLVARRRGRAGAAPERRSID

SEQ ID NO: 94189 - protein, 95 aa, Setaria italica
  Transcript Sequence Number=SeqID_28215
YLIRMGVIGFEKPEAFCDTLSGTRQQLSVKRIATAGNISFRFSKERTDLFRGGIKKRWHTDCTTDRWEHRGFLKGTTAFLGTNTSAQLSLRMAFS

SEQ ID NO: 94190 - protein, 270 aa, Setaria italica
  Transcript Sequence Number=SeqID_28216
  Gene Ontology: Mol. function=transcription regulator activity; Cellular component=nucleus; Biological process=regulation of transcription
  Homolog annotation: Hit_ID=B6TUA5; Match level="QueryCoverage=100%, HitCoverage=76%, E-value=1e-102, Identity=71%"; Hit description =Helix-loop-helix DNA-binding domain containing protein
  Pfam annotation: Domain name=HLH; Domain location=201-249; Score =38.5; E_value=2.7e-08; Accession=PF00010.18; Description=Helix-loop -helix DNA-binding domain
  Subcellular localization annotation: CTP_CleavageSite=64; ConfidenceScore=5.24e-01
GGSGEIRVPPPPLQQQQSLAPPGPPHGLLRHSSSPAGLLSRLMADPHGMAPTRGMGSYSQAGTDASMAHGHRQLSSQWSFSRQDLPQISEMGMIPDIGESIVAGGCNSSSDGGGGAQSSSYLSRNFSVSSWDDTNSIIFSSSSKKAKLDPADEMVTSFSNIDSQFGLSKSSLEMPGMDDYLQLQQDSIACRVRAKRGCATHPRSIAERERRTRISKRLKKLQDLVPNMDKQTNTSDMLDLAVDYIKELKDEVEKLKHDQANCFCSGNQNC

SEQ ID NO: 94191 - protein, 78 aa, Setaria italica
  Transcript Sequence Number=SeqID_28217
  Subcellular localization annotation: CTP_CleavageSite=40; ConfidenceScore=5.12e-01
FFLVFGELLLSFYSSFFFNFTDLVMSNLVIQHPPSLFLPTQKTLANNLTMPVASIFHFCIWVTRIEMLLWTLFPTIKC

SEQ ID NO: 94192 - protein, 102 aa, Setaria italica
  Transcript Sequence Number=SeqID_28218
IISSLIFYCLNCEIIHDMMQKWTTGIKLCQLIEWLGVVCQSYELAALFVCCSGAMICWVNRSYSFMIHGLLLSTHILEAINCKKCCIKYSLIKISPHAHQDG

SEQ ID NO: 94193 - protein, 414 aa, Setaria italica
  misc_feature (323)..(323): Xaa can be any naturally occurring amino acid
  Transcript Sequence Number=SeqID_28219
  Homolog annotation: Hit_ID=B9SLM8; Match level="QueryCoverage=70%, HitCoverage=50%, E-value=3e-82, Identity=59%"; Hit description=ATP binding protein, putative
  Subcellular localization annotation: CTP_CleavageSite=40; ConfidenceScore=5.60e-01
LEPLVLANSSGRPVGVEGLALTTSTKGSRPSTPTSRATVPAKTGASVPRSSTPTSRSTLPSARSTTPSSRAAGPASRNPAPPGRASAPASRSSTPTSRSSIPATRSTTPSSRPSIPAQSKPTSRASTPTRRPSGPSAQHGNSAAPVRSSSISKPGSTMPKGSPAKTTAPTPSRGSSPTVKSRPWKPSEMPGFSLDAPPNLRTSLPERPTSATRGRPGAPSSRSSSVESGPAARPRRQSCSPSRGRTLSGSVPSGSSMPAVRRSHLNGGDSVNPVQMGNKMVERVVHMRRLVPPKHDDQRSSLNSISGKSSNSPDSSGFGRTLXKKSLDMALRHMDIRRSIPNNLRPLMTTIPASSVHSARSGSTRSRPMSVSDSPLATSSNASSEPSVNNNLMCLDSIDIDDELCSDRAGPYGR

SEQ ID NO: 94194 - protein, 208 aa, Setaria italica
  misc_feature (200)..(200): Xaa can be any naturally occurring amino acid
  Transcript Sequence Number=SeqID_28220
  Homolog annotation: Hit_ID=B9SLM8; Match level="QueryCoverage=96%, HitCoverage=33%, E-value=3e-31, Identity=44%"; Hit description=ATP binding protein, putative
RRAGISDGEARGRTLGAVIKEKDEELALFLEMRRREKERGAAADQLLLSGGAAAVDGVLQLDALPPAEPKPAAYKVAGVGFRRAPGGADDFLNADAGDKNDYDWLLTPPGTPLFPSLDVESKRSPASQVGTPKTRPTALKSRLANHPDPPTRTNLPLRTASSNSLNSAATTRRPSSSGGLTSNSSRPSTPTGRPALTTSXKGSRPSTP

SEQ ID NO: 94195 - protein, 356 aa, Setaria italica
  misc_feature (83)..(83): Xaa can be any naturally occurring amino acid
  Transcript Sequence Number=SeqID_28221
  Gene Ontology: Cellular component=nucleus; Biological process=cell division
  Homolog annotation: Hit_ID=B6SKL5; Match level="QueryCoverage=98%, HitCoverage=71%, E-value=0.0, Identity=90%"; Hit description=Cyclin -A2
  Pfam annotation: Domain name=Cyclin_C; Domain location=232-356; Score= 162.4; E_value=1.3e-45; Accession=PF02984.11; Description=Cyclin, C -terminal domain
  Pfam annotation: Domain name=Cyclin_N; Domain location=103-230; Score= 218.2; E_value=2.1e-62; Accession=PF00134.15; Description=Cyclin, N -terminal domain
  Pfam module annotation: Pfam domain module=Cyclin_C::Cyclin_N; Domain location=232-356::103-230
PPPAVKSSVANESNIAEETQEGTLLPQREEPAPLLENRGSLSLQDVERNRDSACHEAFFEERNARDKSEPSVSKTGDSPALDXIVDIDKDNGNPQMCASYVVEIYSNLMASELMRRPSPNYMEGLQRDITKGMRGILIDWLVEVSEEYKLVPDTLYLTVYLIDRFLSRNYIERQRLQLLGITSMLVASKYEEICAPRVEEFCFITDNTYTKAEVLKMECQVLNDLGFHLSVPTTKTFLRRFLRAAQASRKTPSVTLGFLANYLAELTLVEYGFLKFLPSVVAASAVFLARWTLDQSDLPWNQTLEHYTSYKSSDIQLCVCALRELQHNTSNCPLNAVREKYRNQKFECVANLTSPE

SEQ ID NO: 94196 - protein, 227 aa, Setaria italica
  misc_feature (65)..(65): Xaa can be any naturally occurring amino acid
  misc_feature (73)..(73): Xaa can be any naturally occurring amino acid
  Transcript Sequence Number=SeqID_28222
  Gene Ontology: Mol. function=protein binding
  Homolog annotation: Hit_ID=Q8S9Z7; Match level="QueryCoverage=90%, HitCoverage=30%, E-value=2e-49, Identity=50%"; Hit description=F-box protein-like
  Pfam annotation: Domain name=BACK; Domain location=44-153; Score =22.9; E_value=1.1e-05; Accession=PF07707.7; Description=BTB And C -terminal Kelch
HGNFLLLLEGALFLAVESLLVECERWFRTMGSRTSSALVPLDFVIEVWYFAQEHGVTFVQDICKXYLAQNFVXFVISRKSFNKIPYDLLCSSIECPHLTVDSEKQLCEAILYWVSENMEPCDRPNSNSVDGHLFLLSKVKICLLPLELATGIKRHWFDFGNNIVCTILNLLKDSLKTLLDAIAGGNLKGYGIRITEYSKNIVLSGCPQITTAFLYISVLPTDLDCFI

SEQ ID NO: 94197 - protein, 92 aa, Setaria italica
  Transcript Sequence Number=SeqID_28223
  Subcellular localization annotation: CTP_CleavageSite=25; ConfidenceScore=5.24e-01
RSSRARWRCRRTCGWTGSGPAWRTGCSPSWCPRSPPRPGPSPGPSLSTASSELGCHGVATAVLLPIDGVQNASICSSCDVTYMMGVCKGVVK

SEQ ID NO: 94198 - protein, 143 aa, Setaria italica
  misc_feature (56)..(56): Xaa can be any naturally occurring amino acid
  Transcript Sequence Number=SeqID_28224
TAFTSLLIILLLSGFSFPIFPSSSNIYGNVASRWTGESVNEVSKEDKGHEDEPEIXPEPAEESLEDESEIPEPAEENYVGYHSEIEDDRHKYDDEEFDHESEDEYVDDHDEHVESYKSDDDRKGEYNQYQEFKLDNTRNNYLR

SEQ ID NO: 94199 - protein, 181 aa, Setaria italica
  Transcript Sequence Number=SeqID_28225
  Gene Ontology: Mol. function=kinase activity
VFKEQKRLIEKAEEEERLRKEKEEKRIKEEAEKKATVEKKAQDASQEVDSKETDPPVQEDESKVAEQHDGHATNHDNHVAESGISVEQHGSESQGDSGTVDESPPKESATTSEQDPSSDNPEGLSREELGRMVASRWTGESVNEVSKEDKGHEDEPEIPEPAEEFYFVSIVILVNYLVTRP

SEQ ID NO: 94200 - protein, 606 aa, Setaria italica
  Transcript Sequence Number=SeqID_28226
  Gene Ontology: Mol. function=kinase activity; Cellular component =alpha-glucosidase II complex; Biological process=protein kinase cascade
  Homolog annotation: Hit_ID=B9SBM9; Match level="QueryCoverage=95%, HitCoverage=95%, E-value=5e-83, Identity=58%"; Hit description =Glucosidase II beta subunit, putative
  Pfam annotation: Domain name=Ldl_recept_a; Domain location=72-116; Score=10.6; E_value=0.011; Accession=PF00057.10; Description=Low -density lipoprotein receptor domain
  Pfam annotation: Domain name=PRKCSH; Domain location=488-537; Score =62.1; E_value=2.1e-15; Accession=PF07915.5; Description=Glucosidase II beta subunit-like protein
  Pfam module annotation: Pfam domain module=Ldl_recept_a::PRKCSH; Domain location=72-116::488-537
MRLLLVAALFLCASAAAASKPPLDTLGIPPQDEAYYKGGVIKCRDGSGRFSRDQLNDDFCDCPDGTDEPGTSACPEGKFYCKNAGHTPVTIFSSRVNDGICDCCDGSDEYDSNVTCKNTCWEAGKAAREKLKKKIATYKSGVVIRKQEVEKAKEAVAKDEAELAKLKGEEKLLQGLVDRLKEQKRLIEKAEEEERLRKEKEEKRIKEEAEKKATVEKKAQDASQEVDSKETDPPVQEDESKVAEQHDGHATNHDNHVAESGISVEQHGSESQGDSGTVDESPPKESATTSEQDPSSDNPEGLSREELGRMVASRWTGESVNEVSKEDKGHEDEPEIPEPAEESLEDESEIPEPAEENYVGYHSEIEDDRHKYDDEEFDHESEDEYVDDHDEHVESYKSDDDRKGDHHPDLTASEHSSWMNKIQQTVQNVLQKFNFFKTPVDLSEASRVRKEYDDASSKLSKIQSKISTLSEKLKHDFGKDKEFYSFYDQCFESKEGKYTYKVCAYKKATQAEGHSSTNLGRWDKFEESYRVMQFSNGDRCWNGPDRSLKVRLRCGLSNELNDVDEPSRCEYVAVLSTPALCVEEKLKELQNKFDALSSKQPGHDEL

SEQ ID NO: 94201 - protein, 108 aa, Setaria italica
  Transcript Sequence Number=SeqID_28227
  Gene Ontology: Mol. function=protein binding; Biological process =ubiquitin-dependent protein catabolic process
  Homolog annotation: Hit_ID=Q9LV01; Match level="QueryCoverage=63%, HitCoverage=7%, E-value=1e-10, Identity=47%"; Hit description=ETO1 -like protein 2
CRRPPPPPATPPPHRLRRNASEMSEEEEEPETNDLWFVIGEEEVACERSCIAALSKPLNTLLYGGFAEAHRDRIDFSRDGITPRGMRAVAAYSRHGRVDDFPPDIISQ

SEQ ID NO: 94202 - protein, 75 aa, Setaria italica
  Transcript Sequence Number=SeqID_28228
VQDLWAKAPQIHMAVYDTYIYNYQIYSNTSFWEILIVYLAARHVDSPVGTISMNLSPFNSRCMQVECHSISFQPL

SEQ ID NO: 94203 - protein, 41 aa, Setaria italica
  Transcript Sequence Number=SeqID_28229
QHFTASSHMMPSTHLICNLSSCFLPFLFLSVSLYLSKPFCA

SEQ ID NO: 94204 - protein, 387 aa, Setaria italica
  Transcript Sequence Number=SeqID_28230
LIKLATDGMTWCPGSAGFDAQGNLAFMICDPMKLASSPAARSSSASSSSSHSWKKDHPMQFGIPISVVCDWLYQHWQGNLDEVSKPKLPLVRLMSSRSDHSSTSFTRRHVFKPDDENDDASVCSKPKHQQASGSSATARISHEANPLVDLRTSSEQGIATPEIYESPRRSSCQAHKDAAPVQLLDINFPPRAPKTIFLPLPLKQMLSDENNVETSRPKNRSKGNGFPSGLIWHRNSEAECRDPPVALRHEDCSSEGQSSSSPVEILEYGGQDNYSSEEETMYSAETMESRNIPSPREKHVGRSQSCVTYSRWSSPRTSSMQNGTLRKQHTLIPVRKTHSQNTALPQRSHDYLSPTVSSAMKKRNSMEQQQPTKPRRSAVQSSPKWMF

SEQ ID NO: 94205 - protein, 108 aa, Setaria italica
  Transcript Sequence Number=SeqID_28231
  Gene Ontology: Cellular component=extracellular region; Biological process=response to biotic stimulus
  Homolog annotation: Hit_ID=Q3S4I4; Match level="QueryCoverage=100%, HitCoverage=65%, E-value=7e-23, Identity=50%"; Hit description =Pathogenesis-related 1a
  Pfam annotation: Domain name=SCP; Domain location=4-96; Score=10.7; E_ value=0.02; Accession=PF00188.18; Description=SCP-like extracellular protein
KGFAQSRRGDCAPRRSPLFYFGENVVVGKGRHWNATALVAPWVAEGQWYDYGSNSCAAPPGAGCLRYTQVVWRNTTQVGCARIVCGSNDTLLVCDYFPPGNYGTGRPY

SEQ ID NO: 94206 - protein, 80 aa, Setaria italica
  Transcript Sequence Number=SeqID_28232
  Gene Ontology: Mol. function=binding
MEMAGGGAADERWASLCNCVVNFLLEERYHLTAFELLQELQEDGRHAHALRLRAFFSDPALFPPDLVARASSAPPGADPQ

SEQ ID NO: 94207 - protein, 539 aa, Setaria italica
  Transcript Sequence Number=SeqID_28233
  Homolog annotation: Hit_ID=Q01MS5; Match level="QueryCoverage=96%, HitCoverage=80%, E-value=1e-104, Identity=42%"; Hit description =OSIGBa0147M20.2 protein
  Pfam annotation: Domain name=Caa3_CtaG; Domain location=29-229; Score= -131.8; E_value=0.082; Accession=PF09678.2; Description=Cytochrome c oxidase caa3 assembly fa
LPYIMRSEVIEAGRLVNLWNEWGIQILVLVSFALQVFLLIFGGIRRRSSSTVLMFFLWSAYLLADSTAIYTLGHLSVDSRSDEHELVAFWAPFLLLHLGGPDNITAYALEDNTLWLRHLQTLAVQVLGAAYVIYEYIACSGTLLLLASLSMFVAGLLKYGERIWALKCGNISSIRNSISTRKFKTNPYLLLNLGTSEEELLLGAHSQFDICKGVFADIIMVPSHLVRSISNSKPGSVISYLGEDLYKLVEMELSLMYDFLYTKAAVIHTWYGFCIHFISLLGTATTFLLFQLSINSSGNGFSRVDVIISYVLLVGALVLEIISVCRAVLSTWTCSLLHRRGRGWEWPLHVITSLGQRVHPASRRLWSGSIGQYNLFHLCTRNTNEIGSRLAMKLGLQDWWNQMHFSGTFSHSDILSIQDIKKLVLQALVDKDRALQYKNTDSNSRGSFILKSMEAYEDFARWSVNIDFDESILVWHIATEVYIRKSKGKHTKELLEATEVLSNYMMFLLVVKPNMLPGAARHNIHLTSCEQLEVQCRAR

SEQ ID NO: 94208 - protein, 67 aa, Setaria italica
  Transcript Sequence Number=SeqID_28234
EKKGKRIKKKPKKIMIAASQMRARPKMFAVHQHCTVNLHCFSLLSLALPGAGVNLHLNLHSLRRLSP

SEQ ID NO: 94209 - protein, 152 aa, Setaria italica
  Transcript Sequence Number=SeqID_28235
  Gene Ontology: Cellular component=plasma membrane
TRAFAGHLLHLMRAAGVDVAAATRSLTKIPVPSPQLAKHALEAHVTRSLLGGFEHESFYLDGSLSSLLDPAAFRRERYAQFRDMRGMEPAELLGVLPTCAFGRYAATKFASLLPPRVEEAILGDGEHRRVVNSGTHPRTPFYGEFLRAAKAV

SEQ ID NO: 94210 - protein, 114 aa, Setaria italica
  Transcript Sequence Number=SeqID_28236
  Subcellular localization annotation: CTP_CleavageSite=61; ConfidenceScore=5.62e-01
HQGSRRWRPLTKSAAPGADSLARARQSLKTPRAASLRQLDPLSPLLSARGGRGTLRSGQVQARELSSPGAERRAAGRPGRGEKGLLLGSDRAAGGAGAMNFAGRRKSSLSGAGA

SEQ ID NO: 94211 - protein, 83 aa, Setaria italica
  misc_feature (66)..(66): Xaa can be any naturally occurring amino acid
  Transcript Sequence Number=SeqID_28237
  Gene Ontology: Mol. function=aspartic-type endopeptidase activity; Biological process=DNA integration
  Homolog annotation: Hit_ID=Q2QMT8; Match level="QueryCoverage=89%, HitCoverage=4%, E-value=2e-09, Identity=44%"; Hit description =Retrotransposon protein, putative, Ty1-copia subclass
GRDEEEEEEPALFLAHGTIKLLHAAPATTALLHLDEPCAHVSLGDSTSDDKIDGWFLDSGATNPMXYMIGRREYFSDLNVDVR

SEQ ID NO: 94212 - protein, 117 aa, Setaria italica
  misc_feature (87)..(87): Xaa can be any naturally occurring amino acid
  Transcript Sequence Number=SeqID_28238
  Gene Ontology: Mol. function=protein dimerization activity; Cellular component=nucleus; Biological process=regulation of transcription, DNA-dependent
  Homolog annotation: Hit_ID=Q5Z749; Match level="QueryCoverage=96%, HitCoverage=42%, E-value=2e-49, Identity=87%"; Hit description=Auxin- responsive protein IAA21
  Pfam annotation: Domain name=AUX_IAA; Domain location=1-109; Score =61.6; E_value=2.9e-15; Accession=PF02309.8; Description=AUXIAA family
SIGIGAPYLRKVDLKMYNNYKELSLALEKMFSSFTVGDNESNGKSGREGLSGCRLMDHKNGTELVLTYKDKDGDWMLVGDVPWRMFXTGSCRRLRIMKGSDAVGLAPRATEKGKNDN

SEQ ID NO: 94213 - protein, 232 aa, Setaria italica
  Transcript Sequence Number=SeqID_28239
  Gene Ontology: Mol. function=protein dimerization activity; Cellular component=nucleus; Biological process=regulation of transcription, DNA-dependent
  Homolog annotation: Hit_ID=Q5Z749; Match level="QueryCoverage=100%, HitCoverage=100%, E-value=3e-75, Identity=62%"; Hit description =Auxin-responsive protein IAA21
  Pfam annotation: Domain name=AUX_IAA; Domain location=18-224; Score =320.4; E_value=3.6e-93; Accession=PF02309.8; Description=AUXIAA family
MAPPQERDYIGLSPATAATELRLGLPGTEEAEGGEAAAGTPLTLELLPKGGAKRGFADAIVQRESAARGKAPAEDDEEDKKKAQAPAAKAQVVGWPPIRSYRKNTMAMNQGCLYVKVSMDGAPYLRKVDLKMYNNYKELSLALEKMFSSFTVGDNESNGKSGREGLSGCRLMDHKNGTELVLTYKDKDGDWMLVGDVPWRMFTGSCRRLRIMKGSDAVGLAPRATEKGKNDN

SEQ ID NO: 94214 - protein, 240 aa, Setaria italica
  Transcript Sequence Number=SeqID_28240
  Gene Ontology: Biological process=response to biotic stimulus
  Homolog annotation: Hit_ID=B6TQA1; Match level="QueryCoverage=99%, HitCoverage=99%, E-value=1e-111, Identity=81%"; Hit description =Pathogen-related protein
  Pfam annotation: Domain name=SnoaL; Domain location=102-214; Score= -19.8; E_value=0.039; Accession=PF07366.4; Description=SnoaL-like polyketide cyclase
MAAAAEVGAGDKYRSFIHGESEKDTVWRYGAPPNYDVVNKLFEAERTRVWPEGSLEEKVQRLLKTWEMELVHKVRPEDQKTVNSEKYSASNNGMKAQSRAELMAIGSYNHFLRTKLPPEHRIFDPDQETLDSAMATFLTAFPRGFAIEVLDVYSGPPKIAFKFRHWGYMEGPFKGHPPHGQRVEFIGVCIFHVDEEMKVEKSEYFYERGNFLASFLSPPDAAPGSGSAGSGSGCPVMRGN

SEQ ID NO: 94215 - protein, 135 aa, Setaria italica
  misc_feature (46)..(46): Xaa can be any naturally occurring amino acid
  Transcript Sequence Number=SeqID_28241
  Gene Ontology: Mol. function=transferase activity, transferring glycosyl groups; Biological process=metabolic process
  Homolog annotation: Hit_ID=A4F1R6; Match level="QueryCoverage=99%, HitCoverage=27%, E-value=1e-43, Identity=59%"; Hit description =Putative glycosyltransferase
TEFAWGLAGCGRPFLWIIRPDLVSGENAMLPEEFVTDTKEGVFLAXWCPQELVLSHPSVGLFLTHCGWNSTLESICSGVPMLCWPFFAEQPTNCRYVCAKWGIGMEIDSDVRREEVARLVREAMDDESGKARRVK

SEQ ID NO: 94216 - protein, 141 aa, Setaria italica
  Transcript Sequence Number=SeqID_28242
  Gene Ontology: Cellular component=outer membrane
  Pfam annotation: Domain name=Rick_17kDa_Anti; Domain location=66-110; Score=21.0; E_value=0.0018; Accession=PF05433.7; Description =Rickettsia 17 kDa surface antigen
MGIGEHFEGVKQHWARNLAFLDYFKKVYGRAEPLPKWSDADVEEFIASDPVYGPQLKVLRESRKFALGGALVGAAHLGGVAFKYSKAPHGVLLATGFGAITGAVLGAEVAEHWYQLYKVDKQGANLRFIYWWEDKVSGQKS

SEQ ID NO: 94217 - protein, 107 aa, Setaria italica
  Transcript Sequence Number=SeqID_28243
  Gene Ontology: Mol. function=hydroperoxide dehydratase activity; Cellular component=chloroplast; Biological process=fatty acid biosynthetic process
  Homolog annotation: Hit_ID=Q6Z6K9; Match level="QueryCoverage=100%, HitCoverage=20%, E-value=1e-36, Identity=78%"; Hit description =Allene oxide synthase 4
ARMHHVAPAFGAAFTAMFDRVEAGLKASGSDEFNKHNDRQMLDFTCATLFGGAPPSKVIGDGAAAKAYKWLVFQLHPLASKAIKPWPLEDLLLHTFRFPPFLVRRDY

SEQ ID NO: 94218 - protein, 70 aa, Setaria italica
  misc_feature (24)..(24): Xaa can be any naturally occurring amino acid
  Transcript Sequence Number=SeqID_28244
  Gene Ontology: Mol. function=nucleic acid binding
  Homolog annotation: Hit_ID=Q7XI63; Match level="QueryCoverage=97%, HitCoverage=10%, E-value=2e-24, Identity=79%"; Hit description =Putative DNA repair protein rhp54
LFYLLVASGTWEEDKYNSNRRKAXLPKMVFLGRYVDEPLQNNVTEIDDEVLKELADEDQTKAFHKVVKQD

SEQ ID NO: 94219 - protein, 46 aa, Setaria italica
  Transcript Sequence Number=SeqID_28245
KQLGINYPHLRCLRFKVKVMLCEPNSLLILPPFQIINRFNFLVLCI

SEQ ID NO: 94220 - protein, 60 aa, Setaria italica
  Transcript Sequence Number=SeqID_28246
  Gene Ontology: Mol. function=DNA binding; Cellular component=nucleus
MADGSDGTDVSPESEATAAAAEKGGEIWGTLEELLLACAVTRHGTASWDSVAMEVQTRSP

SEQ ID NO: 94221 - protein, 154 aa, Setaria italica
  Transcript Sequence Number=SeqID_28247
  Subcellular localization annotation: CTP_CleavageSite=22; ConfidenceScore=5.03e-01
FRLSVLQRKTSTSNSFIFIYAMAQHKTTSWPCHSWSRMACNCGCHMDLLRTRLNYQVEMHAVHGRFQPKTYCSMWKLMLCSGGPSAEACVCFAREIIARSEQNQLLTHPFKSSTSKLAAYLCSLSVLLLFSKAPSKTSKVSKPPLPCFLLSPTP

SEQ ID NO: 94222 - protein, 182 aa, Setaria italica
  Transcript Sequence Number=SeqID_28248
  Gene Ontology: Mol. function=lipid binding; Cellular component =anchored to membrane; Biological process=lipid transport
  Homolog annotation: Hit_ID=B6SJ67; Match level="QueryCoverage=73%, HitCoverage=74%, E-value=2e-58, Identity=79%"; Hit description=Lipid transfer protein
  Pfam annotation: Domain name=Tryp_alpha_amyl; Domain location=38-119; Score=26.2; E_value=0.00014; Accession=PF00234.14; Description =Protease inhibitorseed storageLTP f
MAATRWCLAAVWCAVAVVSVAQTSPSPPASADPLQAKCAGDFSKLTDCLDYATGHAGSPSSTCCADAADTQKSRPQCLCYIIQQVHNGRNEVQSLGLKFDRLMALPAACKLANANVTLCINLLNLKPGSPDYALFANASHITPSAGGTPASDSTAGSGFSLQTGIRGSIAAAVVSAVLSSVF

SEQ ID NO: 94223 - protein, 45 aa, Setaria italica
  Transcript Sequence Number=SeqID_28249
GQVLWTYAKQDNKAGTSGHLCDSLPMFETVGTELQICSINIKNRK

SEQ ID NO: 94224 - protein, 151 aa, Setaria italica
  Transcript Sequence Number=SeqID_28250
  Gene Ontology: Mol. function=protein serine/threonine kinase activity; Biological process=protein amino acid phosphorylation
  Homolog annotation: Hit_ID=Q2R0X3; Match level="QueryCoverage=95%, HitCoverage=51%, E-value=3e-35, Identity=39%"; Hit description =Leucine Rich Repeat family protein
  Pfam annotation: Domain name=LRR_1; Domain location=121-143; Score =13.8; E_value=0.7; Accession=PF00560.25; Description=Leucine Rich Repeat
  Pfam annotation: Domain name=LRR_1; Domain location=24-46; Score =11.2; E_value=2.2; Accession=PF00560.25; Description=Leucine Rich Repeat
  Pfam annotation: Domain name=LRR_1; Domain location=49-71; Score =17.0; E_value=0.079; Accession=PF00560.25; Description=Leucine Rich Repeat
  Pfam annotation: Domain name=LRR_1; Domain location=73-95; Score =16.7; E_value=0.099; Accession=PF00560.25; Description=Leucine Rich Repeat
  Pfam annotation: Domain name=LRR_1; Domain location=97-119; Score =13.6; E_value=0.75; Accession=PF00560.25; Description=Leucine Rich Repeat
  Pfam module annotation: Pfam domain module=LRR_1::LRR_1::LRR_1::LRR _1::LRR_1; Domain location=121-143::24-46::49-71::73-95::97-119
VLYQNRWLEAGDWMFLSSVTTCTQLAMLILDGNNLQGDLPSLVTDLSRSLEYLVLGSNHITGTIPTGIGNLVSLSMLYLDDNKITGPIPASIGNLHNLYTLDLSKNRFYGKIPTSFGNLGQLSELYLQENNLSGGIPAELAGCKNLLALNL

SEQ ID NO: 94225 - protein, 63 aa, Setaria italica
  Transcript Sequence Number=SeqID_28251
SRTNSVYNLKKRSDLASSKQEVKKTWLTMRSLFTFWESRVRSGEPDWILWAREALRPPPLALP

SEQ ID NO: 94226 - protein, 357 aa, Setaria italica
  Transcript Sequence Number=SeqID_28252
  Gene Ontology: Mol. function=catalytic activity; Biological process =cellular metabolic process
  Homolog annotation: Hit_ID=B6T555; Match level="QueryCoverage=95%, HitCoverage=98%, E-value=1e-111, Identity=59%"; Hit description =Dihydroflavonol-4-reductase
  Pfam annotation: Domain name=3Beta_HSD; Domain location=28-299; Score= -30.5; E_value=6.3e-08; Accession=PF01073.11; Description=3-beta hydroxysteroid dehydrogenaseisomerase family
  Pfam annotation: Domain name=Epimerase; Domain location=27-270; Score= 78.3; E_value=2.8e-20; Accession=PF01370.13; Description=NAD dependent epimerasedehydratase family
  Pfam annotation: Domain name=KR; Domain location=29-159; Score=-88.8; E_value=0.061; Accession=PF08659.2; Description=KR domain
  Pfam annotation: Domain name=NAD_binding_4; Domain location=29-254; Score=-38.1; E_value=1.1e-06; Accession=PF07993.4; Description=Male sterility protein
  Pfam annotation: Domain name=NmrA; Domain location=27-294; Score= -94.2; E_value=0.0085; Accession=PF05368.5; Description=NmrA-like family
  Pfam annotation: Domain name=Polysacc_synt_2; Domain location=27-272; Score=-171.4; E_value=0.0038; Accession=PF02719.7; Description =Polysaccharide biosynthesis protein
  Pfam annotation: Domain name=adh_short; Domain location=25-161; Score= -35.0; E_value=0.0027; Accession=PF00106.17; Description=short chain dehydrogenase
  Pfam module annotation: Pfam domain module=3Beta_HSD::Epimerase::KR::N AD_binding_4::NmrA::Polysacc_synt_2::adh_short; Domain location=28 -299::27-270::29-159::29-254::27-294::27-272::25-161
VCRGFFVFRNSVVRLEEGRGMAPPPRVCVTGGGGFIASWLVKLLLSRGYAVRATLRDPGNPKNAHLKELDKAPENLRLFKGDVLEYDTLTPAVEGCEGVFHLATPVPEDKMVDPESEVLDPAVKGTLNVLKVCSAAKVQKLVVVSSNAAVDFNPTWPQDTLKDESCWSDKEFCKENGDWYSVAKIMAEQAALEYADKNGLNVVTLCPPLVFGPLLQPVVNTSSKFLIYVIKGGPDVMNNKLWHIVDVRDVADALLLLYEKKESSGRYICSPNHIRTKDLVALLKKLYPQYNCVNNILDVDQKASLTCQKLMDLGWEPRTLEETLADSVECYEKAGALQDVPGHPCRLPHLFRLAGDQ

SEQ ID NO: 94227 - protein, 70 aa, Setaria italica
  Transcript Sequence Number=SeqID_28253
  Subcellular localization annotation: CTP_CleavageSite=22; ConfidenceScore=5.37e-01
AGKAGGGGGNHLITLRSPPRRRGANKSEDAPRSRNPPAIPTPFPSPRPGRTPTSINSTPRGEALAAGRNQ

SEQ ID NO: 94228 - protein, 455 aa, Setaria italica
  misc_feature (407)..(407): Xaa can be any naturally occurring amino acid
  Transcript Sequence Number=SeqID_28254
  Gene Ontology: Mol. function=histone acetyltransferase activity; Cellular component=nucleus; Biological process=regulation of transcription, DNA-dependent
  Homolog annotation: Hit_ID=Q7F453; Match level="QueryCoverage=69%, HitCoverage=53%, E-value=1e-119, Identity=66%"; Hit description =P0696G06.1 protein
  Pfam annotation: Domain name=BTB; Domain location=85-195; Score=26.1; E_value=0.0001; Accession=PF00651.23; Description=BTBPOZ domain
  Pfam annotation: Domain name=zf-TAZ; Domain location=271-365; Score =9.5; E_value=0.0017; Accession=PF02135.8; Description=TAZ zinc finger
  Pfam module annotation: Pfam domain module=BTB::zf-TAZ; Domain location=85-195::271-365
MECLELDSSDFFLDGDPIDSPLEIHLESNSLASTKAVPDHRRYAQLHCSNAPDPPPLPGTSYGARRSSRKTTACSRVPGGILDSWDKLFLEGYQADLRVSTDDGSEILSHSCVLGVKSPVLRAMLEDAELTNGFRCIRISGAPSGAVHVFIRFLYSSRFEQEQIKKHVLHLLVLSHVFSVPSLKTVCIDQLERNFLAPDNVVDILQLAGLCDAPRLSLICTRMIIGDFKTISLTDGWKVMRRVNPNLEQELLESLVEADTKRQERAKKMEEKKVYLQLYEAMEALIHICREGCRTIGPRDQALKGSRAGVCKFPACKGIELLVRHFSGCSVRVPGGCANCKRMWQLLELHSRMCFSPDTCKVPLCRHFKEKMQHLGRKEETKWNLLVCKVLESRGAMSFISERRKFXSPKDCWSWESPRGSLPCGTYLKRWQRFCAEEFSFNRNQTNAFALEIRI

SEQ ID NO: 94229 - protein, 71 aa, Setaria italica
  Transcript Sequence Number=SeqID_28255
RLTTSKKYKILLAIVIITFRKLFISTICPSAIVAKSSDAQPWLEFRPPYISLHHLLTIQAFYVLQVLGFYL

SEQ ID NO: 94230 - protein, 67 aa, Setaria italica
  Transcript Sequence Number=SeqID_28256
FFFLGDSFKCDRLMKYQQDASYGISSFLFIAYCSVDLHLVSSCHIFLPIHRFYSVDLHLFLPAAPSL

SEQ ID NO: 94231 - protein, 135 aa, Setaria italica
  Transcript Sequence Number=SeqID_28257
  Gene Ontology: Mol. function=protein serine/threonine kinase activity; Biological process=protein amino acid phosphorylation
  Homolog annotation: Hit_ID=Q00ST1; Match level="QueryCoverage=66%, HitCoverage=23%, E-value=3e-09, Identity=32%"; Hit description =Casein kinase (Serine/threonine/tyrosine protein kinase) (ISS)
LGVRSRGRAGVARAGGRGDGEGAKDAGAAAFFGEDGVVEDMDGYLDYLSLEYDSVWDTKPAWCQPWTILLTGTAVVACSWVLQSVIITAGVSFIICAWWYIFLYSYPKAYTKMIAERRRKVASGDEDTYGMEKIQ

SEQ ID NO: 94232 - protein, 157 aa, Setaria italica
  Transcript Sequence Number=SeqID_28258
  Gene Ontology: Mol. function=DNA binding; Cellular component=nucleus
  Homolog annotation: Hit_ID=B4FRV0; Match level="QueryCoverage=84%, HitCoverage=33%, E-value=6e-43, Identity=67%"; Hit description=DNA -binding protein
  Pfam annotation: Domain name=DUF296; Domain location=1-121; Score =214.3; E_value=3.2e-61; Accession=PF03479.7; Description=Domain of unknown function (DUF296)
FTPHIINVAAGEDVNMKVISFSQQGPRAICILSANGVIANVTLRQQDSLGGTVTYEGRFELLSLSGSFTPTDSGGTRNRSGGMSVSLAAADGRVIGGGVAGLLVAASPVQVVVGSFLPSYQLDQNASKKPVIEITAAPPQQPPPVTVGFTISSGTWR

SEQ ID NO: 94233 - protein, 49 aa, Setaria italica
  Transcript Sequence Number=SeqID_28259
IVIPVFPNSLTAEIIKRALFIIFTCQDSESLNHYLITRSVQWSLRVLFP

SEQ ID NO: 94234 - protein, 90 aa, Setaria italica
  Transcript Sequence Number=SeqID_28260
  Gene Ontology: Mol. function=phosphatidylinositol binding; Cellular component=clathrin coat; Biological process=clathrin coat assembly
  Homolog annotation: Hit_ID=B9RP36; Match level="QueryCoverage=94%, HitCoverage=12%, E-value=3e-16, Identity=51%"; Hit description =Clathrin assembly protein, putative
RRLARTRDYVVAAKCLALLHRLAAEGDPHLRGELLRPAPSGRRAGEPVLSLLLDFRDEAHAASWEHSAFVRAYALYLDERLRFLVSLLPP

SEQ ID NO: 94235 - protein, 164 aa, Setaria italica
  Transcript Sequence Number=SeqID_28261
  Gene Ontology: Mol. function=nucleic acid binding; Cellular component= nuclear membrane
  Homolog annotation: Hit_ID=B9SZF6; Match level="QueryCoverage=98%, HitCoverage=63%, E-value=2e-40, Identity=56%"; Hit description=RNA and export factor binding protein, putative
  Pfam annotation: Domain name=RRM_1; Domain location=4-73; Score=72.4; E_value=1.7e-18; Accession=PF00076.14; Description=RNA recognition motif. (a.k.a. RRM, RBD, o
PTRLYISNLDYAVSNDDIKELFSDVGDIKRYSINYDRSGRSKGTAEVVFSRRSDALAAVKRYNNVQLDGKPMKIEIIGTNIEAPPTPTFAFNPPAGNFKVPFTSGPRRGGGGGWPQGRGGFGGRGRGPASRGRGRGGGRGSEKVSAEDLDADLDKYHAAAMETS

SEQ ID NO: 94236 - protein, 85 aa, Setaria italica
  Transcript Sequence Number=SeqID_28262
  Gene Ontology: Mol. function=metal ion binding
  Homolog annotation: Hit_ID=B6TVZ8; Match level="QueryCoverage=63%, HitCoverage=23%, E-value=4e-09, Identity=63%"; Hit description =Protein binding protein
MVIAILSQVEYGYVNTVLRHPLQPYAPFRIRHANGGGGPRHRREDPGLTDEEFREAMDQLRKQEYRPSNPQKKRHHWTGSARSWG

SEQ ID NO: 94237 - protein, 77 aa, Setaria italica
  Transcript Sequence Number=SeqID_28263
NAPTSYGLVRFGGRNSCEHVHAHKLVLFQDGRLLVLAISQRARSPATAGATREDTAAIFDSQFIAPRGKQESVASLP

SEQ ID NO: 94238 - protein, 61 aa, Setaria italica
  Transcript Sequence Number=SeqID_28264
FSGCTRISSTEPNKPVGRRCIRDQGGKPNLEIKHQKLLSSHESTILFIFHVGGSWKHQKYL

SEQ ID NO: 94239 - protein, 108 aa, Setaria italica
  Transcript Sequence Number=SeqID_28265
  Subcellular localization annotation: CTP_CleavageSite=50; ConfidenceScore=5.04e-01
LVWFTSLVSNAPTSYGLVRFGGRNSCATREDTAAIFDSQFIAPRGKQESVASLPVSYTGQCHQESPVRTSGWRLASLSEPAVKKHALPLHLLQACRLPSKLSSTNSKL

SEQ ID NO: 94240 - protein, 52 aa, Setaria italica
  Transcript Sequence Number=SeqID_28266
LIEADAPSFIHYSLLDKVLQKNPMRISPCYSGASRRNLIGILLSSMSYLCVI

SEQ ID NO: 94241 - protein, 135 aa, Setaria italica
  misc_feature (26)..(26): Xaa can be any naturally occurring amino acid
  Transcript Sequence Number=SeqID_28267
  Gene Ontology: Mol. function=nucleotide binding; Biological process =defense response
  Homolog annotation: Hit_ID=Q2R4S9; Match level="QueryCoverage=99%, HitCoverage=13%, E-value=4e-31, Identity=58%"; Hit description=NB -ARC domain containing protein
IQEFIQRGTDVNDAPSLSLNFEGCSXDFLDFNLEENPCYLSSLKLQGELRSLPVFVTKLGSVTELCLSSSGQLSGNVLAALSNVRSLHYLKLITTELDFVIEQGELKALRRLCVVVRSLSRLENQEGALPHLESP

SEQ ID NO: 94242 - protein, 273 aa, Setaria italica
  Transcript Sequence Number=SeqID_28268
  Gene Ontology: Mol. function=transferase activity; Biological process= oxidation reduction
  Homolog annotation: Hit_ID=Q9C5S7; Match level="QueryCoverage=96%, HitCoverage=94%, E-value=1e-124, Identity=76%"; Hit description =Transcription factor APFI
  Pfam annotation: Domain name=Hexapep; Domain location=119-136; Score =13.0; E_value=1.3; Accession=PF00132.16; Description=Bacterial transferase hexapeptide (th
  Pfam annotation: Domain name=Hexapep; Domain location=142-159; Score =9.0; E_value=14; Accession=PF00132.16; Description=Bacterial transferase hexapeptide (th
  Pfam annotation: Domain name=Hexapep; Domain location=160-177; Score =4.3; E_value=50; Accession=PF00132.16; Description=Bacterial transferase hexapeptide (th
  Pfam annotation: Domain name=Hexapep; Domain location=70-87; Score =8.2; E_value=17; Accession=PF00132.16; Description=Bacterial transferase hexapeptide (th
  Pfam annotation: Domain name=Hexapep; Domain location=91-108; Score =1.4; E_value=1.1e+02; Accession=PF00132.16; Description=Bacterial transferase hexapeptide (th
  Pfam module annotation: Pfam domain module=Hexapep::Hexapep::Hexapep:: Hexapep::Hexapep; Domain location=119-136::142-159::160-177::70 -87::91-108
MGTLGRAIFTVGKWIRGTGQAMDRLGSTLQGGLRVEEQVSRHRTIMNIFEKEPRIHRDVFVAPSAAVIGDVEIGHGSSIWYGSILRGDVNSIHIGSGTNIQDNSLVHVSRSNISRKVLPTIIGSNVTVGHSAVLHACTIEDEAFVGMGATLLDGVVVEKHSMVGAGSLVKQNTRIPSGEVWVGNPAKFLRKLTEEEIAFIAQSATNYINLAQVHAAENSKSFDEIELEKMLRKKYAHKDEEYDSMLGVVREIPPELILPDNILPHNAQKAVAR

SEQ ID NO: 94243 - protein, 65 aa, Setaria italica
  Transcript Sequence Number=SeqID_28269
  Gene Ontology: Mol. function=catalytic activity; Biological process =biosynthetic process
  Homolog annotation: Hit_ID=B6U0C2; Match level="QueryCoverage=96%, HitCoverage=21%, E-value=2e-24, Identity=84%"; Hit description =Phenazine biosynthesis protein
WQDPVCGSAHCVLAPYWARKLGKQKLTAFQVSPRSGTLYLELEAAARRVRIQGEAVTVMTGTLLT

SEQ ID NO: 94244 - protein, 159 aa, Setaria italica
  misc_feature (144)..(144): Xaa can be any naturally occurring amino acid
  Transcript Sequence Number=SeqID_28270
  Gene Ontology: Mol. function=drug transporter activity; Cellular component=membrane; Biological process=multidrug transport
  Homolog annotation: Hit_ID=Q9LUH2; Match level="QueryCoverage=89%, HitCoverage=29%, E-value=6e-32, Identity=48%"; Hit description =Aberrant lateral root formation 5
  Pfam annotation: Domain name=MatE; Domain location=16-159; Score =21.2; E_value=0.00016; Accession=PF01554.10; Description=MatE
ADAFMYVLPTVKLATPSAIMVCLELWAFELLVLIAGLLPHPTVATPLIAICVSTEAIACMITVGFSATVSTRVSNEIGAGNVDKAKNAVSVTLKLSVFLAVSFVLLLAFGHNLWASLFSRSSRIISEFAAITPLMMISIVLDAXEGVLSGVSEGLVGGT

SEQ ID NO: 94245 - protein, 116 aa, Setaria italica
  Transcript Sequence Number=SeqID_28271
  Gene Ontology: Mol. function=electron carrier activity; Biological process=oxidation reduction
  Homolog annotation: Hit_ID=B6SYR0; Match level="QueryCoverage=98%, HitCoverage=23%, E-value=8e-19, Identity=42%"; Hit description =Taxane 13-alpha-hydroxylase
HVAAMDAEVRRHLDAHWRGRAAVAVMPSMKSLTFDVMCTVLFKLGSDAAVREELSTEFQKLARGIWAVPVNVPFSTFSRCLAASRRGRRAVAAVIEERRDKLRRGESSPTDDVVTH

SEQ ID NO: 94246 - protein, 228 aa, Setaria italica
  misc_feature (123)..(123): Xaa can be any naturally occurring amino acid
  misc_feature (125)..(125): Xaa can be any naturally occurring amino acid
  Transcript Sequence Number=SeqID_28272
  Gene Ontology: Mol. function=histone-lysine N-methyltransferase activity; Cellular component=nucleus; Biological process=chromatin modification
  Homolog annotation: Hit_ID=B9HSV4; Match level="QueryCoverage=99%, HitCoverage=43%, E-value=2e-49, Identity=44%"; Hit description=SET domain-containing protein (Fragment)
  Pfam annotation: Domain name=Pre-SET; Domain location=10-109; Score =78.5; E_value=2.4e-20; Accession=PF05033.8; Description=Pre-SET motif
  Pfam annotation: Domain name=SET; Domain location=111-228; Score =13.9; E_value=0.00013; Accession=PF00856.20; Description=SET domain
  Pfam module annotation: Pfam domain module=Pre-SET::SET; Domain location=10-109::111-228
IRPPRYISLDLSKGTEVLRFPVCNKLDDDRSPLQFEYTVRPEFPVPPAPGPGKRQRGCHCAMDCVSKCRCERKNAGGPVYNEDGTLVLGRPVVYECGALCGCPMTCVNRVTQRGMKHRLEVFXSXETGWGVRALDLIPPGAFVCEFSGDVVVMDDHSGKALMEDRCIIDPKRFPERWREWGDASAVDPSKRVPQFAEFGGPGYVLDVSHKRNVACYISHSCTPNVFLF

SEQ ID NO: 94247 - protein, 46 aa, Setaria italica
  Transcript Sequence Number=SeqID_28273
MLMSIRSMEEVKFLSNVWSTWLHSDFKTQRSLNLLFRICAELALLQ

SEQ ID NO: 94248 - protein, 76 aa, Setaria italica
  Transcript Sequence Number=SeqID_28274
KIPVNFSKETGSNPEPLATRPQVESLYHCVRSALQHAHSKSKIISIAVYDMVQTCEDPLEMHAKKDGTPRRAHVWC

SEQ ID NO: 94249 - protein, 108 aa, Setaria italica
  misc_feature (107)..(107): Xaa can be any naturally occurring amino acid
  Transcript Sequence Number=SeqID_28275
SMIRWIPVSAGSIVVNKHLRIVAAARDVLDGCASSLSVTVSVSWRYCHVRLPMQRESTVPYSLAVSCARADFASSKNGHREQKVFLLISQCYHLPASEFGQRNYKPXC

SEQ ID NO: 94250 - protein, 55 aa, Setaria italica
  Transcript Sequence Number=SeqID_28276
  Gene Ontology: Mol. function=protein serine/threonine kinase activity; Biological process=protein amino acid phosphorylation
MATVSVEAAKQNVPGHQVKPGADPVPAKENKKDVDGTPELPGKEILEEQKPSHRR

SEQ ID NO: 94251 - protein, 104 aa, Setaria italica
  Transcript Sequence Number=SeqID_28277
  Gene Ontology: Mol. function=protein serine/threonine kinase activity; Biological process=protein amino acid phosphorylation
MATVSVEAAKQNVPGHQVKPGADPVPAKENKKDVDGTPELPGKEILEEQKPSHRRQESSASMLDKGPSSVCSDSGVLDEPLTPQGDSGELKDIQILDCNANQEK

SEQ ID NO: 94252 - protein, 131 aa, Setaria italica
  Transcript Sequence Number=SeqID_28278
  Gene Ontology: Mol. function=protein serine/threonine kinase activity; Biological process=protein amino acid phosphorylation
  Homolog annotation: Hit_ID=Q10GB1; Match level="QueryCoverage=100%, HitCoverage=21%, E-value=1e-62, Identity=83%"; Hit description =Serine/threonine-protein kinase Nek1
  Pfam annotation: Domain name=Pkinase; Domain location=1-131; Score= -78.1; E_value=0.00076; Accession=PF00069.17; Description=Protein kinase domain
  Pfam annotation: Domain name=Pkinase_Tyr; Domain location=1-131; Score=-177.5; E_value=0.063; Accession=PF07714.9; Description =Protein tyrosine kinase
  Pfam module annotation: Pfam domain module=Pkinase::Pkinase_Tyr; Domain location=1-131::1-131
IGKGAFGSALLVRHKLEKKKYVLKKIRLARQTDRTRRSAHQEMQLIATVRNPFIVEYKDSWVDKGCYVCIVIGYCEGGDMAEAIKRANDTHFSEEKLCQWLVQLLMALDYLHAHHILHRDVKCSNIFLTRD

SEQ ID NO: 94253 - protein, 454 aa, Setaria italica
  Transcript Sequence Number=SeqID_28279
  Gene Ontology: Mol. function=diacylglycerol kinase activity; Cellular component=vacuole; Biological process=activation of protein kinase C activity
  Homolog annotation: Hit_ID=B6TYH8; Match level="QueryCoverage=98%, HitCoverage=88%, E-value=0.0, Identity=79%"; Hit description=D -erythro-sphingosine kinase/ diacylglycerol kinase
  Pfam annotation: Domain name=DAGK_cat; Domain location=71-209; Score =126.5; E_value=8.7e-35; Accession=PF00781.16; Description =Diacylglycerol kinase catalytic domain
GAGSRGGRLRVATFAASGGGDGERPSAVACGGGGKGGGGGEVVLEMESEDAAARWGHAIRDRLASLGRPKRLFIIVNPYGGKRSGRSIFQNEVRPLLEAAGILYTMQETKHRLHAQEIAHSLDIRKYDGIICVSGDGVMVEVVNGFLQREDWETAIKVPLGIIPAGTGNGMAQSLLHAAGEPFSIPNAVFAIIRGHKRALDVTSVVQGKTRFFSVLMLTWGLVADVDIESEKYRWMGSARLEFYFLLRVMNLRRYNGRVLFVPAPGYEEVGEPVEQTATSCKQNGVSTGSQEDKADDRNGETSGYPGPSIEGADLEWRSLSGPFVSVWLGNVPFASEDAMAAPKAEFADGYLDAAIIRDCPRWDVLGLMFQMKDGAYVNSPYVEYFKVKAIQIEPGLRVGSSNKGGIIDSDGEVIARGDGSRGGGEPEHLMAYGPPIQLTVDRGLATIFSPRSR

SEQ ID NO: 94254 - protein, 160 aa, Setaria italica
  Transcript Sequence Number=SeqID_28280
  Gene Ontology: Mol. function=oxidoreductase activity; Cellular component=mitochondrial intermembrane space; Biological process =oxidation reduction
  Homolog annotation: Hit_ID=O80874; Match level="QueryCoverage=75%, HitCoverage=23%, E-value=9e-45, Identity=70%"; Hit description =Putative NADH dehydrogenase (Ubiquinone oxidoreductase)
  Subcellular localization annotation: CTP_CleavageSite=39; ConfidenceScore=5.12e-01
MAASSLLRSLTRHARGASAYRHLPWSPFSTTTAAAAGARDEARKGFPGLGPTAKGEKARVVVLGTGWAGSRLMKDLDTSGYDVVCVAPRNHMVFTPLLASTCVGTLEFRSVAEPLARIQPAVSKSPGSYFFLARCTGVDPDAHTIDCETVTDGEKDTLEP

SEQ ID NO: 94255 - protein, 57 aa, Setaria italica
  Transcript Sequence Number=SeqID_28281
NVRLAGNKCAIFVYFGSMIVVLDRYYQWCSLYYFLKCCDWMGISTIFVGACDWLSGA

SEQ ID NO: 94256 - protein, 150 aa, Setaria italica
  Transcript Sequence Number=SeqID_28282
  Subcellular localization annotation: CTP_CleavageSite=58; ConfidenceScore=5.36e-01
APLRLAVLASASASAAGDPARRIIRRRAPPGQQGSAPAPPAQPSVAEVRRAIGVEDAAASAASSREEKNSAFMELIASTPIGQPESEPERRLREAAEWVVDTTETRACQGQKSFLVLCMMTFPAWFLLMFIALGVIKLPFDVPGLDNLLM

SEQ ID NO: 94257 - protein, 70 aa, Setaria italica
  Transcript Sequence Number=SeqID_28283
SYDSTQVKIPSSSVITECRVMVTEKQHAYLFLKPFECRPKSCRPEHVAGSFVNEVLDPNRQLNISNIVVT

SEQ ID NO: 94258 - protein, 118 aa, Setaria italica
  Transcript Sequence Number=SeqID_28284
  Gene Ontology: Mol. function=transcription regulator activity; Cellular component=nucleus; Biological process=regulation of transcription
  Homolog annotation: Hit_ID=B6SY64; Match level="QueryCoverage=67%, HitCoverage=23%, E-value=3e-13, Identity=42%"; Hit description =Symbiotic ammonium transporter
ETRLVLVKRPCLHAAAAADDDGSPFSPSPGTPTARKELPEIEVRFSEKSVMVRVHCENSEGVAVKVLTEMEELQLAIIHANVMLFSACTLIIAITAKVEEGFTITKEEIVDRLDSALL

SEQ ID NO: 94259 - protein, 94 aa, Setaria italica
  misc_feature (50)..(50): Xaa can be any naturally occurring amino acid
  Transcript Sequence Number=SeqID_28285
  Gene Ontology: Mol. function=transporter activity; Cellular component= integral to membrane; Biological process=transport
  Homolog annotation: Hit_ID=Q9SL56; Match level="QueryCoverage=78%, HitCoverage=17%, E-value=4e-22, Identity=62%"; Hit description =Putative membrane transporter
MEAARPPHGGAPARGLGRHEYAVLALTFASYASFHASRKPPSIVKAVLSXRGWAPFSGARGTHRLGELDVAFLSAYALAMFAAGHLADRADLRR

SEQ ID NO: 94260 - protein, 48 aa, Setaria italica
  Transcript Sequence Number=SeqID_28286
MVAARRSTASTAALLLLLLAAAVSISSSAELHRSQEQDRSALLQLKNA

SEQ ID NO: 94261 - protein, 63 aa, Setaria italica
  Transcript Sequence Number=SeqID_28287
KDRSLEQVLHARDLLLYGTGHPSVARSAVMDVQRNCTIDRSISTRRQSSILRLDDDRMKKDPV

SEQ ID NO: 94262 - protein, 115 aa, Setaria italica
  Transcript Sequence Number=SeqID_28288
  Gene Ontology: Mol. function=histone acetyltransferase activity; Cellular component=nucleus; Biological process=regulation of transcription, DNA-dependent
  Homolog annotation: Hit_ID=B6SMS2; Match level="QueryCoverage=100%, HitCoverage=33%, E-value=2e-24, Identity=54%"; Hit description =Protein binding protein
RQGLRLLMRHFAACARKAAPGGCARCKRLLQLFRLHAAVCDRPAEQELDRPCRVPLCSHFAARMRTEKADKTWRLLVKKVARARAMAGLADRRVPEVVAMSWARYIGSSKWAKLR

SEQ ID NO: 94263 - protein, 197 aa, Setaria italica
  Transcript Sequence Number=SeqID_28289
  Gene Ontology: Mol. function=histone acetyltransferase activity; Cellular component=nucleus; Biological process=regulation of transcription, DNA-dependent
  Homolog annotation: Hit_ID=B6SMS2; Match level="QueryCoverage=99%, HitCoverage=55%, E-value=6e-29, Identity=43%"; Hit description =Protein binding protein
ASDGWRFARRHDPALELELLQLLEDAYRRRERWARERASREACRQLAEAMDSLDSIFAAADDACSTTGGTGKPCAREDDDATCQGLRLLMRHFAACARKAAPGGCARCKRLLQLFRLHAAVCDRPAEQELDRPCRVPLCSHFAARMRTEKADKTWRLLVKKVARARAMAGLADRRVPEVVAMSWARYIGSSKWAKLR

SEQ ID NO: 94264 - protein, 94 aa, Setaria italica
  Transcript Sequence Number=SeqID_28290
TDNFWNVLERGDTVYSIIRKLICYRPTAIVRGESLHGRRRRRAWWGCSLGAAVGAGHVDGGPLDVLHVLAHEHRLVQHRRPSRLLVRAAVAVDR

SEQ ID NO: 94265 - protein, 131 aa, Setaria italica
  Transcript Sequence Number=SeqID_28291
  Gene Ontology: Mol. function=metal ion binding
QYYNLHDHMLIASEGGKFGPCKLQSLWEEHDSGSRLAMVNPYIFGSDIPGSISKPCIDEEDEVYGSNNDRIVLVSAIHGPCEVLHVDKFREETKRRCQLDSSGCVLHPIFFCRWNYDDSTSSFYKDYNVDN

SEQ ID NO: 94266 - protein, 70 aa, Setaria italica
  Transcript Sequence Number=SeqID_28292
  Gene Ontology: Mol. function=metal ion binding
VYGSNNDRIVLVSAIHGVCEVLHVDKFREETKRRCQLDSSGCVLHPIFFCSWWNYDDSTSSFYKDYNVDN

SEQ ID NO: 94267 - protein, 157 aa, Setaria italica
  Transcript Sequence Number=SeqID_28293
  Gene Ontology: Cellular component=cytoplasm; Biological process =multicellular organismal development
  Homolog annotation: Hit_ID=Q53Q71; Match level="QueryCoverage=100%, HitCoverage=90%, E-value=8e-84, Identity=93%"; Hit description=CEN -like protein 2, putative, expressed
  Pfam annotation: Domain name=PBP; Domain location=3-149; Score=227.0; E_value=4.8e-65; Accession=PF01161.12; Description=Phosphatidylethanol amine-binding protein
VLDSFNPCVKMTVTYNSNKLVFNGHEIYPSAVVSKPRVEVQGGDLRSFFTLVMTDPDVPGPSDPYQREHLHWIVTDIPGTTDASFGREVISYESPRPSIGIHRFIFVLFKQKRRQTVTVPSFRDHFNTKQFAEENDLGLPVAAVYFNAQRETAARRR

SEQ ID NO: 94268 - protein, 61 aa, Setaria italica
  Transcript Sequence Number=SeqID_28294
VVVHIFSHYYDKIQNGGIENIGKLRKYSKVLMRKQVHSTPPNVPKAHLPTPPDSNTVTVTE

SEQ ID NO: 94269 - protein, 118 aa, Setaria italica
  misc_feature (74)..(74): Xaa can be any naturally occurring amino acid
  Transcript Sequence Number=SeqID_28295
  Gene Ontology: Mol. function=iron-sulfur cluster binding; Biological process=oxidation reduction
  Homolog annotation: Hit_ID=Q6Z351; Match level="QueryCoverage=100%, HitCoverage=11%, E-value=2e-39, Identity=57%"; Hit description =Putative aldehyde oxidase-like protein
KEVKLASEYYFYMETQTALAIPDEDNTLVVYSSSQCPDLAQSVIARCLGIPFSKVRVITRRAGGGFGGKAFRSXRHPVKARYSVGFKSDGKITALHLDLLINAGISPDASPLMPGTII

SEQ ID NO: 94270 - protein, 46 aa, Setaria italica
  Transcript Sequence Number=SeqID_28296
  Gene Ontology: Mol. function=iron-sulfur cluster binding
  Homolog annotation: Hit_ID=Q6Z351; Match level="QueryCoverage=97%, HitCoverage=3%, E-value=9e-11, Identity=71%"; Hit description =Putative aldehyde oxidase-like protein
TGSGSSPLEFQMDVPAPMTLVKELCGFDIVDKYLESLSTQERAAGA

SEQ ID NO: 94271 - protein, 131 aa, Setaria italica
  Transcript Sequence Number=SeqID_28297
  Gene Ontology: Mol. function=iron-sulfur cluster binding; Biological process=oxidation reduction
  Homolog annotation: Hit_ID=Q6Z351; Match level="QueryCoverage=87%, HitCoverage=8%, E-value=7e-54, Identity=85%"; Hit description =Putative aldehyde oxidase-like protein
SCLLGDTFCSKYSEVQVEIDLLTGAITLLRGDLVYDCGKSLNPAVDLGQIEGSFIQGIGFFIYEEYVTNSDGLMISNSTWDYKIPSVDIIPKQFNAEVLNTGYHKNRVLSSKASGEPALIAASSVHCALVG

SEQ ID NO: 94272 - protein, 784 aa, Setaria italica
  misc_feature (197)..(197): Xaa can be any naturally occurring amino acid
  Transcript Sequence Number=SeqID_28298
  Gene Ontology: Mol. function=iron-sulfur cluster binding; Biological process=oxidation reduction
  Homolog annotation: Hit_ID=Q6Z351; Match level="QueryCoverage=99%, HitCoverage=58%, E-value=0.0, Identity=75%"; Hit description =Putative aldehyde oxidase-like protein
  Pfam annotation: Domain name=Ald_Xan_dh_C; Domain location=27-137; Score=147.3; E_value=4.8e-41; Accession=PF01315.14; Description =Aldehyde oxidase and xanthine dehydrogenase, ab hammerhead domain
  Pfam annotation: Domain name=Ald_Xan_dh_C2; Domain location=148-686; Score=629.2; E_value=4.2e-186; Accession=PF02738.10; Description =Aldehyde oxidase and xanthine dehydrogenase, molybdopterin binding domain
  Pfam module annotation: Pfam domain module=Ald_Xan_dh_C::Ald_Xan_dh _C2; Domain location=27-137::148-686
HVEKISNNDSKPVGEPIKKYAVELQASGEAVYVDDIPAPKNCLYGEFIYSTQPLAYVKSIKFKSSLASEKIIDVVSAKDIPSGGENIGSSFIWGDEPLFGDPIAEYAGQALGVVIAETQRYADMAAKQVIIEYDTKGLSPPILTVEQAVENSSYFSVPPEYYPKEVGDVMRRMAEADHKIPSTEVKFASEYYFYMEXQSVSLQEELEEALVVYSSSQCPELAQTVIARCLGIPFSNVRVITRRVGGGFGGKAFRSFQVATAAALCAYKLRRPVRMYLNRNTDMVMIGGRHPVKARYSVGFKSDGKITALHLDLLINAGISEDASPSIPRVIISSVKKYNWGALSFDFKLCKTNNSSKSIMRAPGDTQGSLIADAIIEHVASVLSLDANSVREKNFHTYDTLQLFYPDSAGEASTYTLHSIFDRLVSTSSYLDRAESIKMFNSSNKWRKRGISCVPLIFRAEPRAAPGRVSVLNDGSIVVEIGGIEIGRRNWTKVQQTTAFALGKLWPDGVEGFLERVRVLQADTLNLIQGGLTAGSTSSESSCAATLQVCNMLVDRLKPVLDRLQQQSEDVSWDTLISQASKENVNLSASAYWVPGQDSNKYLNYGAGISEVEIDLLTGAITLLRGDLVYDCGKSLNPAVDLGQIEGSFIQGIGFFIYEEYVTNSDGLMISNSTWDYKIPSVDIIPKQFNAEVLNTGYHKNRVLSSKASGEPALIAASSVHCALREAIRAARREFANSTGSGSSPLEFQMDVPAPMTLVKELCGFDIVDKYLESLSNYERAAGA

SEQ ID NO: 94273 - protein, 441 aa, Setaria italica
  misc_feature (213)..(213): Xaa can be any naturally occurring amino acid
  Transcript Sequence Number=SeqID_28299
  Gene Ontology: Mol. function=nucleic acid binding; Cellular component= nucleus; Biological process=response to DNA damage stimulus
  Homolog annotation: Hit_ID=B9SN70; Match level="QueryCoverage=99%, HitCoverage=42%, E-value=0.0, Identity=82%"; Hit description=DNA repair helicase rad5,16, putative
  Pfam annotation: Domain name=Helicase_C; Domain location=310-388; Score=78.9; E_value=1.9e-20; Accession=PF00271.23; Description =Helicase conserved C-terminal domain
  Pfam annotation: Domain name=SNF2_N; Domain location=1-152; Score= -110.7; E_value=0.022; Accession=PF00176.15; Description=SNF2 family N-terminal domain
  Pfam annotation: Domain name=zf-C3HC4; Domain location=205-245; Score= 38.8; E_value=2.1e-08; Accession=PF00097.17; Description=Zinc finger, C3HC4 type (RING finger)
  Pfam module annotation: Pfam domain module=Helicase_C::SNF2_N::zf -C3HC4; Domain location=310-388::1-152::205-245
AAAALTADRRWCLTGTPIQNNLEDLYSLFRFLRVEPWRNWALWNKLVQKPYEEGDERGLKLVQSILKPIMLRRTKNSTDKEGRPILNLPPANIEVKYCDLSEAEKDFYEALFRRSKVKFDQFVEQGKVLHNYASILELLLRLRQCCDHPFLVMSRGDTQEFADLNKLAKRFLRGGNGPVNGDSCLPSRAYIEEVVQELQKGEGECPICLEAFXGNAVLTPCAHRLCRECLLSSWQSATAGLCPVCRKSMSKQDLITAPTDSRFQVDVDKNWVESSKISALLQELEVLRSSGAKSIVFSQWTAFLDLLQIPLSRNNISFARLDGTLNLQQREKVIKEFSEDRGILVLLMSLKAGGVGINLTAASNAFVMDPWWNPAVEEQAVMRIHRIGQTKTVSIKRFIVKGTVEERMEAVQARKQRMISGALTDQEVRTARIEELKMLCP

SEQ ID NO: 94274 - protein, 226 aa, Setaria italica
  misc_feature (207)..(207): Xaa can be any naturally occurring amino acid
  misc_feature (220)..(220): Xaa can be any naturally occurring amino acid
  Transcript Sequence Number=SeqID_28300
  Gene Ontology: Mol. function=transferase activity; Cellular component= chloroplast
  Homolog annotation: Hit_ID=B6TPY7; Match level="QueryCoverage=100%, HitCoverage=51%, E-value=1e-109, Identity=44%"; Hit description=ATP binding protein
  Pfam annotation: Domain name=PPR; Domain location=113-147; Score =27.9; E_value=4.2e-05; Accession=PF01535.12; Description=PPR repeat
  Pfam annotation: Domain name=PPR; Domain location=148-182; Score =45.3; E_value=2.4e-10; Accession=PF01535.12; Description=PPR repeat
  Pfam annotation: Domain name=PPR; Domain location=183-217; Score =26.7; E_value=9.7e-05; Accession=PF01535.12; Description=PPR repeat
  Pfam annotation: Domain name=PPR; Domain location=44-77; Score=24.5; E_value=0.00045; Accession=PF01535.12; Description=PPR repeat
  Pfam annotation: Domain name=PPR; Domain location=78-112; Score=37.5; E_value=5.2e-08; Accession=PF01535.12; Description=PPR repeat
  Pfam annotation: Domain name=PPR; Domain location=9-43; Score=11.4; E_ value=0.4; Accession=PF01535.12; Description=PPR repeat
  Pfam module annotation: Pfam domain module=PPR::PPR::PPR::PPR::PPR::PP R; Domain location=113-147::148-182::183-217::44-77::78-112::9-43
GRQGPCPMDAFKIAIKSFAAAGEIKNAVGVFELMRKNGFDDGVESFNCLLVALAQEGLGREARQVFDKMHDRYTPDLRSYTALMLAWCNAKNLVEAGRVWNEMLEKGMKPDVVVHNTMIEGLLRGQRRPEAVKMFELMKAKGPPPNARTYTMLIRDHCKRGKMDMAMRCFEEMQEARCQPDVATYTCLLVGYGNAKRMDRVTAVLEXMTQEGVPADAQTXYNALIK

SEQ ID NO: 94275 - protein, 77 aa, Setaria italica
  Transcript Sequence Number=SeqID_28301
LAQQFYYLHTLSHCCRNRTHILRSASYNSFNIAVAIASVLQHCCRNCKHIAQADCCRNCSACLHCFSLQRRRRSIDR

SEQ ID NO: 94276 - protein, 149 aa, Setaria italica
  misc_feature (140)..(140): Xaa can be any naturally occurring amino acid
  Transcript Sequence Number=SeqID_28302
  Homolog annotation: Hit_ID=B6UAX4; Match level="QueryCoverage=100%, HitCoverage=42%, E-value=6e-64, Identity=85%"; Hit description =Growth-regulating factor
  Subcellular localization annotation: CTP_CleavageSite=84; ConfidenceScore=5.28e-01
YRYGSKYPLGAKADAGELSFFSGASGNSRGFTIDSPTDNSWNSLPSNVPPFTLSKSRDSGLLPGTYSYSQLETPQELGQVTIASLSQEQERHSFSSGAGGLLGNVKQENQPLRPFFDEWPGTRDSWSEMDDARSNRTSFXTTQLSISIP

SEQ ID NO: 94277 - protein, 122 aa, Setaria italica
  misc_feature (99)..(99): Xaa can be any naturally occurring amino acid
  Transcript Sequence Number=SeqID_28303
  Gene Ontology: Mol. function=nucleic acid binding
KFVNKFEYDRERRMRERAFAPMNMESNFGRHDLRFRSQDDSNFAPTDASDDFGSHGQTFGHRSDRSFQNSSSFRNHGDSRFQNESNFRNQRESDFQHKXSFGNHRYPNFQNQRDTRDHAFDD

SEQ ID NO: 94278 - protein, 192 aa, Setaria italica
  misc_feature (17)..(17): Xaa can be any naturally occurring amino acid
  Transcript Sequence Number=SeqID_28304
  Gene Ontology: Mol. function=transporter activity; Cellular component= integral to membrane; Biological process=transport
  Homolog annotation: Hit_ID=Q41760; Match level="QueryCoverage=99%, HitCoverage=36%, E-value=6e-90, Identity=86%"; Hit description =Nucleobase-ascorbate transporter LPE1
GPTAEKAIVIQTILFLXGINTLLQVHFGTRLPAVMGGSYTYIYPIVAIVLSPRHALIIDPLERFVLTMRSIQGALIIAGVFQAVVGFFGIWRVFIRFLSPLAAFPFVTLSGLGLFYFTFPGVAKCIEIGLPALVLLVLFAESASHFCVKGSFVFGRCAVLVTIIIVWIYAEILTAAGAYNERGPVTQFSCRT

SEQ ID NO: 94279 - protein, 111 aa, Setaria italica
  Transcript Sequence Number=SeqID_28305
  Gene Ontology: Mol. function=transporter activity; Cellular component= integral to membrane; Biological process=transport
  Homolog annotation: Hit_ID=Q41760; Match level="QueryCoverage=92%, HitCoverage=19%, E-value=4e-41, Identity=77%"; Hit description =Nucleobase-ascorbate transporter LPE1
TCFLLDAVGAGLSLLQYCNLNSLRSKFIISISLFLGLSIPQYFRVYEMFFGFGPVHTHSVAFNVMVNVIFSSPATVAAILAYLLDCTHLYWEASVRKDRGWHWWEKFKSLL

SEQ ID NO: 94280 - protein, 236 aa, Setaria italica
  Transcript Sequence Number=SeqID_28306
  Gene Ontology: Mol. function=transporter activity; Cellular component= integral to membrane; Biological process=transport
  Homolog annotation: Hit_ID=Q41760; Match level="QueryCoverage=100%, HitCoverage=44%, E-value=1e-101, Identity=78%"; Hit description =Nucleobase-ascorbate transporter LPE1
MAPVKAEDLVPHPVREQFDGLDFCITSPPPWLTTVVVAFQHYLVMLGTTVIIPTIIVPLMGGGHAEKAIVIQTILFLAGINTLLQVHFGTRLPAVMGGSYTYIYPIVAIVLSPRHALIIDPLERFVLTTNRRYEYQGTTGVFQAVVGFFGIWRVFIRFLSPLAAFPFVTLSGLGLFYFTFPGVAKCIEIGLPALVLLVLFAEYASHFFVKGSFVFGRCAVLVTIIIVWIYAEILTA

SEQ ID NO: 94281 - protein, 381 aa, Setaria italica
  Transcript Sequence Number=SeqID_28307
  Gene Ontology: Mol. function=transporter activity; Cellular component= integral to membrane; Biological process=transport
  Homolog annotation: Hit_ID=Q41760; Match level="QueryCoverage=96%, HitCoverage=69%, E-value=0.0, Identity=85%"; Hit description =Nucleobase-ascorbate transporter LPE1
  Pfam annotation: Domain name=Xan_ur_permease; Domain location=1-293; Score=-23.8; E_value=3.7e-07; Accession=PF00860.12; Description =Permease family
KRLNLKKRNPLNERNVAAFPFVTLSGLGLFYFTFPGVAKCIEIGLPALVLLVLFAEYASHFFVKGSFVFGRCAVLVTIIIVWIYAEILTAAGAYNERGPVTQFSCRTDRAGIIQGSPWVRFPYPFQWGYPIFCWQDCLAMLAASFASLIESTGTLIVVSRFAGATFCPPSVFSRGVGWEGISIILDGMCGTLTGTAASVENAGLLPLTRVGSRRVIKISALFMIFFSLFGKFGAVLASIPLSLFAALYCVLFAYTVGAGLSLLQYCNLNSLRSKFIISISLFLGLSIPQYFRVYEMFFGFGPVHTHSVAFNVMVNVIFSSPATVAAILAYLLDCTHLYWEASVRKDRGWHWWEKFKSYKQDSRSEEFYALPYGLSRYFPSL

SEQ ID NO: 94282 - protein, 90 aa, Setaria italica
  misc_feature (16)..(16): Xaa can be any naturally occurring amino acid
  misc_feature (44)..(44): Xaa can be any naturally occurring amino acid
  Transcript Sequence Number=SeqID_28308
  Gene Ontology: Mol. function=hydrolase activity, hydrolyzing O -glycosyl compounds; Cellular component=chloroplast; Biological process=carbohydrate metabolic process
  Homolog annotation: Hit_ID=Q9SXI9; Match level="QueryCoverage=78%, HitCoverage=8%, E-value=2e-31, Identity=94%"; Hit description =H0321H01.10 protein
VLLVLLMLVNDLIHGXPEAVAIGEDVSGMPTFCIPVQDGGVGFXDYRLHMAVPDKWIELLKQSDEYWKMGDIVHTLTNIRKNRTRKKVSK

SEQ ID NO: 94283 - protein, 404 aa, Setaria italica
  Transcript Sequence Number=SeqID_28309
  Gene Ontology: Mol. function=hydrolase activity, hydrolyzing O -glycosyl compounds; Cellular component=chloroplast; Biological process=carbohydrate metabolic process
  Homolog annotation: Hit_ID=Q9SXI9; Match level="QueryCoverage=100%, HitCoverage=48%, E-value=1e-179, Identity=78%"; Hit description =H0321H01.10 protein
  Pfam annotation: Domain name=CBM_48; Domain location=203-287; Score =106.7; E_value=7.7e-29; Accession=PF02922.10; Description =Carbohydrate-binding module 48 (Isoam
  Subcellular localization annotation: CTP_CleavageSite=50; ConfidenceScore=5.32e-01
MASFAVSGARLGVVRPGGGSARSGAERRSGVDLPSMLFRRKDSFSRTVLSCAGAPGKVLVPGGGSDDLLSSTEPAVDTPVQPDEELQVPDEAELVVEETASSSAAEASSAVDVEEKPEPSEVIEGTGETVTDGVAVEAKAPLVEEKPRVIPPPGDGQRIYEIDPMLEGFRNHLDYRYSEYKRMRAAIDQHEGGLDAFSRGYEKMGFTRSAQGITYREWAPGAHSAALVGDFNNWNPNADTMTRNEYGVWEIFLPNNADGSPAIPHGSRVKIRMDTPSGVKDSIPAWIKFSVQAPGEIPYNGIYYDPPEEEKYVFKHPQPKRPKSLRIYESHVGMSSPEPKINTYANFRDEVLPRIKRLGYNAVQIMAIQEHSYYASFGYHVTNLFAPSSRFGTPEDLNTLIDKA

SEQ ID NO: 94284 - protein, 515 aa, Setaria italica
  Transcript Sequence Number=SeqID_28310
  Gene Ontology: Mol. function=hydrolase activity, hydrolyzing O -glycosyl compounds; Cellular component=chloroplast; Biological process=carbohydrate metabolic process
  Homolog annotation: Hit_ID=Q9SXI9; Match level="QueryCoverage=98%, HitCoverage=60%, E-value=0.0, Identity=97%"; Hit description =H0321H01.10 protein
  Pfam annotation: Domain name=Alpha-amylase; Domain location=3-323; Score=-27.2; E_value=6.4e-08; Accession=PF00128.16; Description =Alpha amylase, catalytic domain
  Pfam annotation: Domain name=Alpha-amylase_C; Domain location=417 -512; Score=112.0; E_value=2e-30; Accession=PF02806.10; Description =Alpha amylase, C-terminal all-beta do
  Pfam module annotation: Pfam domain module=Alpha-amylase::Alpha -amylase_C; Domain location=3-323::417-512
LVDNNLKLGMSSPEPKINTYANFRDEVLPRIKRLGYNAVQIMAIQEHSYYASFGYHVTNFFAPSSRFGTPEDLKSLIDKAHELGLLVLMDIVHSHSSNNTLDGLNGFDGTDTHYFHGGPRGHHWMWDSRLFNYGSWEVLRYLLSNARWWLEEYKFDGFRFDGVTSMMYTHHGLQVAFTGNYGEYFGFATDVDAVVYLMLVNDLIHGLYPEAVAIGEDVSGMPTFCIPVQDGGVGFDYRLHMAVPDKWIELLKQSDEYWKMGDIVHTLTNRRWLEKCVTYAESHDQALVGDKTIAFWLMDKDMYDFMALDRPSTPRIDRGIALHKMIRLVTMGLGGEGYLNFMGNEFGHPEWIDFPRGPQSLPNGSVIPGNNNSFDKCRRRFDLGDADYLRYRGMQEFDQAMQHLEEKYEFMTAEHSYVSRKHEEDKVIIFERGNLVFVFNFHWSNSYFDYRVGCFKPGKYKIVLDSDDGLFGGFSRLDHDAEYFTADWPHDNRPCSFSVYAPSRTAVVYALAEDE

SEQ ID NO: 94285 - protein, 79 aa, Setaria italica
  Transcript Sequence Number=SeqID_28311
  Gene Ontology: Mol. function=zinc ion binding
  Homolog annotation: Hit_ID=B9RGS0; Match level="QueryCoverage=92%, HitCoverage=27%, E-value=4e-12, Identity=42%"; Hit description=Zinc finger protein, putative
AVTEARCPTCSRAFCLQCEGPWDERHGGEGCVMSRLADGRNWTRCPSCRAMIDKTGGCRHIVCRCGTAFCYICGSAFSA

SEQ ID NO: 94286 - protein, 45 aa, Setaria italica
  Transcript Sequence Number=SeqID_28312
  Gene Ontology: Mol. function=catalytic activity; Cellular component =intracellular; Biological process=regulation of transcription
LKLWNKDRIAKASEVLQSISSQVNEALENRPISIQLRGLVSLLWI

SEQ ID NO: 94287 - protein, 548 aa, Setaria italica
  misc_feature (372)..(372): Xaa can be any naturally occurring amino acid
  misc_feature (443)..(443): Xaa can be any naturally occurring amino acid
  Transcript Sequence Number=SeqID_28313
  Gene Ontology: Mol. function=catalytic activity; Cellular component =intracellular; Biological process=regulation of transcription
  Homolog annotation: Hit_ID=B9RQI1; Match level="QueryCoverage=63%, HitCoverage=86%, E-value=1e-114, Identity=55%"; Hit description =Nucleic acid binding protein, putative
  Pfam annotation: Domain name=AKAP7_NLS; Domain location=296-541; Score=-79.2; E_value=0.00023; Accession=PF10469.1; Description =Protein kinase A anchor protein nuclea
  Pfam annotation: Domain name=KH_1; Domain location=203-263; Score =51.3; E_value=3.8e-12; Accession=PF00013.21; Description=KH domain
  Pfam module annotation: Pfam domain module=AKAP7_NLS::KH_1; Domain location=296-541::203-263
  Subcellular localization annotation: CTP_CleavageSite=70; ConfidenceScore=5.12e-01
SQIFGAGVGAEQLTSPLCGRRSPLTVHRSKQWIAYSPQPQPQPRVRPPVSSSPKSFHFSTRPIHARLQVSARKGSVGQNKLASFVMEGAQGGSSNLAKHKKRKSPVQRWRPISTEAVPQKDDANEISNSGSGQVVEECITSSENLASDGATNAVIEVTTNDASLSKNNISLESSSTKVVIEDNEEVSGFNKDLDESNVYETYSFSIEVDVPLMRFVKGKGGSMQKKIEEDTGVKIIFPSSREETSVVLEGTSSESIRKASQMIANVLEEAVQSRMLDYSHFISLPLAIHPDLVHKLNYFQSSILGASASNEESDQDKRRSEGSIDEMDHDHKQADGSSVSINLQVQEESVQVKMDSKGSRSDFGIDKTIFIXPKTFHLTVVMLKLWNKDRIAKASEVLQSISSQVNEALENRPISIQLRGLTCMKGSPAKARVVYAPVLEVGXEGRLARACKVIIDAFVKSGLVLERDARQELKLHATIMNVRHRKSKQRNRWNDSFDARDIFRKYGKEEWGEYHIPEVHLSQRFKFDESGYYHCCSSIPLPAEMRAK

SEQ ID NO: 94288 - protein, 287 aa, Setaria italica
  Transcript Sequence Number=SeqID_28314
  Subcellular localization annotation: CTP_CleavageSite=56; ConfidenceScore=5.10e-01
MERAAPVRSSHTSTADLLAWPQPQGQATAPATPSPPRRPGQPSEAIRKVVFGGQVTEEEADSLTKRKPCSAPKWKEMTGSGIFAAGSNGDSGEAAAAVKPARTASRQAISTVSHISFAEDGTDPPKKPTSVAEVAKQRELSGTLQSEADSKMKQISNAKSKELSGHDIFADTQESRLNRARNSSNGSSASHIPVKNANASTFSFGEANIDSAPKTAKKITGKKVNDLSGNDIFKGDAPPASAEKHLSTAKLKEITGSNIFADGKEPTRERVGGNRKPPGGVSSIALI

SEQ ID NO: 94289 - protein, 63 aa, Setaria italica
  Transcript Sequence Number=SeqID_28315
INPFQDSVLSETNTDEKDVSMFLSVKIRKHLFPLSYEAFASLYLFIIVEVLLNILTYSKSNKY

SEQ ID NO: 94290 - protein, 384 aa, Setaria italica
  Transcript Sequence Number=SeqID_28316
  Gene Ontology: Mol. function=phosphoric diester hydrolase activity; Cellular component=anchored to membrane; Biological process =intracellular signaling cascade
  Homolog annotation: Hit_ID=B9SCA3; Match level="QueryCoverage=89%, HitCoverage=82%, E-value=1e-144, Identity=70%"; Hit description =Phospholipase C, putative
  Pfam annotation: Domain name=PI-PLC-X; Domain location=78-222; Score=- 46.2; E_value=0.056; Accession=PF00388.11; Description=Phosphatidylino sitol-specific phospholipase C, X domain
MAPPLLPSSVLLLLHIALLLLVVPCSAQVGDSCSSARDCGTGLYCGNCPASGRTKPSCIRDLAIQPTSIVKGLPFNRYSWLVTHNSFSILGEPSRTGVERVTFYNQEDSVTNQLRNGVRGLMLDMYDFNNDVWLCHSLQGQCYNFTAFVPAVETLKEVEAFLSENPSEIVTIFIEDYVRSPMGLSKVFTAADLMKYWYPISEMPTNGKDWPSVTDMVAKNHRLLVFTSDSSKEASEGIAYQWSYLIENESGDPGIVPGSCPNRKESQPLNSRSASLFLQNYFPTMPVQNEACKENSGLPQMAQACYAAAGNRIPNFIAVNFYMRSDGGGVFDVQDRINGITLCGCNTIAACQAGAPMGACKDTGAPNRTPSSSSSSSSSVDGNI

SEQ ID NO: 94291 - protein, 203 aa, Setaria italica
  Transcript Sequence Number=SeqID_28317
  Gene Ontology: Mol. function=phosphoric diester hydrolase activity; Cellular component=anchored to membrane; Biological process =intracellular signaling cascade
  Homolog annotation: Hit_ID=B9SCA3; Match level="QueryCoverage=72%, HitCoverage=33%, E-value=3e-40, Identity=59%"; Hit description =Phospholipase C, putative
  Subcellular localization annotation: CTP_CleavageSite=76; ConfidenceScore=5.15e-01
LLLNYKVSAIDFSSAKILISFLVVMAAGDPGIVPGSCPNRKESQPLNSRSASLFLQNYFPTMPVQNEACKENSGLPQMAQACYAAAGNRIPNFIAVNFYMRSDGGGVFDVQDRINGITLCGCNTIAACQAGAPMGACKDTGAPNRTPSSSSSSSSSVDGNIYSGTIEFKTHPTADASTTSMRSSFVLLLSLVLTVKLVASFMH

SEQ ID NO: 94292 - protein, 118 aa, Setaria italica
  misc_feature (107)..(107): Xaa can be any naturally occurring amino acid
  Transcript Sequence Number=SeqID_28318
  Gene Ontology: Biological process=protein transport
  Homolog annotation: Hit_ID=B9RXZ5; Match level="QueryCoverage=87%, HitCoverage=37%, E-value=5e-31, Identity=69%"; Hit description =Charged multivesicular body protein, putative
  Pfam annotation: Domain name=Snf7; Domain location=1-98; Score=-33.2; E_value=0.0027; Accession=PF03357.13; Description=Snf7
RQRNKELKGMMKTVKIEDIDNMQDEMTDLMDVSNEIQETLGRSYNIPDDVDEEELMGELDALESDMEFESAAVPSYLQPETDMEFESAAAASYPQPETDFDADLNLXAAPTRPAGTAA

SEQ ID NO: 94293 - protein, 178 aa, Setaria italica
  misc_feature (29)..(29): Xaa can be any naturally occurring amino acid
  Transcript Sequence Number=SeqID_28319
  Gene Ontology: Mol. function=nucleoside-triphosphatase activity; Cellular component=peroxisomal membrane; Biological process=protein import into peroxisome matrix, translocation
  Homolog annotation: Hit_ID=Q93X55; Match level="QueryCoverage=99%, HitCoverage=19%, E-value=8e-78, Identity=77%"; Hit description =Peroxin 6 (Fragment)
  Pfam annotation: Domain name=AAA; Domain location=1-162; Score=135.2; E_value=2.1e-37; Accession=PF00004.21; Description=ATPase family associated with various cellular activities (AAA)
VKGPELINMYVGESEKNVRDIFEKARSAXPMCHFFDELDSLAPARGSSADSGGVMDRVVSQLLVEIDGLSDNSQDLFIIGATNRPDLLDSALLRPGRFDKLLYVGVNTDASYRERLILKAQTRKYKLHKNVSLLSVAQRCPPNFTGADIYALCADAWFHAAKRSVKTFETDTSRSNDA

SEQ ID NO: 94294 - protein, 206 aa, Setaria italica
  Transcript Sequence Number=SeqID_28320
  Gene Ontology: Mol. function=nucleoside-triphosphatase activity
  Homolog annotation: Hit_ID=B9S3U3; Match level="QueryCoverage=90%, HitCoverage=20%, E-value=4e-53, Identity=53%"; Hit description =Peroxisome assembly factor-2, putative
EPHAASSARSDLSLLLDLLPCPQVPKYALHVRVSVVRIPECGVLASLKINSSVGGSDYQDMVDQALNEYFKFDRFLARGDVFCIQNNWNCGASSCLACNKQVDNLHPHNVIYFKVTSMEPSDEPILRVNCNQTALVLGGAASAAIPPYSFFSASGDSVPLHGEIVEHFASIIAPALCPSDILPKIKFSTFIYGPSGCGKRTVVRHV

SEQ ID NO: 94295 - protein, 588 aa, Setaria italica
  Transcript Sequence Number=SeqID_28321
  Gene Ontology: Mol. function=nucleoside-triphosphatase activity; Cellular component=cytoplasm; Biological process=peroxisome organization and biogenesis
  Homolog annotation: Hit_ID=A2Q4J2; Match level="QueryCoverage=96%, HitCoverage=61%, E-value=0.0, Identity=61%"; Hit description=AAA ATPase, central region; L-lactate dehydrogenase
  Pfam annotation: Domain name=AAA; Domain location=27-242; Score=23.0; E_value=2.3e-07; Accession=PF00004.21; Description=ATPase family associated with various cellular activities (AAA)
  Pfam annotation: Domain name=AAA; Domain location=340-529; Score =290.5; E_value=3.8e-84; Accession=PF00004.21; Description=ATPase family associated with various cellular activities (AAA)
  Pfam annotation: Domain name=AAA_2; Domain location=336-469; Score= -37.7; E_value=0.0093; Accession=PF07724.6; Description=ATPase family associated with various
  Pfam annotation: Domain name=AAA_3; Domain location=340-471; Score= -14.1; E_value=0.013; Accession=PF07726.3; Description=ATPase family associated with various
  Pfam annotation: Domain name=AAA_5; Domain location=340-475; Score= -12.9; E_value=0.011; Accession=PF07728.6; Description=ATPase family associated with various
  Pfam module annotation: Pfam domain module=AAA::AAA::AAA_2::AAA _3::AAA_5; Domain location=27-242::340-529::336-469::340-471::340-475
ISWLSSSASIIAPALCPSDILPKIKFSTFIYGPSGCGKRTVVRHVANHLGLHVVECSCHDLMTSSESGAPVALATAFKEAQKYSPCIILLRHFDAIGNSSSNEGPQSEQSGIASNIESVIKQYTGQRWVAKDSMPGRYVNGSLYLVEPECVSSLQIILVATADSSEGMQQSIRRCFRHEIDMKTMNEEHRNKLISETLQGIATVGDESIDDKFVKDLAAQTSGFMPRDILALIADAGVSFAHKIAAEKDSKEFSNHEDILPESSSATQNEEKHFCKEHIMSSLERAKKRNRAALGTPKVPNVKWEDVGGLEEVKKVILDTIQLPLMYKHLFSSKLRKRSGVLLYGPPGTGKTLLAKAVATECSLNFISVKGPELINMYVGESEKNVRDIFEKARSARPCVIFFDELDSLAPARGSSADSGGVMDRVVSQLLVEIDGLSDNSQDLFIIGATNRPDLLDSALLRPGRFDKLLYVGVNTDASYRERILKAQTRKYKLHKNVSLLSVAQRCPPNFTGADIYALCADAWFHAAKRSVKTFETDTSRSNDASAEEVIVEIDDFMTVLGDISPSLSLEELQNYELLRQKIEGPSR

SEQ ID NO: 94296 - protein, 119 aa, Setaria italica
  Transcript Sequence Number=SeqID_28322
  Gene Ontology: Mol. function=protein binding; Cellular component =extracellular region
  Homolog annotation: Hit_ID=B6SN21; Match level="QueryCoverage=67%, HitCoverage=23%, E-value=1e-17, Identity=60%"; Hit description =Polygalacturonase inhibitor
  Pfam annotation: Domain name=LRRNT_2; Domain location=37-75; Score =23.6; E_value=0.00082; Accession=PF08263.4; Description=Leucine rich repeat N-terminal domain
MAAAAAFSQQPHGRLLVLLLFCCLVGAATSGSTMQCHDEDQAALLAINDALGSPQHFTSWTPDTFCCDWYDVDCDNATGRVAGLTVIGDGNVTAAIPDAIANLTSSLTLVMRHLRASPA

SEQ ID NO: 94297 - protein, 71 aa, Setaria italica
  Transcript Sequence Number=SeqID_28323
SCAEIETKSKASAPQIHTASADNSNTRNKDSATRSAEGDATSTQICGNGAREPRERIGLRGDKQKKRKGKN

SEQ ID NO: 94298 - protein, 254 aa, Setaria italica
  misc_feature (15)..(15): Xaa can be any naturally occurring amino acid
  Transcript Sequence Number=SeqID_28324
  Gene Ontology: Mol. function=3-methyl-2-oxobutanoate hydroxymethyltran sferase activity; Cellular component=cytoplasm; Biological process =pantothenate biosynthetic process
  Homolog annotation: Hit_ID=B6TL59; Match level="QueryCoverage=99%, HitCoverage=71%, E-value=1e-117, Identity=84%"; Hit description=3 -methyl-2-oxobutanoate hydroxymethyltransferase
  Pfam annotation: Domain name=Pantoate_transf; Domain location=1-208; Score=209.2; E_value=1.1e-59; Accession=PF02548.7; Description =Ketopantoate hydroxymethyltransferase
LDLMLEHCRAVARGXAPRPLLVGDLPFGCYESSAAQAVDSAVRLLKEGGMDAIKLEGGAPSRISAAKAIVEAGIAVMGHVGLTPQAISVLGGFRPQGKTVDSAVKVVETALALQEAGCFSVVLECVPAPVAAAATSALQIPTIGIGAGPFCSGQVLVYHDLLGMMQHPHHAKVTPKFCKQFGNVGNVINRALSEYKKEVETRTFPGPSHTPYPITPTDVDGFANALQKMGLSDAADAAAAAAENSGTDGGPKEK

SEQ ID NO: 94299 - protein, 98 aa, Setaria italica
  Transcript Sequence Number=SeqID_28325
  Gene Ontology: Mol. function=hydrolase activity, hydrolyzing O -glycosyl compounds; Cellular component=extracellular region; Biological process=carbohydrate metabolic process
  Homolog annotation: Hit_ID=B6TU78; Match level="QueryCoverage=55%, HitCoverage=12%, E-value=3e-23, Identity=96%"; Hit description =Glucan endo-1,3-beta-glucosidase 7
GTPRAPGKSVETYIFAVYDEDLKPGKASERYFGLFQTSLTETYPTGLLRNGTAGLGPAMAPAPAPTSVQPPPALPTPQVRLLRYNTSCRCFFLSLFTG

SEQ ID NO: 94300 - protein, 102 aa, Setaria italica
  Transcript Sequence Number=SeqID_28326
  Subcellular localization annotation: CTP_CleavageSite=20; ConfidenceScore=5.36e-01
PARRAPGSPRRDPPPARSVSAVRDAAPLLGRPCSSPSLPPAGGVLRCGRGCHRAAAFLALAWARGASEVATGGALCRGRRRRATGRDRDVTHATLVAKTGCG

SEQ ID NO: 94301 - protein, 168 aa, Setaria italica
  misc_feature (7)..(7): Xaa can be any naturally occurring amino acid
  misc_feature (160)..(160): Xaa can be any naturally occurring amino acid
  Transcript Sequence Number=SeqID_28327
  Gene Ontology: Mol. function=protein dimerization activity; Cellular component=nucleus; Biological process=regulation of transcription, DNA-dependent
  Homolog annotation: Hit_ID=B9T7C9; Match level="QueryCoverage=69%, HitCoverage=42%, E-value=2e-24, Identity=48%"; Hit description=DNA binding protein, putative
  Pfam annotation: Domain name=bZIP_1; Domain location=36-101; Score =21.5; E_value=0.002; Accession=PF00170.13; Description=bZIP transcription factor
  Pfam annotation: Domain name=bZIP_2; Domain location=35-92; Score =48.8; E_value=2.1e-11; Accession=PF07716.7; Description=Basic region leucine zipper
  Pfam module annotation: Pfam domain module=bZIP_1::bZIP_2; Domain location=36-101::35-92
CNPPGPXSAPMHTHTCLHTHTQVLAGGADDDDASPGPPAKPRKPLGNRVAVRKYREKKKAHAAFLEEEVKKLRAANQQLLRRVQDHAVLEAEVVRLRTLLLDVRGKIDAEVGAFPFQNPCSVGSVVSADPALCFNGNSEVAGAWEESSVPSAADCRIDGXGGMSRETD

SEQ ID NO: 94302 - protein, 136 aa, Setaria italica
  Transcript Sequence Number=SeqID_28328
  Gene Ontology: Mol. function=protein dimerization activity; Cellular component=nucleus; Biological process=regulation of transcription, DNA-dependent
TRPYLGRKEGTKKDYRRPTKPRQLLRRVQDHAVLEAEVVRLRTLLLDVRGKIDAEVGAFPFQNPCSVGSVVSADPALCFNGNSEVAGAWEESSVPSAADCRIDEGGGMSRETDVPEGLHHPMDVVASFVSSDSLAE

SEQ ID NO: 94303 - protein, 58 aa, Setaria italica
  misc_feature (43)..(43): Xaa can be any naturally occurring amino acid
  Transcript Sequence Number=SeqID_28329
  Gene Ontology: Mol. function=DNA binding; Cellular component=nucleus; Biological process=regulation of transcription
  Homolog annotation: Hit_ID=B9SJP4; Match level="QueryCoverage=82%, HitCoverage=11%, E-value=8e-18, Identity=78%"; Hit description=R2r3 -myb transcription factor, putative
MGRAPCCDKATVKKGPWAPEEDAVLKAYIDEHGAGGNWIQLPXKIGRCKHLHRSSALP

SEQ ID NO: 94304 - protein, 77 aa, Setaria italica
  Transcript Sequence Number=SeqID_28330
FFFFFSLEQNNEPIINSRDPNIHLQFYTNEGVERQETLASSNYPTAKLYTHGRNNERNKQRPPIQTASYPKQSLAIC

SEQ ID NO: 94305 - protein, 232 aa, Setaria italica
  Transcript Sequence Number=SeqID_28331
  Gene Ontology: Mol. function=nucleic acid binding; Cellular component= nucleus
  Homolog annotation: Hit_ID=B9RAN9; Match level="QueryCoverage=97%, HitCoverage=53%, E-value=1e-27, Identity=34%"; Hit description =Nucleic acid binding protein, putative
  Pfam annotation: Domain name=zf-CCCH; Domain location=200-226; Score =28.3; E_value=3.2e-05; Accession=PF00642.16; Description=Zinc finger C-x8-C-x5-C-x3-H type (and similar)
  Pfam annotation: Domain name=zf-CCCH; Domain location=4-30; Score =43.0; E_value=1.1e-09; Accession=PF00642.16; Description=Zinc finger C-x8-C-x5-C-x3-H type (and similar)
  Pfam annotation: Domain name=zf-CCCH; Domain location=63-89; Score =36.7; E_value=9.1e-08; Accession=PF00642.16; Description=Zinc finger C-x8-C-x5-C-x3-H type (and similar)
  Pfam module annotation: Pfam domain module=zf-CCCH::zf-CCCH::zf-CCCH; Domain location=200-226::4-30::63-89
QEGPGKLNCRFYMLNGSCSYGSSCHFNHPQLKAKLEVSNFPSEQRNREVEFLELNRVGLPIREGARKCTYYMRNGTCRYGKKCCFNHPEQVLDAQLHMPTGWDDTNLQSSPHSKKSTEHATINDISSGLEILPPNGSEILPPNILRMLLPPQNVPPCTEEKEMKVKKEAIDDGTDNEHDFDTKSENVLQQQEKTIYPQRPGEPECSHYMKHGYCKFQKSCIFHHPTDHLSNK

SEQ ID NO: 94306 - protein, 596 aa, Setaria italica
  misc_feature (382)..(382): Xaa can be any naturally occurring amino acid
  Transcript Sequence Number=SeqID_28332
  Gene Ontology: Mol. function=nucleic acid binding; Cellular component= nucleus
  Homolog annotation: Hit_ID=B9RAN9; Match level="QueryCoverage=81%, HitCoverage=69%, E-value=2e-29, Identity=29%"; Hit description =Nucleic acid binding protein, putative
  Pfam annotation: Domain name=zf-CCCH; Domain location=106-132; Score =43.0; E_value=1.1e-09; Accession=PF00642.16; Description=Zinc finger C-x8-C-x5-C-x3-H type (and similar)
  Pfam annotation: Domain name=zf-CCCH; Domain location=165-191; Score =36.7; E_value=9.1e-08; Accession=PF00642.16; Description=Zinc finger C-x8-C-x5-C-x3-H type (and similar)
  Pfam annotation: Domain name=zf-CCCH; Domain location=302-328; Score =31.4; E_value=3.7e-06; Accession=PF00642.16; Description=Zinc finger C-x8-C-x5-C-x3-H type (and similar)
  Pfam annotation: Domain name=zf-CCCH; Domain location=373-399; Score =38.2; E_value=3.3e-08; Accession=PF00642.16; Description=Zinc finger C-x8-C-x5-C-x3-H type (and similar)
  Pfam annotation: Domain name=zf-CCCH; Domain location=465-491; Score =32.2; E_value=2.2e-06; Accession=PF00642.16; Description=Zinc finger C-x8-C-x5-C-x3-H type (and similar)
  Pfam annotation: Domain name=zf-CCCH; Domain location=498-524; Score =44.1; E_value=5.4e-10; Accession=PF00642.16; Description=Zinc finger C-x8-C-x5-C-x3-H type (and similar)
  Pfam annotation: Domain name=zf-CCCH; Domain location=564-590; Score =28.3; E_value=3.2e-05; Accession=PF00642.16; Description=Zinc finger C-x8-C-x5-C-x3-H type (and similar)
  Pfam annotation: Domain name=zf-CCHH; Domain location=510-526; Score =3.6; E_value=0.036; Accession=PF10283.1; Description=Zinc-finger (CX5CX6HX5H) motif
  Pfam module annotation: Pfam domain module=zf-CCCH::zf-CCCH::zf -CCCH::zf-CCCH::zf-CCCH::zf-CCCH::zf-CCCH::zf-CCHH; Domain location =106-132::165-191::302-328::373-399::465-491::498-524::564-590::510 -526
MEQCTSDQQRTTTDDNAAEYQEVVEQEGVVSILGAAKVDIAVESLQEEDIVVADQVEDGVSVQDQDKVVEQCTSDQLRTRTYGYAEEDQEARRENIGFSAGYPQRPGKLNCRFYMLNGSCSYGSSCHFNHPQLKAKLEVSNFPSEQRNREVEFLELNRVGLPIREGARKCTYYMRNGTCRYGKKCCFNHPEQVLDAQLHMPTGWDDTNLQSSPHSKKSTEHATINDISSGLEILPPNGSEILPPNILRMLLPPQNVPPCTEEKEMKVKKDPDWSSASDDSDGCCSADSSGGPLCKQEHVDYPERPECPFLQRFGNCKFESACQYYHPKDKFPCRHHPKDKFPSRYHSKDKFQSRYLPKRDPPLAELKVYPDRPGEPECPFYXKTGSCKFRADCKFHHPKDLTPSMQGSASPKRSVAANEHHPAARIPSMQGPASPKRLVANEHHPAARITLQDHMYQQQKCPERPGEPDCRYYMQFGKCKFQSACIFNHPKDILSSGWRPAACPFYMKTGTCQFGSACEFSHPKDRCATTGEAIDDGTDNEHDFDTKSENVLQQQEKTIYPQRPGEPECSHYMKHGYCKFQKSCIFHHPTDHLSNK

SEQ ID NO: 94307 - protein, 101 aa, Setaria italica
  Transcript Sequence Number=SeqID_28333
  Gene Ontology: Mol. function=actin binding; Cellular component =intracellular
  Homolog annotation: Hit_ID=B5LQT1; Match level="QueryCoverage=87%, HitCoverage=59%, E-value=8e-30, Identity=71%"; Hit description=Actin depolymerization factor-like protein
  Pfam annotation: Domain name=Cofilin_ADF; Domain location=1-101; Score=47.0; E_value=7.6e-11; Accession=PF00241.12; Description =Cofilintropomyosin-type actin-binding pr
GAPGTPGFATSRQLPPDDCRYAVYDHDFTVGEATAAGPGGEAPRSKIFFVSWSPATADVRSKMVYASSCEGFKKELDGVQIDVQATDPSELTLDVLNDHVS

SEQ ID NO: 94308 - protein, 57 aa, Setaria italica
  Transcript Sequence Number=SeqID_28334
GLTKELPGPHRHARAPGPEEHRRRRRRGGRRALTRFDLQLWRCYDLRTVNRILLLLL

SEQ ID NO: 94309 - protein, 81 aa, Setaria italica
  Transcript Sequence Number=SeqID_28335
FVVKDPQTQKPLDCAGREQGDYSRLQISICDNFNCHNTYTISDLKIKKYTTKNLLLSVCLIKKRNIIFRICIRCSTFFVIH

SEQ ID NO: 94310 - protein, 91 aa, Setaria italica
  Transcript Sequence Number=SeqID_28336
  Subcellular localization annotation: CTP_CleavageSite=33; ConfidenceScore=5.48e-01
ADLLAAHSKLTFLPRKTLKRKRNRTQKFRSVLKQARKAGRSLAFEPSLNSQKMKTGDKKTPESKDTKDPNEVLLLRKKTYPTSLISRALRS

SEQ ID NO: 94311 - protein, 139 aa, Setaria italica
  misc_feature (105)..(105): Xaa can be any naturally occurring amino acid
  misc_feature (111)..(111): Xaa can be any naturally occurring amino acid
  misc_feature (131)..(131): Xaa can be any naturally occurring amino acid
  Transcript Sequence Number=SeqID_28337
  Gene Ontology: Mol. function=hydrolase activity, acting on glycosyl bonds; Biological process=polysaccharide catabolic process
  Homolog annotation: Hit_ID=B6SYP0; Match level="QueryCoverage=99%, HitCoverage=23%, E-value=1e-54, Identity=79%"; Hit description=Beta -amylase
RLDPAPVQATDSVKSDLAMACQALVEAAPEAEHADVAAELKSKAGVPVFVMMPLDTVRKDGNSLNRRRAVEASLAALKSAGVEGIMVDVWWGIAEAEGPGQYNFXNGYMEXLMEMARKNGLKVQAVMSFHXTCGGNVGD

SEQ ID NO: 94312 - protein, 131 aa, Setaria italica
  Transcript Sequence Number=SeqID_28338
  Gene Ontology: Cellular component=chloroplast
  Homolog annotation: Hit_ID=B9R8M0; Match level="QueryCoverage=99%, HitCoverage=18%, E-value=2e-40, Identity=60%"; Hit description =Pentatricopeptide repeat-containing protein, putative
  Pfam annotation: Domain name=PPR; Domain location=43-77; Score=40.3; E_value=7.8e-09; Accession=PF01535.12; Description=PPR repeat
  Pfam annotation: Domain name=PPR; Domain location=7-41; Score=4.5; E _value=2.6; Accession=PF01535.12; Description=PPR repeat
  Pfam annotation: Domain name=PPR; Domain location=78-112; Score=41.2; E_value=4.2e-09; Accession=PF01535.12; Description=PPR repeat
  Pfam module annotation: Pfam domain module=PPR::PPR::PPR; Domain location=43-77::7-41::78-112
GLTPRSNAATALISALGTAGRVAEAEALFLEFFLAGEIKPRTRAYNALLKGYVRIGSLKNAEQVLDEMSQCGVAPDEATYSLLVDAYTRAGRWESARILLKEMEADGVKPSSYVFSRILAGFRDRGDWQKV

SEQ ID NO: 94313 - protein, 1262 aa, Setaria italica
  misc_feature (31)..(31): Xaa can be any naturally occurring amino acid
  misc_feature (872)..(872): Xaa can be any naturally occurring amino acid
  misc_feature (879)..(879): Xaa can be any naturally occurring amino acid
  Transcript Sequence Number=SeqID_28339
  Gene Ontology: Mol. function=nucleic acid binding; Cellular component= nucleus; Biological process=nuclear mRNA splicing, via spliceosome
  Homolog annotation: Hit_ID=B9T017; Match level="QueryCoverage=94%, HitCoverage=90%, E-value=1e-166, Identity=48%"; Hit description =Spliceosomal protein sap, putative
  Pfam annotation: Domain name=CPSF_A; Domain location=836-1193; Score =3.5; E_value=7.2e-09; Accession=PF03178.7; Description=CPSF A subunit region
QEPERREVIILVIIPQIEHKDLLVVLSDSGXLSLLYFCPEMHRFFAIANIELSKPGNLRHQLGRVLAIDRESSFVAVSAYEDKFALIQVSVCQSLHGSGRGTISDKKYFYPPENEEDERTVSGASRTSVRGTIWNMRFISTSQDEEYYPVLAMIINRKGSDVNDLSLFGHDSSSGVINHISSYSEIGPLALDISEIPEMFGFALLFRVGDALLLDLRNPRNVCCVRRISLTTSLIGEPVTVEDSCSVLDVDDDVAACALLELRDSANNILKDDGYMDIDGVDSRGSVKSRIVCSWSWEPPDPIKQGWARLLFCLDDGEFHILEFTSDVEGVKLCTFEYIDRSLPCKPLLWMKNRMIIGFVEMGDGIIFKLGHRRLFHKSTIQNVAPILDLAIADYHGEKQDQMFACCGMCPEGSLRVLRNGVNVEKLLRTEAIYQGVTGLWTLRMKITDAYHSFLVLSFVEETRILSVGISFNDISDAVGFQPDVCTLACGLVADGLLVQIHSKGVKLCLPTVYAHPEGAHFTSPICTNWYPDVTISVGAVGHNVVVVATSNPCCLYVLGVRSSSSYQYELYETQHVQLQFEVSCISIPQEDWRPDNVTLSGGERDDFCNNPLAKVNIRKFAVIGTHKPSVEIISVEPGEALRLLTIGTISVSNALGAPISGCIPENVRFVAAERFYILAGLRNGMLLRFESEASEHYFPGSFYKDSSIPSVDTFLQLISIRRIGITPVFLVPIHDSANADIIVLSDRPWLLHAARHSLAYSSISFLPASHVTPVSSADCPNGLLFVAESCLHLVEMVHGKRLNAQKFSIGGTPRKVLYHNESRTLLVLRTGLSGASCSSDIVQVDPQNGVLLSRYKCEPGETAKCMQITKXGSDQVLXVGTSRSAGRPMMSNGEAESSTKGRLIILSLEAVESPRESSSFIPTSSFNPSSHSGSPFHEIIGYTTEEFSSNSLCSSPDEFCCNQIQAEQMAGHLRSLTHASLSGAVLAVYPYLDRYVLAAAGNTIYVFGFANENPHRMKKCAVGRTRFTITCLKTFASRIAVGDCRDGVLFYSYNESLRKLELIYSDPAQRLVGDIALLNCETAVVSDRRGSISVLSSARLEVSESPQKNLAVNCSFYMGETAMSIQKAAFRYRLPIDDDTDPVLETAYDCIVASTLLGSLFVMIPLTSEEHQLLQDVQERLAVHPLTAPVLGNDHAEFRQRSIPSGVPPILDGDMLVLFLELTGEQQQAILSHALPGKGPRSPVSVFQVLRTLERVHYALN

SEQ ID NO: 94314 - protein, 112 aa, Setaria italica
  Transcript Sequence Number=SeqID_28340
MSGTAGSIPKFGEWKASDGGSPYTMYFENARKRRNNSGITPPPGASPAHMVSAPAGHRTPPRTADAKPVKPQDRANRSRNQAKAGQGGSGSVPTWGQWNESNSSAGAQQYTL

SEQ ID NO: 94315 - protein, 97 aa, Setaria italica
  Transcript Sequence Number=SeqID_28341
  Homolog annotation: Hit_ID=A9XMT5; Match level="QueryCoverage=100%, HitCoverage=19%, E-value=3e-39, Identity=80%"; Hit description =CYCLOPS
VTSVVSMLKDTLERKKLGSHANKDASVGNSFGFYDPQQFQQNILGGTDIFSLVTTAQVQDSPMLPKAERPMEPNSGNFVAPANQVWFGAASREPSHS

SEQ ID NO: 94316 - protein, 146 aa, Setaria italica
  Transcript Sequence Number=SeqID_28342
  Gene Ontology: Mol. function=transferase activity; Cellular component= membrane
  Homolog annotation: Hit_ID=Q7XR50; Match level="QueryCoverage=100%, HitCoverage=32%, E-value=2e-69, Identity=80%"; Hit description =OSJNBa0043A12.35 protein
KGMRASEFCLHPAGDTPTSCRLFDAIASLCIPVIVSDEVELPFEGLVDYTEFSIFVSVSNAMRPKWLTNYLRNISKQQKDEFRRNLAHVQPIFEYDTSYSSSRTPDGAVNYIWKKIHQKLPAIQEAIIREKRKPYGALIPLRCHCT

SEQ ID NO: 94317 - protein, 249 aa, Setaria italica
  misc_feature (26)..(26): Xaa can be any naturally occurring amino acid
  misc_feature (223)..(223): Xaa can be any naturally occurring amino acid
  misc_feature (236)..(236): Xaa can be any naturally occurring amino acid
  Transcript Sequence Number=SeqID_28343
  Gene Ontology: Cellular component=chromosome, centromeric region; Biological process=mitosis
  Homolog annotation: Hit_ID=B6TKR2; Match level="QueryCoverage=98%, HitCoverage=54%, E-value=4e-71, Identity=57%"; Hit description=Nuf2 family protein
LPNVFSLFFTNVVGDNPPDELRIEDXTRLLENPEHHLQAMALRRIYRKARDFLDSIYFGGLTLRDFLRPHPRRIIDILSALVNYLHFRQEKLDVLKPISQEYFEREDQLTELRARVAELQKAKTEHAYNEQMEEPVVQQLQAEVNTLRQKIQEYNTHQLALRSRAKAVDEKKEGLLSKISQADFELIKHSQENSKLLSKIVQSPEKTLKTVEEKKGVRDELSXEKMAMHKVQEKTXLEMYTKVCDKLSK

SEQ ID NO: 94318 - protein, 72 aa, Setaria italica
  Transcript Sequence Number=SeqID_28344
HIKNIEKKCASALQEPPEALSLQESSSDNKHERIQLWWAGKELAMDHKLCDYIGVNDKTKIVVKLTQAHDER

SEQ ID NO: 94319 - protein, 168 aa, Setaria italica
  misc_feature (161)..(161): Xaa can be any naturally occurring amino acid
  Transcript Sequence Number=SeqID_28345
  Gene Ontology: Mol. function=transporter activity; Cellular component= integral to membrane; Biological process=transport
  Homolog annotation: Hit_ID=B6TCP1; Match level="QueryCoverage=100%, HitCoverage=35%, E-value=6e-38, Identity=49%"; Hit description =Carbohydrate transporter/ sugar porter/ transporter
  Subcellular localization annotation: CTP_CleavageSite=62; ConfidenceScore=5.08e-01
VPGWRLAFYVLALVSASLAALTWLLGADPRPRTGKATATAALAQLVREARDVVRVPTFQIIVAQGVAGTIPWSALSFAAMWLELVGFTHWQTTLITNLNSLANALGALFAGFVGDPLALRFPNTGRIALAQVCTASTVPLSAVLLLGLPDDPTAGAAYAAXFFILGFA

SEQ ID NO: 94320 - protein, 161 aa, Setaria italica
  Transcript Sequence Number=SeqID_28346
  Homolog annotation: Hit_ID=B6U8T6; Match level="QueryCoverage=100%, HitCoverage=38%, E-value=3e-54, Identity=64%"; Hit description =Carboxyl-terminal peptidase
  Pfam annotation: Domain name=DUF239; Domain location=1-113; Score =124.2; E_value=4.3e-34; Accession=PF03080.7; Description=Arabidopsis proteins of unknown function
LQCSGFIQTNNQIAIGGSFSPVSRYGGSQYEITILIWKDPKGGNWWLQVGNHILGYWPSTIFSYLQISASYVMWGGEVYSPYAGQTSTDMGSGHFPGEGYSKASYIRNIQVVDSFNKLNSPNVVGLGNKQPNCYNVQSGTNSINWGTYIFYGGPGKNPSCP

SEQ ID NO: 94321 - protein, 61 aa, Setaria italica
  Transcript Sequence Number=SeqID_28347
LLGFGEFIGFWDSDHCKLVDKISSTSRGFCLQNSAWLTPANGSRTIASSCACVWISVIHLF

SEQ ID NO: 94322 - protein, 94 aa, Setaria italica
  Transcript Sequence Number=SeqID_28348
  Gene Ontology: Mol. function=zinc ion binding; Cellular component =intracellular
  Homolog annotation: Hit_ID=Q7X9N8; Match level="QueryCoverage=100%, HitCoverage=51%, E-value=1e-36, Identity=79%"; Hit description=C2H2 type zinc finger transcription factor ZFP16
  Pfam annotation: Domain name=zf-C2H2; Domain location=44-66; Score =17.6; E_value=0.052; Accession=PF00096.18; Description=Zinc finger, C2H2 type
MKRFAVQESEMARVLMLMSHGQEPALPLLPVAAGRGDRAPERVFVCKTCNRAFPSFQALGGHRASHKKPRLDGDGDPSLAKPKLHGCSICGLEF

SEQ ID NO: 94323 - protein, 41 aa, Setaria italica
  Transcript Sequence Number=SeqID_28349
FFFFLTTEKPYLNYAKCLLMHINNSKLRKVDQQHMFHYRNP

SEQ ID NO: 94324 - protein, 69 aa, Setaria italica
  Transcript Sequence Number=SeqID_28350
  Homolog annotation: Hit_ID=B4FQA8; Match level="QueryCoverage=100%, HitCoverage=22%, E-value=7e-13, Identity=62%"; Hit description =Methylglutaconyl-CoA hydratase
  Subcellular localization annotation: CTP_CleavageSite=45; ConfidenceScore=5.32e-01
MLGLRRLLAVSGRHAPAFASASVASSHSAFFVRALQILTQQGPVRLQKLSAPDSGIVELWLERPEAKNA

SEQ ID NO: 94325 - protein, 84 aa, Setaria italica
  Transcript Sequence Number=SeqID_28351
LSLPVPRLITTNPERVREMVERAEAVGVPRRTGMFRHALLAVAFLSEEKIAAKVEFLKKTFRWSDAEVGIAVSKLPLVLKHSKD

SEQ ID NO: 94326 - protein, 84 aa, Setaria italica
  Transcript Sequence Number=SeqID_28352
AALWRAHPPPREPGEARRRPEPSPRHLHTPDCCNYYKAVLEGRTGKKPLGNGIVHEVGAYSSSPRIEMEVATKWDRRCLNTSGG

SEQ ID NO: 94327 - protein, 59 aa, Setaria italica
  Transcript Sequence Number=SeqID_28353
  Gene Ontology: Mol. function=branched-chain-amino-acid transaminase activity; Cellular component=chloroplast; Biological process =branched chain family amino acid metabolic process
  Homolog annotation: Hit_ID=B6THP1; Match level="QueryCoverage=98%, HitCoverage=14%, E-value=9e-22, Identity=87%"; Hit description =Branched-chain-amino-acid aminotransferase
VTGTAVVLSPVGSITYRERKVEYGKSQEAGVVSQQLYAAFTAIQKGLVEDSIGWTLQLN

SEQ ID NO: 94328 - protein, 51 aa, Setaria italica
  misc_feature (23)..(23): Xaa can be any naturally occurring amino acid
  Transcript Sequence Number=SeqID_28354
  Subcellular localization annotation: CTP_CleavageSite=35; ConfidenceScore=5.48e-01
MAAATVPPSPRADLMPPPPPPPXVPPTTERRPRRRAREVSSRYLSTPVPST

SEQ ID NO: 94329 - protein, 112 aa, Setaria italica
  misc_feature (62)..(62): Xaa can be any naturally occurring amino acid
  misc_feature (89)..(89): Xaa can be any naturally occurring amino acid
  Transcript Sequence Number=SeqID_28355
  Subcellular localization annotation: CTP_CleavageSite=70; ConfidenceScore=5.12e-01
VIARTDENQHVNEIRLSERRTNSRRQPHRGSFSSPPAQQKPTRRTPARPSPPTPAPPFTSPXTPPTRRVLLFAPGSWDVPSAPAPPPPXPPPPPWLALPSPAPPPRPKPCSP

SEQ ID NO: 94330 - protein, 78 aa, Setaria italica
  Transcript Sequence Number=SeqID_28356
SLSLNETMAGSCEYESHTFMLTLQPKTQCAIRIHTQVLQMQLAAYKLVVCQGFLKQTRQWKWLAPWETWDACYLCREM

SEQ ID NO: 94331 - protein, 82 aa, Setaria italica
  Transcript Sequence Number=SeqID_28357
LKPPFVPSHVAQHTACSLRMAPSGSENVESAQQLLPPAVVLPPDETPDALADAGTKTVTMEQMRHPVSVTGATEEANGSILP

SEQ ID NO: 94332 - protein, 46 aa, Setaria italica
  Transcript Sequence Number=SeqID_28358
GTYRMLFVNLVGQHIHDIIWHDNIQDHKCFVLIKVSLGANMALLSP

SEQ ID NO: 94333 - protein, 160 aa, Setaria italica
  Transcript Sequence Number=SeqID_28359
MDSATVALASPASDDRRFWDRLRNRVDTILEDRGVLPQPAAAATTRGVESERGKRLREDSLMLVRGLDSVAASLAQLSDTLTAAQKGVSALATCSSQARECERRAELDEEEEEPKAKRLCGDSLEAAGLDGDSPVAGKEASAAAAAGSDVEETAGVKLRR

SEQ ID NO: 94334 - protein, 174 aa, Setaria italica
  Transcript Sequence Number=SeqID_28360
  Gene Ontology: Mol. function=P-P-bond-hydrolysis-driven protein transmembrane transporter activity; Cellular component=mitochondrial inner membrane presequence translocase complex; Biological process =intracellular protein transport
  Homolog annotation: Hit_ID=B9RF13; Match level="QueryCoverage=81%, HitCoverage=22%, E-value=2e-48, Identity=63%"; Hit description =Pentatricopeptide repeat-containing protein, putative
  Pfam annotation: Domain name=Tim44; Domain location=19-173; Score =106.6; E_value=8.2e-29; Accession=PF04280.7; Description =Mitochondrial import inner membrane, translocase subunit TIM44
MYTVDSRRTKEDIILEMKNAYAVSRLRKKTGYTKKQFYDQALNIYKEVNTLMAHGDTSALRKILTERMHSTIKNELKRRQSKWNSVYWELVEPAVSIRTLRARMIGLDKKDLDKAFIQLTLEFVTKQKFEAYNSKGEVVSGDKSKEVLVKDIWVFERSLFHPGAYWRVCGRINL

SEQ ID NO: 94335 - protein, 109 aa, Setaria italica
  misc_feature (7)..(7): Xaa can be any naturally occurring amino acid
  Transcript Sequence Number=SeqID_28361
  Homolog annotation: Hit_ID=Q9FZ98; Match level="QueryCoverage=87%, HitCoverage=93%, E-value=1e-17, Identity=48%"; Hit description =F3H9.10 protein
  Subcellular localization annotation: CTP_CleavageSite=71; ConfidenceScore=5.44e-01
SSAEAVXVGALSSGVNAPTWFVLKITFLLLAFCFTAMLALAFSSKNFVIVGHVLLLVTIGTVLFVLLNRFLAEVGFVPVEQQMQEMGIHKTEATDRDKRKLNCDRLLLI

SEQ ID NO: 94336 - protein, 61 aa, Setaria italica
  Transcript Sequence Number=SeqID_28362
SQNNNLRQTQCKHSGFLLTQAIHTEALLASISLLHEYNPSGTGEEANYLPLDVRVGSIACW

SEQ ID NO: 94337 - protein, 81 aa, Setaria italica
  Transcript Sequence Number=SeqID_28363
  Gene Ontology: Mol. function=transcription regulator activity; Cellular component=nucleus; Biological process=regulation of transcription
  Homolog annotation: Hit_ID=Q10Q90; Match level="QueryCoverage=95%, HitCoverage=28%, E-value=1e-13, Identity=52%"; Hit description=Helix- loop-helix DNA-binding domain containing protein
DGHAGYYGSGTVTMTGDFFVPDEQVADPSFMLDLNLDFEDQDGGDVPAACKRKLLQDHKDESATCTVPKKKPRSTAMPVQK

SEQ ID NO: 94338 - protein, 67 aa, Setaria italica
  Transcript Sequence Number=SeqID_28364
  Gene Ontology: Mol. function=transferase activity, transferring phosphorus-containing groups; Cellular component=membrane; Biological process=two-component signal transduction system (phosphorelay)
  Homolog annotation: Hit_ID=Q67WC2; Match level="QueryCoverage=88%, HitCoverage=6%, E-value=2e-23, Identity=86%"; Hit description =Putative histidine kinase 1
MIADPAISSDCTPAKRQGQRVPIIAMTANSFSESADECLAAGMDSYISKPVNFQNIKECLQRYLPSQ

SEQ ID NO: 94339 - protein, 104 aa, Setaria italica
  Transcript Sequence Number=SeqID_28365
  Homolog annotation: Hit_ID=C0RWW9; Match level="QueryCoverage=95%, HitCoverage=12%, E-value=2e-35, Identity=74%"; Hit description =Ameiotic 1
  Subcellular localization annotation: CTP_CleavageSite=34; ConfidenceScore=5.00e-01
QNSPKPQVSKYYFKKKTSSHSSRNGKDDANHDSRIQSRSPPSRQSLTFYDTPTYHTGAFYEIDHEKLPPKSPIHLKSIRVVKVSECTHLDVTVKFPSLQVCALA

SEQ ID NO: 94340 - protein, 263 aa, Setaria italica
  misc_feature (38)..(38): Xaa can be any naturally occurring amino acid
  Transcript Sequence Number=SeqID_28366
  Gene Ontology: Mol. function=catalytic activity; Cellular component =plasma membrane; Biological process=multicellular organismal development
  Homolog annotation: Hit_ID=Q10NB9; Match level="QueryCoverage=95%, HitCoverage=39%, E-value=1e-114, Identity=77%"; Hit description =Probable protein phosphatase 2C 31
  Pfam annotation: Domain name=PP2C; Domain location=12-230; Score= -23.7; E_value=0.00016; Accession=PF00481.13; Description=Protein phosphatase 2C
AFFAAAEARAEDSPELGLMGSCVLVMLMKGTDVYVMNXVGDSRAVLARRPEPDLKNVLGKASQDLQQFKAEIMRELEARDKDGLQAVQLTPEHSTAVEEEVRKIRVQHLNDRNAIVNGRVKGKINVTRAFGVGYLKQPKWNSRLLEAFKINYVGTDPYVSCTPALCHHRISAQDKFLVLSSDGLYQYFTNKEVVDQVEAFTAAQPDGDPAQHLVGELVVRAARKAGMASHELLDIPRGARRHYHDDVSIIVISFEGRIWRSSV

SEQ ID NO: 94341 - protein, 80 aa, Setaria italica
  Transcript Sequence Number=SeqID_28367
  Gene Ontology: Mol. function=protein binding; Biological process =apoptosis
LWSSLTKMPNLSRLLISACDMDEVLDLRMLKPLPNLKFLWLSGKLAEGVLPLIFSKFEKLALLKMDWSGLKKDPIISFSH

SEQ ID NO: 94342 - protein, 47 aa, Setaria italica
  Transcript Sequence Number=SeqID_28368
TCLCIYQSVFYLETELPYCHPLLETLVTFCRGSWYNYLMYGQNKFAL

SEQ ID NO: 94343 - protein, 173 aa, Setaria italica
  Transcript Sequence Number=SeqID_28369
  Gene Ontology: Mol. function=oxidoreductase activity; Biological process=metabolic process
  Homolog annotation: Hit_ID=B6TRS7; Match level="QueryCoverage=98%, HitCoverage=53%, E-value=6e-59, Identity=64%"; Hit description =Carbonyl reductase 3
IGVPIVQQFAGMDEGQMSEWMRRNTRETHNSAKETLRTNYYGTKQGTEALLPLLQASADGRIVNVSSVIGQLRYFVSEELKHELNDVDTLTEERLDEMLDAFMKDFTAGAAEANGWPVAFSAYKVTKAAVNAYTRILARRHLDLRVNCAHPGFVKTDMNKLAGLLTPEEGARN

SEQ ID NO: 94344 - protein, 81 aa, Setaria italica
  Transcript Sequence Number=SeqID_28370
CRRADVETTLASEFWLQQSGGVWMLNILQIWNARKISIVSNIQGINFSPQHNIIVQARIYAFQVPNCGLQYSFAQKKTQLS

SEQ ID NO: 94345 - protein, 379 aa, Setaria italica
  Transcript Sequence Number=SeqID_28371
  Gene Ontology: Mol. function=protein binding; Cellular component =integral to peroxisomal membrane; Biological process=peroxisome organization and biogenesis
  Homolog annotation: Hit_ID=B6TW18; Match level="QueryCoverage=100%, HitCoverage=99%, E-value=1e-176, Identity=80%"; Hit description =Lysine and histidine specific transporter
  Pfam annotation: Domain name=Peroxin-3; Domain location=1-375; Score=- 40.4; E_value=1.1e-08; Accession=PF04882.4; Description=Peroxin-3
LASARGVRGGGHRRKILVSLGVAGAGYAAYRLTDAHRAQLVRVEQLRAMEEQAAADLVKNQLQEHFEKVQSICDSTTLPLAMHQLCEKIMSELDISKLIDKLRQGKVESSALTPKEKYDTWEEIKIKSFTKTVSSIWAMTLLSLYTRVQVTILGRHLYLDFARGSHRAQIQEESDTFSENGHKSFLTTADYLPTGKINAYIMQMQHAATEVLKEKQLKDLMSTDQVLQTVLQILDMFMGLCEDNSWINYLVPDDASVHAQLMAVSSTGFDDSSLLNDFRKLEQLMAETRIVLASDDFKNIMERSLRKIADMVIEDLAAQTGIPSPPSGLPLATLLPRVAHLSSPLLVEPNKNKHIQMIRSMPEVELFYTFLYANMPPET

SEQ ID NO: 94346 - protein, 134 aa, Setaria italica
  misc_feature (14)..(14): Xaa can be any naturally occurring amino acid
  Transcript Sequence Number=SeqID_28372
  Pfam annotation: Domain name=PIG-H; Domain location=16-80; Score =78.4; E_value=2.5e-20; Accession=PF10181.1; Description=GPI-GlcNAc transferase complex, PIG-H compon
GVIAKWLRCDPVKXESLVIMPTFGIQLEQHFCSGRVHRKFVPTGKILRPVLNECVTPVTCYWSLALLLRDDYGLMLVFKNLNPPAKMLIPIWKALCAFVDSNTLGASVLPQLHDPHKCAEQDGGEHMIAEDFVD

SEQ ID NO: 94347 - protein, 68 aa, Setaria italica
  Transcript Sequence Number=SeqID_28373
NEYMDRWIMDAYTVHRLIDMQIKSFPPTYTTLGSNSVLNSFPLLLFFGDEDEPRRSIIIIYLLLVSRG

SEQ ID NO: 94348 - protein, 176 aa, Setaria italica
  misc_feature (35)..(35): Xaa can be any naturally occurring amino acid
  misc_feature (102)..(102): Xaa can be any naturally occurring amino acid
  misc_feature (150)..(150): Xaa can be any naturally occurring amino acid
  Transcript Sequence Number=SeqID_28374
  Gene Ontology: Mol. function=DNA binding; Cellular component =chromosome; Biological process=regulation of transcription, DNA -dependent
  Homolog annotation: Hit_ID=Q9LGR0; Match level="QueryCoverage=97%, HitCoverage=26%, E-value=8e-91, Identity=94%"; Hit description=FACT complex subunit SSRP1-A
  Pfam annotation: Domain name=Rtt106; Domain location=98-176; Score =24.3; E_value=8.4e-05; Accession=PF08512.4; Description=Histone chaperone Rttp106-like
  Pfam annotation: Domain name=SSrecog; Domain location=2-176; Score =314.9; E_value=1.7e-91; Accession=PF03531.6; Description=Structure -specific recognition protein
  Pfam module annotation: Pfam domain module=Rtt106::SSrecog; Domain location=98-176::2-176
GLFVVITLDPPIRKGQTLYPHIVIQFETEVVVERXLALSKEVLADKYKDRLEESYKGLIHEVFTKVLRGLSGAKVTRPGSFRSCQDGYAVKSSLKAEDGLLXPLEKGFFFLPKPPTLILHEEIEFVEFERHGAGGASMSSHYFDLLVKLXKNDQEHLFRNIQRNEYHNLFNFISVP

SEQ ID NO: 94349 - protein, 182 aa, Setaria italica
  misc_feature (3)..(3): Xaa can be any naturally occurring amino acid
  Transcript Sequence Number=SeqID_28375
  Gene Ontology: Mol. function=iron ion binding; Cellular component =integral to membrane; Biological process=iron ion transport
  Homolog annotation: Hit_ID=Q7XUJ2; Match level="QueryCoverage=100%, HitCoverage=26%, E-value=1e-92, Identity=89%"; Hit description =Probable metal-nicotianamine transporter YSL9
TGXLTLTSPRSMIIAQAIGTAMGCVIGPLTFFLFYKAFDIGNPYGYWKAPYALVYRNMAILGVQGFSALPQHCLQLCYGFFGFAVASNLMRDLLPPKYGKWVPLPMAMGVPFLVGASFAIDMCVGSLIVFTWHMIDRSKASLMVPAVASGLICGDGLWILPESLLALAKISPPLCMAFRPTH

SEQ ID NO: 94350 - protein, 120 aa, Setaria italica
  Transcript Sequence Number=SeqID_28376
  Gene Ontology: Mol. function=metal ion binding
  Homolog annotation: Hit_ID=B6U5N0; Match level="QueryCoverage=100%, HitCoverage=29%, E-value=3e-52, Identity=82%"; Hit description =Protein binding protein
PLNAMQENDVLSVMESDGFVRKIVTHCLKRFGTKVEQEAGSFWSLDEKRVCLQFARRVLGAGKMKFANFMDKWEKSIPSEMCADLQMLEGEVLCEKRGAETWVHAFSVADLPLTPAERFA

SEQ ID NO: 94351 - protein, 124 aa, Setaria italica
  misc_feature (41)..(41): Xaa can be any naturally occurring amino acid
  Transcript Sequence Number=SeqID_28377
  Gene Ontology: Mol. function=metal ion binding; Biological process =embryonic development ending in birth or egg hatching
  Homolog annotation: Hit_ID=Q7F1V5; Match level="QueryCoverage=81%, HitCoverage=7%, E-value=1e-39, Identity=77%"; Hit description =Putative sno protein
STVRQPTKVPMAPMFPPAEPPEEINEVAVDVERDEDEGGTXGETFTDYRPPKLSLGLPHPDPVVETSSLSAVQPPEPTHKLTIMEELDETNALSCLQIETLVYACQRHLHHLPTGARAGFFIGE

SEQ ID NO: 94352 - protein, 274 aa, Setaria italica
  misc_feature (242)..(242): Xaa can be any naturally occurring amino acid
  Transcript Sequence Number=SeqID_28378
  Gene Ontology: Mol. function=transferase activity; Cellular component= chloroplast
  Homolog annotation: Hit_ID=B9T6M2; Match level="QueryCoverage=100%, HitCoverage=86%, E-value=2e-76, Identity=34%"; Hit description =Pentatricopeptide repeat-containing protein, putative
  Pfam annotation: Domain name=PPR; Domain location=11-45; Score=46.4; E_value=1.1e-10; Accession=PF01535.12; Description=PPR repeat
  Pfam annotation: Domain name=PPR; Domain location=116-150; Score =31.6; E_value=3.2e-06; Accession=PF01535.12; Description=PPR repeat
  Pfam annotation: Domain name=PPR; Domain location=151-185; Score =32.8; E_value=1.4e-06; Accession=PF01535.12; Description=PPR repeat
  Pfam annotation: Domain name=PPR; Domain location=187-221; Score =33.8; E_value=6.8e-07; Accession=PF01535.12; Description=PPR repeat
  Pfam annotation: Domain name=PPR; Domain location=222-256; Score =30.6; E_value=6.5e-06; Accession=PF01535.12; Description=PPR repeat
  Pfam annotation: Domain name=PPR; Domain location=46-80; Score=40.8; E_value=5.3e-09; Accession=PF01535.12; Description=PPR repeat
  Pfam annotation: Domain name=PPR; Domain location=81-115; Score=50.7; E_value=5.8e-12; Accession=PF01535.12; Description=PPR repeat
  Pfam module annotation: Pfam domain module=PPR::PPR::PPR::PPR::PPR::PP R::PPR; Domain location=11-45::116-150::151-185::187-221::222-256::46- 80::81-115
ARTGGKELDVFSYSSMINRFCKDGRTDDANKVYENMVKDGCKPNSHVYNALINGFCRARKISDAVKIYIEMAGNGCSPTMITYNTLIDGLCKAEKYQEASSLTREMIERGFTPDIKTYGSVIRGLCRDKKIDSALGIWNEILDAGLQVDVMVHNILIHGLCSAGKVDEAFRLYLEMKEKKNCSPNLVTYNTLMDGFYEIGSIDKAASLWTTILDNGLKPDIVTYNTRIKGLCSCNRTPEGSXLLDEVLARGIIPTVITWNILVRAVIKYGPIQI

SEQ ID NO: 94353 - protein, 143 aa, Setaria italica
  Transcript Sequence Number=SeqID_28379
  Gene Ontology: Mol. function=protein kinase activity; Cellular component=plastoglobule; Biological process=protein amino acid phosphorylation
  Homolog annotation: Hit_ID=B9SMA1; Match level="QueryCoverage=100%, HitCoverage=20%, E-value=1e-69, Identity=87%"; Hit description =Protein ABC1, mitochondrial, putative
YLVEVGVYCSLSQLLEYGFYHADPHPGNLLRTVDGKLAYLDFGMMGEFRQELRDGFIEACLHLVNRDFDALAKDFITLGLLPPTAQKGEVTKALTGVFENAVNRGVQNISFGDLSGNLGRTMYKFKFQIPSYFSLVIRSLAVL

SEQ ID NO: 94354 - protein, 171 aa, Setaria italica
  misc_feature (64)..(64): Xaa can be any naturally occurring amino acid
  misc_feature (164)..(164): Xaa can be any naturally occurring amino acid
  Transcript Sequence Number=SeqID_28380
  Gene Ontology: Mol. function=protein kinase activity; Cellular component=plastoglobule; Biological process=protein amino acid phosphorylation
  Homolog annotation: Hit_ID=B9SMA1; Match level="QueryCoverage=100%, HitCoverage=23%, E-value=2e-77, Identity=83%"; Hit description =Protein ABC1, mitochondrial, putative
LSEVRDQYLVEVGVYCSLSQLLEYGFYHADPHPGNLLRTVDGKLAYLDFGMMGEFRQELRDGFXERASLHLVNRDFDALAKDFITLGLLPPTAQKGEVTKALTGVFENAVNRGVQNISFGDLSGNLGRTMYKFKFQIPSYFSLVIRSLAVLEGIAISFNPNYKXVLGSSYP

SEQ ID NO: 94355 - protein, 97 aa, Setaria italica
  Transcript Sequence Number=SeqID_28381
  Gene Ontology: Mol. function=metal ion binding
  Homolog annotation: Hit_ID=B6TA04; Match level="QueryCoverage=98%, HitCoverage=32%, E-value=7e-22, Identity=56%"; Hit description =Palmitoyltransferase PFA4
MGRPGYVTVPILSVLAAIGYVYYTTVFLAIPAWLGLTTAAGVANAAAFTALAAACVATYAVAVLRDPGRVPASFVPDVEDAESPIHEIKRKGGDLRY

SEQ ID NO: 94356 - protein, 817 aa, Setaria italica
  misc_feature (80)..(80): Xaa can be any naturally occurring amino acid
  Transcript Sequence Number=SeqID_28382
  Gene Ontology: Mol. function=nucleic acid binding; Cellular component= spliceosome; Biological process=mRNA processing
  Homolog annotation: Hit_ID=B9RH99; Match level="QueryCoverage=90%, HitCoverage=80%, E-value=1e-142, Identity=41%"; Hit description=RNA -binding protein, putative
  Pfam annotation: Domain name=RRM_1; Domain location=174-244; Score =66.3; E_value=1.1e-16; Accession=PF00076.14; Description=RNA recognition motif. (a.k.a. RRM, RBD, o
  Pfam annotation: Domain name=RRM_1; Domain location=390-460; Score =55.6; E_value=1.9e-13; Accession=PF00076.14; Description=RNA recognition motif. (a.k.a. RRM, RBD, o
  Pfam annotation: Domain name=RRM_1; Domain location=542-625; Score =13.9; E_value=0.01; Accession=PF00076.14; Description=RNA recognition motif. (a.k.a. RRM, RBD, o
  Pfam module annotation: Pfam domain module=RRM_1::RRM_1::RRM_1; Domain location=174-244::390-460::542-625
NRAPLKERLQKKENIQAKDSDAKDEADDTSATVKHKESSIKADSEKPQLLAKDAMVSKEASIGDSDKVKSSEKQRVAKRXFGGLPDFAMASEVFRQAGEIGPVVSVNYPLPKEEMELHGLARDGCTSDAAAVLFASVKSAWDSVVRLHRKEVKGAIVWARQLGGEGSKIRKWRVIVRNLPFKITEKEIMDMFSSAGFVWDVSIPHKSDEGLSKGFAFVSFTRKQDAENAIKNINGKVVAKRPVAVDWAVPKKVYTVAAKSGAEDNELANVPDDGSDDDTSEENLVGEDDSSELDQEISNRPSEDDFKTEVDISRKVLENLIKSSEKSEPSGVDGSDIDTDTETENDTPEKKKPESPVAGKSAKSKRVTDAKITDPASKPDKKDTDLDRTIFISNLPFDISNEEVTKRFSVFGKVESFFPVLHKLTKRPRGTGFLKFSTADAADAAVSAANAAPGLGIFMKSRALNVMKAMDKESAHKKALDKAKTEVEDRRNLYLAKEGEILAGTPAAEGVSDADMNKRNWLARRKAEMLQSPKFHVSKTRLIIYNLPKTMTINDVKKLCREAVISRATRQNPVIRKVNILKNEKKGVQKHSRGVAFVDFQEHEHALVALRVLNNNPETFGAERRPIVEFALEDVEKVRLQKIRMERNRKSAAEAAEDQQSPSGDQPAGDGSHAGSRRTFRKGNKQRSHDRPSKPSDSGEGPAKDPVAGDQSAVEGVRKGRPAKRSRKSNEGTVLADRDRKDATPIAAGNQAVSSEHDQSVAPKKRKNRKDGQTEQKRGKATKRTRKEPTGEGGVDKSLVEQYRSKFLQHGVSKTKA

SEQ ID NO: 94357 - protein, 82 aa, Setaria italica
  Transcript Sequence Number=SeqID_28383
  Gene Ontology: Mol. function=nucleotide binding; Biological process =defense response
  Homolog annotation: Hit_ID=Q84NY1; Match level="QueryCoverage=97%, HitCoverage=8%, E-value=7e-26, Identity=70%"; Hit description =Putative disease resistance complex protein
GSKNSQFLPALGQLPQLHELVIIHMECVERIGQEFYGQDSMERFPALEKLEFEDMPKWVEWYEVSETDFPSLRELKIKDSNE

SEQ ID NO: 94358 - protein, 383 aa, Setaria italica
  Transcript Sequence Number=SeqID_28384
  Gene Ontology: Mol. function=sequence-specific DNA binding; Cellular component=cytoplasm; Biological process=regulation of transcription, DNA-dependent
  Homolog annotation: Hit_ID=B4FZ71; Match level="QueryCoverage=100%, HitCoverage=78%, E-value=1e-167, Identity=78%"; Hit description=Heat shock transcription factor like protein
  Pfam annotation: Domain name=HSF_DNA-bind; Domain location=1-168; Score=195.1; E_value=1.9e-55; Accession=PF00447.9; Description=HSF -type DNA-binding
PAPFLLKTYEMVDDPSSDAVVSWSDASDGSFVVWNPPEFAARMLPTYFKHSNFSSFIRQLNTYGFHKIDPERWEFANEYFVKGQKQLLKNIHRRKPIHSHSHQPGALPDNERALFEDEIDRLSREKTTLQTDLWKFNQQQSGAMSQIEDLERRVLDMEQRQVKMLSFLQQASKNPQFVSKLAKMAEASPIFADAFHKKRRLPGLEYSNEAAETTSYDDHSSTSRQEMGNILNQHFSDKLKLGLCPAMTESNLITLSTHSSHEDNGSPHAGKHPDCERTGVECLPLVPQMMELSDTGTSICPSKGQGVSFTAATNDVGILPCHLNLTLASCSMDVNRSQISHANGNTTEEEKDSPPEAATTATMEEDNGIARRHDDIDTQNKAS

SEQ ID NO: 94359 - protein, 45 aa, Setaria italica
  Transcript Sequence Number=SeqID_28385
CFASHNKTLHNQLDLLWFAKKKQLDLFRVALANTNQRVIHSVSCS

SEQ ID NO: 94360 - protein, 172 aa, Setaria italica
  Transcript Sequence Number=SeqID_28386
  Gene Ontology: Mol. function=metal ion binding; Cellular component =plasma membrane
  Homolog annotation: Hit_ID=B6SXK5; Match level="QueryCoverage=97%, HitCoverage=23%, E-value=1e-40, Identity=50%"; Hit description =Protein binding protein
VPIHAFGFGLDHDSRAMHALSEMSRGTFSFIDDAVGSSIQDAFAQCMGGLLSVVVQEAQLSIECAGEGVLVTSIKSGGYASGVDGNGRGGFVDIDHLYADEEKDFLVTVRVPAAHGDTELIRASCEYRDAVSGETVQVVGDLVTVPRPPGPVTAAMSLQVEREWHRVHAHGR

SEQ ID NO: 94361 - protein, 133 aa, Setaria italica
  Transcript Sequence Number=SeqID_28387
  Gene Ontology: Mol. function=nucleic acid binding
  Homolog annotation: Hit_ID=Q9SFY4; Match level="QueryCoverage=75%, HitCoverage=5%, E-value=1e-17, Identity=50%"; Hit description =T22C5.20
NTSGSVGGGEADGFVAYLPHDEAVAAGLGGLDAHESQAVVDLLNDALAALLRAKPREFWRQVAQNTSLHDFLDSYLQFRHRWYDLPHRAPKGAVAGLVVGELELCRRVFMVLYRISSNKDPGAGRGESLSLKE

SEQ ID NO: 94362 - protein, 97 aa, Setaria italica
  Transcript Sequence Number=SeqID_28388
  Gene Ontology: Mol. function=sulfotransferase activity
  Homolog annotation: Hit_ID=B6TRN9; Match level="QueryCoverage=71%, HitCoverage=20%, E-value=1e-13, Identity=52%"; Hit description =Flavonol 4-sulfotransferase
MADPQFEKKEHSGGSEGEARDGLTQTPTTLPMREGWFVPLFRLQGCWLTPQRVESVKLVQAQFNPRPDDVLLVTYPKCGTTWLKALAFTVANRSRHP

SEQ ID NO: 94363 - protein, 95 aa, Setaria italica
  Transcript Sequence Number=SeqID_28389
  Subcellular localization annotation: CTP_CleavageSite=31; ConfidenceScore=5.11e-01
GSAPARSCASRIWKSLSAGSRSFAKLVYLPKADASAKHRRHQTLSTPSLAVVRPYWCGAIHLHGPHFEAGRGISSASPPSRGLRLHQLGMIVRGA

SEQ ID NO: 94364 - protein, 89 aa, Setaria italica
  Transcript Sequence Number=SeqID_28390
  Subcellular localization annotation: CTP_CleavageSite=76; ConfidenceScore=5.76e-01
DRASPCSLALPPPRRSPLPSPWSPAQSGRSVPVKEVSRLVAFCHSSVSLSSVSLCSDSYTLEHASTFEGFWESCTRLERDGASSDQMEG

SEQ ID NO: 94365 - protein, 71 aa, Setaria italica
  Transcript Sequence Number=SeqID_28391
CNQMLLVWKISLARSLQCGLVLESCEQEREVSSQAGTKTRASCLLAHCGVHGIFRCLLPIGSCWKTLPMES

SEQ ID NO: 94366 - protein, 71 aa, Setaria italica
  Transcript Sequence Number=SeqID_28392
  Homolog annotation: Hit_ID=B6SS62; Match level="QueryCoverage=100%, HitCoverage=16%, E-value=7e-30, Identity=84%"; Hit description=Kelch motif family protein
FNGKLCIIRNNMSITLIDLSDPTTVIEVDSARMWDAFARKGQHRSFMANLWSTITGRNLKTDIMHCQVLQV

SEQ ID NO: 94367 - protein, 84 aa, Setaria italica
  Transcript Sequence Number=SeqID_28393
TAHPRKLAEAPQNAVSAFLYPPEAKNSGLFRLLIIISILVPGAGAGRTETDGGGKGSRGRRVAAEGRRRRAGATGWQRREPGST

SEQ ID NO: 94368 - protein, 59 aa, Setaria italica
  Transcript Sequence Number=SeqID_28394
LLGQGQVEVMLVSQALMSVTLAIKQHPYKPKLQETCQRSTRRRARPRVEAELVVQVSKP

SEQ ID NO: 94369 - protein, 147 aa, Setaria italica
  Transcript Sequence Number=SeqID_28395
  Gene Ontology: Mol. function=metal ion binding; Biological process =metal ion transport
  Homolog annotation: Hit_ID=B6SLA8; Match level="QueryCoverage=97%, HitCoverage=43%, E-value=1e-21, Identity=48%"; Hit description=Heavy metal-associated domain containing protein
PPELEKQPVDARVTVEYDRGVGGGYGNHMPAPQHVVMSYNQARPSMSASYYAPAPAPAPMARPGPSQGYIDEHYTPSYYGRPSSNEPYYYNPPPPQPSPYRYQYQPTPSSEDYYYYSAPPQRSAFSPPRDGYGDMFNDENANSCSVM

SEQ ID NO: 94370 - protein, 59 aa, Setaria italica
  Transcript Sequence Number=SeqID_28396
YNKEWLWTIDMTVILHVQAMNHARIISGLTECLNNKRHGDESQQQGTGPQGATRPVELN

SEQ ID NO: 94371 - protein, 148 aa, Setaria italica
  Transcript Sequence Number=SeqID_28397
  Gene Ontology: Mol. function=metal ion binding
  Homolog annotation: Hit_ID=B6TCR8; Match level="QueryCoverage=99%, HitCoverage=43%, E-value=2e-52, Identity=67%"; Hit description =Protein binding protein
  Pfam annotation: Domain name=PHD; Domain location=95-139; Score=-1.6; E_value=0.039; Accession=PF00628.21; Description=PHD-finger
  Pfam annotation: Domain name=zf-C3HC4; Domain location=96-136; Score =39.9; E_value=1e-08; Accession=PF00097.17; Description=Zinc finger, C3HC4 type (RING finger)
  Pfam module annotation: Pfam domain module=PHD::zf-C3HC4; Domain location=95-139::96-136
AEERDVAGRLMALAGIGDWRAMEQDDDEEVEDEEDGEDPQDAWEDVDPDEYSYEELIALGEVVGTESKGLSADTIGSLPSVTYQAQDKQEGNMEQCVICRVEFDEGESLVALPCKHLYHSECINQWLQLNKVCPMCSAEVSTSVNKKL

SEQ ID NO: 94372 - protein, 85 aa, Setaria italica
  Transcript Sequence Number=SeqID_28398
  Gene Ontology: Mol. function=protein transporter activity; Cellular component=nuclear pore; Biological process=protein import into nucleus, docking
  Homolog annotation: Hit_ID=Q01KY9; Match level="QueryCoverage=100%, HitCoverage=8%, E-value=5e-35, Identity=84%"; Hit description =OSIGBa0137O04.8 protein
  Pfam annotation: Domain name=IBN_N; Domain location=24-83; Score =49.7; E_value=1.1e-11; Accession=PF03810.11; Description=Importin -beta N-terminal domain
MDLPSLAVVLRAALSHVPEERKAAEESLNQFQYTPQHLVRLLQIIVDGSCDMAVRQVASIHFKNFIAKNWSPNDPDESPKVLESD

SEQ ID NO: 94373 - protein, 143 aa, Setaria italica
  Transcript Sequence Number=SeqID_28399
  Homolog annotation: Hit_ID=B9RAT8; Match level="QueryCoverage=66%, HitCoverage=14%, E-value=2e-10, Identity=37%"; Hit description =Pentatricopeptide repeat-containing protein, putative
  Pfam annotation: Domain name=PPR; Domain location=94-128; Score=24.7; E_value=0.00039; Accession=PF01535.12; Description=PPR repeat
ESFRAKDMARDADLLQEAFAAHERNAAAAEVCKVLRAPGKDDASKLAMLSESGVEVTDELVALVVEKVGQFPQQAMVFFRWVEQSAGAGISWDKVYNAMARVLGREDCIEEFREVLRKMRGKGLEMDRDVYVTVTDRFLKRKM

SEQ ID NO: 94374 - protein, 590 aa, Setaria italica
  Transcript Sequence Number=SeqID_28400
  Gene Ontology: Mol. function=protein kinase activity; Biological process=protein amino acid phosphorylation
  Homolog annotation: Hit_ID=B6SVF3; Match level="QueryCoverage=100%, HitCoverage=91%, E-value=0.0, Identity=80%"; Hit description=Protein kinase domain containing protein
  Pfam annotation: Domain name=Pkinase; Domain location=35-328; Score= -67.3; E_value=0.00018; Accession=PF00069.17; Description=Protein kinase domain
GAGPCPVVRFDMDNFAIADRVSVGLHGRSDEMIFEATVRDPSSELYGSTVVLRQLKSSQAKRRGRRAIEVLKKLARRQVMYHSYALQVHGYIAPGNAVEQEDVPLVLVHGYHGSYSLRHWLQLSDWLPTLEATLALDEEQVRRVGDDSVGGPAVTRQLRLIRILMRDLLIGVNYLHSHGLAHTELRLENVHVSPIDKHVKVGILGNAADFHDNDPSSSTVASNDERRKMMIAFDMRCVGFIMAKMVLRELMDSSTFFKFKSFLTKGNDPYCLREFLLPILCQNSPSGNIGLQILDRQWGAGWNLLALLLATKPDKRISCVDALRHPFLCGPKWRINPSTSIIRWGLGSTAVRMAEDYIYGHHQRRRLVYFIELMEVLNPNLRTENWLQFLPGRWRLLYCTGRHIGLTLRQPSPRILISDVYLTVSSESIDPVFSLTSDIGFRIMPESDWPHDKSGTEGVLSVTTSARIAAGRIYIHEQDNKETRVTSSRSSRRYLGGKWRKVAKMKELPASLPSVNIATDEVDVSMSCNSALNVNSAQKVLQEIRTQTPPEMFDLSKIVCGTYIDARLMVLRGVNGSALLFTRSNPTTDS

SEQ ID NO: 94375 - protein, 108 aa, Setaria italica
  Transcript Sequence Number=SeqID_28401
EEDLERLFGSGRRGRPTLRERNRGRDDGGGGSPSPPPPRQACCFGFSPRKPLQRTPTKGKKVHGSGDGDVLGVDAGEWGDENRRMVTELKEQQRKLKKALEEQVKVSR

SEQ ID NO: 94376 - protein, 122 aa, Setaria italica
  misc_feature (98)..(98): Xaa can be any naturally occurring amino acid
  misc_feature (104)..(104): Xaa can be any naturally occurring amino acid
  Transcript Sequence Number=SeqID_28402
  Gene Ontology: Mol. function=nucleotide binding; Biological process =defense response
  Homolog annotation: Hit_ID=Q8LL82; Match level="QueryCoverage=95%, HitCoverage=10%, E-value=1e-14, Identity=37%"; Hit description=NBS -LRR-like protein
LLIYKIGQLTNLQGLEEFPVSRIKGHGITELKDLNDLCGQLCISNLEEVTCTDIEGDVELSRKRHLKKLALKWGLEAGASTTKSDVCMRTLAGLKPNXNLEELXKIQCYMGVGFPAWMADEQ

SEQ ID NO: 94377 - protein, 138 aa, Setaria italica
  Transcript Sequence Number=SeqID_28403
  Gene Ontology: Mol. function=methyltransferase activity; Cellular component=chromosome, telomeric region; Biological process=positive regulation of growth rate
  Homolog annotation: Hit_ID=B6TN81; Match level="QueryCoverage=60%, HitCoverage=28%, E-value=1e-36, Identity=83%"; Hit description =Cerebral protein 1
  Pfam annotation: Domain name=Methyltransf_8; Domain location=73-138; Score=-116.7; E_value=0.035; Accession=PF05148.7; Description =Hypothetical methyltransferase
  Subcellular localization annotation: CTP_CleavageSite=76; ConfidenceScore=5.46e-01
MEPPQESAAGGRKRRRRGGSRNRGKPSSSSQQAPRPAVAPPPPSSPPAKRRRKDGAGQAAVTPKRDNTSIKLDKMRARLYGGHFRMLNETLYTCSGQDAFDYFQKDPSLFDVYHTGYQEQMSRWPEQPVNVIINWLER

SEQ ID NO: 94378 - protein, 47 aa, Setaria italica
  Transcript Sequence Number=SeqID_28404
MAAAAAEWDSGSEAAPTGEWPPATASPVKGKAALPEESDAGASASGS

SEQ ID NO: 94379 - protein, 42 aa, Setaria italica
  Transcript Sequence Number=SeqID_28405
SRRSEFRWYSQKETSRSPNSSMICWSLRRREATSKNCRRGAS

SEQ ID NO: 94380 - protein, 193 aa, Setaria italica
  Transcript Sequence Number=SeqID_28406
  Gene Ontology: Mol. function=sequence-specific DNA binding; Cellular component=nucleus; Biological process=regulation of transcription, DNA-dependent
  Homolog annotation: Hit_ID=B2KJ78; Match level="QueryCoverage=48%, HitCoverage=29%, E-value=2e-42, Identity=86%"; Hit description=WRKY transcription factor 37 (Fragment)
  Pfam annotation: Domain name=WRKY; Domain location=76-136; Score =132.9; E_value=1e-36; Accession=PF03106.7; Description=WRKY DNA -binding domain
RKASGASAAPGVLNLSSDSSSANDAAKPARDDAAASPPCATRKSPSAAGEGVDDEVQQQAKKARVSVRVKCDTPTMPDGCQWRKYGQKISKGNPCPRAYYRCTVAPHCPVRKQVQRCAEDTTILITTYEGQHNHQLPPAATAMASTTSAAAAMLTSGSTTSSSPASLAAHGHHLPLAAAGLLGPTTMVSTAAS

SEQ ID NO: 94381 - protein, 72 aa, Setaria italica
  Transcript Sequence Number=SeqID_28407
  Gene Ontology: Mol. function=oxidoreductase activity; Biological process=multicellular organismal development
  Homolog annotation: Hit_ID=P50160; Match level="QueryCoverage=93%, HitCoverage=19%, E-value=1e-29, Identity=94%"; Hit description=Sex determination protein tasselseed-2
DLDLDITVPSDEEVEKMEEVVRGFATLKGPTLRPRDIAEAVLFLASDESRYISGHNLVVDGGVTTSRNLIGL

SEQ ID NO: 94382 - protein, 98 aa, Setaria italica
  Transcript Sequence Number=SeqID_28408
  Subcellular localization annotation: CTP_CleavageSite=44; ConfidenceScore=5.31e-01
AGLHAGRRAHPAHGAHSTSRGFSIFTGCLRPLATASLQREGQTEAQRRAGTETGREREKDRERLRGEGKEERRRAAAVAGPARWNAGRSRGGSGCLLG

SEQ ID NO: 94383 - protein, 97 aa, Setaria italica
  Transcript Sequence Number=SeqID_28409
  Subcellular localization annotation: CTP_CleavageSite=25; ConfidenceScore=5.04e-01
MSCLGRAAVPVKRVWRGLSARLRLRRATGKSSSSSSSYYTAMDPDGEADGVGAAGLGRLRKEVRTCEYSDVHVMWEMLSSSSSSKSAGGGGGGHGQR

SEQ ID NO: 94384 - protein, 87 aa, Setaria italica
  Transcript Sequence Number=SeqID_28410
  Gene Ontology: Mol. function=signal transducer activity; Cellular component=plasma membrane; Biological process=response to light stimulus
  Homolog annotation: Hit_ID=Q9SA69; Match level="QueryCoverage=100%, HitCoverage=13%, E-value=6e-21, Identity=56%"; Hit description =F10O3.17
NRELKLEVARMRMRLTDLEKDHVSMKRELVRVGPANRLLRGFARSLSRLNALFRMRPAAEPGLQQLGAKATADAKVLFQRRRRHSIS

SEQ ID NO: 94385 - protein, 225 aa, Setaria italica
  Transcript Sequence Number=SeqID_28411
  Homolog annotation: Hit_ID=Q9SGX1; Match level="QueryCoverage=70%, HitCoverage=33%, E-value=3e-35, Identity=45%"; Hit description =F1N19.1
  Subcellular localization annotation: CTP_CleavageSite=44; ConfidenceScore=5.47e-01
PSSHRRSLRPVSSPPLARVTPAARFCPAFFSSLSPGSCSLQRTGAAGGDGDGAGEGSSEAPVAGWLDADLLRRVSGAADADQALDIVAESSGGAGAALEAPECNAIVAAALDRGNVELALSVFEAMRSGFAGVGGWRWARPDVRTYALLVQRLAAALRVSDAIRIIDCVSRAGVSSTEEVPFGIIVRCPTCMVAVAVAQPQDGTQVVSCSKCRYQYELFSGEITY

SEQ ID NO: 94386 - protein, 104 aa, Setaria italica
  Transcript Sequence Number=SeqID_28412
  Gene Ontology: Mol. function=(S)-2-hydroxy-acid oxidase activity; Cellular component=peroxisome; Biological process=oxidative photosynthetic carbon pathway
  Homolog annotation: Hit_ID=P05414; Match level="QueryCoverage=99%, HitCoverage=27%, E-value=4e-47, Identity=85%"; Hit description =Peroxisomal (S)-2-hydroxy-acid oxidase
  Pfam annotation: Domain name=FMN_dh; Domain location=2-104; Score= -182.4; E_value=0.00032; Accession=PF01070.10; Description=FMN -dependent dehydrogenase
MAGFKAIALTVDTPRLGRREADIKNRFTLPPHLVLKNFEALDLGTMDKTNDSGLASYVAGQVDRTLSWKDVKWLQTITSLPILVKGVVTAEDTRLAIEHGAAGI

SEQ ID NO: 94387 - protein, 54 aa, Setaria italica
  Transcript Sequence Number=SeqID_28413
LEEERYQERMKALRAKSSPKPPTPPPAEPPTPPPAPEPPAARPTPAAIDTAPKS

SEQ ID NO: 94388 - protein, 205 aa, Setaria italica
  misc_feature (12)..(12): Xaa can be any naturally occurring amino acid
  Transcript Sequence Number=SeqID_28414
  Gene Ontology: Mol. function=RNA binding; Cellular component =cytoplasmic exosome (RNase complex); Biological process=rRNA processing
  Homolog annotation: Hit_ID=B6T7D6; Match level="QueryCoverage=100%, HitCoverage=85%, E-value=1e-98, Identity=86%"; Hit description =Exosome complex exonuclease RRP40
LGTGLRQRATTXGEPSAGILRLSKPNKYWVESSQKRYVPSVEDTVLGVVVDTKPDNFVVDIKGPHLAFLPVLAFEGGTRRNIPKFEIGTLIYARVVKANIIMNPELSCMDATGKAAEFGQLKDGYTFDTSTGMSRMLLSSPTCPVLEALGKKLSFEIAVGLNGRVWVNAPAPNTVILVSNAIMRSESLSGIQQRAMVENLLERLS

SEQ ID NO: 94389 - protein, 90 aa, Setaria italica
  Transcript Sequence Number=SeqID_28415
  Homolog annotation: Hit_ID=Q10RH1; Match level="QueryCoverage=83%, HitCoverage=27%, E-value=6e-16, Identity=61%"; Hit description=XS domain containing protein, expressed
LKRKHPTDQDEGFPSHHKQLRLDEAHHPPQLPPHAAVDRHALRRAFLKYAKMLNESSSQKRRFLEGSRVPCLACGRDFADVHGLVMHAYN

SEQ ID NO: 94390 - protein, 137 aa, Setaria italica
  Transcript Sequence Number=SeqID_28416
NREIHEEMEGSVDEDCNRSDEEYDDLAMGDSMENGYLTDDVSDVCGLSKSSNGRFLDGNQRSHSTPRKHQAKLDAGVPETARSTSSALPTGTSSKRHAARKWKRSLSDSFRSRPRSAPDLVSTYKGSPPVPVAPDER

SEQ ID NO: 94391 - protein, 129 aa, Setaria italica
  misc_feature (10)..(10): Xaa can be any naturally occurring amino acid
  misc_feature (14)..(14): Xaa can be any naturally occurring amino acid
  Transcript Sequence Number=SeqID_28417
  Gene Ontology: Mol. function=transcription regulator activity; Cellular component=nucleus; Biological process=regulation of transcription
  Homolog annotation: Hit_ID=A6NAB4; Match level="QueryCoverage=96%, HitCoverage=20%, E-value=2e-35, Identity=56%"; Hit description=Myc2 bHLH protein
ASVLADLQNXLQNXVEADGQSLHWNYAIFWQLARTKSGAVVLGWGDGSCREPHDGEIGFATSVGAGDASSVTRQKIRKRVLQRLHTAFAGADEEDYAPGIDQVTDTEIFFLASMYFSFPRHVGGPGKVF

SEQ ID NO: 94392 - protein, 46 aa, Setaria italica
  Transcript Sequence Number=SeqID_28418
  Homolog annotation: Hit_ID=B6T871; Match level="QueryCoverage=100%, HitCoverage=32%, E-value=9e-18, Identity=93%"; Hit description =Lactoylglutathione lyase
MATLQLNHIARETSDVPRLAAFYEAVLGFERVPSPNYSGFQVAWLR

SEQ ID NO: 94393 - protein, 132 aa, Setaria italica
  Transcript Sequence Number=SeqID_28419
NFDTPSLEIIQEFYEKKWEPEKNDERRKELFFEFMKKEVKEATVDDSFFIAAGLAAPVAAVIGKRASGHIPYVKSLRLDMVPNVVFVPMVTLLGIMGATAWQMSSKSAAAKGEEEAKEDEKQRKDQSSNKAN

SEQ ID NO: 94394 - protein, 55 aa, Setaria italica
  Transcript Sequence Number=SeqID_28420
QQEEENRPHRQSSLLAIRAPRNAMDLEESLREGEEREEQGNRRDTGGRTDKVDGH

SEQ ID NO: 94395 - protein, 115 aa, Setaria italica
  Transcript Sequence Number=SeqID_28421
RESFLWLAEEVDEAMADEVSMIPYLAYSLLESPCLFSSILRRVSGFITSDGGAVRCAKGGDEHAMVLRDLLWDTVVDMEGVRAANHHCIHADAGCAPDVMSVGSQFSCRTVWLFF

SEQ ID NO: 94396 - protein, 122 aa, Setaria italica
  Transcript Sequence Number=SeqID_28422
  Subcellular localization annotation: CTP_CleavageSite=40; ConfidenceScore=5.07e-01
IAMELRIAVVVATDFSSLRGAGYSQIRRGGGQGTRKPRRRVSHGVVNLVSKSGEALLEDHDEASWIRQPQIPHRQSSLLAIRAPRNAMDLEESLREGEEREEQGNRRDTGGRTDKVDGHLDD

SEQ ID NO: 94397 - protein, 116 aa, Setaria italica
  Transcript Sequence Number=SeqID_28423
  Subcellular localization annotation: CTP_CleavageSite=32; ConfidenceScore=5.04e-01
KYERGRRTRIALPPSPVRLPCSSASLPGPGVLGDTASGAAATAAADAAAGGLVGGGSAMGRGSRACSVLGSALLLLLVSLGSAAAQKGSTWKTLSGKAPVIIAKGGFSGLFPDSSD

SEQ ID NO: 94398 - protein, 213 aa, Setaria italica
  Transcript Sequence Number=SeqID_28424
  Gene Ontology: Mol. function=hydrolase activity, acting on acid anhydrides, catalyzing transmembrane movement of substances; Cellular component=integral to membrane; Biological process =metabolic process
  Homolog annotation: Hit_ID=B9MVA1; Match level="QueryCoverage=83%, HitCoverage=18%, E-value=2e-61, Identity=62%"; Hit description =Autoinhibited H+ ATPase
SVVLFCRTGSCILFGVFTLVLLTTVLFFWAVYKTEFFVRLFHVRSLNINKLDSKDINAVADNTERLASAVYLQVSTISQALIFVTRSRGWSFLERPGMLLMGAFVVAQLIASVLAAMVSWEVAGIKGIGWGWTGAIWVYNIAVYLLLDPIKFAVRYGLSGKAWGLVLDNKVAFTSRKDFGKEAREAAWAHEQRTLHGLQTATATTYLVVQLSS

SEQ ID NO: 94399 - protein, 61 aa, Setaria italica
  Transcript Sequence Number=SeqID_28425
KEADSSAGKFTKGLGSCLPPVTTQQEGFKCMQAEQGKPYQRFKFCLAYGSISAVTKYRVED

SEQ ID NO: 94400 - protein, 95 aa, Setaria italica
  Transcript Sequence Number=SeqID_28426
MRNLRLVTRLPQQLPLQLDGETLLASAVDAERRRAFFASSANFIYTVQLPASSTQGQEPLPWSKISTQHSDVEEVVLEPGDCIVAMDYLMERESL

SEQ ID NO: 94401 - protein, 65 aa, Setaria italica
  Transcript Sequence Number=SeqID_28427
VAEVFIHIGSLQQLNLLSTLLLPSFHCMHHSQHLLQFLNYLEIYVLTIMYLTGSLELISVHFNEL

SEQ ID NO: 94402 - protein, 106 aa, Setaria italica
  Transcript Sequence Number=SeqID_28428
  Gene Ontology: Mol. function=fructose-bisphosphate aldolase activity; Cellular component=chloroplast; Biological process=metabolic process
  Homolog annotation: Hit_ID=B6UDN1; Match level="QueryCoverage=100%, HitCoverage=27%, E-value=5e-39, Identity=79%"; Hit description =Fructose-bisphosphate aldolase
  Subcellular localization annotation: CTP_CleavageSite=34; ConfidenceScore=5.42e-01
MAMATVKLSSPATGLLAGGRTRRSAPARRATVIRAAAGSYSDELVSTAKSVASPGRGILAIDESNATCGKRLASIGLDNTEANRQAYRQLLLTTAGLGEYISGAIL

SEQ ID NO: 94403 - protein, 87 aa, Setaria italica
  Transcript Sequence Number=SeqID_28429
IITNLLPCWCQGLLAPLAFGETLELLKYLENETYCMHTLRKLMHSKLVNSVLFAEWFMPTAKASKHLIGRRPSWLFFWKKTGCVFCW

SEQ ID NO: 94404 - protein, 198 aa, Setaria italica
  misc_feature (103)..(103): Xaa can be any naturally occurring amino acid
  misc_feature (129)..(129): Xaa can be any naturally occurring amino acid
  Transcript Sequence Number=SeqID_28430
  Gene Ontology: Mol. function=fructose-bisphosphate aldolase activity; Cellular component=chloroplast; Biological process=metabolic process
  Homolog annotation: Hit_ID=B9EZ83; Match level="QueryCoverage=89%, HitCoverage=10%, E-value=4e-97, Identity=95%"; Hit description =Fructose-bisphosphate aldolase
  Pfam annotation: Domain name=Glycolytic; Domain location=1-198; Score= 211.2; E_value=2.8e-60; Accession=PF00274.11; Description=Fructose -bisphosphate aldolase class-I
LFVPLVSYFLRFCYLRVLVSYLPGSNNESWCQGLDGLASRCAEYYKQGARFAKWRTVVSIPCGPSALAVKEAAWGLARYAGIAQDNGLVPIVEPEILLDGDHXLERTLEVAEKVWSEVFFYLAQNNVLXEGILLKPSMVTPGAEHKEKASPEAIAKNTLTMLRRRVPPAVPGIMFLSGGQSEVEATLNLNAMNQSPNP

SEQ ID NO: 94405 - protein, 347 aa, Setaria italica
  Transcript Sequence Number=SeqID_28431
  Gene Ontology: Mol. function=fructose-bisphosphate aldolase activity; Cellular component=chloroplast; Biological process=metabolic process
  Homolog annotation: Hit_ID=Q94JJ0; Match level="QueryCoverage=97%, HitCoverage=86%, E-value=0.0, Identity=93%"; Hit description =Fructose-bisphosphate aldolase
  Pfam annotation: Domain name=Glycolytic; Domain location=5-347; Score= 837.7; E_value=7.1e-249; Accession=PF00274.11; Description=Fructose -bisphosphate aldolase class-I
PILEQLRQVHCCSPGRGILAIDESNATCGKRLASIGLDNTEANRQAYRQLLLTTAGLGEYISGAILFEETLYQSTMDGKKFVDCLKDQNIMPGIKVDKGLVPLPGSNNESWCQGLDGLASRCAEYYKQGARFAKWRTVVSIPCGPSALAVKEAAWGLARYAGIAQDNGLVPIVEPEILLDGDHGIERTLEVAEKVWSEVFFYLAQNNVLFEGILLKPSMVTPGAEHKEKASPEAIAKNTLTMLRRRVPPAVPGIMFLSGGQSEVEATLNLNAMNQSPNPWHVSFSYARALQNSVLKTWQGRPENVEAAQKALLARAKANSQAQLGRYTGEGESDEAKKGMFQKGYTY

SEQ ID NO: 94406 - protein, 491 aa, Setaria italica
  Transcript Sequence Number=SeqID_28432
  Gene Ontology: Mol. function=transporter activity; Cellular component= integral to membrane; Biological process=transport
  Homolog annotation: Hit_ID=Q25AI7; Match level="QueryCoverage=98%, HitCoverage=98%, E-value=1e-171, Identity=60%"; Hit description =H0702G05.6 protein
  Pfam annotation: Domain name=MFS_1; Domain location=29-443; Score =87.4; E_value=5.1e-23; Accession=PF07690.8; Description=Major Facilitator Superfamily
  Pfam annotation: Domain name=Sugar_tr; Domain location=23-490; Score =1.8; E_value=5.2e-09; Accession=PF00083.16; Description=Sugar (and other) transporter
  Pfam module annotation: Pfam domain module=MFS_1::Sugar_tr; Domain location=29-443::23-490
MEDGVSTYTVDEALVFMGFGKFHAFVLAYSGMAKISEAMEMMLLSFVGQSVQAEWELSAQAESLITSVVFVGMLVGAYAWGIVSDNYGRRVGFNFTAIVTGGAGLLSAFAPNYLSLIVLRFMVGVGLGGGPVLGSWFLEFIPAPNRGTWMVMFSAFWTVGTIMEASLAWAVMPAFGWRWLLALSSLPSFALLLFYPVTLESPRYLCMKGRIAEAVHVLETMARVNRVTLPSGRLVSGHRTELHEMGDSSETAQLVTTKKNNTGDLASKSEIGGLNAILKLLSPNLIRSSLLLWTVFLGHAFLYYGLVLLTSELNHGNRICGSEGGAEVTTTAHINDENLYRNVFITSFGEVPGLLLSAAIVDKFGRKLSMSSMLYISCLCIAPLMFAQTEALTTVFLFGARVCISASFTVLHIYAPEIYPTAVRATGVGFASSIARFGGILCPLVAVGLVHACHQTAAIVIFITVMLVSGVAVSYFPLETSGRKLSDHITA

SEQ ID NO: 94407 - protein, 192 aa, Setaria italica
  Transcript Sequence Number=SeqID_28433
  Gene Ontology: Mol. function=binding
  Subcellular localization annotation: CTP_CleavageSite=54; ConfidenceScore=5.62e-01
QHYPALSDKHKSSVSSAFVPAMKAMWPGLYGNSGGSSHVISKKRKLAVQASRFMVQMVQTQLLSTESTDQASKSPESASRSADVSSNFDVGEEGLAIRIAAEVASCPDKKTAAGKAYALALCKVAVLLRFRQSEQKAIKCMRGLVNSLAASVASDKELMKELAQMAARLRSLDASPDEELPKDEAEAIFKKL

SEQ ID NO: 94408 - protein, 67 aa, Setaria italica
  Transcript Sequence Number=SeqID_28434
MRDAAEDDSDSPPSQMSEDDPGGGGGDRWEPDLRGGNGGGGRWAPPDQVLENVLESVLEFLTAARDP

SEQ ID NO: 94409 - protein, 46 aa, Setaria italica
  Transcript Sequence Number=SeqID_28435
SRQCNFLVCIGTYATFMLHQPSYQVLNICIPRLYMCSYTLLRNFSF

SEQ ID NO: 94410 - protein, 42 aa, Setaria italica
  Transcript Sequence Number=SeqID_28436
TLVEPFFNLLLCSHLKHETFYLWWQREFLMVFCSAILFTDHC

SEQ ID NO: 94411 - protein, 276 aa, Setaria italica
  misc_feature (13)..(13): Xaa can be any naturally occurring amino acid
  misc_feature (21)..(21): Xaa can be any naturally occurring amino acid
  misc_feature (140)..(140): Xaa can be any naturally occurring amino acid
  Transcript Sequence Number=SeqID_28437
  Gene Ontology: Cellular component=vacuole; Biological process=protein localization
  Homolog annotation: Hit_ID=Q6K796; Match level="QueryCoverage=100%, HitCoverage=6%, E-value=1e-120, Identity=78%"; Hit description =Vacuolar protein sorting 13C protein-like
VNVVQSSRGLSVXTKLHSLKXKDELQGRLSMSSKYLACSVIDESVEATCSGTPDKEGDISTFSVDEDSFMDALTDFTSDQNCNLQDNEIPNLVSDANDYTETSSKDGIWFDGDQQKVKPSEIFYEAQDNNVTDFVVLTFXLSRSPDSCLYDGIDSQMSIRMSALEFYCNRPTLVALIEFGFDLSTVNSVPKNNSDKAPGTQIVKPSGKEDGAPTIVKGLLGYGKRRTIFNMKMDVDRVSMFLNKEDGSQLAMFVQEKFLFDLKVHPSSFSIDGMLG

SEQ ID NO: 94412 - protein, 318 aa, Setaria italica
  Transcript Sequence Number=SeqID_28438
SMEFALEASHSYGVFQEDVPYSCNMRQYPKSGPSHSSTPIKKLIHEDISFRTNEGQKRPSVIARLMGMDSPPLNTSTESISRSEERRSVPRSRDPSEMISTKHVSFVPHDKDSIKHAPKQEIRAYDDERDVFGHPSKRNNEWSKPQPREHPQEEELQKFKKEFEAWQASRAWEQSRSFELESNLDDDDDDKCTDIVPYRHQHHKGKDASSGNKYIDSNDDVHRRRSKESSTSISGSRTFSLASADACSTRLPLSRFYHEEERSLSPTRIVVLKPCPELSMDDIEESSMGSPELVKKENNMEAFLEEVKKRLKIELEGS

SEQ ID NO: 94413 - protein, 284 aa, Setaria italica
  misc_feature (163)..(163): Xaa can be any naturally occurring amino acid
  misc_feature (165)..(165): Xaa can be any naturally occurring amino acid
  Transcript Sequence Number=SeqID_28439
  Gene Ontology: Mol. function=transferase activity, transferring groups other than amino-acyl groups; Biological process=flavonoid biosynthetic process
  Homolog annotation: Hit_ID=Q01MP2; Match level="QueryCoverage=98%, HitCoverage=61%, E-value=5e-83, Identity=58%"; Hit description =H1005F08.2 protein
  Pfam annotation: Domain name=Transferase; Domain location=1-279; Score=-133.6; E_value=0.0002; Accession=PF02458.7; Description =Transferase family
HHSVADGYATCTSLLAWGQAVRGAAAFDPAPVHDRASLFVPRDPPLVEFEHRGAEFKPRAEKKKALDVVGDGNEVVMQTVRFSREFVARLKLEASAGRRRPYSAAQCVAAHLWRCVTAARGLSAHEVTKLHIAVNGRFRMTDPPVPKGYTGNAVLWARPATTXGXLLHSPLRRAAQLISKAVSGVDGRYFHSFVDFASSGAVEREGLVRTAVSSELVARTNIEVDSVLGIPFYDLDFGTGKPFLFMPTYSTPQPVEGAAFLVPEADGGGGVVAYVPLITVRRPF

SEQ ID NO: 94414 - protein, 122 aa, Setaria italica
  Transcript Sequence Number=SeqID_28440
RQKDSRIRRMEEKATGSNPDQMAALMEILQRKEAELEEIKTRFQDYKKTDRVAVNSMSTPVQTNNTRATPDIVVVKKPMNSSSVGKSEEKRSANSTVVESAKSEEKRAANTTVVENAKPEEK

SEQ ID NO: 94415 - protein, 88 aa, Setaria italica
  misc_feature (20)..(20): Xaa can be any naturally occurring amino acid
  Transcript Sequence Number=SeqID_28441
  Gene Ontology: Mol. function=transporter activity; Cellular component= membrane; Biological process=oligopeptide transport
  Homolog annotation: Hit_ID=Q7XHA8; Match level="QueryCoverage=97%, HitCoverage=14%, E-value=3e-34, Identity=79%"; Hit description=POT family protein, expressed
VSFLASTLLVWVQDNYGWGXGFGIPTLFSATGIAGFLACVKLYRYQKPGGSALTRICHVVVAATRKINVDVPDDSSLLYEMPGKESAI

SEQ ID NO: 94416 - protein, 68 aa, Setaria italica
  Transcript Sequence Number=SeqID_28442
LWLVAHVYYFGRPCSYHFDSLVYVQSLSQLSYCSFGLYFIFLFVIRTSVSLLIPVYVLVVLVMPCLYV

SEQ ID NO: 94417 - protein, 80 aa, Setaria italica
  Transcript Sequence Number=SeqID_28443
  Subcellular localization annotation: CTP_CleavageSite=27; ConfidenceScore=5.24e-01
QPPPVTVGFTISSGDMEDSYSGSQHPRSGAAKGSSTTAVFKVENWTAPAQQQQQQASPEQARKTPPPPPASEAKVPVPGG

SEQ ID NO: 94418 - protein, 80 aa, Setaria italica
  Transcript Sequence Number=SeqID_28444
LNKRQRKYKETNENEDDNGGPDGLALYSSRLTSQDDIAKDCHDGVSMPFVADCLGKQYYCCSKPSDEPIWRGLLNTGKEY

SEQ ID NO: 94419 - protein, 104 aa, Setaria italica
  Transcript Sequence Number=SeqID_28445
  Subcellular localization annotation: CTP_CleavageSite=64; ConfidenceScore=5.37e-01
EKATTAITPAGARAKQWPATATGAAARALPLLRTHTTPLPVSSPESTGEPSRCPHHTTIPRRVRSQLGNSPLLPPQAPALGATGPCWRRSLSEGRAAHGVPRRL

SEQ ID NO: 94420 - protein, 188 aa, Setaria italica
  misc_feature (156)..(156): Xaa can be any naturally occurring amino acid
  misc_feature (172)..(172): Xaa can be any naturally occurring amino acid
  Transcript Sequence Number=SeqID_28446
  Gene Ontology: Mol. function=oxidoreductase activity; Biological process=metabolic process
  Homolog annotation: Hit_ID=B9SED7; Match level="QueryCoverage=100%, HitCoverage=58%, E-value=2e-76, Identity=72%"; Hit description=Short- chain dehydrogenase, putative
  Pfam annotation: Domain name=adh_short; Domain location=1-141; Score=- 12.6; E_value=9.2e-05; Accession=PF00106.17; Description=short chain dehydrogenase
TGIGFATAEGLASHGATVYMLCRNKERGEAALNQIRSKTGNENVHLEICDLSSINEVKSFATKFTSMDKPLHVLVNNAGLLEHKRETTAEGLELNFAVNVAATYTLTELVMPLLEKAAPDARVITVASGGMYTEPLNKDLQFSEENFDGTRQYARXNKRVQVALTEWWAEEXNSKGVGFYSMHPGWAD

SEQ ID NO: 94421 - protein, 58 aa, Setaria italica
  misc_feature (35)..(35): Xaa can be any naturally occurring amino acid
  Transcript Sequence Number=SeqID_28447
  Gene Ontology: Mol. function=amino acid transmembrane transporter activity; Cellular component=integral to membrane
  Homolog annotation: Hit_ID=B6U1T8; Match level="QueryCoverage=100%, HitCoverage=9%, E-value=2e-16, Identity=75%"; Hit description=High -affinity cationic amino acid transporter 1
MALEAGTSGCGGSGWGGGFRSLMRRKQVDSDRVRXEGQPQLAKELNVPELVAIGVGST

SEQ ID NO: 94422 - protein, 116 aa, Setaria italica
  Transcript Sequence Number=SeqID_28448
  Gene Ontology: Cellular component=exocyst; Biological process =exocytosis
  Homolog annotation: Hit_ID=B9RNN3; Match level="QueryCoverage=68%, HitCoverage=11%, E-value=4e-14, Identity=52%"; Hit description =Protein binding protein, putative
RASADLDAGLLAAALGMLEAEFRRLLAEHSAPLAMRERGDSSTPASIVPSRIPPSVVHKLSLILDRLAANGRLDRCSAAYADARGDTVGASLRALGLDYLKETSEDAQVLSPSVER

SEQ ID NO: 94423 - protein, 59 aa, Setaria italica
  Transcript Sequence Number=SeqID_28449
  Gene Ontology: Mol. function=hydrolase activity; Biological process =alkaloid metabolic process
  Homolog annotation: Hit_ID=Q6RYA0; Match level="QueryCoverage=86%, HitCoverage=19%, E-value=1e-13, Identity=62%"; Hit description =Salicylic acid-binding protein 2
MDGGGKKHFILVHGLCHGAWCWYKVATLLRAAGHRVTALDLAASGAHPARLDEVRSFEV

SEQ ID NO: 94424 - protein, 38 aa, Setaria italica
  Transcript Sequence Number=SeqID_28450
MIVLLGLEYVVVGLFPFRSRKISHNHCMSLKLSGTRTS

SEQ ID NO: 94425 - protein, 66 aa, Setaria italica
  Transcript Sequence Number=SeqID_28451
  Subcellular localization annotation: CTP_CleavageSite=52; ConfidenceScore=5.08e-01
TMHPPGEVPLDPTSLVPSPANKSSCRRKTPNSHVYVKLQTNPPRWQYLHTVCQQEYQVNHLNDSFR

SEQ ID NO: 94426 - protein, 94 aa, Setaria italica
  Transcript Sequence Number=SeqID_28452
MAMVTTDAAAATAVVEKPPDADKPDYAPHNGTSTADGGAASRVRGGGVVDSVVARWRREDMLDKSPLALHAAAAVFAFVALVLVASNQHGDWMQ

SEQ ID NO: 94427 - protein, 30 aa, Setaria italica
  Transcript Sequence Number=SeqID_28453
KPPPPDPLEPLNTALAVASWGYDLSVTLPG

SEQ ID NO: 94428 - protein, 69 aa, Setaria italica
  Transcript Sequence Number=SeqID_28454
ETERAMISIISVSHHLPVPLHHKHSTVVKETSSAKEYIYANSTKDYTQFIPIALIYIRWPLSLYFQDEA

SEQ ID NO: 94429 - protein, 46 aa, Setaria italica
  Transcript Sequence Number=SeqID_28455
MASSADSSAAGGMRKAPSLEWRWVSTEEDDDEDRGRGRRGRRGWWA

SEQ ID NO: 94430 - protein, 68 aa, Setaria italica
  Transcript Sequence Number=SeqID_28456
ILIASCHKNTLNPSLCRHLNNHLRNSLQDLEPMSPAASHPDPPIRTVRRRTESTSSSSPENQRRGYQL

SEQ ID NO: 94431 - protein, 168 aa, Setaria italica
  Transcript Sequence Number=SeqID_28457
  Gene Ontology: Mol. function=transferase activity, transferring pentosyl groups; Cellular component=cytosol
  Homolog annotation: Hit_ID=B9RKG8; Match level="QueryCoverage=75%, HitCoverage=24%, E-value=6e-50, Identity=67%"; Hit description =Transferase, transferring pentosyl groups, putative
  Pfam annotation: Domain name=Init_tRNA_PT; Domain location=1-165; Score=-233.4; E_value=0.023; Accession=PF04179.4; Description =Initiator tRNA phosphoribosyl transferase
LLAVNLQKPLRPLWISQRTRIWLNEVPELESWDFTPIILISASASNAVAMQRMSSEFSWQYIAGAGDDEESWARGLTPTLFWKHSYDLLDAGPDHCNQLVADIVEKDRVYRAQRGEHSPQITAKPLKSHDDIKCNDDRISAMRPTNSDTCTSTTDAQYCNNGPLLFWI

SEQ ID NO: 94432 - protein, 27 aa, Setaria italica
  Transcript Sequence Number=SeqID_28458
WLREPIFMGYQVITDMVSLLMSPYMSM

SEQ ID NO: 94433 - protein, 105 aa, Setaria italica
  Transcript Sequence Number=SeqID_28459
  Gene Ontology: Mol. function=nucleoside-triphosphatase activity; Cellular component=membrane; Biological process=transport
  Homolog annotation: Hit_ID=A3BXL8; Match level="QueryCoverage=96%, HitCoverage=6%, E-value=3e-52, Identity=91%"; Hit description=PDR20
TTKKTYELFDDIILLSDGQVVYNGPREHVLEFFESVGFKCPQRKGVADFLQEVTSRKDQRQYWKHDDETYRYVPVKEFAEAFQSFHIGEAIRNELAVPFDKSTSL

SEQ ID NO: 94434 - protein, 171 aa, Setaria italica
  misc_feature (93)..(93): Xaa can be any naturally occurring amino acid
  Transcript Sequence Number=SeqID_28460
  Gene Ontology: Mol. function=nucleoside-triphosphatase activity; Cellular component=membrane; Biological process=transport
  Homolog annotation: Hit_ID=A3BXL8; Match level="QueryCoverage=100%, HitCoverage=11%, E-value=5e-85, Identity=87%"; Hit description=PDR20
VTSRKDQRQYWKHDDETYRYVPVKEFAEAFQSFHIGEAIRNELAVPFDKSTSHPVALKTSKYGASMKELLKANIDREILLMKRNSFVYIFKAXQVAVVAIIAMTVFLRTNMHRDSITDGRIYMGALFFGILMIMFNGLAEVGLTIAKLPVFFKQRDLLFYPAWTYSLPSWI

SEQ ID NO: 94435 - protein, 111 aa, Setaria italica
  Transcript Sequence Number=SeqID_28461
  Gene Ontology: Cellular component=nucleus
  Homolog annotation: Hit_ID=B6TD34; Match level="QueryCoverage=88%, HitCoverage=25%, E-value=2e-51, Identity=97%"; Hit description =SWIB/MDM2 domain containing protein
  Pfam annotation: Domain name=SWIB; Domain location=30-105; Score =129.1; E_value=1.4e-35; Accession=PF02201.10; Description=SWIBMDM2 domain
VTAPPTAAAQVAGDNKESASKRKRGGPGGLNKVCAISPELQTIVGETAMSRTQIVKQLWAYIRQNNLQDPDDKRKIICNDELRVVFGTDTTDMFKMNKLLAKHITPLDPKD

SEQ ID NO: 94436 - protein, 261 aa, Setaria italica
  misc_feature (19)..(19): Xaa can be any naturally occurring amino acid
  Transcript Sequence Number=SeqID_28462
  Gene Ontology: Cellular component=nucleus
  Homolog annotation: Hit_ID=B6TD34; Match level="QueryCoverage=94%, HitCoverage=63%, E-value=1e-113, Identity=80%"; Hit description =SWIB/MDM2 domain containing protein
  Pfam annotation: Domain name=SWIB; Domain location=184-258; Score =77.5; E_value=5e-20; Accession=PF02201.10; Description=SWIBMDM2 domain
  Pfam annotation: Domain name=SWIB; Domain location=80-155; Score =129.1; E_value=1.4e-35; Accession=PF02201.10; Description=SWIBMDM2 domain
  Pfam module annotation: Pfam domain module=SWIB::SWIB; Domain location=184-258::80-155
  Subcellular localization annotation: CTP_CleavageSite=94; ConfidenceScore=5.63e-01
ATVPAVSSPPAVPAMAFYXAAPLAFRYTTGLGGVATGGTVSFQQSAPGVGGTAPPTAAAQVAGDNKESASKRKRGGPGGLNKVCAISPELQTIVGETAMSRTQIVKQLWAYIRQNNLQDPDDKRKIICNDELRVVFGTDTTDMFKMNKLLAKHITPLDPKDQIRDVKRMKAPTVTPQPGPPINQPSVVISDALAKFIGTDGTFPHEDALKYLWDYIKANQLEDVINGSILCDSKLQELFGCESIPMSGLSEMLGHHFIKKT

SEQ ID NO: 94437 - protein, 53 aa, Setaria italica
  Transcript Sequence Number=SeqID_28463
FLRFFFGLQNRREFSNKTFQLKHTTAMVTCSSTNGKQLLSHQTKTSIDKLMHL

SEQ ID NO: 94438 - protein, 51 aa, Setaria italica
  Transcript Sequence Number=SeqID_28464
APAAAAGIGDAVFGGAARSELTCNGGGGGEYDALQPRKRARVATGLLECGG

SEQ ID NO: 94439 - protein, 933 aa, Setaria italica
  Transcript Sequence Number=SeqID_28465
  Gene Ontology: Mol. function=actin binding; Cellular component =cytoskeleton; Biological process=cytoskeleton organization and biogenesis
  Homolog annotation: Hit_ID=Q7Y0V3; Match level="QueryCoverage=99%, HitCoverage=96%, E-value=0.0, Identity=66%"; Hit description=Actin filament bundling protein P-115-ABP
  Pfam annotation: Domain name=Gelsolin; Domain location=1-75; Score =51.8; E_value=2.6e-12; Accession=PF00626.14; Description=Gelsolin repeat
  Pfam annotation: Domain name=Gelsolin; Domain location=114-185; Score= 49.6; E_value=1.2e-11; Accession=PF00626.14; Description=Gelsolin repeat
  Pfam annotation: Domain name=Gelsolin; Domain location=230-304; Score= 36.8; E_value=8.5e-08; Accession=PF00626.14; Description=Gelsolin repeat
  Pfam annotation: Domain name=Gelsolin; Domain location=367-449; Score= 19.8; E_value=0.0051; Accession=PF00626.14; Description=Gelsolin repeat
  Pfam annotation: Domain name=Gelsolin; Domain location=496-566; Score= 14.4; E_value=0.018; Accession=PF00626.14; Description=Gelsolin repeat
  Pfam annotation: Domain name=Gelsolin; Domain location=599-679; Score= 23.2; E_value=0.001; Accession=PF00626.14; Description=Gelsolin repeat
  Pfam annotation: Domain name=VHP; Domain location=898-933; Score =74.4; E_value=4.1e-19; Accession=PF02209.11; Description=Villin headpiece domain
  Pfam module annotation: Pfam domain module=Gelsolin::Gelsolin::Gelsoli n::Gelsolin::Gelsolin::Gelsolin::VHP; Domain location=1-75::114 -185::230-304::367-449::496-566::599-679::898-933
ETYGKFFTGDSYIILKTTALKNGSFRQDIHYWLGKDTSQDEAGTAAIKTVELDAALGGRAVQYREVQGNETEKFLSYFKPCIIPEEGGVTSGFRHAEINEREHKTRLFVCRGKHTVHVKEVPFARSSLNHDDIFILDTKSKIFQFNGSNSSIQERAKALEVVQYLKDTNHDGKCEVGAVEDGKLMADADAGEFWGLFGGFAPLPRKTFSELNGKDSTSTSKLLCVNKGQVAPIDCEILTRELLDSTKCYLLDCGSEIYAWMGRETTLEERKRAGSAAEELLREGNRPKSHIIRLMEGFETVIFRSKFDKWPKKADAVVSDESRGKVAALLKRQGFNFKSPVKAAPVKQEPQPQIDCTGNLQVWRVNGSEKTFLSFSEQCKFYSGDCYIFQYTYPGDNGDECLIGTWFGKKSVQEERSAATSLADKMIESLKFQAVLVRVYEGKEPIEFFPIFQNLVIYKGGTSTGYKKFVSENNIEDDTYSESGVALFRVQGSGPENMQAIQVDTAAASLNSSYCYILHDGDTVFTWIGNLSSSMDQELAERQLDVIKPNMQSRLLKEGSEYDQFWKLLGVKSEYSSQKIVRDQESDPHLFACTFSKGVLKVREIFNFTQDDLMTEDIFVLDCHSCVFIWVGQRVDTKIRAQALNIGEKFLELDILMENVSRETPLYVITEGSEPQYFTRFFTWDSAKSAMHGNSFERKLSIVKDGVKPRADKPKRRTTTSSHTGRSSVPDKSQRSRSMSFSPDRVRVRGRSPAFNALAANFENPNARNLSTPPPIVRKQPPKPVSPDSSKPPPRTASIAAISSSFERPKATLIPKSIKASPDASKPQTEASKPNPETNAKESNPTKDSQIATPAVQEDVKESQAEGEEGLPVYPYDRLRTSSTNPATDIDVTKREAYLSSSEFRERFGMTKEAFAKLPKWKQNRLKIALQLF

SEQ ID NO: 94440 - protein, 122 aa, Setaria italica
  misc_feature (29)..(29): Xaa can be any naturally occurring amino acid
  Transcript Sequence Number=SeqID_28466
  Gene Ontology: Mol. function=binding
VVSSEKLHALLLAECMMSILGEDWLSEDXKIQKYPECVACCKFVLLVLESARIEVAVLLNELAYLKYESLKTSQTDEAVCQKQRNLAILFSLIERIIKMISNASSSEGAPSQTIRESTLGTT

SEQ ID NO: 94441 - protein, 80 aa, Setaria italica
  Transcript Sequence Number=SeqID_28467
  Gene Ontology: Mol. function=protein serine/threonine kinase activity; Cellular component=intrinsic to membrane; Biological process=regulation of transcription, DNA-dependent
  Homolog annotation: Hit_ID=Q7XQ05; Match level="QueryCoverage=100%, HitCoverage=37%, E-value=2e-34, Identity=63%"; Hit description =OSJNBa0036B21.17 protein
STLYCKAHGGGKRCVFEGCAKGAEGSTPLCKAHGGGKRCMYEGGGVCPKSVHGGTEFCVAHGGGKRCAVPGCGKSARGRT

SEQ ID NO: 94442 - protein, 638 aa, Setaria italica
  Transcript Sequence Number=SeqID_28468
  Gene Ontology: Mol. function=ubiquitin-protein ligase activity; Cellular component=ubiquitin ligase complex; Biological process =ubiquitin-dependent protein catabolic process
  Homolog annotation: Hit_ID=B9R8Q6; Match level="QueryCoverage=99%, HitCoverage=77%, E-value=0.0, Identity=65%"; Hit description =Ubiquitin-protein ligase, putative
  Pfam annotation: Domain name=Arm; Domain location=130-169; Score=8.1; E_value=1.1; Accession=PF00514.15; Description=Armadillobeta-catenin -like repeat
  Pfam annotation: Domain name=Arm; Domain location=170-215; Score=1.8; E_value=7.2; Accession=PF00514.15; Description=Armadillobeta-catenin -like repeat
  Pfam annotation: Domain name=Arm; Domain location=270-310; Score=1.3; E_value=8.5; Accession=PF00514.15; Description=Armadillobeta-catenin -like repeat
  Pfam annotation: Domain name=Arm; Domain location=4-44; Score=3.0; E _value=5.2; Accession=PF00514.15; Description=Armadillobeta-catenin -like repeat
  Pfam annotation: Domain name=Arm; Domain location=413-454; Score=9.5; E_value=0.76; Accession=PF00514.15; Description=Armadillobeta-catenin- like repeat
  Pfam annotation: Domain name=Arm; Domain location=496-536; Score =19.8; E_value=0.011; Accession=PF00514.15; Description=Armadillobeta- catenin-like repeat
  Pfam annotation: Domain name=Arm; Domain location=541-582; Score =14.7; E_value=0.17; Accession=PF00514.15; Description=Armadillobeta -catenin-like repeat
  Pfam annotation: Domain name=Arm; Domain location=89-129; Score=15.5; E_value=0.13; Accession=PF00514.15; Description=Armadillobeta-catenin- like repeat
  Pfam annotation: Domain name=HEAT; Domain location=135-171; Score =6.5; E_value=7.8; Accession=PF02985.14; Description=HEAT repeat
  Pfam annotation: Domain name=HEAT; Domain location=275-312; Score =4.5; E_value=14; Accession=PF02985.14; Description=HEAT repeat
  Pfam annotation: Domain name=HEAT; Domain location=501-538; Score =11.1; E_value=2.2; Accession=PF02985.14; Description=HEAT repeat
  Pfam annotation: Domain name=HEAT; Domain location=552-584; Score =5.4; E_value=11; Accession=PF02985.14; Description=HEAT repeat
  Pfam module annotation: Pfam domain module=Arm::Arm::Arm::Arm::Arm::Ar m::Arm::Arm::HEAT::HEAT::HEAT::HEAT; Domain location=130-169::170 -215::270-310::4-44::413-454::496-536::541-582::89-129::135-171::275 -312::501-538::552-584
KSNDNYNKVEIAAGDNIRTIVKFLNHGQTQEKEKAVSLLYELSENKDLSERIGSVSGAILILVGLSSSKVENSLIVDRAEKTLENLESCEKNVRQMAENGRLQPLLRLLLEGSPDMQLSMAAYLGELVLSNDVKVLVAQTAGSTLVNIMKNGNREAREAALKALNQISSYDASAKILIEAGILPPLITDLFTVGSNQLPMRLKEVSANILANVVASGARFESIPLDHSRQTLVSEDIVHNLLHLISNTGPAIECKLLQVLVGLTDSSTSVQSIVDAIKSSGAIVSLIQFVEAPQREVRMNSIKLLNNISPYMGQELADAFRGNFSQLSSLVRVIADNNGISEEQAAAAGLVADLPMRDSVLTRRLHQDGAFATINLKVLRIRQGEIRGGRFVNPFLEGLVRIVSRITYVLDDDPDFIAVAREYNLTALFTDLLQMNGLDTVQIVSATALEKLSHQSKHLTKILPAPNPGVCFSIFPCLSQKTVATGVCRVHCGICSARESFCLLEGKAVEKLVACLDNNNEKVVEAALAALSTLLDDGVDIDQGVMVLCDAEGINPILDVLCENRNEALRQRAVWAVERILRMDEIAYEISGNQNVGTALVEAFRHGDYRTRQVAERALKHVDKLPNFSGIFSKMGAQ

SEQ ID NO: 94443 - protein, 67 aa, Setaria italica
  Transcript Sequence Number=SeqID_28469
LLECVQHLYLSTLGRKETKKNNSGAHTSAYTLAREPMYDTAKKIYASLFRSLALLLPRWLVYCCVYW

SEQ ID NO: 94444 - protein, 95 aa, Setaria italica
  Transcript Sequence Number=SeqID_28470
  Gene Ontology: Mol. function=protein serine/threonine phosphatase activity; Cellular component=protein serine/threonine phosphatase complex; Biological process=protein amino acid dephosphorylation
  Homolog annotation: Hit_ID=B6TAL6; Match level="QueryCoverage=100%, HitCoverage=24%, E-value=1e-42, Identity=88%"; Hit description =Catalytic/ protein phosphatase type 2C
QAVEIVQSNPRRGIAKRLVRTALKQAARKREMRYDDLKKVEKGVRRFFHDDITVVVVYIDHGLLQQRDASLPELSVRGFVDSVGPSRFSGVTAIS

SEQ ID NO: 94445 - protein, 175 aa, Setaria italica
  Transcript Sequence Number=SeqID_28471
  Gene Ontology: Mol. function=solute:hydrogen antiporter activity; Cellular component=integral to membrane; Biological process =regulation of pH
  Homolog annotation: Hit_ID=Q10B66; Match level="QueryCoverage=100%, HitCoverage=22%, E-value=3e-62, Identity=73%"; Hit description =Cation/hydrogen exchanger, putative
VIAEIIGGILLGPSALGRSKVFLDHVFPPESLTVLDTLANIGLLFFLFLVGLELDPASLRRTGRRAFAIAVAGISLPFAFGVGSSLALRAAIDPGAPRGPLVVFMGVALSITAFPVLARILAELKLLTTDLGRMAMSAAAVNDITAWILLALAIALSGSGSPFVSIYVLLCGIGF

SEQ ID NO: 94446 - protein, 86 aa, Setaria italica
  Transcript Sequence Number=SeqID_28472
IAKYYIVMQELQKMVNSPFEDTNIVWKTFITIKCHNLTSQLATKTTKLLELEEHGTTVRDWELIRSSVRSERLFVQSNHNHEGYII

SEQ ID NO: 94447 - protein, 108 aa, Setaria italica
  Transcript Sequence Number=SeqID_28473
  Gene Ontology: Mol. function=plastoquinol-plastocyanin reductase activity; Cellular component=integral to membrane; Biological process=electron transport chain
  Homolog annotation: Hit_ID=B4FSD8; Match level="QueryCoverage=96%, HitCoverage=45%, E-value=4e-55, Identity=96%"; Hit description =Cytochrome b6-f complex iron-sulfur subunit
  Pfam annotation: Domain name=Rieske; Domain location=1-84; Score =57.7; E_value=4.3e-14; Accession=PF00355.18; Description=Rieske [2Fe- 2S] domain
RPQTDRTLAQGLKGDPTYLVVEQDKTLATYGINAVCTHLGCVVPWNSAENKFICPCHGSQYNNQGRVVRGPAPLSLALVHADVDDGKVLFVPWVETDFRTGEDPWWKA

SEQ ID NO: 94448 - protein, 224 aa, Setaria italica
  Transcript Sequence Number=SeqID_28474
  Gene Ontology: Mol. function=plastoquinol-plastocyanin reductase activity; Cellular component=integral to membrane; Biological process=electron transport chain
  Homolog annotation: Hit_ID=B4FSD8; Match level="QueryCoverage=100%, HitCoverage=100%, E-value=1e-108, Identity=88%"; Hit description =Cytochrome b6-f complex iron-sulfur subunit
  Pfam annotation: Domain name=CytB6-F_Fe-S; Domain location=52-90; Score=81.5; E_value=3e-21; Accession=PF08802.2; Description =Cytochrome B6-F complex Fe-S subunit
  Pfam annotation: Domain name=Rieske; Domain location=108-200; Score =70.2; E_value=7.8e-18; Accession=PF00355.18; Description=Rieske [2Fe- 2S] domain
  Pfam module annotation: Pfam domain module=CytB6-F_Fe-S::Rieske; Domain location=52-90::108-200
  Subcellular localization annotation: CTP_CleavageSite=42; ConfidenceScore=5.48e-01
MAASTALSTAANPTQLCRPRAASSLGKPVKGLGLGMGRRSITCQAASSIPADRVPDMEKRKLMNLLLLGAISLPTVGMVVPYGAFFIPAGSGSAGGGTYAKDKLGNDIKVDEWLKTHGPNDRTLAQGLKGDPTYLVVEQDKTLATYGINAVCTHLGCVVPWNSAENKFICPCHGSQYNNQGRVVRGPAPLSLALVHADVDDGKVLFVPWVETDFRTGEDPWWKA

SEQ ID NO: 94449 - protein, 41 aa, Setaria italica
  Transcript Sequence Number=SeqID_28475
QYKSLLILTERVLLISAASSSIRLLQKNHTFVHDCNFRCSR

SEQ ID NO: 94450 - protein, 125 aa, Setaria italica
  misc_feature (113)..(113): Xaa can be any naturally occurring amino acid
  Transcript Sequence Number=SeqID_28476
  Gene Ontology: Biological process=cell division
  Homolog annotation: Hit_ID=Q0E474; Match level="QueryCoverage=98%, HitCoverage=27%, E-value=8e-54, Identity=80%"; Hit description =Cyclin-T1-1
  Pfam annotation: Domain name=Cyclin_N; Domain location=1-124; Score =10.1; E_value=0.00042; Accession=PF00134.15; Description=Cyclin, N -terminal domain
REEIERGSPSRRDGVGAAKEAELRATYCCFIRDVCTRLQLPQITVATAILLCHRFYLRQSHAKNEWQTIATVCIFLASKIEDTPCLLKHVVIAAYETMYRKNPDAAKRIHQEXVLAKQKDLILGW

SEQ ID NO: 94451 - protein, 186 aa, Setaria italica
  Transcript Sequence Number=SeqID_28477
QRTDKENQYRRTNEQNQYRWTDEQNQHRRTDEQNQYRRRTNEENQHRRTYEQNQHRRTYEENQHRQTYEENQHRRMNEEKQCWRVNEEKQCRQTNEENQYRRTNEENQYQRTHTNHNLVPVDQRIEKPSYRGTLKVDRGYRATIIMDLTRKKRRIQEVGRFPAPVYISDTNDWRIGSLKKQKLERR

SEQ ID NO: 94452 - protein, 126 aa, Setaria italica
  Transcript Sequence Number=SeqID_28478
  Gene Ontology: Biological process=cell division
  Homolog annotation: Hit_ID=Q0E474; Match level="QueryCoverage=65%, HitCoverage=19%, E-value=2e-33, Identity=78%"; Hit description =Cyclin-T1-1
MDGDAWEGGGGRARSWYLSREEIERGSPSRRDGVGAAKEAELRATYCCFIRDVCTRLQLPQITVATAILLCHRFYLRQSHAKNEWQVNICVPSTNCTHPARIRLMAQPDISLRFYMHPALHISSLE

SEQ ID NO: 94453 - protein, 365 aa, Setaria italica
  Transcript Sequence Number=SeqID_28479
  Gene Ontology: Cellular component=nucleus; Biological process=cell division
  Homolog annotation: Hit_ID=Q0E474; Match level="QueryCoverage=68%, HitCoverage=55%, E-value=1e-84, Identity=64%"; Hit description =Cyclin-T1-1
FFWSNLIELEAALINNTRSTIATVCIFLASKIEDTPCLLKHVVIAAYETMYRKNPDAAKRIHQEEVFAKQKDLILVGETLLLSTIRFDFNIQHPYEPLKLALKNLGICQKEVRQRAMSFINDTLPTTLVVQFKPHFIAAGSLFHAAKFHNFVLPSQNGKVWWNEFDVAPKQLQAVIQQMSELLFKKRDPCSMVSANKPVPTPIPTPTPMDKHQIKPPPTPALMDKQTIKPIPTPTLTDRQQKIRTPAPALRHTQSSMRSFSSSNTKASSCVTVGSSFDKLTSSSASNEENRYRWTDEENQYRQRTDKENQYRRTNEQNQYRWTDEQNQHRRTDEQNQYRRRTNEENQHRRTSNWLKLLVWLTLSF

SEQ ID NO: 94454 - protein, 61 aa, Setaria italica
  Transcript Sequence Number=SeqID_28480
  Gene Ontology: Mol. function=catalytic activity; Biological process =metabolic process
  Homolog annotation: Hit_ID=Q6K821; Match level="QueryCoverage=95%, HitCoverage=7%, E-value=5e-13, Identity=63%"; Hit description =Phosphatidylinositolglycan-like
YFYSQKPFYLLISAILLMTMSCLCLMGTVSRVFNGQSLSQADHHSESYLNQHWHLDEVFIL

SEQ ID NO: 94455 - protein, 362 aa, Setaria italica
  misc_feature (31)..(31): Xaa can be any naturally occurring amino acid
  misc_feature (93)..(93): Xaa can be any naturally occurring amino acid
  misc_feature (355)..(355): Xaa can be any naturally occurring amino acid
  Transcript Sequence Number=SeqID_28481
  Gene Ontology: Mol. function=catalytic activity; Cellular component =endoplasmic reticulum membrane; Biological process=metabolic process
  Homolog annotation: Hit_ID=Q6K821; Match level="QueryCoverage=58%, HitCoverage=28%, E-value=2e-75, Identity=67%"; Hit description =Phosphatidylinositolglycan-like
KSAEARYIGIAVDNYYGFLRYASEWLSHKAXQKPFYLLISAILLMTMSCLCLMGTVSRVFNGQSLSQADHHSESYLNQHWHLDEVFILTGIFXYVISLGSSSFVEEEQYTWNFLTSTLYLIFLIKTVQSMLKGSSSTLVHRAEGESSDGNKELTPGKRDGYKLCTVLIVLVAGRVIRAWHQGGINWVHFPDISKLLAQADSSIVKFLQTISVLAVVALYSVSLMLLRARSKVLIGVWLSHISCGPLVLLHIWEDQINTTLPINHSTTSTARLFYAIASVSISATLLASPWIFPVYSTEAKPASSDSNPVKDTDSCGISNSVFLTGITYTMFWCLLQLLLQQPINAIPLLLIFLQXVSSVAHF

SEQ ID NO: 94456 - protein, 89 aa, Setaria italica
  Transcript Sequence Number=SeqID_28482
  Subcellular localization annotation: CTP_CleavageSite=65; ConfidenceScore=5.34e-01
RNRRHRRGPTLTTSPSLLPLLPPLPRAQSLLQLISSLASNLFELSPNRAAWISAYRGSLPTFLPSASSSPPPPLPTPISSTKDALSLLT

SEQ ID NO: 94457 - protein, 341 aa, Setaria italica
  misc_feature (184)..(184): Xaa can be any naturally occurring amino acid
  Transcript Sequence Number=SeqID_28483
  Gene Ontology: Mol. function=DNA topoisomerase (ATP-hydrolyzing) activity; Cellular component=mitochondrion; Biological process=DNA topological change
  Homolog annotation: Hit_ID=Q5NBJ3; Match level="QueryCoverage=100%, HitCoverage=46%, E-value=1e-150, Identity=76%"; Hit description=DNA gyrase subunit B, chloroplastic/mitochondrial
  Pfam annotation: Domain name=DNA_gyraseB; Domain location=240-341; Score=23.2; E_value=5e-09; Accession=PF00204.17; Description=DNA gyrase B
  Pfam annotation: Domain name=HATPase_c; Domain location=41-190; Score= 105.1; E_value=2.4e-28; Accession=PF02518.18; Description=Histidine kinase-, DNA gyrase B-, and HSP90-like ATPase
  Pfam module annotation: Pfam domain module=DNA_gyraseB::HATPase_c; Domain location=240-341::41-190
SAASEAMQEKRVAGEYTAANVQVLEALDGVRTRPGMYIGSTGPRGLHHLVYEILDNAVDEAQAGHASKINVVLHDDNSVSVTDNGRGIPTDIHPQTKKSCVETVLTLMHAGGKFGGSKSGYSVSGGLHGVGLSVVNALSEALEVTVWRDGKEYRQSYSRGKPLTTLNSITLSGETSSIFTTTIXFWPDKDIFTTTISFDFNTISSRIRELAFLNPELTITLTKEEGHTEVQHNEYCYAGGLVEYVKWLNTDKKPLHDPIAYRKELDGITVDVSLQWCSDSYSDTVLGYANSIRTIDGGTHIEGLKASLTRTINNLAKKSKTIKDKDITLSGEHVREGMTCV

SEQ ID NO: 94458 - protein, 60 aa, Setaria italica
  Transcript Sequence Number=SeqID_28484
MAMSDTGSSFAQWAELYHHDPSLPTADDIVAASSPGDMFAAATAAASPPTSGGSGGSPTK

SEQ ID NO: 94459 - protein, 88 aa, Setaria italica
  Transcript Sequence Number=SeqID_28485
GHSSHVGITSFCFLSAYGFVKVESPCLIECGREPCCLFSLPSRSCSSDVYVNCSEVHWRKGSMVAAIATKVCNNLIFLMPVFVVTLYD

SEQ ID NO: 94460 - protein, 93 aa, Setaria italica
  misc_feature (72)..(72): Xaa can be any naturally occurring amino acid
  Transcript Sequence Number=SeqID_28486
  Gene Ontology: Mol. function=4 iron, 4 sulfur cluster binding; Cellular component=intracellular; Biological process=base-excision repair
  Homolog annotation: Hit_ID=B6TQ62; Match level="QueryCoverage=91%, HitCoverage=17%, E-value=5e-39, Identity=89%"; Hit description=A/G -specific adenine DNA glycosylase
  Pfam annotation: Domain name=EndIII_4Fe-2S; Domain location=35-51; Score=19.9; E_value=0.01; Accession=PF10576.1; Description=Iron -sulfur binding domain of endonucle
MYIFFHHRELAGQLVDPLRPGDFNQAMMELGATLCSKTKPGCTGCPVSSHCQALALSLENSSVQVTDFPRVXLPKAKPRSDFAAVCVVQIAQG

SEQ ID NO: 94461 - protein, 250 aa, Setaria italica
  Transcript Sequence Number=SeqID_28487
  Gene Ontology: Mol. function=nucleoside-triphosphatase activity
  Homolog annotation: Hit_ID=B9RLP5; Match level="QueryCoverage=100%, HitCoverage=12%, E-value=7e-53, Identity=48%"; Hit description =Activating signal cointegrator 1 complex subunit 3, helc1, putative
QAYKQFIGAVVELLNGEVVSEELHEVAQTVFALFGGDDTEYDAAQRAFVKRNELERLVGYTVQDSVLRKLAQLAQKLGSLLRASSHEFIHRIADDVDENERREFGADFDFKPPARFFIDVSLDIPLESAELGSETFLKGQYDGWSTSATRNSTAVRGSVSLRWLKDQCDLITRSGGSLSGDELAMTLCRVLISNKAGDEIAGELLDLAGDTAFEIVQDLLLHRKELVDAIQHGLAILKSEKMTSSNQPKM

SEQ ID NO: 94462 - protein, 87 aa, Setaria italica
  Transcript Sequence Number=SeqID_28488
  Homolog annotation: Hit_ID=Q43557; Match level="QueryCoverage=100%, HitCoverage=22%, E-value=1e-24, Identity=58%"; Hit description =Unidentified
  Pfam annotation: Domain name=DUF642; Domain location=1-87; Score= -149.6; E_value=0.0039; Accession=PF04862.4; Description=Protein of unknown function, DUF642
LIDSIAIKNLSPPRREKGNMLRNGDFEEGPFIFPDTAWGALVPPMDEDDVCPLPGWMVMSDTKVVKYVDAAHHAVPRGARGVELVAG

SEQ ID NO: 94463 - protein, 62 aa, Setaria italica
  Transcript Sequence Number=SeqID_28489
MGGGGMVFEPHAGAAVGGGDVVFCVAIALLSLLSMIIFAAAAGGEGKPRRSGRASGPVFVGG

SEQ ID NO: 94464 - protein, 57 aa, Setaria italica
  Transcript Sequence Number=SeqID_28490
VPEHELPPLPKVELPPKPEVPTFPDVHLPPFPEVELPPKPEMPTVPEFHFPVPEAKP

SEQ ID NO: 94465 - protein, 373 aa, Setaria italica
  misc_feature (14)..(14): Xaa can be any naturally occurring amino acid
  Transcript Sequence Number=SeqID_28491
  Gene Ontology: Mol. function=metalloendopeptidase activity; Cellular component=chloroplast; Biological process=proteolysis
  Homolog annotation: Hit_ID=B6UCS1; Match level="QueryCoverage=100%, HitCoverage=67%, E-value=1e-173, Identity=82%"; Hit description =Metalloendopeptidase
  Pfam annotation: Domain name=Peptidase_M50; Domain location=127-308; Score=63.7; E_value=7e-16; Accession=PF02163.14; Description =Peptidase family M50
LKDQVFGFDTFFVXTSQEPYEGGVLFKGNLRGKPAKSYEKITNRLENKFGDQYKLFLLVNPEDEKPVAVVIPRQTLQPETTAVPEWFAAASFGLVTIFTLLLRNVPVLQDNLLSTFDNLELLKDGLSGALVTGLIIGVHEIGHILAARESGIKLGVPYFVPSWQIGSFGAITRIINIVRNREDLLKLAAAGPLAGFSLGFVLLLLGFILPPSDGLGLIIDPTVFHESFLVGGLAKLLLGDALKEGTQLSINPLVLWAWAGLLINAINSIPAGELDGGRIAFAMWGRKISSRLSSLTIGLLGIAALFNDVAFYWVVLIFFLQRGPIAPLSEEITDPENNYIGIGIAVLLFGLLICLPYPFPFDPSQLTDIDFDF

SEQ ID NO: 94466 - protein, 64 aa, Setaria italica
  Transcript Sequence Number=SeqID_28492
  Subcellular localization annotation: CTP_CleavageSite=47; ConfidenceScore=5.21e-01
PSCGRPGSLGGHRSPAARRHGDSTCLSRHLHRDASLFPVTAFPTPARRSTPSDPSTFSPIATAA

SEQ ID NO: 94467 - protein, 103 aa, Setaria italica
  Transcript Sequence Number=SeqID_28493
  Gene Ontology: Mol. function=nucleic acid binding; Cellular component= nucleus; Biological process=nuclear-transcribed mRNA poly(A) tail shortening
  Homolog annotation: Hit_ID=Q8LG48; Match level="QueryCoverage=99%, HitCoverage=50%, E-value=3e-34, Identity=65%"; Hit description =Contains similarity to poly(A)-binding protein II
  Pfam annotation: Domain name=RRM_1; Domain location=1-61; Score=40.0; E_value=9.5e-09; Accession=PF00076.14; Description=RNA recognition motif. (a.k.a. RRM, RBD, o
AFLPEEVQQHFQFCGTINRVTILTDSFGQPKGFAYVEFDEVEAVQNALLLNETELHGRPLKVCPKRTNIPGMKQSRGRHPFYPSYGKVPRFRRFLGYSYSPYY

SEQ ID NO: 94468 - protein, 94 aa, Setaria italica
  misc_feature (41)..(41): Xaa can be any naturally occurring amino acid
  misc_feature (49)..(49): Xaa can be any naturally occurring amino acid
  Transcript Sequence Number=SeqID_28494
QGLALAWKEELHTDIVVKPGTGAPIPAHKAILVSGPFSILXGPPLKFKXAHPTRARAGREVRGVAPRPVRRRALQGRRRRLHLPPRALPRRALP

SEQ ID NO: 94469 - protein, 49 aa, Setaria italica
  Transcript Sequence Number=SeqID_28495
TLQAQTKQELVMQLVNGEFIEQNSVMSRPLVTHLYHHLNNPYSCSLLTN

SEQ ID NO: 94470 - protein, 86 aa, Setaria italica
  Transcript Sequence Number=SeqID_28496
LLQIKDSVSLGFATNIEAAGDDQLKQIQPEGTQKGLGRNIAPSWEDVLHSSSGLPTPSIYQSDVQYQQNSEYHPPGSLDSSDLRIQ

SEQ ID NO: 94471 - protein, 90 aa, Setaria italica
  Transcript Sequence Number=SeqID_28497
  Subcellular localization annotation: CTP_CleavageSite=53; ConfidenceScore=5.32e-01
MVLNFSPLLSFSPLPRRAKSGPPALLALPHPYCPPAPPRRTRVLHSCHNRTPSCSSIPYPHPCPSAPPPRRNATIHRPQLMPSSCRPTVV

SEQ ID NO: 94472 - protein, 156 aa, Setaria italica
  Transcript Sequence Number=SeqID_28498
  Gene Ontology: Mol. function=protein binding
  Homolog annotation: Hit_ID=Q2RBG8; Match level="QueryCoverage=91%, HitCoverage=52%, E-value=3e-50, Identity=72%"; Hit description =BTB/POZ domain containing protein, expressed
  Pfam annotation: Domain name=BTB; Domain location=3-79; Score=-10.5; E_value=0.1; Accession=PF00651.23; Description=BTBPOZ domain
EVLRHVLSGDEHCKAAAGDSISLPELSHDELSLLLAFLYTGALEQDLPERHLHALLVAADKYDVPFLRRACEARLAAAVEPRNVLRTLEVADLSSSAALRERAMDTVVEHAEQVVFSAEYEEFAVRNAGLCVEITRALLASMSATTTNKEPCIEDV

SEQ ID NO: 94473 - protein, 63 aa, Setaria italica
  Transcript Sequence Number=SeqID_28499
NKICYCCCRKRDFGLGLKATAKNIKGILDGLAEHSKLECAGEVLPCLFLYLTASIVPALLCSE

SEQ ID NO: 94474 - protein, 97 aa, Setaria italica
  Transcript Sequence Number=SeqID_28500
  Subcellular localization annotation: CTP_CleavageSite=20; ConfidenceScore=5.38e-01
STPAPVPAAVPTFSSIPAPKSSTGKPKRVVQYRPQPIRQPTGDSSDDEEDDAKKRRASAAEARLPPVSAGSGPVSSFLPPPKHSLGLGSGLGAGARR

SEQ ID NO: 94475 - protein, 123 aa, Setaria italica
  misc_feature (88)..(88): Xaa can be any naturally occurring amino acid
  misc_feature (100)..(100): Xaa can be any naturally occurring amino acid
  Transcript Sequence Number=SeqID_28501
MEALEVNVCAASQSLLGLSEGIQDDSSCIDSGKVTCGTPPAILKKVKEDKPLIVNRSHKGQMSLGDTQQKVPAPVSRSSTSKYLRMEXTIVDTTTPIESXKVAASKFGGSINWKTRRSQTAQD

SEQ ID NO: 94476 - protein, 69 aa, Setaria italica
  Transcript Sequence Number=SeqID_28502
  Subcellular localization annotation: CTP_CleavageSite=41; ConfidenceScore=5.15e-01
FAKKWELNDVFNGNNLYAMVISEGSSAAYSSLFWRRTKRSRAKRPRNRGRTALKSSWAVSTIPPIWWPS

SEQ ID NO: 94477 - protein, 121 aa, Setaria italica
  Transcript Sequence Number=SeqID_28503
  Subcellular localization annotation: CTP_CleavageSite=18; ConfidenceScore=5.21e-01
FSAAPVFVIAALWFVAVAAAALVSCCCRCCRGGGNSNYSYSRRVFALSLVLLIVFTASAIIGCAVLYHGQGKLHGSTTATLDYVVSQADGAAATMRDFTGLLETAKSAGGSVASLPPDVAR

SEQ ID NO: 94478 - protein, 316 aa, Setaria italica
  Transcript Sequence Number=SeqID_28504
  Homolog annotation: Hit_ID=B4FW40; Match level="QueryCoverage=96%, HitCoverage=77%, E-value=1e-160, Identity=87%"; Hit description =Membrane related protein-like
  Pfam annotation: Domain name=START; Domain location=1-200; Score= -23.3; E_value=0.01; Accession=PF01852.11; Description=START domain
VRSLGVGSREPETEGWEHVISKGNDDVSYRVWCDKPTAGPPKYLSITTYERCSTEQLRDFYMDNEYRMEWDKTVTKHEQLQYDENSGVEVGRTIKKFPLLTPREYILAWRVWEANDKSFYCFIKECEHPLAVRQKKFVRVRLLRSGWCIRKIPGRDACQITVLHHEDNGMNIEMAKLAFSKGIWNYICKMNNALRRYPQHRSPSVSILTMQRLTKKFPQDLEAAMNASLPASQTTAATVVPSTRTSPCKLPGKKSSRQMIASGLLLVGSIVCLSRGRSNLGAQLAMALFLKKAFKQERESGSSTSRGKTNVTRSRR

SEQ ID NO: 94479 - protein, 79 aa, Setaria italica
  Transcript Sequence Number=SeqID_28505
  Subcellular localization annotation: CTP_CleavageSite=7; ConfidenceScore=5.57e-01
PGSHRRRAQNLASPSPPSSPGSVPKILHNLFHSPDHRGSGAPSPRAALSRSPNPPPRPIAPPTPPNTLRRPLSTSRSVA

SEQ ID NO: 94480 - protein, 148 aa, Setaria italica
  misc_feature (140)..(140): Xaa can be any naturally occurring amino acid
  Transcript Sequence Number=SeqID_28506
  Gene Ontology: Mol. function=protein serine/threonine kinase activity; Biological process=protein amino acid phosphorylation
  Homolog annotation: Hit_ID=Q69MN9; Match level="QueryCoverage=96%, HitCoverage=17%, E-value=2e-41, Identity=58%"; Hit description =Putative receptor kinase 5
KGIKQKRRKHRILVLGDLSDPKGFGEGSPTEGYEFPVVSFRDIIAATDNFHESCMIGKEVLESLQGNLDGQEVAIKRLSRDSEQGIVEFRNEVVLIAKLQHRNLVKFLGCSIEGDEKLLIFEHMPNKSLDALLFSATRKXRLDWPTTG

SEQ ID NO: 94481 - protein, 49 aa, Setaria italica
  Transcript Sequence Number=SeqID_28507
HLPLVLFLPKKKTNLLRYHFKLLTDPFMLCFGTNQQPSWLFVGSRNPTE

SEQ ID NO: 94482 - protein, 902 aa, Setaria italica
  Transcript Sequence Number=SeqID_28508
  Gene Ontology: Mol. function=protein transporter activity; Cellular component=nuclear pore; Biological process=protein import into nucleus, docking
  Homolog annotation: Hit_ID=B9RKV8; Match level="QueryCoverage=31%, HitCoverage=85%, E-value=1e-111, Identity=71%"; Hit description =Importin beta-4, putative
  Pfam annotation: Domain name=HEAT; Domain location=10-47; Score=36.5; E_value=1.1e-07; Accession=PF02985.14; Description=HEAT repeat
  Pfam annotation: Domain name=HEAT; Domain location=189-225; Score =15.1; E_value=0.3; Accession=PF02985.14; Description=HEAT repeat
  Pfam annotation: Domain name=HEAT; Domain location=230-266; Score =31.4; E_value=3.7e-06; Accession=PF02985.14; Description=HEAT repeat
  Pfam annotation: Domain name=HEAT; Domain location=272-307; Score =28.6; E_value=2.5e-05; Accession=PF02985.14; Description=HEAT repeat
  Pfam annotation: Domain name=HEAT; Domain location=357-392; Score =4.2; E_value=15; Accession=PF02985.14; Description=HEAT repeat
  Pfam annotation: Domain name=HEAT; Domain location=519-555; Score =1.6; E_value=31; Accession=PF02985.14; Description=HEAT repeat
  Pfam annotation: Domain name=HEAT; Domain location=570-607; Score =18.1; E_value=0.036; Accession=PF02985.14; Description=HEAT repeat
  Pfam annotation: Domain name=HEAT; Domain location=58-94; Score=3.9; E_value=16; Accession=PF02985.14; Description=HEAT repeat
  Pfam annotation: Domain name=HEAT; Domain location=714-750; Score =24.3; E_value=0.00051; Accession=PF02985.14; Description=HEAT repeat
  Pfam annotation: Domain name=HEAT; Domain location=755-793; Score =2.9; E_value=22; Accession=PF02985.14; Description=HEAT repeat
  Pfam annotation: Domain name=HEAT; Domain location=838-876; Score =3.8; E_value=17; Accession=PF02985.14; Description=HEAT repeat
  Pfam annotation: Domain name=HEAT_PBS; Domain location=210-246; Score= 5.8; E_value=16; Accession=PF03130.8; Description=PBS lyase HEAT-like repeat
  Pfam annotation: Domain name=HEAT_PBS; Domain location=251-287; Score= 10.9; E_value=2.7; Accession=PF03130.8; Description=PBS lyase HEAT -like repeat
  Pfam annotation: Domain name=HEAT_PBS; Domain location=384-410; Score= 1.0; E_value=83; Accession=PF03130.8; Description=PBS lyase HEAT-like repeat
  Pfam module annotation: Pfam domain module=HEAT::HEAT::HEAT::HEAT::HEA T::HEAT::HEAT::HEAT::HEAT::HEAT::HEAT::HEAT_PBS::HEAT_PBS::HEAT_PBS; Domain location=10-47::189-225::230-266::272-307::357-392::519 -555::570-607::...
  Pfam module annotation: Domain location=58-94::714-750::755-793::838 -876::210-246::251-287::384-410
LTETIGATFQSHLNDLQPVLLKCLQDETSSRVRIAALKAVGSFIEYVNDGGDIVKMFRDFVPSILNVSRQCLANGEEDVASIAFEIFDELIESPAPLLGDSVRSIVQFSLEVSANQDLEINIRQQAIQIVSWLAKFKASFLKKHKLVVPILQVMCPLLTETANEDEDSDLAADRSAAEVIDTMAINLPRHVLAPVLEFASVSFHHTNPKYREAAVTSLGVISEGCCEHLKDKLEDCLKIVLEALKDQEQMVRGAASFALGQFAEHLQPEILSHYANVLPCILNALEDPSDEVKEKSYYALAAFCEDMGEDILPYLDPLICRLVMSLQSSPRNLQETCMSAIGSVAAAAEQAFTPYAEKVLEMMKGFMVLTNDEDLCARARATEVVGIVAMAVGRARVEAILPPFIEAAISGFGLDYSELREYTHGFFSNVAEILGDNFTQYLPHVVPLVFSSCNLDDGSAVDIDDADSVENGFGGVSSDEDNDEPRVRNISVRTGVLDEKAAATQAIGFFALHTKSAYAPYLEESLKILIRHSGYFHEDLRLQAVISLKHILTAVRAIPPTHADVLEKQKDVLDTVLNIYIKTMTEDDDKEVVAQACMSVADIVKDCGFAAIEPYMLRFAEATLVLLRQESSCQQVESDGEDDGDIDHDEVLMDAVSDLLPAFAKVMGSYFDPIFAKLFDPLMKFAKSPHPPQDKTMVVATLAEVAQEMGAPISAYVDKIMPLVLKELASSDATNRRNAAFCVGEICKNGGAAALKYYGDILRSLHNLFSNSESDDAVRDNAAGAIARMVMVQPQSIPLNQVLPVFIKALPLKEDHEESMPVYSCICSLLLSSHPQILPLVPDVIHVFAQVVVSPDESDEVKTNIGKAVSHLISVYGQQMQPILSALPPAHANALAAFASRR

SEQ ID NO: 94483 - protein, 81 aa, Setaria italica
  Transcript Sequence Number=SeqID_28509
VPIYRYHLSYFSTERWAASRYHTLLDLECEELGHMCSVNLHKCIIISIYAFKFLLKKYFNVPFCRRNGINIRVVSERNVCS

SEQ ID NO: 94484 - protein, 214 aa, Setaria italica
  Transcript Sequence Number=SeqID_28510
  Homolog annotation: Hit_ID=Q9SGY3; Match level="QueryCoverage=93%, HitCoverage=57%, E-value=6e-20, Identity=34%"; Hit description =F20B24.10
PPPPVVTIYFGLGTALSIYGCSKFADENVAAARADMELGTTYITHAAAAKPSFDEHDGTREIAGFWGYLLQIIYQANAGAVMLTDCVFWFIIFPFLTVKDYNLNFLLIGMHSVNAVFLLGEAALNSLSFPWFRIAYFFLWTALYVIFQWIVHAATPIWWPYPFLDLSSNLAPLWYLAVAVMQLPCYVVFRLVIKLKHHLLAKWFPGSFVRLRGY

SEQ ID NO: 94485 - protein, 81 aa, Setaria italica
  Transcript Sequence Number=SeqID_28511
  Gene Ontology: Mol. function=binding; Cellular component =mitochondrial inner membrane; Biological process=transport
  Homolog annotation: Hit_ID=B6TIB3; Match level="QueryCoverage=100%, HitCoverage=24%, E-value=7e-25, Identity=74%"; Hit description =Mitochondrial carrier-like protein
MSFGSARVDEHGGDVEEARCMPAEVSWEMLDKSRFFVLGAALFSGVSAALYPAVVLKTHLQVAPPPQAAASAAAAAILRRD

SEQ ID NO: 94486 - protein, 57 aa, Setaria italica
  Transcript Sequence Number=SeqID_28512
SGHPSPAAAPKMELGHSATADTPAGAAGGSFGSLLCGAVVDEQPPFWPWTDGHHSFQ

SEQ ID NO: 94487 - protein, 80 aa, Setaria italica
  Transcript Sequence Number=SeqID_28513
  Subcellular localization annotation: CTP_CleavageSite=36; ConfidenceScore=5.52e-01
CRVGLVFRLVLVFLSVVRSFVRSLVRPFLGPGRGPTATTASSDRTSSSARINETMHVTNDQRKLRVIDQCGSPFLGIDQC

SEQ ID NO: 94488 - protein, 206 aa, Setaria italica
  Transcript Sequence Number=SeqID_28514
  Gene Ontology: Mol. function=calcium ion binding
  Homolog annotation: Hit_ID=B6T6R3; Match level="QueryCoverage=93%, HitCoverage=83%, E-value=1e-79, Identity=75%"; Hit description =Calcium ion binding protein
  Pfam annotation: Domain name=efhand; Domain location=149-177; Score =14.1; E_value=0.61; Accession=PF00036.24; Description=EF hand
  Pfam annotation: Domain name=efhand; Domain location=59-87; Score =32.5; E_value=1.7e-06; Accession=PF00036.24; Description=EF hand
  Pfam annotation: Domain name=efhand; Domain location=95-123; Score =8.0; E_value=2.8; Accession=PF00036.24; Description=EF hand
  Pfam module annotation: Pfam domain module=efhand::efhand::efhand; Domain location=149-177::59-87::95-123
MGIVASMCMEPIKRRRVEKDLDDKVAAALRERARSRQRTFRSVNSITMRLPRFKDGLRDIKDVFDQYDENSDGTIDNEELRRCLGKLQVQMSDEEADDVHRYCDIDRRNGIQFQEFVVLLCLMYLLFGPDVTRRVSEFESAKLNYVFDELIDAFLFFDKDGDGKMKRKDVTQRMNEESHQERTPSHITAQLFSTTLYSSCHSFHPS

SEQ ID NO: 94489 - protein, 138 aa, Setaria italica
  Transcript Sequence Number=SeqID_28515
  Gene Ontology: Cellular component=exocyst; Biological process =exocytosis
  Homolog annotation: Hit_ID=Q53PU2; Match level="QueryCoverage=97%, HitCoverage=19%, E-value=2e-47, Identity=69%"; Hit description=Exo70 exocyst complex subunit family protein, expressed
SADGLARSIFADLARGAMLHMLSFTEAVVLMKRAAEKLFKVLDMYEAIRDVAPVVDAFVAEASAGDNDGGSAAAAMMADLKYELASVRARLGESAAAIFCDLESSIRADAGKQPVPGGAVHPLTRYLMNYLKFTCYYK

SEQ ID NO: 94490 - protein, 202 aa, Setaria italica
  misc_feature (185)..(185): Xaa can be any naturally occurring amino acid
  Transcript Sequence Number=SeqID_28516
  Gene Ontology: Mol. function=protein binding; Cellular component =clathrin adaptor complex; Biological process=intracellular protein transport
  Homolog annotation: Hit_ID=Q9SB50; Match level="QueryCoverage=100%, HitCoverage=44%, E-value=1e-92, Identity=82%"; Hit description =Clathrin coat assembly like protein
MISQFFVLSQRGDHIVFRDYRGEVPKGSAEIFFRKVKFWNDDEAEEAPPVFNVDGVNYIHVKVAGLFFVVTTMVNVSPSLLLELLQRIACVTKDYLGVLNEDSLRKNFILVYELLDEVIDFGYPQTTSTEVLKSYIFNEPIMVDAGRLPPLGPAAMFMQGTKRMPGTAVTKSVVANEPGGKKREXIFVDIIERISVTFSSSG

SEQ ID NO: 94491 - protein, 111 aa, Setaria italica
  Transcript Sequence Number=SeqID_28517
  Gene Ontology: Mol. function=ATP-dependent DNA helicase activity; Cellular component=DNA-dependent protein kinase complex; Biological process=double-strand break repair via nonhomologous end joining
  Homolog annotation: Hit_ID=Q7F1L9; Match level="QueryCoverage=79%, HitCoverage=26%, E-value=1e-40, Identity=88%"; Hit description =Putative DNA-dependent protein kinase 70 kDa DNA-binding subunit Ku70
NQCTDTAKYAALWLDLVYSQLLQKEKKNLQDLAGVYVYNVGDRDPLDRPTAKLIKDFSCIEDSFMSNIGSRYGITAGSRENTLYNALWVAQALLRKGSVKTVSKRMLIFTN

SEQ ID NO: 94492 - protein, 48 aa, Setaria italica
  Transcript Sequence Number=SeqID_28518
NAVLDEIYITFSNQIVRAAVQVVFMVLDLNIRTRSSGHGHLMKQIGFL

SEQ ID NO: 94493 - protein, 90 aa, Setaria italica
  Transcript Sequence Number=SeqID_28519
FLANYVHSPRLQADEQGRSTCSTCPLTCHNSYTRLCWWWQFISHNVFSEPVLSSFERNHRSTHSWAVQIKFTRTNTVTFESNHRSTHSWA

SEQ ID NO: 94494 - protein, 91 aa, Setaria italica
  Transcript Sequence Number=SeqID_28520
  Subcellular localization annotation: CTP_CleavageSite=70; ConfidenceScore=5.07e-01
CMQLRPCVRRCSSRLRVATLHTRSWPRAGVLAPPPTRGHKEPPRAGCRSWRRRRVGTRDLELPQTSGRSPATGGRASFVVLGSCPAANGQN

SEQ ID NO: 94495 - protein, 70 aa, Setaria italica
  Transcript Sequence Number=SeqID_28521
  Subcellular localization annotation: CTP_CleavageSite=61; ConfidenceScore=5.03e-01
MAVHVLLLAVPAVAGGFLQAFQFTFLLWPFNLALPLARHLPRACAVLRELASFYDAELRPYASGARRAVR

SEQ ID NO: 94496 - protein, 148 aa, Setaria italica
  misc_feature (132)..(132): Xaa can be any naturally occurring amino acid
  Transcript Sequence Number=SeqID_28522
  Gene Ontology: Mol. function=phosphotransferase activity, alcohol group as acceptor; Cellular component=cytoplasm; Biological process =metabolic process
  Homolog annotation: Hit_ID=UPI0000162BDC; Match level="QueryCoverage =99%, HitCoverage=14%, E-value=2e-34, Identity=49%"; Hit description =GHMP kinase-related
SQLCMDARKHQSDLAADIAKACMNYGLLGRNLFQLCEEVLQKDSCLTLCEELLSFFPSHGDQYSGVLPQSREYQVKMDLLRASGDLSTACIVEEKVWASISSETASAIKYGSKEPSSGSMSSTHGNLHPRKXFVELPVRVDFVGLSDT

SEQ ID NO: 94497 - protein, 63 aa, Setaria italica
  Transcript Sequence Number=SeqID_28523
AVKEVVIEAEKEASEVAGEGLQLVAGAELAGDGLVQAAVVAGAEALGVVVGLSVVNGILKPEA

SEQ ID NO: 94498 - protein, 166 aa, Setaria italica
  Transcript Sequence Number=SeqID_28524
  Gene Ontology: Mol. function=calcium ion binding
  Homolog annotation: Hit_ID=B6SS50; Match level="QueryCoverage=93%, HitCoverage=91%, E-value=7e-65, Identity=74%"; Hit description=EF hand family protein
MSSSSKPNFFGRAWNRARGKSDVERICKKVFDDLADEKTELLHIDSLHVATLMVYNSINKQLGSPHKDPPCLKIIGEKVEEYRAKEGIAFTEFQEMILKWVEKDLRLVLVNKAGFAIMAAPLFAVTAKSAGRQVPRVGDAVDKVPTPLIAAAFSIGLLFLQDVWLW

SEQ ID NO: 94499 - protein, 124 aa, Setaria italica
  Transcript Sequence Number=SeqID_28525
  Homolog annotation: Hit_ID=Q8LMN7; Match level="QueryCoverage=76%, HitCoverage=29%, E-value=8e-12, Identity=38%"; Hit description=F-box domain containing protein, expressed
FFSFGCRHGLALLVDRAQLEAVVWNPVTGTRRRVPFPPGFNQGHVYKGAVLSSSGDGHVHGDCRLIPFKLVLVHHAELHGSVATACLYESESREWGNVCSTAIPRLSLHQPGVLVGNQIYWMLS

SEQ ID NO: 94500 - protein, 88 aa, Setaria italica
  Transcript Sequence Number=SeqID_28526
  Gene Ontology: Mol. function=peptidyl-prolyl cis-trans isomerase activity; Cellular component=endoplasmic reticulum lumen; Biological process=protein folding
  Homolog annotation: Hit_ID=B6SYF5; Match level="QueryCoverage=65%, HitCoverage=39%, E-value=2e-11, Identity=58%"; Hit description=FK506- binding protein 2-1
EFLSPPPQQRPLAITKPQLLLCLLVAAAALLLVAVAKKSGDVTELQIGVKFKPETCSIQAHKGDRVKVHYRVSLVFYLLICLLLYNLQ

SEQ ID NO: 94501 - protein, 150 aa, Setaria italica
  Transcript Sequence Number=SeqID_28527
  Gene Ontology: Mol. function=peptidyl-prolyl cis-trans isomerase activity; Cellular component=endoplasmic reticulum lumen; Biological process=protein folding
  Homolog annotation: Hit_ID=B6SYF5; Match level="QueryCoverage=98%, HitCoverage=99%, E-value=3e-64, Identity=81%"; Hit description=FK506- binding protein 2-1
  Pfam annotation: Domain name=FKBP_C; Domain location=41-135; Score =197.6; E_value=3.5e-56; Accession=PF00254.20; Description=FKBP-type peptidyl-prolyl cis-trans isomer
MAKPQLLLCLLVAAAALLLVAVAKKSGDVTELQIGVKFKPETCSIQAHKGDRVKVHYRGKLTDGTVFDSSYERGDPIEFELGSGQVIKGWDQGLLGMCVGEKRKLKIPSKLGYGPQGSPPTIPGGATLIFDTELVAVNGEPASKSDDSEL

SEQ ID NO: 94502 - protein, 65 aa, Setaria italica
  misc_feature (20)..(20): Xaa can be any naturally occurring amino acid
  misc_feature (31)..(31): Xaa can be any naturally occurring amino acid
  Transcript Sequence Number=SeqID_28528
  Subcellular localization annotation: CTP_CleavageSite=38; ConfidenceScore=5.15e-01
PVAVAGGAPEPSCDLGLCLXPGSPPAPGERXPRRPGTPSMTSEESVTTTSGGGGGREPELLNLFV

SEQ ID NO: 94503 - protein, 81 aa, Setaria italica
  Transcript Sequence Number=SeqID_28529
  Gene Ontology: Mol. function=substrate-specific transmembrane transporter activity; Cellular component=integral to membrane; Biological process=transmembrane transport
  Homolog annotation: Hit_ID=A2Q208; Match level="QueryCoverage=98%, HitCoverage=15%, E-value=2e-28, Identity=75%"; Hit description =General substrate transporter
SPVIARMLVTGLGIQCFQQITGIDALVYYSPTIFRDAGITTESQLLAATIAVGFFKTAFIALAIVLIDRVGRKPLLYVSTA

SEQ ID NO: 94504 - protein, 282 aa, Setaria italica
  Transcript Sequence Number=SeqID_28530
  Gene Ontology: Mol. function=DNA binding
  Homolog annotation: Hit_ID=Q10SS9; Match level="QueryCoverage=95%, HitCoverage=37%, E-value=5e-61, Identity=47%"; Hit description =Transposon protein, putative, Mariner sub-class
  Pfam annotation: Domain name=LacI; Domain location=238-262; Score =12.8; E_value=0.071; Accession=PF00356.13; Description=Bacterial regulatory proteins, lacI family
  Subcellular localization annotation: CTP_CleavageSite=45; ConfidenceScore=5.59e-01
MVQASAPGFVFAIPRVVQEGALNIQGQRSKKRKSPCAIMPPFPSSRMMLSPRACFRSPSVRQETSPFAIFHTPLDQGQRVTNEIDLNFAPEDYRDDSIGQENGDDPVGQANGTCDDTLGQENGGGDDPVGQEDGTGDDPLSEGNARKNLLVPNEKRRAIFEALLGRARSGNLKGSETKEVSVQFSVPIRTVQRIWKKGKGCLDQGLGVDVSTRKNRCGRKKKVVDVSKLRDILLSSRTTIDDVAKHLGVSKAKVRRMKNEGVIKRVSNTIKPYLTDNNNKDR

SEQ ID NO: 94505 - protein, 347 aa, Setaria italica
  Transcript Sequence Number=SeqID_28531
  Gene Ontology: Mol. function=transcription repressor activity; Cellular component=chloroplast; Biological process=regulation of nitrogen utilization
  Homolog annotation: Hit_ID=B7KEZ0; Match level="QueryCoverage=87%, HitCoverage=90%, E-value=3e-98, Identity=55%"; Hit description=NmrA family protein
  Pfam annotation: Domain name=3Beta_HSD; Domain location=35-230; Score= -137.1; E_value=0.089; Accession=PF01073.11; Description=3-beta hydroxysteroid dehydrogenaseisomerase family
  Pfam annotation: Domain name=DapB_N; Domain location=32-129; Score= -36.7; E_value=0.063; Accession=PF01113.12; Description =Dihydrodipicolinate reductase, N-terminus
  Pfam annotation: Domain name=Epimerase; Domain location=34-247; Score= -24.9; E_value=2.9e-05; Accession=PF01370.13; Description=NAD dependent epimerasedehydratase family
  Pfam annotation: Domain name=NAD_binding_4; Domain location=36-216; Score=-85.0; E_value=0.0017; Accession=PF07993.4; Description=Male sterility protein
  Pfam annotation: Domain name=NmrA; Domain location=34-259; Score =22.7; E_value=8.5e-10; Accession=PF05368.5; Description=NmrA-like family
  Pfam annotation: Domain name=adh_short; Domain location=32-186; Score= -58.1; E_value=0.091; Accession=PF00106.17; Description=short chain dehydrogenase
  Pfam module annotation: Pfam domain module=3Beta_HSD::DapB _N::Epimerase::NAD_binding_4::NmrA::adh_short; Domain location=35 -230::32-129::34-247::36-216::34-259::32-186
  Subcellular localization annotation: CTP_CleavageSite=49; ConfidenceScore=5.30e-01
KGGSSRCRLAVTCNAQAVAPTSIAQGTPVRPTSILVVGATGTLGRQVVRRALDEGYDVRCLVRPRPAPADFLRDWGATVVNADLSKPETIPATLVGIHTVIDCATGRPEEPIRTVDWEGKVALIQCAKAMGIQKYVFYSIHNCDKHPEVPLMEIKHCTEKFIQDSGLDYIIIRLCGFMQGLIGQYAVPILEEKSVWGTDAPTRIAYMDTQDVARLTFIAMRNEKATKKLLTFAGPRAWTTQEVITLCERLAGQDANVTTVPVAVLRFTRQLTRFFQWTNDVADRLAFSEVLSSDTVFSAPMSETYQLLGVDANDILSLEKYLQDYFTNILKKLKDLKAQSKQTDIFF

SEQ ID NO: 94506 - protein, 124 aa, Setaria italica
  Transcript Sequence Number=SeqID_28532
AAACCSNLFHASKTYSAAAPLAAEEHGGHHPRQVLLAAPGNTLSTDGMTPAAMRHGLDPATLNVYQDTVLGFLYAFLPKPPVSAAAALSGAAATEGGEGIDRISGLPDILLRRILARLPAKDGA

SEQ ID NO: 94507 - protein, 233 aa, Setaria italica
  Transcript Sequence Number=SeqID_28533
  Gene Ontology: Mol. function=transferase activity
  Homolog annotation: Hit_ID=B6SS11; Match level="QueryCoverage=99%, HitCoverage=43%, E-value=1e-106, Identity=82%"; Hit description =Glycosyltransferase
  Pfam annotation: Domain name=DUF563; Domain location=1-124; Score= -100.4; E_value=0.0084; Accession=PF04577.6; Description=Protein of unknown function (DUF563)
RRRTHCFPEAVVGLRIHDELAIDAARMPANQTIQDFRQMLDDAHRGRIQTIIEEEEKEAAAAAATVPRKQQLRGGRRSQRTKTAEGDKPRLVIVSRNGSRAIENEAELVRAAEGAGFRVAKLQPRQDTELAKIYRALNASDVMLGVHGAAMTHFLFMRPGSVFIQVVPLGTDWAAETYYGEPARRLGLRYMPYKILPSESSLCGQYAKDDPVLTDPDIVNAKGWQVTKQVYLD

SEQ ID NO: 94508 - protein, 86 aa, Setaria italica
  Transcript Sequence Number=SeqID_28534
  Gene Ontology: Mol. function=electron carrier activity; Cellular component=cytoplasmic vesicle membrane; Biological process=oxidation reduction
  Homolog annotation: Hit_ID=Q2R6X3; Match level="QueryCoverage=98%, HitCoverage=17%, E-value=5e-26, Identity=60%"; Hit description =Cytochrome P450 family protein, expressed
RELRKNFEDFLRGMLCFPIYFPGTLYYKCMKGRRNVHRILSDILKERLSTPGKKHGDLVDLLVEELRSEKPLIDENFAIDALAAIL

SEQ ID NO: 94509 - protein, 76 aa, Setaria italica
  Transcript Sequence Number=SeqID_28535
WTQQLHWHCPSLHLLQTQAAFGCSCPRKLSEAGAGSHGFCCYRCAAVAVRCRPRGIRRAYHSLFSFIPSIHPREGE

SEQ ID NO: 94510 - protein, 130 aa, Setaria italica
  misc_feature (33)..(33): Xaa can be any naturally occurring amino acid
  misc_feature (40)..(40): Xaa can be any naturally occurring amino acid
  Transcript Sequence Number=SeqID_28536
  Subcellular localization annotation: CTP_CleavageSite=14; ConfidenceScore=5.40e-01
PPWPRPTPPPPPPRSVPRSARPPTARPIPQKPXEPPPEAXSKPQPRPPPPPRPPRRNTPRNARPPRPPPTPSPRPPATPPPRPPATPPPRPTPTPRPPPTPPSTSPSMPPSQAAEPPPAPAPAPAVAYLP

SEQ ID NO: 94511 - protein, 371 aa, Setaria italica
  misc_feature (168)..(168): Xaa can be any naturally occurring amino acid
  misc_feature (318)..(318): Xaa can be any naturally occurring amino acid
  Transcript Sequence Number=SeqID_28537
  Gene Ontology: Mol. function=binding; Cellular component=integral to membrane; Biological process=transport
  Homolog annotation: Hit_ID=UPI000150580A; Match level="QueryCoverage =35%, HitCoverage=20%, E-value=2e-35, Identity=60%"; Hit description =binding
  Pfam annotation: Domain name=Mito_carr; Domain location=243-332; Score=54.4; E_value=4.3e-13; Accession=PF00153.19; Description =Mitochondrial carrier protein
ILTPCCVESSSDLRSRNCLSTPKSIYEDLSSVKKMLMLAPFSSILGASSTWSDMHSISKIGGAHYLQYRNIYSMQTEKKEKSGTSQSSKRSICEETCAASTNMDIGDDNYSSQTRSTPAELCTSSNEEAKTAHDCESSLRDTESNLEIFHDDPNRSASSVHQIEIAKXGSIMLGNQISSKACIDAHLDTLTRMSRLVADDVVLDPANADQYAYGDDMSLQHSVDKWSHEHQPTFEHRCDGAVTINRHAVAGALAGTAVSVSLHPVDTVKTIIQANSSGQSSFYHTLRRTLVERGVLGLYGGLTSKLACSAPISAILYXLTYEIVKGALLPVLPEEHHSIAHCAAGGCSSIATSFLFTPSECIKQQMQVGSQ

SEQ ID NO: 94512 - protein, 102 aa, Setaria italica
  misc_feature (90)..(90): Xaa can be any naturally occurring amino acid
  Transcript Sequence Number=SeqID_28538
  Gene Ontology: Mol. function=sequence-specific DNA binding; Cellular component=nucleus; Biological process=regulation of transcription, DNA-dependent
  Homolog annotation: Hit_ID=A9J236; Match level="QueryCoverage=82%, HitCoverage=34%, E-value=1e-22, Identity=61%"; Hit description=MIKC -type MADS-box transcription factor WM32A
MIMHGSCCILITYILMVIQGRMIHQENMELCRRVNIMSQQKMELHRKLQASEPRDVADANTSSSTPYSFSIAQDADVPSNLVQRQSHQKXGEHCKTGAPELG

SEQ ID NO: 94513 - protein, 146 aa, Setaria italica
  Transcript Sequence Number=SeqID_28539
  Gene Ontology: Cellular component=nuclear membrane; Biological process=mitotic cell cycle G2/M transition DNA damage checkpoint
  Homolog annotation: Hit_ID=B6TYC2; Match level="QueryCoverage=84%, HitCoverage=23%, E-value=1e-51, Identity=81%"; Hit description=Cell division cycle protein cdt2
  Pfam annotation: Domain name=WD40; Domain location=16-55; Score=35.1; E_value=2.8e-07; Accession=PF00400.24; Description=WD domain, G-beta repeat
GSSDGNVYLWQVDKPEDDPIVLKGHEGEATSVDWCVSEVGMIATSSDDSTVRVWSTKKMECTNVSSPTAFRKRITAPNTEYRRSASHERATTSWDAVACTSTDGKSPSGSHSPLQPRALDFGTIGSSSGLSTCHRYTFPSLEPPRM

SEQ ID NO: 94514 - protein, 44 aa, Setaria italica
  Transcript Sequence Number=SeqID_28540
FYISTKSDRWSNKTSHSCLSSSQILKICSKIDRLHLPFKFFPPT

SEQ ID NO: 94515 - protein, 89 aa, Setaria italica
  Transcript Sequence Number=SeqID_28541
YNKKKYQMEKWTYLKQQLVLRADFLIDAAVSEVVGFELTGGSPGTSCFYLPRPELVQYQEQNAVVVHEMMAGAGANFPSDYLLEVQGKT

SEQ ID NO: 94516 - protein, 773 aa, Setaria italica
  Transcript Sequence Number=SeqID_28542
  Gene Ontology: Mol. function=nucleic acid binding; Biological process= RNA processing
  Homolog annotation: Hit_ID=Q58T22; Match level="QueryCoverage=75%, HitCoverage=55%, E-value=3e-94, Identity=37%"; Hit description=FPA
  Pfam annotation: Domain name=RRM_1; Domain location=157-214; Score =24.2; E_value=0.00053; Accession=PF00076.14; Description=RNA recognition motif. (a.k.a. RRM, RBD, o
  Pfam annotation: Domain name=RRM_1; Domain location=32-96; Score =58.1; E_value=3.4e-14; Accession=PF00076.14; Description=RNA recognition motif. (a.k.a. RRM, RBD, o
  Pfam annotation: Domain name=SPOC; Domain location=351-447; Score =76.5; E_value=1e-19; Accession=PF07744.5; Description=SPOC domain
  Pfam module annotation: Pfam domain module=RRM_1::RRM_1::SPOC; Domain location=157-214::32-96::351-447
ARAAVEATRGEKVKGAAMRTEFARPARAVRNLWVGGISPSVSKEELEEEFQKFGKVEGVAFSQDQTSAYVDFEKLEDAISAHRSLNGRTLGGKELCVDFQRSKGRAEWSEASGFNGRVSGPPADKRGTGPPKGSAGSRMRDAQPTNVLWVAFPASYKVIDEEMLRQAMSAFGVVTKIKIFQTRQYAFVEFSSVVEAYNAKTNLDGHLFNDPRIQILFSNSELAPNKLDNPTSLSGFPRSEMYSSDGRHGLGSGTLQGYDPPRGGRSRHFDYGGLPTPGGILPPPESFDPREAKRMRLDAGADPYEVRAGSTSLYSAGIRHRDSSVHAEGSSSPAIRVRGTVHRTSYLEHFWRGSISKGGSPVCHARCLPITKGSDIPLPDVINCSARTGLDMLAKHYADATGFDVVFFLPDSEDDFVSYTEFLRYLGSKSRAGVVKVDAGTTLFLVPPSDFLTNVLQVDGPERLYGVVLHIPQMSAAAALRPQLTGPELQPYYDEREALPTSQRKYSIISPSDNGYSDADYRGSLREESMHHLGQLSGRPRVDEGQAVQPALAGFPTNQTAAAQVQPSVKPDIMATLAKLMPSVQSSPLIANLQQPGQQFSRQVSAAHLTNYGSMVGAQEHSTQHTAYNPEVALNLPPPPPIPTPTHSSTTTLPSQGGHSLPTQTNQQLPEQYYVPQSNYVPLAMGSHSNIQASNANNPAPPLPQVYPGPPANNQMGNLPQLQPSSHGQQQHFAPGTAQAPDEADKSKKYQATLQLAQNLLLQIQQRQSGNQP

SEQ ID NO: 94517 - protein, 95 aa, Setaria italica
  Transcript Sequence Number=SeqID_28543
  Gene Ontology: Mol. function=phosphotransferase activity, alcohol group as acceptor; Cellular component=cytoplasm; Biological process =nuclear-transcribed mRNA catabolic process, nonsense-mediated decay
  Homolog annotation: Hit_ID=Q10D72; Match level="QueryCoverage=100%, HitCoverage=2%, E-value=1e-49, Identity=94%"; Hit description =Phosphatidylinositol 3-and 4-kinase family protein, expressed
  Pfam annotation: Domain name=PI3_PI4_kinase; Domain location=1-95; Score=-47.4; E_value=0.041; Accession=PF00454.19; Description =Phosphatidylinositol 3- and 4-kinase
LLLELMNETPKQILWQEMWCASEGFRNFNSKVKRFSSSVAAMSMVGHMLGLGDRHLDNILMDFSNGDVVHIDYNICFDKGKRLKIPEIVPFRLTQ

SEQ ID NO: 94518 - protein, 158 aa, Setaria italica
  misc_feature (8)..(8): Xaa can be any naturally occurring amino acid
  Transcript Sequence Number=SeqID_28544
  Gene Ontology: Biological process=protein localization
  Homolog annotation: Hit_ID=Q6K796; Match level="QueryCoverage=99%, HitCoverage=3%, E-value=7e-75, Identity=79%"; Hit description =Vacuolar protein sorting 13C protein-like
SDTKKPFXIWRPLPRFGFASVGDCITEGFEPPTLGILFKCDTVVSERPVQFTRVAQIDRKGLDEIFFWYPVPPPGYASLGCIVTKTDEMPSKDSICCPKLSLVSQANIAEDPITRSSSSKGPNCWSIWRIENQGCTFLARPDVKKPSARLAYRIAEHA

SEQ ID NO: 94519 - protein, 72 aa, Setaria italica
  misc_feature (32)..(32): Xaa can be any naturally occurring amino acid
  Transcript Sequence Number=SeqID_28545
AQRRKPLERATPLPPAPAVDEALDDLEREVTXRGFVEDLMHALAPPPSSLPLPTFSLVRAAAVKAAAASCAV

SEQ ID NO: 94520 - protein, 55 aa, Setaria italica
  Transcript Sequence Number=SeqID_28546
MERVLSCRAATLARRLGVQAQPLPQTGVVLSRRHSHTRRRAEEVLEADAAGPSTT

SEQ ID NO: 94521 - protein, 391 aa, Setaria italica
  misc_feature (17)..(17): Xaa can be any naturally occurring amino acid
  misc_feature (35)..(35): Xaa can be any naturally occurring amino acid
  misc_feature (332)..(332): Xaa can be any naturally occurring amino acid
  Transcript Sequence Number=SeqID_28547
  Gene Ontology: Mol. function=metal ion binding; Cellular component =plasma membrane; Biological process=innate immune response
  Homolog annotation: Hit_ID=B9SJF7; Match level="QueryCoverage=99%, HitCoverage=53%, E-value=1e-141, Identity=49%"; Hit description=Ran GTPase binding protein, putative
  Pfam annotation: Domain name=FYVE; Domain location=136-204; Score =68.7; E_value=2.1e-17; Accession=PF01363.13; Description=FYVE zinc finger
  Pfam annotation: Domain name=RCC1; Domain location=32-81; Score=18.4; E_value=0.0082; Accession=PF00415.10; Description=Regulator of chromosome condensation (RCC1)
  Pfam annotation: Domain name=RCC1; Domain location=86-133; Score =29.6; E_value=1.3e-05; Accession=PF00415.10; Description=Regulator of chromosome condensation (RCC1)
  Pfam module annotation: Pfam domain module=FYVE::RCC1::RCC1; Domain location=136-204::32-81::86-133
ARLKPTCVATLIDYDFXRVACGHSLTVALTTSGQXLSMGNAVYGQLGNPHSDGRIPCLVEDKIASEHVLQIACGSYHVAVLTSRSEIFTWGKGANGRLGHGDIEDRKVPTLVEALKDRAVRYIACGANFTAAICQHKWVSGADQAQCSSCRQPFGFTRKRRNCYNCGLVHCNACTSRKALRAALAPNSGKHYRVCDSCFLKLDSASDPNSANRRKDPVPYQSGESNGDAKATKAAIPSNMDMIRSLDIKAARQGKKTDGLSFLRNPQVSSLLQLSDIALSGGLDMTRSAPRAVRISATRSVTTSRAVSPFSRKPSPPRSTTPVPTAHGLSLXKSATDNIVKANELLNQEVERLRAQVDNLRNRCELQDLDLQKSAKKVQEAMTLVAEESAK

SEQ ID NO: 94522 - protein, 116 aa, Setaria italica
  misc_feature (100)..(100): Xaa can be any naturally occurring amino acid
  Transcript Sequence Number=SeqID_28548
GEQPERALPRSSYSECRLEASPMAASGPDAKRAKTKLHTATGNYSASELLHDKVLVENTKKELSRIQAELSSTNRNLNFSDQQIEAISTKLPVDKSELKXFPKAWCDQHGDGVITA

SEQ ID NO: 94523 - protein, 133 aa, Setaria italica
  Transcript Sequence Number=SeqID_28549
  Gene Ontology: Mol. function=3'-phosphoadenosine 5'-phosphosulfate transmembrane transporter activity; Cellular component=integral to membrane; Biological process=transport
  Homolog annotation: Hit_ID=Q9LDX3; Match level="QueryCoverage=100%, HitCoverage=38%, E-value=7e-56, Identity=87%"; Hit description =F5O11.33
  Pfam annotation: Domain name=TPT; Domain location=2-133; Score=2.9; E_ value=0.00042; Accession=PF03151.8; Description=Triose-phosphate Transporter family
  Pfam annotation: Domain name=UAA; Domain location=1-133; Score=-91.8; E_value=9.1e-06; Accession=PF08449.3; Description=UAA transporter family
  Pfam module annotation: Pfam domain module=TPT::UAA; Domain location =2-133::1-133
SGALVMDAFLGNLQEAIFKMNPDTTQMEMLFCSTVVGLPFLAVPMVLTGELMTAWTSCSQHLYVYAVLVFEAMATFVGQVSVLSLIALFGAATTAMVTTARKAVTLLLSYLIFTKPLTEQHVTGLLLITMAIV

SEQ ID NO: 94524 - protein, 94 aa, Setaria italica
  Transcript Sequence Number=SeqID_28550
  Gene Ontology: Mol. function=GTP binding; Cellular component =intracellular; Biological process=small GTPase mediated signal transduction
  Homolog annotation: Hit_ID=B9S055; Match level="QueryCoverage=98%, HitCoverage=14%, E-value=2e-41, Identity=82%"; Hit description=GTP -binding protein enga, putative
IAVMRQVIDTYETWCLRLSTSRLNRWLRKVMSRHSWKDSATQPKVKYFTQVKARPPTFVAFMSGKAQLSDTDIRFLTKSLKEDFNIGGIPIRIV

SEQ ID NO: 94525 - protein, 191 aa, Setaria italica
  Transcript Sequence Number=SeqID_28551
  Gene Ontology: Mol. function=oxidoreductase activity; Biological process=oxidation reduction
  Homolog annotation: Hit_ID=Q2EFH7; Match level="QueryCoverage=75%, HitCoverage=61%, E-value=3e-67, Identity=89%"; Hit description=Short- chain dehydrogenase/reductase (Fragment)
  Pfam annotation: Domain name=KR; Domain location=41-191; Score=-50.8; E_value=0.00049; Accession=PF08659.2; Description=KR domain
  Pfam annotation: Domain name=adh_short; Domain location=40-183; Score= 72.9; E_value=1.1e-18; Accession=PF00106.17; Description=short chain dehydrogenase
  Pfam module annotation: Pfam domain module=KR::adh_short; Domain location=41-191::40-183
  Subcellular localization annotation: CTP_CleavageSite=29; ConfidenceScore=5.03e-01
MFFRAAQEILRHGKSKALPALPGVANRFSTSADSQRLAGKVAVITGGASGIGEATAREFVKNGARVVLADVQDDLGRALATDLGADAASYTRCDVTDEAQVAAAVDLAVARHGKLDIIFNNAGVVGSLARPPLGALDLDDFDRVMAVNTRGVMAGVKHAARVMVPRRSGSIICTASIAGVLGMITPHPYSV

SEQ ID NO: 94526 - protein, 140 aa, Setaria italica
  Transcript Sequence Number=SeqID_28552
GTVAADPCHLEFPILASPQNLMTLQNPPAEADPTDTLLAMAARDLQTEMQTPCPTLDVQHRRVCPDDSSKMNLELDTAAEMLHEGTTSDHLGDSSTGVKDKNADTVASDPLNSESQYYNAPQNPVVLPDGHEVETQTDQS

SEQ ID NO: 94527 - protein, 67 aa, Setaria italica
  Transcript Sequence Number=SeqID_28553
  Subcellular localization annotation: CTP_CleavageSite=31; ConfidenceScore=5.04e-01
AKKGEKSRTISLYESRQTQRGFLGTIPQPMRCSKTKSCLVGVLLSSSPYLFSYCSVSSLLERGRRRE

SEQ ID NO: 94528 - protein, 152 aa, Setaria italica
  Transcript Sequence Number=SeqID_28554
  Gene Ontology: Mol. function=electron carrier activity; Biological process=oxidation reduction
  Homolog annotation: Hit_ID=Q69MH0; Match level="QueryCoverage=100%, HitCoverage=28%, E-value=2e-62, Identity=79%"; Hit description =Putative cytochrome P450 monooxygenase CYP72A5
EVARVCGDAPPSYDDLSKLNVLQMIIHETLRLYPPATLLPRMVFEDIRLGGGIGGGESLHLPAGLSVWIPVLAIHHDESIWGPDAHEFRPERFASGRRPAFLPFAAGPRNCVGQAYALVEAKVVLAMLLQQFRLAISDDYRHAPVNVLTLRP

SEQ ID NO: 94529 - protein, 177 aa, Setaria italica
  Transcript Sequence Number=SeqID_28555
KFSYALYDIISIKEHFAYDIFQVMFPFVEAASRGAETSPIEGGRFQEVSESSVSYQLAFALRPIFTVQHGKSATRPLRTVKNNKAPIHQASSGPKGQKPLFCSARAGVEMLCFKQSGFAQCPSGDPGKLIAARTNKQLPAKLAPSGHICLELGFVVLLGRPITWTILSSSLFQYRPG

SEQ ID NO: 94530 - protein, 125 aa, Setaria italica
  Transcript Sequence Number=SeqID_28556
  Gene Ontology: Mol. function=RNA binding; Cellular component =ribonucleoprotein complex; Biological process=mRNA processing
  Homolog annotation: Hit_ID=Q0J7J7; Match level="QueryCoverage=76%, HitCoverage=26%, E-value=6e-28, Identity=64%"; Hit description=CRS2 -associated factor 2, mitochondrial
SYSETDPAWRPIGFREPTRFSPFGPGRLDRPWDGVAAGRGGGGDGEGVERSREEVLGEPLSEEEVAELVERYRHSDCSRQINLGKGGGTHNMLDDILMLVMLFVRDYQNLVLVSCLIKLSQVPFL

SEQ ID NO: 94531 - protein, 77 aa, Setaria italica
  Transcript Sequence Number=SeqID_28557
  Homolog annotation: Hit_ID=Q5N730; Match level="QueryCoverage=100%, HitCoverage=5%, E-value=7e-31, Identity=84%"; Hit description =Erythroid differentiation-related factor 1-like protein
PSNKAKCAQFFRKCLDFLTEQDHLVVRACAHEQFARLILKCYEELELTSESFMIESEVTLTDLDDDSPELRLENLPS

SEQ ID NO: 94532 - protein, 82 aa, Setaria italica
  Transcript Sequence Number=SeqID_28558
MAAGFTEEEKAVDDAMGYPKAYARLCRGGGGAAVGLPYGHGPPHAFLPYVLQPHEALRAKDLNEMFPVTDAEAPPTANPRGY

SEQ ID NO: 94533 - protein, 68 aa, Setaria italica
  Transcript Sequence Number=SeqID_28559
LVIQVLVVQASDAPSNSKGVFRAAEPTGRSLHDATKNNENNDSAIPGSKAAAGVTYKAREIVAYDDLF

SEQ ID NO: 94534 - protein, 82 aa, Setaria italica
  Transcript Sequence Number=SeqID_28560
DLENGRPHMHKFAVLHGQRDKMKICWVFYWLIHGSSCKEERPHATLPRNIYAICKWSSATKNGAHEHFAKRIAGKKLRSNMS

SEQ ID NO: 94535 - protein, 134 aa, Setaria italica
  Transcript Sequence Number=SeqID_28561
  Homolog annotation: Hit_ID=B6T1H7; Match level="QueryCoverage=85%, HitCoverage=86%, E-value=5e-49, Identity=84%"; Hit description =Glutaredoxin 2
  Pfam annotation: Domain name=DUF836; Domain location=41-129; Score =107.8; E_value=3.8e-29; Accession=PF05768.6; Description=Protein of unknown function (DUF836)
MVAAALSALPRAASRLAPCVRQPDFRALCAAAAAGEASKRRLVLYTKPGCCLCDGLKEKLHAASLLAGTPYSLASLELQERDITTNPEWERLYQYEIPVLAKVLHDGTEEILPRLSPRLSVELVQKKIYSAFDQ

SEQ ID NO: 94536 - protein, 339 aa, Setaria italica
  Transcript Sequence Number=SeqID_28562
  Gene Ontology: Mol. function=catalytic activity; Biological process =metabolic process
  Homolog annotation: Hit_ID=A2Q4X2; Match level="QueryCoverage=100%, HitCoverage=72%, E-value=1e-145, Identity=71%"; Hit description =Isocitrate lyase and phosphorylmutase
AAALRRVLETPGAHQAPACYDALSARLVERAGFSACFTSGFSISAARLGLPDVGLISYGEMIDQGRLITEAVSIPVIGDADNGYGNSMNVKRTVKGFINAGLAGMILEDQVSPKACGHTQGRKVVSREEAIMRIKAAVDARNESGSDIVIVARTDSRQALSLDEALWRVRAFADAGADVLFIDALASREEMKAFCAIAPGVPKMANMLEGGGKTPILSPVELEEIGYKIIAYPLSLIGVSMRAMEDALIAIKGGRVPPPSSLPSFEEIKDTLGFNHYYEEEKRYVVTPAQSSYRTGEPTSPGDARSTTEKPQEPVIDILPQLYDIGSSGRRGPSTGIWS

SEQ ID NO: 94537 - protein, 201 aa, Setaria italica
  Transcript Sequence Number=SeqID_28563
  Homolog annotation: Hit_ID=Q7XKS6; Match level="QueryCoverage=73%, HitCoverage=38%, E-value=1e-16, Identity=34%"; Hit description =OSJNBa0038P21.5 protein
PSQSPRSRPKLTPFLYYLNDFLFYENTDDSVSCTSVTVMCSPRQAWVHLSDLQAGVWGEGRYSGMIDLPVPGTLRGCDHHELFSNGKLYMMCLPHHIVGFDLPSMSSFCIELPDAVQYEYLENIGLSCAEGSGIFLIHLKGFQISVWLYRTDCSSIGTWKLIDTICLQQAFRHLAELTWDLLPDVIRVAAVGDNADFVLLR

SEQ ID NO: 94538 - protein, 64 aa, Setaria italica
  Transcript Sequence Number=SeqID_28564
  Homolog annotation: Hit_ID=Q9LWZ7; Match level="QueryCoverage=51%, HitCoverage=11%, E-value=7e-10, Identity=87%"; Hit description =Putative arachidonic acid-induced DEA1
MAASSRKLLFVALVVVVVAVLLSPAAACGGHPCPSPAGKCPVNAVKLGVCADVLDGLIHAVVGN

SEQ ID NO: 94539 - protein, 102 aa, Setaria italica
  misc_feature (92)..(92): Xaa can be any naturally occurring amino acid
  Transcript Sequence Number=SeqID_28565
  Gene Ontology: Mol. function=signal transducer activity; Cellular component=plasma membrane; Biological process=response to light stimulus
  Homolog annotation: Hit_ID=Q9SA69; Match level="QueryCoverage=49%, HitCoverage=7%, E-value=1e-16, Identity=78%"; Hit description =F10O3.17
ERYRLCKAIDCQRLTPDACSHAAQNERLPVQMAVQVLYFEQLRLRSAIQAGGGGGGMSMGGHDAALFFGCAAAAASAQGCGGVTNMRSGSGXVGSGAMSPRD

SEQ ID NO: 94540 - protein, 281 aa, Setaria italica
  Transcript Sequence Number=SeqID_28566
  Gene Ontology: Cellular component=mitochondrion
  Homolog annotation: Hit_ID=A2Q1Y4; Match level="QueryCoverage=62%, HitCoverage=60%, E-value=4e-44, Identity=52%"; Hit description =Nodulin-like protein, related (Fragment)
YLLLNAILPLAASILALPAILLCHTHDNHLQSVPRYDRRVFLGLYILAFITGIYLVVFGSLNTTRAAAWVILTGAMVLLALPLIIPACSSCSYVDTHSIDSASHNDDPHKPLLVGNHLQNESNAVMEKSMEQQLQGSNCGTILDKGRLVVLGEEHSAKRLIGCVDFWLYYTAYFCGATVGLVYSNNLGQIAQSLHQQSQLTMLLAVYSSFSFFGRLLSALPDFLHRKVSLARTGWLAAALVPMPMAFFLMRKQQDGSTLAVGTALIGLSSGFIFAAAVSVT

SEQ ID NO: 94541 - protein, 49 aa, Setaria italica
  Transcript Sequence Number=SeqID_28567
QEGTKSQTVLVAPPSTGTIITSISPAPREHENTTEHKPSSPVERNQGGF

SEQ ID NO: 94542 - protein, 101 aa, Setaria italica
  Transcript Sequence Number=SeqID_28568
GKLGAAAFLDHGRVLPGRRDRMFASLSNLAELKSAAAAAAMDDYDYEFDHLYVGHQYAGGGATEHAMKHRKRRSILRKFGDLFRRRSLYKPDPAPVLHNHY

SEQ ID NO: 94543 - protein, 88 aa, Setaria italica
  Transcript Sequence Number=SeqID_28569
  Gene Ontology: Mol. function=chromatin binding; Cellular component =chromatin; Biological process=metabolic process
  Homolog annotation: Hit_ID=Q7XQR1; Match level="QueryCoverage=95%, HitCoverage=12%, E-value=4e-26, Identity=68%"; Hit description =OSJNBa0091D06.3 protein
  Pfam annotation: Domain name=Auxin_inducible; Domain location=15-79; Score=124.9; E_value=2.7e-34; Accession=PF02519.6; Description=Auxin responsive protein
EDGGDGGEPAVTTPKGQVAVYVGGGEASLRYVVPVVYFNHPMFGELLREAEEEFGFHHPGGITIPCPAARFEQAAALAAAGKKGLARW

SEQ ID NO: 94544 - protein, 68 aa, Setaria italica
  Transcript Sequence Number=SeqID_28570
  Gene Ontology: Mol. function=potassium ion transmembrane transporter activity; Cellular component=integral to membrane; Biological process=potassium ion transport
  Homolog annotation: Hit_ID=Q9AYN4; Match level="QueryCoverage=100%, HitCoverage=8%, E-value=5e-33, Identity=89%"; Hit description=High -affinity potassium transporter
RAFNPMYIVHYFKRNGKDGWISLGGVVLCVTGTEGMYADLGHFNIRAVQISFNCVLFPSVALCYIGQA

SEQ ID NO: 94545 - protein, 97 aa, Setaria italica
  misc_feature (60)..(60): Xaa can be any naturally occurring amino acid
  Transcript Sequence Number=SeqID_28571
  Gene Ontology: Mol. function=ubiquitin-protein ligase activity; Cellular component=ubiquitin ligase complex; Biological process =ubiquitin-dependent protein catabolic process
  Pfam annotation: Domain name=U-box; Domain location=48-94; Score= -2.7; E_value=0.0011; Accession=PF04564.7; Description=U-box domain
QLRRSRRLHPRAHGDGHPPALVGAAAVHGDGTPSAPPFPSPPSSFTADPPEEFLCPISGXLMADPVVVPPGQTFERACIQVCAALAFSPPAVAADLR

SEQ ID NO: 94546 - protein, 65 aa, Setaria italica
  Transcript Sequence Number=SeqID_28572
ADRRSNFVHPDFPFRFLGNSFVTCNAALQPLHVIRCVVQSWRSENLQSDRSDHRVAPIISCFGLI

SEQ ID NO: 94547 - protein, 60 aa, Setaria italica
  Transcript Sequence Number=SeqID_28573
MAVFAARFAVATVASFAVHWLVHSFLQYQHPALVLLLPVAVFVGIVATGSDSSGAGARLR

SEQ ID NO: 94548 - protein, 155 aa, Setaria italica
  Transcript Sequence Number=SeqID_28574
  Gene Ontology: Mol. function=electron carrier activity; Biological process=oxidation reduction
  Homolog annotation: Hit_ID=Q6DV71; Match level="QueryCoverage=91%, HitCoverage=32%, E-value=3e-53, Identity=62%"; Hit description =Cytochrome P450 CYP709C1
SQREKGCQQVTIELSDEFEELTADVISHTAFGSSYKEGKQVFQALKELQFITFSTLFSVQIPGFRYLPTEKNRRVWKLDREVRATLTKIIRNRLAAKDKAGYGNDLLGLMLEACAPEHGGDQLLSMDEIIDDTHPEWLDKVREEVRRECGGDKDR

SEQ ID NO: 94549 - protein, 237 aa, Setaria italica
  misc_feature (4)..(4): Xaa can be any naturally occurring amino acid
  misc_feature (223)..(223): Xaa can be any naturally occurring amino acid
  Transcript Sequence Number=SeqID_28575
  Gene Ontology: Mol. function=protein serine/threonine kinase activity; Biological process=protein amino acid phosphorylation
  Homolog annotation: Hit_ID=B9RMV5; Match level="QueryCoverage=87%, HitCoverage=31%, E-value=1e-59, Identity=53%"; Hit description =Serine/threonine-protein kinase, putative
  Pfam annotation: Domain name=Pkinase; Domain location=1-203; Score =144.2; E_value=4e-40; Accession=PF00069.17; Description=Protein kinase domain
  Pfam annotation: Domain name=Pkinase_Tyr; Domain location=1-203; Score=-56.9; E_value=6.1e-10; Accession=PF07714.9; Description =Protein tyrosine kinase
  Pfam module annotation: Pfam domain module=Pkinase::Pkinase_Tyr; Domain location=1-203::1-203
SIDXPNILRLLDTIDTTNMMYLVLEYCDGGDLDAFLHKHGRLPVATAKDLMRQLAEGLKVLRERNIVHRDLKPQNLLLSTNDDAIILKIGDFGFAKHENLAATICGSPYYMAPEIWQGKDYDAKSDLWSVGVILFQLVTGKLPYTGSTCFQLQQNILASDELNFPSEIEADLCPDCIDLCRRLLLRDPRKRISFEEFFNHKFLATTRKCELVRESHHAVDLRXDTCQAITSHVVLKT

SEQ ID NO: 94550 - protein, 61 aa, Setaria italica
  Transcript Sequence Number=SeqID_28576
LPSVRCTLLYACMVVCASSFMCEREVLRSLCRRHPFYVLYVCSSVSVYGGDRVCTLSSTLL

SEQ ID NO: 94551 - protein, 81 aa, Setaria italica
  Transcript Sequence Number=SeqID_28577
  Gene Ontology: Mol. function=asparagine synthase (glutamine -hydrolyzing) activity; Biological process=amino acid biosynthetic process
  Homolog annotation: Hit_ID=P49093; Match level="QueryCoverage=67%, HitCoverage=9%, E-value=2e-18, Identity=72%"; Hit description =Asparagine synthetase [glutamine-hydrolyzing] 2
VRLLAAGLLVELLLVGREVEVEVSAQDCVRFELFPPGHLYSSAAAEFRRWYNPRWFLEQVPAAPYDPLVLRAAFEKAAETR

SEQ ID NO: 94552 - protein, 60 aa, Setaria italica
  misc_feature (46)..(46): Xaa can be any naturally occurring amino acid
  Transcript Sequence Number=SeqID_28578
MDEPFQGEDRNLSAVDHVKKRHHEKGFFYACAFTLCCCFCCYEACXHCLEFFCCCCKKDD

SEQ ID NO: 94553 - protein, 60 aa, Setaria italica
  Transcript Sequence Number=SeqID_28579
MDEPFQGEDRNLSAVDHVKKRHHEKGFFYACAFTLCCCFCCYEACEHCLEFFCCCCKKDD

SEQ ID NO: 94554 - protein, 169 aa, Setaria italica
  Transcript Sequence Number=SeqID_28580
  Gene Ontology: Mol. function=asparagine synthase (glutamine -hydrolyzing) activity; Biological process=asparagine biosynthetic process
  Homolog annotation: Hit_ID=Q10MX3; Match level="QueryCoverage=60%, HitCoverage=17%, E-value=2e-48, Identity=87%"; Hit description =Asparagine synthetase, putative, expressed
  Pfam annotation: Domain name=GATase_2; Domain location=1-108; Score= -76.2; E_value=0.0075; Accession=PF00310.13; Description=Glutamine amidotransferases class-II
LAHQRLSVVSPLSGDQPLFNEDRTVVVVANGEIYNHKKIRKQFTKHTFTTGSDCEVIIALYEEYGENFVDMLDGVFAFVLYDTRNKTFMAARDAIGVNPLYIGWAATVGVSSILLSPIPVSHHPFTLLFPTPAWAVGFRQSGSHTTMTDRSLPRLSFLRLQVPSGSPPR

SEQ ID NO: 94555 - protein, 211 aa, Setaria italica
  misc_feature (30)..(30): Xaa can be any naturally occurring amino acid
  misc_feature (41)..(41): Xaa can be any naturally occurring amino acid
  Transcript Sequence Number=SeqID_28581
  Gene Ontology: Mol. function=asparagine synthase (glutamine -hydrolyzing) activity; Cellular component=phagocytic vesicle; Biological process=asparagine biosynthetic process
  Homolog annotation: Hit_ID=B5U8J8; Match level="QueryCoverage=94%, HitCoverage=32%, E-value=1e-85, Identity=76%"; Hit description =Asparagine synthetase
  Pfam annotation: Domain name=GATase_2; Domain location=2-164; Score =5.8; E_value=1.1e-09; Accession=PF00310.13; Description=Glutamine amidotransferases class-II
MCGIFAVLGCADCSQAQRARVLACSRRLKXKGYLELGTGLXQHEGNFLAHQRLSVVSPLSGDQPLFNEDRTVVVVANGEIYNHKKIRKQFTGKHTFTTGSDCEVIIALYEEYGENFVDMLDGVFAFVLYDTRNKTFMAARDAIGVNPLYIGWGGDGSVWFSSEMKALNEDCVRFELFPPAPARGTSAGCTSAGTRRRRWSRGAPAGRARTG

SEQ ID NO: 94556 - protein, 69 aa, Setaria italica
  Transcript Sequence Number=SeqID_28582
VCSDGGGMLAPASCTLLYACMVVCASSFMCERGVLRSLCRRHPCYVLYVCSSVSVYGGDRVCTLSSTLL

SEQ ID NO: 94557 - protein, 117 aa, Setaria italica
  Transcript Sequence Number=SeqID_28583
  Gene Ontology: Mol. function=lipid binding; Biological process=lipid transport
  Homolog annotation: Hit_ID=Q43193; Match level="QueryCoverage=78%, HitCoverage=77%, E-value=2e-30, Identity=75%"; Hit description=Non -specific lipid-transfer protein 1
  Pfam annotation: Domain name=Tryp_alpha_amyl; Domain location=28-113; Score=118.6; E_value=2.1e-32; Accession=PF00234.14; Description =Protease inhibitorseed storageLTP f
MARAQVVVLAVVAVVLLAAAASEAAISCGQVNSAIGQCLPYARGQGSKPSDACCSGVKRLNSAATTTADRRAACNCLKNAARGISGLNAGNAASIPSKCGVSIPYSISTSTDCSRVS

SEQ ID NO: 94558 - protein, 119 aa, Setaria italica
  misc_feature (84)..(84): Xaa can be any naturally occurring amino acid
  misc_feature (99)..(99): Xaa can be any naturally occurring amino acid
  Transcript Sequence Number=SeqID_28584
  Gene Ontology: Mol. function=lipid binding; Biological process=lipid transport
  Homolog annotation: Hit_ID=Q43193; Match level="QueryCoverage=78%, HitCoverage=77%, E-value=4e-29, Identity=76%"; Hit description=Non -specific lipid-transfer protein 1
  Pfam annotation: Domain name=Tryp_alpha_amyl; Domain location=28-115; Score=97.3; E_value=5.4e-26; Accession=PF00234.14; Description =Protease inhibitorseed storageLTP f
MARAQVVVLAVVAAVLLAAAASEAAISCGQVNSAIGQCLPYARGQGSAPSAGCCNGVRSLNSAARTTADRRAACNCLKNAARGXISGLNAGNAASIPSXPCGVSIPYSISTSTDCSRVS

SEQ ID NO: 94559 - protein, 118 aa, Setaria italica
  misc_feature (78)..(78): Xaa can be any naturally occurring amino acid
  Transcript Sequence Number=SeqID_28585
  Gene Ontology: Mol. function=lipid binding; Biological process=lipid transport
  Homolog annotation: Hit_ID=Q43193; Match level="QueryCoverage=78%, HitCoverage=77%, E-value=5e-29, Identity=74%"; Hit description=Non -specific lipid-transfer protein 1
  Pfam annotation: Domain name=Tryp_alpha_amyl; Domain location=28-114; Score=109.1; E_value=1.5e-29; Accession=PF00234.14; Description =Protease inhibitorseed storageLTP f
MARAQVVVLAVVAVVLLAAAASEAAISCGQVNSAIGQCLPYARGQGSKPSDACCSGVKRLNSAATTTADRRAACNCLXKNAARGISGLNAGNAASIPSKCGVSIPYSISTSTDCSRVS

SEQ ID NO: 94560 - protein, 641 aa, Setaria italica
  misc_feature (219)..(219): Xaa can be any naturally occurring amino acid
  misc_feature (404)..(404): Xaa can be any naturally occurring amino acid
  misc_feature (435)..(435): Xaa can be any naturally occurring amino acid
  misc_feature (488)..(488): Xaa can be any naturally occurring amino acid
  misc_feature (570)..(570): Xaa can be any naturally occurring amino acid
  Transcript Sequence Number=SeqID_28586
  Gene Ontology: Mol. function=asparagine synthase (glutamine -hydrolyzing) activity; Cellular component=phagocytic vesicle; Biological process=asparagine biosynthetic process
  Homolog annotation: Hit_ID=B5U8J8; Match level="QueryCoverage=86%, HitCoverage=93%, E-value=0.0, Identity=84%"; Hit description =Asparagine synthetase
  Pfam annotation: Domain name=Asn_synthase; Domain location=251-494; Score=299.8; E_value=5.7e-87; Accession=PF00733.13; Description =Asparagine synthase
  Pfam annotation: Domain name=GATase_2; Domain location=41-202; Score =29.7; E_value=1.1e-11; Accession=PF00310.13; Description=Glutamine amidotransferases class-II
  Pfam module annotation: Pfam domain module=Asn_synthase::GATase_2; Domain location=251-494::41-202
  Subcellular localization annotation: CTP_CleavageSite=54; ConfidenceScore=5.21e-01
MIFERLFPQDSSLFFLPHARSFLSLPPPPLLAFRITTNPPCGGIFAVLGCADCSQAQRARVLACSRRLKHRGPDWSGLYQHEGNFLAHQRLSVVSPLSGDQPLFNEDRTVVVVANGEIYNHKKIRKQFTGKHTFTTGSDCEVIIALYEEYGENFVDMLDGVFAFVLYDTRNKTFMAARDAIGVNPLYIGWGGDGSVWFSSEMKALNEDCVRFELFPPGXHLYSSAAAEFRRWYNPRWFLEQVPAAPYDPLVLRAAFEKAVIKRLMTDAPFGVLLSGGLDSSLVASVTKRHLVETEAAKKFGTELHSFVVGLEGSPDLKAAREVADYLGTIHHEFYFTVQDGIDAIEEVIYHDETYDVTTIRASTPMFLMARKIKSLGVKMVLSGEGSDELLGGYLYFHFAPNKXEEFHKETCRKVKALHQYDCLRANKATSAWGXLEIRVPFLDKEFVDVAMGMDPEWKMYDKDLGRIEKWVMRKAFEDEENPYLPKXILYRQKEQFSDGVGYSWIDGLKAFTEQQVTDEMMINAAKMYPYNTPVNKEAYYYRMIFERLFPQDSARETVPWGPSIACSTXPAAIEWVEQWKASNDPSGRFISSHDAAATTTADQTAGAAHANGNGVAPVANGHAAANGAVNGTEVAVAIAA

SEQ ID NO: 94561 - protein, 123 aa, Setaria italica
  misc_feature (54)..(54): Xaa can be any naturally occurring amino acid
  Transcript Sequence Number=SeqID_28587
  Gene Ontology: Cellular component=chromosome, centromeric region; Biological process=mitosis
  Homolog annotation: Hit_ID=B9SU78; Match level="QueryCoverage=85%, HitCoverage=10%, E-value=3e-15, Identity=43%"; Hit description =Membralin, putative
  Subcellular localization annotation: CTP_CleavageSite=50; ConfidenceScore=5.55e-01
CIATLVFADYFVTKCGVLLMSLFVFFTTTMSVSFTLRETQSRMLRFTGLCSFMXVATWIALRLKYFYLIHLLRCSSLKFSVQLQHHARHQLPTFQLIFVHVIESLVFVPVMGKFFGVLNEVCD

SEQ ID NO: 94562 - protein, 155 aa, Setaria italica
  misc_feature (145)..(145): Xaa can be any naturally occurring amino acid
  Transcript Sequence Number=SeqID_28588
  Gene Ontology: Cellular component=chromosome, centromeric region; Biological process=mitosis
  Homolog annotation: Hit_ID=B9SU78; Match level="QueryCoverage=97%, HitCoverage=27%, E-value=6e-31, Identity=41%"; Hit description =Membralin, putative
LSQLLTPRIRLALEYLYLAGAVALFCLLVVMHTNFVQQPGCSSEFSGIEFGEAQLVQIKIISGGLWASRGASYIMDLQNLGRSAEKILEVNGDKFNILASKFWSTWVGPGARRSVPDLKAAGDGSVHYPLSAKESFKAAVTLFVXRKWYFRCLVL

SEQ ID NO: 94563 - protein, 103 aa, Setaria italica
  Transcript Sequence Number=SeqID_28589
  Gene Ontology: Mol. function=actin binding; Cellular component =cytoskeleton
  Homolog annotation: Hit_ID=Q84TX2; Match level="QueryCoverage=80%, HitCoverage=4%, E-value=3e-16, Identity=55%"; Hit description=SCAR -like protein 1
  Subcellular localization annotation: CTP_CleavageSite=19; ConfidenceScore=5.05e-01
AKSPTHPVPKPPRYPLLPVTSHDRSMLRKAPTLVQPSSKLSDEKNTILEEIKNKSFNLKPVLAKRPSVMGGPRTNLQVVAIIERAHAIRQAVADDDDEDSWSE

SEQ ID NO: 94564 - protein, 131 aa, Setaria italica
  Transcript Sequence Number=SeqID_28590
  Homolog annotation: Hit_ID=B6U8T6; Match level="QueryCoverage=99%, HitCoverage=30%, E-value=9e-39, Identity=62%"; Hit description =Carboxyl-terminal peptidase
SDDSNIAPHSITQTWHQNGKCCPPNTIPIRRTKEEDVLRASSIKRYGKKRPRSIPNFFSVIDDPNKLNVTIGHQHAIAYTPKARYYGTKTSINLWEPTIGRAKDFSLAQLWISGGSYSGNDLNTIEAGWQV

SEQ ID NO: 94565 - protein, 188 aa, Setaria italica
  Transcript Sequence Number=SeqID_28591
  Homolog annotation: Hit_ID=B3DIQ7; Match level="QueryCoverage=77%, HitCoverage=39%, E-value=7e-19, Identity=36%"; Hit description =Zgc:194177 protein
  Pfam annotation: Domain name=Methyltransf_16; Domain location=4-158; Score=-62.4; E_value=0.03; Accession=PF10294.1; Description=Putative methyltransferase
GGGRKKGEGERRRSSGGAGTVGLALARVARRIFVTDRGADILDNCLANVRINSGTLKFDEAKVCVRELDWKLSWPPPVSTCDPSDPSLRYLWSAHEIDEAEKATVLFAADVIYSDDLTDLFFDTVKKLMSSGAKKVLYLALEKRYNFSLDELDVVANGYAHFRGFFVTQDEHGDAIHGDKPKVLRLGK

SEQ ID NO: 94566 - protein, 106 aa, Setaria italica
  Transcript Sequence Number=SeqID_28592
  Homolog annotation: Hit_ID=Q7XGU7; Match level="QueryCoverage=70%, HitCoverage=23%, E-value=1e-22, Identity=64%"; Hit description =Thaumatin-like protein 1, putative, expressed
MSGQEHRAPIALLLILIVSVSGELPIHEGVSSRTLTITNHCGHTVWPGILSSSGSPTLETTGFALEPGQSRSLPASHGWSGRLWGRTHCSVDSAGRFSCVTGNCGS

SEQ ID NO: 94567 - protein, 69 aa, Setaria italica
  misc_feature (6)..(6): Xaa can be any naturally occurring amino acid
  Transcript Sequence Number=SeqID_28593
  Gene Ontology: Mol. function=hydrolase activity
  Homolog annotation: Hit_ID=B6TJ32; Match level="QueryCoverage=100%, HitCoverage=20%, E-value=2e-27, Identity=85%"; Hit description =Catalytic/ hydrolase
RKKLLXWGENDNIFNIELAKAMKEQLGEKTMLQSIRKAGHLVHLERPCVYNRCLKEFLASVTATETTKQ

SEQ ID NO: 94568 - protein, 58 aa, Setaria italica
  misc_feature (46)..(46): Xaa can be any naturally occurring amino acid
  Transcript Sequence Number=SeqID_28594
MAEAAAILSLSAAAVVEDVLRQHGCRLSDRDLASRRAEEAASRRNXAGGVLRRDGWGL

SEQ ID NO: 94569 - protein, 287 aa, Setaria italica
  Transcript Sequence Number=SeqID_28595
  Gene Ontology: Mol. function=nucleic acid binding; Cellular component= nucleus; Biological process=positive regulation of transcription from RNA polymerase II promoter
  Homolog annotation: Hit_ID=B6T5P2; Match level="QueryCoverage=82%, HitCoverage=100%, E-value=1e-137, Identity=99%"; Hit description =CCR4-NOT transcription complex subunit 7
  Pfam annotation: Domain name=CAF1; Domain location=25-258; Score =411.9; E_value=1.1e-120; Accession=PF04857.12; Description=CAF1 family ribonuclease
MEMSDPTAAVIPKPDGGDDESVEIREVWADNLEEEFALIRDVVDEFPFVAMDTEFPGIVCRPVGAFRSPADYNYATLKANVDMLHLIQLGLTFSGPRGELPALGADRRRCVWQFNFREFDDARDIFASDSIELLRRSGIDFRRNAERGVDARRFAELLMSSGVVLNDSVYWVTFHAGYDFGYLLKILTCNSLPDTQAGFFKLMKIYFPTVYDIKHLMKFCNSLHGGLNKLAELLDVERVGESHQAGSDSLVTSCAFWKLKDSFFAGSTEKYAGVLYGLNAENGVSAH

SEQ ID NO: 94570 - protein, 211 aa, Setaria italica
  misc_feature (188)..(188): Xaa can be any naturally occurring amino acid
  Transcript Sequence Number=SeqID_28596
  Gene Ontology: Mol. function=nucleotide binding; Cellular component =myosin complex; Biological process=signal transduction
  Homolog annotation: Hit_ID=Q6L5H7; Match level="QueryCoverage=98%, HitCoverage=30%, E-value=3e-28, Identity=34%"; Hit description =Putative myosin heavy chain
VSFKLKVALHEMEQRVEEVKAMQEQESAKKAVEEALAQEREKISLLTTEIEGLKALLVAEREENDVAKKAHANALEMNEELNKKVSDADEKIKQFNDTVQRLEGTIREGETLLLTERQQNEAASATLAESQARNGALVSKLEDAVKQNDLLQETVQRFEEAMKNLESSLTFEKQQHEASLVELAEARXKIEELQREVGDTDEKSTLLQTAI

SEQ ID NO: 94571 - protein, 669 aa, Setaria italica
  Transcript Sequence Number=SeqID_28597
  Gene Ontology: Mol. function=signal transducer activity; Cellular component=integral to membrane; Biological process=signal transduction
  Homolog annotation: Hit_ID=Q10F06; Match level="QueryCoverage=97%, HitCoverage=44%, E-value=0.0, Identity=70%"; Hit description =Unconventional myosin heavy chain, putative, expressed
  Pfam annotation: Domain name=IQ; Domain location=418-438; Score=14.7; E_value=0.4; Accession=PF00612.19; Description=IQ calmodulin-binding motif
  Pfam annotation: Domain name=IQ; Domain location=441-461; Score=18.2; E_value=0.034; Accession=PF00612.19; Description=IQ calmodulin -binding motif
  Pfam annotation: Domain name=IQ; Domain location=466-486; Score=2.5; E_value=18; Accession=PF00612.19; Description=IQ calmodulin-binding motif
  Pfam annotation: Domain name=IQ; Domain location=489-509; Score=16.3; E_value=0.13; Accession=PF00612.19; Description=IQ calmodulin-binding motif
  Pfam annotation: Domain name=IQ; Domain location=514-534; Score=12.7; E_value=1.1; Accession=PF00612.19; Description=IQ calmodulin-binding motif
  Pfam annotation: Domain name=IQ; Domain location=537-557; Score=19.2; E_value=0.017; Accession=PF00612.19; Description=IQ calmodulin -binding motif
  Pfam annotation: Domain name=Myosin_head; Domain location=1-402; Score=224.8; E_value=2.2e-64; Accession=PF00063.13; Description =Myosin head (motor domain)
  Pfam module annotation: Pfam domain module=IQ::IQ::IQ::IQ::IQ::IQ::Myo sin_head; Domain location=418-438::441-461::466-486::489-509::514 -534::537-557::1-402
AIFRVVAAVLHLGNINFAKGREVDSSVIKDDKSRFHLNTAGELLMCDCGKLENALINREINTPEGVITTTVGPNSATISRDGLAKQIYSRLFDWLVNRINASIGQDPDSNKLIGVLDIYGFESFKTNSFEQLCINFTNEKLQQHFNQNVFKMEQEEYTREQINWSYIEFVDNQDVLDLIEKKPGGIIALLDEACMFPKSTHETLSQKLYEKFKNHKRFTKPKLSRTAFTIQHYAGDVTYQSDQFLDKNKDYVVAEHQELLNASKCSFVSVLFPPATEENTKSSKSSIASRFKMQLHELMETLSSTEPHYIRCIKPNSVLKPAIFENTNVLQQLRCSGVLEAIRISCAGYPTRKLFHDFLHRFRVLAPEILKEKNDEKVACQKILDKIGLQGYQIGRTKVFLRAGQMAELDARRTEMRNNAARGVQSQYRTHVAREQFLVLRDASICLQSFVRARLACKQHEFLRQQAAALRIQKTTRWYFAWKTYCQLRLSAVTLQAGLRAMSARNEFNFRKRNKASVHIQSQWRCHRDYSNYMKLKRAALTYQCAWRRRVARKELRKLKMAARDTQALKVAKEKLEERVEELTSRLGLEKKLRADLEKSKEEEVSKLKVALHEMEQRVEEVKAMQEQESAKKAVEEALAQEREKISLLTFLFNSSFISRALACAFFAT

SEQ ID NO: 94572 - protein, 75 aa, Setaria italica
  Transcript Sequence Number=SeqID_28598
MRTIMARSPHESSFSFSRRNFKWPVLGKSSSHGATAGVEDGSAKGSEADEEDEAAMAFSSSCPSFHSEDFVSPPT

SEQ ID NO: 94573 - protein, 74 aa, Setaria italica
  Transcript Sequence Number=SeqID_28599
CRYKYNSKATLVVLLWPLTRPEDQNNASVPNMLVDKMNVTFAQALAVELKICHLPVVVPQEIHFDFNFVVMFMQ

SEQ ID NO: 94574 - protein, 91 aa, Setaria italica
  Transcript Sequence Number=SeqID_28600
  Homolog annotation: Hit_ID=Q10I27; Match level="QueryCoverage=91%, HitCoverage=7%, E-value=4e-09, Identity=43%"; Hit description=NB-ARC domain containing protein, expressed
NCPLLLASLSSPTTSEITASFGLLRSIITDQMTILRSPLLRERLELIESLDIQDCSEITSFTAHDNDVLLQLKSLQSLCISDCRVLQPLTL

SEQ ID NO: 94575 - protein, 281 aa, Setaria italica
  Transcript Sequence Number=SeqID_28601
  Gene Ontology: Mol. function=nucleotide binding; Biological process =defense response
  Homolog annotation: Hit_ID=Q10I27; Match level="QueryCoverage=96%, HitCoverage=24%, E-value=1e-106, Identity=69%"; Hit description=NB -ARC domain containing protein, expressed
VTREQTQSIVQLGYLLELQGSLQIRNLENINTPDDAKEAMLCKKGQLSVLQLMWAPDRDEVNTNREEDVLEALQPHENLKRLDIMGWMGVKSPSWLENEWLGNLEHIFLSGCNAWEQLPPLGQLTSVRTIWLQRLKMLRQIGPEAYGSSSQQEPFQSLEELVLDDMPELNEWLWSGHTMMNLHNVVIKDCKKLKALPPVPPNLTEITTAKKGYWMPYHHDVKLAHATTARSSVSSLCIFNCPLLLASLSSPTTSEITASFGLLRSIITDQMTSSTTIPFRQ

SEQ ID NO: 94576 - protein, 121 aa, Setaria italica
  Transcript Sequence Number=SeqID_28602
HSFKPITHCLTGSERQERAALRVCSSSSTSIPLEQIHGCLTGLQLLFNFDSFRANPGRLSCRSENGSHGWNSNCVFPLFRNGGQENGEKLMELQWCRPGYGLSVYITKEAEAMVSVNLPTR

SEQ ID NO: 94577 - protein, 41 aa, Setaria italica
  Transcript Sequence Number=SeqID_28603
  Gene Ontology: Mol. function=heat shock protein binding; Biological process=response to stress
  Homolog annotation: Hit_ID=B6T422; Match level="QueryCoverage=100%, HitCoverage=12%, E-value=2e-12, Identity=85%"; Hit description=DnaJ subfamily B member 4
EGWPIRKEPGKKGKLVIKFNVAFPTRLSLSQRAAIRQIMAS

SEQ ID NO: 94578 - protein, 85 aa, Setaria italica
  Transcript Sequence Number=SeqID_28604
HDGPNCSRIPRREKLAEMAWSFSQFALGTVRAPNPHGDSIRDSANMYAILLANELLSIELRWQEQRDPLELSCLAWDSWLQWFAA

SEQ ID NO: 94579 - protein, 120 aa, Setaria italica
  Transcript Sequence Number=SeqID_28605
  Homolog annotation: Hit_ID=Q7XXF8; Match level="QueryCoverage=85%, HitCoverage=12%, E-value=9e-12, Identity=43%"; Hit description =OSJNBa0095E20.14 protein
  Pfam annotation: Domain name=DUF594; Domain location=37-98; Score =95.2; E_value=2.2e-25; Accession=PF04578.5; Description=Protein of unknown function, DUF594
MPIQLKRISLGTVRAPNPHGDSIRDSANMYAILLANELLSIELRWQEQRDPLELILGVWVELLLYAANHCSQESHARQLSNGCEFITIVSLLAHHFKYYSGVSRGTEDIGGSKPTSESNP

SEQ ID NO: 94580 - protein, 206 aa, Setaria italica
  Transcript Sequence Number=SeqID_28606
  Gene Ontology: Mol. function=transferase activity, transferring phosphorus-containing groups; Cellular component=intracellular; Biological process=tRNA splicing
  Homolog annotation: Hit_ID=B9S8T9; Match level="QueryCoverage=46%, HitCoverage=90%, E-value=2e-37, Identity=75%"; Hit description=tRNA 2'-phosphotransferase, putative
  Pfam annotation: Domain name=PTS_2-RNA; Domain location=1-186; Score =268.6; E_value=1.4e-77; Accession=PF01885.8; Description=RNA 2' -phosphotransferase, Tpt1  KptA family
TIGRIMSRVLRHMAVELGLDMRMDGYVRVSDLLSLNLRTYAEVPLKNHTVDEVREAVRRDNKQRFSLLEEDGELLIRANQGHTVTTVTSESLLTPILSADEVSVCVHGTYRTKLSSILQSGLKRMARLHVHFSSGLPSSGEVISGMRSNINILIHLDVKKALNDGMKLYISENKVILTEGFDGVVPVKYFEKIETWPGRAPVPLQR

SEQ ID NO: 94581 - protein, 157 aa, Setaria italica
  Transcript Sequence Number=SeqID_28607
  Gene Ontology: Mol. function=dopamine beta-monooxygenase activity; Biological process=histidine catabolic process
  Homolog annotation: Hit_ID=B9RNX5; Match level="QueryCoverage=99%, HitCoverage=18%, E-value=1e-32, Identity=46%"; Hit description =Dopamine beta-monooxygenase, putative
SRHARIGAVAFTFACVQPINAYLRPHKMEDREPSSGNRTVWEYLHHFTGRSAALAGIVALFTGLQHLGHRYGSKNIKGLTCGLILWFLSVALVTAYFEYMAIKRRRDGADGLSGKWVLGNTDEDDTVDLLQSDRVVSKLESNSSPEPMEVQLEPLKG

SEQ ID NO: 94582 - protein, 257 aa, Setaria italica
  misc_feature (8)..(8): Xaa can be any naturally occurring amino acid
  misc_feature (17)..(17): Xaa can be any naturally occurring amino acid
  misc_feature (196)..(196): Xaa can be any naturally occurring amino acid
  Transcript Sequence Number=SeqID_28608
  Gene Ontology: Cellular component=plasma membrane
  Subcellular localization annotation: CTP_CleavageSite=20; ConfidenceScore=5.15e-01
GSCTSKAXLEHRRPARXYTRGRRVRSRSRSIMPEAPQSQQLSDSRGRMTGFSVSEIVHVETANRGKSEHSKTFHLTQMQWHHSQRDVVGCSNEDAWFDSVSILEDDSDDEFKSVNGGKNIINLTTMKQYESASRFADALSRIGEICRGVPMTLSVEQYLKRDNVKSDDHGCRSQSMSVCATKCLPTSFSFQGLKDXNDTDDDNKESPTPSRLQKLLHSISFNDRMQQLTGGSPDKKKSTVIRLSYKTTACDGCEDSS

SEQ ID NO: 94583 - protein, 130 aa, Setaria italica
  misc_feature (94)..(94): Xaa can be any naturally occurring amino acid
  Transcript Sequence Number=SeqID_28609
IIAPQRNKLCKYSTSTALSDILAVKSDDHGCRSQSMSVCATKCLPTSFSFQGLKDKNDTDDDNKESPTPSRLQKLLHSISFNDRMQQLTGGSPXKKKSTVIRLSYKTTACDGCEDSSELGRSSVSIGRRA

SEQ ID NO: 94584 - protein, 104 aa, Setaria italica
  Transcript Sequence Number=SeqID_28610
  Gene Ontology: Mol. function=electron carrier activity; Biological process=oxidation reduction
  Homolog annotation: Hit_ID=B9X286; Match level="QueryCoverage=100%, HitCoverage=20%, E-value=2e-35, Identity=77%"; Hit description =Cytochrome P450 monooxygenase
LYPPAVAMIRKAKRDVDLGGCAVPAGTEIMMPVMAVHHDVGVWGADAAEFNPARFADGGDRPRQQMAFMPFGGGGRVCIGQNLALIEAKVALALVLQRCEFRLS

SEQ ID NO: 94585 - protein, 276 aa, Setaria italica
  misc_feature (157)..(157): Xaa can be any naturally occurring amino acid
  Transcript Sequence Number=SeqID_28611
  Gene Ontology: Mol. function=protein serine/threonine kinase activity; Cellular component=plasma membrane; Biological process =protein amino acid phosphorylation
  Homolog annotation: Hit_ID=Q9SA72; Match level="QueryCoverage=97%, HitCoverage=32%, E-value=1e-56, Identity=43%"; Hit description =T5I8.2 protein
RPDGGNFTVTLPGAIALAPKASGGDDFYEDLYRTARVFNASSTYKFSVPPGSYFLRLHFSQLFSNLSAKESVFDVAGNGLKLLSKFSVPGEVYQRNSKINSTSNVIVKEYLLNVTSGKLEVEFAPDDGSFAFINAMEVVPVPGNSVFDSVNKVGGVXVKGPFSLGDSGIETMYRVCVGGGKIERKEDPRLWRKWDSDEHYIFSLNAAHSIKNTSNISYVSSDDLTSAPLRLYETARVTEETFVVDKKFNVSWRFNVDPGFDYLVRLHFCELEYEKA

SEQ ID NO: 94586 - protein, 93 aa, Setaria italica
  Transcript Sequence Number=SeqID_28612
  Subcellular localization annotation: CTP_CleavageSite=63; ConfidenceScore=5.15e-01
FAALGRGNRRRTDELSESFTASMFSRSGSIDVSRKSVVRIPLQGTCFTFHSTRNRSGGERLKSAEMRSGLVAREDSTVNVLIVYKHFQTKLQS

SEQ ID NO: 94587 - protein, 95 aa, Setaria italica
  Transcript Sequence Number=SeqID_28613
  Gene Ontology: Mol. function=ATPase activity, coupled to transmembrane movement of substances; Cellular component=integral to membrane; Biological process=transport
  Homolog annotation: Hit_ID=Q8GU65; Match level="QueryCoverage=100%, HitCoverage=6%, E-value=2e-43, Identity=87%"; Hit description=MRP -like ABC transporter
  Pfam annotation: Domain name=ABC_tran; Domain location=11-95; Score= -43.7; E_value=0.0085; Accession=PF00005.19; Description=ABC transporter
LKGINVSISGGEKIGIVGRTGSGKSTLIQVLFRLIEPTEGKMIIDGIDISTLGLHDLRSRLGIIPQEPVLFEGTIRNNIDPIGQYSDAEIWQALK

SEQ ID NO: 94588 - protein, 198 aa, Setaria italica
  Transcript Sequence Number=SeqID_28614
  Gene Ontology: Mol. function=voltage-gated potassium channel activity; Cellular component=integral to membrane; Biological process=potassium ion transport
  Homolog annotation: Hit_ID=O04242; Match level="QueryCoverage=97%, HitCoverage=21%, E-value=1e-98, Identity=91%"; Hit description =Potassium channel
  Pfam annotation: Domain name=cNMP_binding; Domain location=69-158; Score=64.7; E_value=3.5e-16; Accession=PF00027.21; Description =Cyclic nucleotide-binding domain
LQDQMISHLSLKFRTDSEGLQQQETLDTLPKAIRSSISQYLFFNLVQKVYLFQGVSNDLIFQLVSEMKAEYFPPREDVILQNEAPTDFYILVTGSAELIELQNGAEQVAGVAKSGDVVGEIGVLCYRPQLFTVRTKSLCQLLRMNRTAFLNIVQSNVGDGTIIMNNLIQLLKEQKDNSVMVGVLKEIENMLARVIWIC

SEQ ID NO: 94589 - protein, 37 aa, Setaria italica
  Transcript Sequence Number=SeqID_28615
  Homolog annotation: Hit_ID=B6T3D2; Match level="QueryCoverage=100%, HitCoverage=8%, E-value=6e-11, Identity=89%"; Hit description =Saccharopine dehydrogenase
MAPPEPEVFDVVIFGASGFTGKYVIREALKFLSPDSS

SEQ ID NO: 94590 - protein, 381 aa, Setaria italica
  Transcript Sequence Number=SeqID_28616
  Gene Ontology: Mol. function=peptidase activity; Biological process =proteolysis
  Homolog annotation: Hit_ID=Q7X7Q3; Match level="QueryCoverage=100%, HitCoverage=43%, E-value=1e-150, Identity=72%"; Hit description =OSJNBa0019D11.4 protein
  Subcellular localization annotation: CTP_CleavageSite=56; ConfidenceScore=5.01e-01
LTLGTYFKVGSSYIALIWLVSPAFAYGFLEATLSPVRLPKQLKVVTLVLGLVAPVVSSAGLAVRMADVIVGSVVRIDRNPGGLPYWLGNVIVAVAIAVVVCFMFVYLLSYVHISGDKRTLGLLLCLFFGLSLALVSGGIVPAFTEDVARSVNVVHVVDTTGIDGGNREPLSYISLFSNTPGKLTKELVDLGDEEFFCGRNMTVDFVTFTMKYGCWSYKESSTGWSKSEVPVLHVESDSVTDGARQTVISVDTKSSTRWSLGINKQQIDDFTVQVDSEKLVLLGGKSEVDGWHTIQFAGGKKSPTKFQLTLYWSNSAAQTSGREANKEAADVPFLVKLRTDVNRVTPQVAKVLEKLPRWCTPFGKSTSPYTLAFLTGLRVDI

SEQ ID NO: 94591 - protein, 152 aa, Setaria italica
  Transcript Sequence Number=SeqID_28617
VVHISRNNTVYLDCCSLHRVITFRCGQGLVEGLCWCNIAGSVDIYPYIPTAIVGVSFVSFSPCLMCLTVIRLLFLFLLNVQVQLQIYVLFLESVGREQLLALSTGKKFKNLLIQTWMNIAETIHRNTCRSDKHRGEESYKQNKRNKMETHGT

SEQ ID NO: 94592 - protein, 293 aa, Setaria italica
  misc_feature (19)..(19): Xaa can be any naturally occurring amino acid
  Transcript Sequence Number=SeqID_28618
  Gene Ontology: Mol. function=metal ion binding; Cellular component =integral to membrane
  Homolog annotation: Hit_ID=B9SAK9; Match level="QueryCoverage=91%, HitCoverage=77%, E-value=5e-83, Identity=53%"; Hit description=Zinc finger protein, putative
  Pfam annotation: Domain name=zf-DHHC; Domain location=102-166; Score =62.3; E_value=1.8e-15; Accession=PF01529.12; Description=DHHC zinc finger domain
LPRSTLDWRIHEVGYYLGXYGVLVLLTLVQYFYTAGSSPGYVVDVMRAGSSMHATFVNTAALSKQSNSRNGNISSPTSRAQLQKLSTMTPSSSWAQMVMDLYPPGSSSRDWTCTYCRVVQPPRTRHCHDCDKCVLQFDHHCIWLGTCIGKKNHCRFWWYIFQETILCIWTAALYIESLRLDVDKAWWKDFVGVILLAVLIFILIFLLLLLGFHSYIALTNQTTYEVARRKRIFYLRGVPERVHPFSKGICRNLYDFCCSSQKGYILEALPPAEDLEARAARYTCRDVICCRCC

SEQ ID NO: 94593 - protein, 73 aa, Setaria italica
  Transcript Sequence Number=SeqID_28619
MATTIDWHGRNAALYEMAADSKELVRALAAAPPMQQAPTISFAYPCSSGAERQGAAGSLLGGGGLTLAQVLQV

SEQ ID NO: 94594 - protein, 55 aa, Setaria italica
  Transcript Sequence Number=SeqID_28620
ACFLSQHWNSLKKGNEIQTQQLLNFDNTSKMHITKNSKIHNTTPNPWRSYTIQIT

SEQ ID NO: 94595 - protein, 143 aa, Setaria italica
  misc_feature (35)..(35): Xaa can be any naturally occurring amino acid
  Transcript Sequence Number=SeqID_28621
EILNNNPIRVFEEATRKFEDDMDMVKMKIHRYPPXIQVINEWYTVPTVVAIGPYHHGKRQLKQAEKVKHAAAYHCIKNSGRSVQEMYQAVVSVVLEINARRLYDNDVMEGIGDDKFLPMMFFDACFWVTYMLKMSRKACDTLL

SEQ ID NO: 94596 - protein, 59 aa, Setaria italica
  Transcript Sequence Number=SeqID_28622
PRRTGSAGGGGAGNGRWSSRIAWRSPRGRGWAVDPFGLHARGGRISSSFEPRSLLLLKC

SEQ ID NO: 94597 - protein, 99 aa, Setaria italica
  Transcript Sequence Number=SeqID_28623
  Gene Ontology: Mol. function=protein serine/threonine kinase activity; Biological process=protein amino acid phosphorylation
  Subcellular localization annotation: CTP_CleavageSite=53; ConfidenceScore=5.14e-01
PEAFRGNPGLCGYVPGIAACEPKRAPRRRRPLLPAVVGIVAAVSLMLSAVGCRSMATARAKRLGRRSVRLVDGEEEVEREHPRISYRELAEATGGFVQE

SEQ ID NO: 94598 - protein, 96 aa, Setaria italica
  misc_feature (14)..(14): Xaa can be any naturally occurring amino acid
  misc_feature (25)..(25): Xaa can be any naturally occurring amino acid
  Transcript Sequence Number=SeqID_28624
  Subcellular localization annotation: CTP_CleavageSite=39; ConfidenceScore=5.59e-01
PNSASLVPKVQDHXRARPTPPSTAXTLPTPPTPPGPIARSFSIPSRRTSGISDGKETDERQDKGAARMSLSSLPSAQTFLEDREPLSAAAESVSKT

SEQ ID NO: 94599 - protein, 585 aa, Setaria italica
  Transcript Sequence Number=SeqID_28625
  Homolog annotation: Hit_ID=Q67UP0; Match level="QueryCoverage=35%, HitCoverage=65%, E-value=6e-64, Identity=56%"; Hit description =Hydroxyproline-rich glycoprotein-like
PPWAAQDMADMRSCYDNLLSVAAAIANSAYEFSEALQEMGTCLLKRVTPNKDGINDKVLLLLGKSQFELRKLVDSYRVHVLNTITTPSQSLLNELQTVEEMKRQCDEKRELYEFMLNAQKEKGRSKSAKGDTGASEQLRQAQEDYQEEATLFLFRLKSLKQGQFRSLFTQAARHHAAQLNLFRKGLKSLEAVEPHVRLAAEQQHIDHQFSALEEEDYFVEDENDDDYNDSHDGELSFDYGENKEAEESGNATRSHTEDFFNRSKEEYSSVPRERQRIVSQSAPLFPEKKLETEEKIKDLRRSATRKLNTYVLPTPNDVRATSQIVSGNPTLGPLDSRGPLPSPPHTSADMGDLRDNKLPSPTRLSNAQSVLKESNTNTAETRKTLPVGDIALPGYYDLKASDNKKVKRGSFSGPIASRPRSTENIDVLSAAPRHSSAHQPIHIRVSPGNSPPPISSPKIKELHELPRPPVNTSKNTAFPSLVAHSAPLVPNSASLVPKVQDHFRARQTPPSTASPLPTPPTPPGPIARSFSIPSRRTSGISDGKETDERQDKGAARMSLSSLPSAQTFLEDREPLSAAAESVSKT

SEQ ID NO: 94600 - protein, 262 aa, Setaria italica
  Transcript Sequence Number=SeqID_28626
  Gene Ontology: Cellular component=chloroplast
  Homolog annotation: Hit_ID=Q7VAI6; Match level="QueryCoverage=69%, HitCoverage=98%, E-value=3e-20, Identity=33%"; Hit description =Uncharacterized conserved protein
  Subcellular localization annotation: CTP_CleavageSite=51; ConfidenceScore=5.40e-01
MAAGSIKTFSRDLSTLQRLANPRQPRAYSAAGAHRRLPRPPSIRRGAAVVACAPGSEQRSSPAIATQQARPGTGTLSVEFRTREGCRLGIARYPDFVYNAQGGRGVGAARGAESGEDGNGTVLVDFDVASLYIPPMSGATTRFLGLPLPPFLKIDILPEALGGTIDRATGQVDLKFRSRFCFSVGSIYKAPPLFIDTTLTSEESRGAIRSGTGERMDDKGRCKLVGVAVVDPIDDLFMNTFLSLPTECIAYLNATISVATSR

SEQ ID NO: 94601 - protein, 65 aa, Setaria italica
  Transcript Sequence Number=SeqID_28627
WQISHCSCGISSYSCLCIWDCLQLAKKTVEFVICLIPICVCNSLICSVLFITFNRLNEGQIICCC

SEQ ID NO: 94602 - protein, 60 aa, Setaria italica
  Transcript Sequence Number=SeqID_28628
  Gene Ontology: Mol. function=protein dimerization activity
  Homolog annotation: Hit_ID=Q8S7P4; Match level="QueryCoverage=95%, HitCoverage=7%, E-value=1e-11, Identity=59%"; Hit description =Putative transposase
RIFSALVKVKTKSRNKLGDSILDDCLVTFIERDIFFRVKEDDIIKTFMSFKKWRVNKADK

SEQ ID NO: 94603 - protein, 94 aa, Setaria italica
  Transcript Sequence Number=SeqID_28629
  Gene Ontology: Mol. function=oxidoreductase activity; Biological process=oxidation reduction
  Homolog annotation: Hit_ID=B6UA92; Match level="QueryCoverage=100%, HitCoverage=28%, E-value=5e-32, Identity=72%"; Hit description =Hyoscyamine 6-dioxygenase
LSSAASHEALPDSFVFPPDQRPPASAAAVALPVIDLSRPRDEVRRDVLEAGKELGFFQVVNHGVPEQAMRDMESSCEEFFRLPAEDKAAFYTEE

SEQ ID NO: 94604 - protein, 71 aa, Setaria italica
  Transcript Sequence Number=SeqID_28630
RYTNIYIYVYVVCVDMPVCTSVSVGLWRGLFCVWLSSALWCQCDRGAHVCMAMVSMPQLLPWSCTAAGCKC

SEQ ID NO: 94605 - protein, 130 aa, Setaria italica
  misc_feature (25)..(25): Xaa can be any naturally occurring amino acid
  Transcript Sequence Number=SeqID_28631
PDIDLDASGEAALGFKTVPPFSCTXRDKGAQANQIEVKSMSSKKKRAAAIDLSVEAERREEEDRSAGDRRDKDGGVGKKEEQFKEQEEAPPKEETGGEEKVVEVVVDQGGDGTKEEIKYRTQQGEEMEED

SEQ ID NO: 94606 - protein, 82 aa, Setaria italica
  Transcript Sequence Number=SeqID_28632
ERVGRQPSIGELAHSAPPRPRRGRCTPSAADARPHMKKEKNATGSGGLADVSAVMQVEAAAVRRRTRRGRRCWAIATREPRP

SEQ ID NO: 94607 - protein, 328 aa, Setaria italica
  Transcript Sequence Number=SeqID_28633
  Gene Ontology: Mol. function=protein serine/threonine kinase activity; Biological process=protein amino acid phosphorylation
  Homolog annotation: Hit_ID=B9V0F9; Match level="QueryCoverage=53%, HitCoverage=29%, E-value=3e-56, Identity=58%"; Hit description =Protein kinase domain containing protein-2
  Pfam annotation: Domain name=Motile_Sperm; Domain location=166-268; Score=23.3; E_value=9.1e-05; Accession=PF00635.18; Description=MSP (Major sperm protein) domain
  Pfam annotation: Domain name=Pkinase; Domain location=1-154; Score= -82.9; E_value=0.0015; Accession=PF00069.17; Description=Protein kinase domain
  Pfam module annotation: Pfam domain module=Motile_Sperm::Pkinase; Domain location=166-268::1-154
LHTGLKNPVHHLDLKPDNILLDSNMVPKLADFGLSKIFEETRSTEGVHGTLGYMPPEYVSNSIRSTKFDIFSLGVVILEIIAGPTARTKIDDMPLQEFTGLIQANWRIRLQKAWSGSSLEAYCQQVNTCIDVALKCMESDKHKRPHIENVVQQLDETENEIGKSVLLSVQSVELKFHTGPSDLTISSVLRLTNNTAARVAFRLLTTTSEYFLSPLLGGIVPPMSSCAVAVTTSSQKPLEDSNGYFTLESITATDQGIRYSTCDAADSYNNFFTEAQKDGRVAQQVKLTAFYIELPVAGNTTTDETVKQPKNSTYQQHDFTMKPGPSCN

SEQ ID NO: 94608 - protein, 50 aa, Setaria italica
  Transcript Sequence Number=SeqID_28634
SIPGYPCVVPNFRSPQSHLDKLCSKDIYPSDFSPAGICLRRPLLISVNSQ

SEQ ID NO: 94609 - protein, 56 aa, Setaria italica
  Transcript Sequence Number=SeqID_28635
  Subcellular localization annotation: CTP_CleavageSite=37; ConfidenceScore=5.28e-01
CLLQQLASSNYSSCSKLTRSQASAAGLAALCSRAACCAAAAQSTPINWFSLSQEPN

SEQ ID NO: 94610 - protein, 326 aa, Setaria italica
  misc_feature (185)..(185): Xaa can be any naturally occurring amino acid
  misc_feature (285)..(285): Xaa can be any naturally occurring amino acid
  Transcript Sequence Number=SeqID_28636
  Gene Ontology: Mol. function=transcription factor activity; Cellular component=transcription factor complex; Biological process =regulation of transcription, DNA-dependent
  Homolog annotation: Hit_ID=Q9ST55; Match level="QueryCoverage=100%, HitCoverage=70%, E-value=1e-105, Identity=61%"; Hit description=E2F protein
  Pfam annotation: Domain name=E2F_TDP; Domain location=51-116; Score =124.4; E_value=3.6e-34; Accession=PF02319.12; Description =Transcription factor E2Fdimerisation partner (TDP)
  Subcellular localization annotation: CTP_CleavageSite=25; ConfidenceScore=5.25e-01
GSLVTPLGAPVSGKSARTYKSKAKCCKAEPQTPISNAGSPGNPPTPAVPCRYDSSLALLTRKFVSLLKQVQDGILDLNSTAEKLHVQKRRMYDITNVLEGIGLIEKKSKNRIHWKGLDESGTNLDNALSVLKNEVENLNLQEQALDEHISEMRKKLETLTEDENRQRWLFLTEDDIKGLPCFQNXTLIAIKAPHGTSVEVPNPDLMAVESFQRRYRIIIRSAMGPVDLYLVSNFEEKLEGKLDDIATLASHTYFAKCAASVKGPRTKRAQRNRKEAVLNAQQIHXTPDLNAPCPSEGVLRKILPKDVDSDADYWLLTDDDVSITDM

SEQ ID NO: 94611 - protein, 105 aa, Setaria italica
  Transcript Sequence Number=SeqID_28637
  Subcellular localization annotation: CTP_CleavageSite=70; ConfidenceScore=5.27e-01
MPRHHLRVSMISLTGFTILSLALLFASLQAQAGASNLGSGKEKRQSSSSSEYLPVRSVVYRSRSSVALPAAAAKTEAVGYEPFAVCEGCRCCSTSNSSSCVDTSC

SEQ ID NO: 94612 - protein, 166 aa, Setaria italica
  misc_feature (13)..(13): Xaa can be any naturally occurring amino acid
  Transcript Sequence Number=SeqID_28638
  Homolog annotation: Hit_ID=Q4JQF9; Match level="QueryCoverage=100%, HitCoverage=6%, E-value=2e-79, Identity=87%"; Hit description =Aberrant pollen transmission 1
PFAVSDVRLLMDXFHREDFTGTWARLFSRVKKHIVWGVLKSVTGMQGKKFKAKSTSQKEPSAALISASDFNLSDSDGDDAGNSDQLPAFLKKPSDGAGDGFATSVKGLFNSQKKKAKAFVLKTMKGEAEHDFHGERSENEIEFSPFARQLTITKTKKLIRRHTKKL

SEQ ID NO: 94613 - protein, 166 aa, Setaria italica
  Transcript Sequence Number=SeqID_28639
  Gene Ontology: Mol. function=microtubule motor activity; Cellular component=microtubule associated complex; Biological process =microtubule-based movement
  Homolog annotation: Hit_ID=Q75LL2; Match level="QueryCoverage=100%, HitCoverage=13%, E-value=2e-84, Identity=96%"; Hit description =Kinesin-like protein
  Pfam annotation: Domain name=Kinesin; Domain location=1-166; Score =31.3; E_value=1.3e-17; Accession=PF00225.15; Description=Kinesin motor domain
FEHLFARIQKEKEIRRDEKLRFTCKCSFLEIYNEQILDLLNPNSVNLQIREDAKKGVHVENLTEHEISNAREALQQLIEGAANRKVAATNMNRASSRSHSVFTCLIESKWESQGINHHRFSRLNLVDLAGSERQKSSGAEGERLKEATNINKSLSTLGLVITNLIA

SEQ ID NO: 94614 - protein, 287 aa, Setaria italica
  Transcript Sequence Number=SeqID_28640
  Subcellular localization annotation: CTP_CleavageSite=36; ConfidenceScore=5.79e-01
RPSPSPSRSRPPPRSSSSSARRGAPCSRSPRRPSASCSARSRTRRRPATVAAPDPFCSPIPSSRRASSFVLSGRRATATGVSSGGFSLQCQSLPSRCRYRAWWSNGRARRGGGTSRVRHCRAVASAPDHMDERPGKGRYHRFEEIPEAATLDDGEPAHLTDAESARTIVEVNNKATVMISTLVGDGVHERIILPEFPYLTDENGDIYFEVDNEDALLESIMGEDKIAHVIIGLDNTQVFADLDLAAASATEFAQEDDDDDDDDEDDGSDDDEESDFDDDFNDVEGVF

SEQ ID NO: 94615 - protein, 284 aa, Setaria italica
  Transcript Sequence Number=SeqID_28641
  Pfam annotation: Domain name=YL1; Domain location=9-239; Score=-82.3; E_value=0.027; Accession=PF05764.5; Description=YL1 nuclear protein
DWEQNTQVFADLDLAAASATEFAQEDDDDDDDDEDDGSDDDEESDFDDDFNDVEGVFAVDDDDDDEEEDEDDDLPSWSNLETVNSCHPLYFARMIVETATKSNIDWLDRPPASLVVEGQLRPAFAEESTMVAKHLSSDEPQKDKKESGATFFKVEVLSIELITAYGTEPKVKIEEYRKARPDIIAHSAPNVISRLRAGGDKITQALKSLCWRCKAIQVEEAAVIGVDCLGFDLRVCSGTQVQTLRFAFPTKATSEFSAEKQIHELLFPRNTHQEGQSPQARHKS

SEQ ID NO: 94616 - protein, 107 aa, Setaria italica
  Transcript Sequence Number=SeqID_28642
  Gene Ontology: Mol. function=hydrolase activity, acting on ester bonds; Biological process=lipid metabolic process
SRVCKKQTKNLQGLLERGAKYVMVQGLPLTGCLTLAMTLARPDDRDNVSCVASVNRQSYAHNRRLLAALHQLRRRHPDAVIAYADYYAAHLAVMRSPAAYGFTVALS

SEQ ID NO: 94617 - protein, 389 aa, Setaria italica
  Transcript Sequence Number=SeqID_28643
  Gene Ontology: Mol. function=hydrolase activity, acting on ester bonds; Biological process=lipid metabolic process
  Homolog annotation: Hit_ID=B9RMQ3; Match level="QueryCoverage=80%, HitCoverage=95%, E-value=1e-46, Identity=33%"; Hit description=Alpha- L-fucosidase 2, putative
  Pfam annotation: Domain name=Lipase_GDSL; Domain location=42-365; Score=138.0; E_value=3.1e-38; Accession=PF00657.14; Description=GDSL- like LipaseAcylhydrolase
  Subcellular localization annotation: CTP_CleavageSite=23; ConfidenceScore=5.15e-01
MSMATTASNRLLLALTLSIVVVVAAAAAPPAAAAPPSAFRRVYAFGDSFTDTGNTRSTTGPYSFGYVSSPPYGATFFHRSTNRYSDGRLVVDFLAEALNLPSFLPPYLSISNASAAAADGGVGVNFAVAGSTAIEHDFFARNNLSLDITPQSIMTQLAWFDDHLRKANESSKVVGDALFWVGEIGANDYAYTVIARDTIPTKLVRTMAVQRITTFVEGLLERGAKYVMVQGLPLTGCLTLAMTLARPDDRDNVSCVASVNRQSYAHNRRLLAALHQLRRRHPDAVIAYADYYAAHLAVMRSPAAYGFTEPFRACCGSGGGDYNFDLFATCGSPAVNTACAQPARYVNWDGVHMTEAMYKVVAGMFFHAGDAYCRPAFSDLLARKAQGKP

SEQ ID NO: 94618 - protein, 232 aa, Setaria italica
  Transcript Sequence Number=SeqID_28644
  Gene Ontology: Mol. function=protein serine/threonine kinase activity; Cellular component=plasma membrane; Biological process =protein amino acid phosphorylation
  Homolog annotation: Hit_ID=B6SYF7; Match level="QueryCoverage=78%, HitCoverage=39%, E-value=1e-69, Identity=78%"; Hit description =Protein kinase KIPK
  Pfam annotation: Domain name=Pkinase; Domain location=2-147; Score= -53.8; E_value=2.8e-05; Accession=PF00069.17; Description=Protein kinase domain
  Subcellular localization annotation: CTP_CleavageSite=39; ConfidenceScore=5.86e-01
RTGGSSKHAVPAADSPSPPSTSRTASSSSSSSTATTASSAASAGARTPAKSNSFVGTEDYVAPEIIAGRGHDFVVDWWGLGVVLYEMLYGHTPFRGQNRKETFYRVLTKQPELVGEQTPLRDLIARLLEKDPEKRIGARGVKAHPFFRGVDWDRILHVARPPFIPTLPQDEDGDEALDVEKVVREVFASNDPEAAKAGEGEKASPEADGGSGGGDGVGRRDPSKDGDFSVFF

SEQ ID NO: 94619 - protein, 77 aa, Setaria italica
  Transcript Sequence Number=SeqID_28645
  Subcellular localization annotation: CTP_CleavageSite=50; ConfidenceScore=5.19e-01
MVFSVLVSASNFLLSSSSSDRITNVRMDTRDQALVMFTLTASLHGLRPVPCQPGAGGDACEPASTGQMAALYAAVFM

SEQ ID NO: 94620 - protein, 116 aa, Setaria italica
  misc_feature (26)..(26): Xaa can be any naturally occurring amino acid
  Transcript Sequence Number=SeqID_28646
  Gene Ontology: Mol. function=adenylosuccinate lyase activity; Biological process=purine ribonucleotide biosynthetic process
  Homolog annotation: Hit_ID=B4F8Z3; Match level="QueryCoverage=85%, HitCoverage=18%, E-value=4e-13, Identity=46%"; Hit description =Adenylosuccinate lyase
RALQELCGMPDTDTFCLMMVLLPLDXTHLKPFFSEFGLIRYCVLIELPHIQDIPHSRRMLSCSSNMPPFSEEAQLFLDAIIQDFGIDDFEAGTVFWITNAAQTQRWERCQEQLDRD

SEQ ID NO: 94621 - protein, 76 aa, Setaria italica
  Transcript Sequence Number=SeqID_28647
KGNSPSLHKPVSPGPYTKTRNPRDCILQCDVSKTEAKLFIHLSQHTCILLHVQAAILTKYDTIQSNTISFHYFTKH

SEQ ID NO: 94622 - protein, 169 aa, Setaria italica
  misc_feature (106)..(106): Xaa can be any naturally occurring amino acid
  misc_feature (141)..(141): Xaa can be any naturally occurring amino acid
  misc_feature (156)..(156): Xaa can be any naturally occurring amino acid
  Transcript Sequence Number=SeqID_28648
  Gene Ontology: Mol. function=aspartic-type endopeptidase activity; Cellular component=retromer complex; Biological process=DNA integration
  Homolog annotation: Hit_ID=Q6I5B6; Match level="QueryCoverage=78%, HitCoverage=10%, E-value=4e-29, Identity=47%"; Hit description =Putative polyprotein
MRCDPEKATAEEMDQSLAAYDVDVVKLLADYDDDDGLASYESQFTAYRTWVDEDARAASILVASMEDMFSADIVELDFAHLMWAFLRKRYEPTGQSTFLAAIRQEXLVRQGDGTVDDFYAQIFAIWRQIDTLGSQLSTSTXQSCLGQQQTLELRRXYDFLTRLRDEFEP

SEQ ID NO: 94623 - protein, 558 aa, Setaria italica
  Transcript Sequence Number=SeqID_28649
  Gene Ontology: Mol. function=unfolded protein binding; Cellular component=plasma membrane; Biological process=cellular protein metabolic process
  Homolog annotation: Hit_ID=O81503; Match level="QueryCoverage=94%, HitCoverage=96%, E-value=0.0, Identity=81%"; Hit description =F9D12.18 protein
  Pfam annotation: Domain name=Cpn60_TCP1; Domain location=33-529; Score=600.8; E_value=1.5e-177; Accession=PF00118.16; Description=TCP- 1cpn60 chaperonin family
MALHAPVLVLKDSLKRESGAKVHQANIQAAKAVADIIRTTLGPRSMLKMLLDAGGGIVVTNDGNAILREIDIAHPAAKSMIELSRTQDEEVGDGTTSVIVLAGEMLHVAQAFIDKNYHPTVICRAYTKALDDAIAVLDKIAMPVDVNDRVSMLGLVKSSIGTKFTGQFGDLIADLAIDATTTAGVDLGQGMREVDIKKYIKVEKVPGGQLEDSRVLKGVMINKDVVAPGKMRRKIVNPRIILLDSPIEYKKGENQTNAELMKEEDWQVLLEMEEEYIKNLCAQILKFKPDLVITEKGLSDLAIHYLSKAGVSAIRRLRKTDNNRIAKACGAVIVNRPEELQESDVGTGAGLFEVKKIGDEFFAFIVDCKDPKACTVLLRGASKDVLNEVERNLQDAMSVARNILKNPKLLPGGGATELTVSAALKQKSSSVEGVEKWPYEAAALAFEAIPRTLAQNCGLNIIRTMTQLQGKHANGENAWVGLDGRSGEIVDMKERKIWDSYSVKAQTFKTAIEAACMLLRIDDIVSGIKKKQAPGASAPKQPQIETEGDADNEQMIPE

SEQ ID NO: 94624 - protein, 96 aa, Setaria italica
  Transcript Sequence Number=SeqID_28650
  Gene Ontology: Mol. function=hydrolase activity
  Homolog annotation: Hit_ID=B6TRY3; Match level="QueryCoverage=87%, HitCoverage=23%, E-value=9e-24, Identity=66%"; Hit description =Hydrolase
AEARGAVGRVVVMTSGVAAAPGEMREMAAREERTVEEALLPKTAEGLRFLVRRSMHRPPPWMPDFVLDDFIQLMCVDQRKERAELLQELLKNGAGF

SEQ ID NO: 94625 - protein, 79 aa, Setaria italica
  Transcript Sequence Number=SeqID_28651
  Gene Ontology: Cellular component=integral to membrane
  Homolog annotation: Hit_ID=B9SRB0; Match level="QueryCoverage=98%, HitCoverage=17%, E-value=2e-20, Identity=58%"; Hit description =Auxin:hydrogen symporter, putative
MGLLELFVTACVPVFNMLLVTGVGSFLATDFAGILSKEARKHLNNIVFYVFNPSLVAIYLAKTITMESLAKLWFMPVNY

SEQ ID NO: 94626 - protein, 298 aa, Setaria italica
  Transcript Sequence Number=SeqID_28652
  Gene Ontology: Cellular component=plasma membrane
MAPPRRALLALEALLLFSLYLTAAAFQSDELVLNDDEEFEGVGARSSSPSQPAAPAVSSSRRRSADAASAAVGESNALQFTLEHDLGVGKGFTPAGTFSARLKTSAHGTQTLTKLRFMRNELTEDDKDAFKKLLQEDGFYTIRLPSNVLDPTRKDNVVSSIKARCIPRDSLDEHIVIHMDGVNILAVNYGSVGGCQYPRQMKFPSKWTFSSYTILKTAEQAPRTPSFVDQMLEADNGLGEVMKPPEKSFWAKYWMYIIPLGLIVMNAVTAAANIPEEQAAGQGQPGAQRAPAAAARRR

SEQ ID NO: 94627 - protein, 93 aa, Setaria italica
  Transcript Sequence Number=SeqID_28653
  Gene Ontology: Mol. function=nucleoside-triphosphatase activity; Cellular component=membrane; Biological process=proteolysis
  Homolog annotation: Hit_ID=Q6EQ64; Match level="QueryCoverage=79%, HitCoverage=11%, E-value=1e-27, Identity=83%"; Hit description=PDR -type ABC transporter-like
RSPNHLHGNFCLIPANFRMTLLLGPPGAGKTSLLLALAGTLPSSLKVLASSLHCTNGHTMDEFEARRSAAYVSQHDLHMGELTVRETVNFSWE

SEQ ID NO: 94628 - protein, 190 aa, Setaria italica
  misc_feature (44)..(44): Xaa can be any naturally occurring amino acid
  Transcript Sequence Number=SeqID_28654
  Gene Ontology: Mol. function=nucleoside-triphosphatase activity; Cellular component=membrane; Biological process=proteolysis
  Homolog annotation: Hit_ID=A3BXL8; Match level="QueryCoverage=94%, HitCoverage=12%, E-value=1e-93, Identity=90%"; Hit description=PDR20
VGDDHQRFLSKFKDRVDRVGIELPKIEVRYRNLNVEADAYVGSXGLPTIFNTYANVLEGIANALHLTPSRKQKISILHNVSGIIKPHRMTLLLGPPGAGKTSLLLALAGTLPSSLKVTGNITYNGHTMDEFEARRSAAYVSQHDLHMGELTVRETVNFSAKCQGIGHRYDLLVELSRREKGSKVSSQIQK

SEQ ID NO: 94629 - protein, 63 aa, Setaria italica
  misc_feature (14)..(14): Xaa can be any naturally occurring amino acid
  Transcript Sequence Number=SeqID_28655
  Gene Ontology: Mol. function=transferase activity, transferring hexosyl groups; Cellular component=integral to membrane
  Homolog annotation: Hit_ID=Q2P9N4; Match level="QueryCoverage=100%, HitCoverage=12%, E-value=1e-24, Identity=74%"; Hit description =Putative glycosyltransferase
KWMEKVQIETEFYXLHGFWTGLVDRYEQMMEEHHPGLGDDRWPFITHFVGCKTCGRYEDYPLE

SEQ ID NO: 94630 - protein, 97 aa, Setaria italica
  Transcript Sequence Number=SeqID_28656
  Gene Ontology: Mol. function=zinc ion binding; Cellular component =intracellular; Biological process=retina development in camera-type eye
  Homolog annotation: Hit_ID=B4FIA4; Match level="QueryCoverage=100%, HitCoverage=18%, E-value=1e-42, Identity=86%"; Hit description =Chromatin assembly factor 1 subunit B
  Pfam annotation: Domain name=WD40; Domain location=3-41; Score=27.1; E_value=7.3e-05; Accession=PF00400.24; Description=WD domain, G-beta repeat
  Pfam annotation: Domain name=WD40; Domain location=58-96; Score=31.6; E_value=3.1e-06; Accession=PF00400.24; Description=WD domain, G-beta repeat
  Pfam module annotation: Pfam domain module=WD40::WD40; Domain location=3-41::58-96
MRGGTVQINWHDLQPVLSLDFHPASRRLATAGADHDVKIWVISSDGSESKLPTATFQSGLVPNGTAHSSAVNVLRFSPSGEYLASGADGGGIILWKL

SEQ ID NO: 94631 - protein, 118 aa, Setaria italica
  Transcript Sequence Number=SeqID_28657
  Gene Ontology: Mol. function=electron carrier activity; Biological process=oxidation reduction
  Homolog annotation: Hit_ID=Q8H3L0; Match level="QueryCoverage=81%, HitCoverage=17%, E-value=4e-41, Identity=82%"; Hit description =Putative cytochrome P450 monooxygenase
MALGVAGLVLALPLLFLLTRAAWVTVTCYYLTPMRIRRILTGQGVHGPPPRLLVGNLRDVSALVADATAGDMGSLSHDIVGRLLPHYVRWSKIYGRMFVYWYGSEPRVCVTDAGMVRE

SEQ ID NO: 94632 - protein, 140 aa, Setaria italica
  Transcript Sequence Number=SeqID_28658
  Gene Ontology: Mol. function=heat shock protein binding; Cellular component=nucleus
  Homolog annotation: Hit_ID=Q6ZJD0; Match level="QueryCoverage=64%, HitCoverage=23%, E-value=3e-28, Identity=66%"; Hit description =Putative AT hook-containing MAR binding protein 1(AHM1)
  Subcellular localization annotation: CTP_CleavageSite=37; ConfidenceScore=5.71e-01
QPQLPPPPPQPASPPPAPQPRQTVSATPPSKRGRPPRAAETPPAVERNQEGVAPQAPPFWTACPSCCHLHQYDRSYEGQTLLCPSCHQPFAGTAMSTPPPIVPGTDMYYCSWGFFPMGFPGGPAFAGPVSSPGQQPPSAL

SEQ ID NO: 94633 - protein, 98 aa, Setaria italica
  Transcript Sequence Number=SeqID_28659
  Homolog annotation: Hit_ID=Q01M02; Match level="QueryCoverage=91%, HitCoverage=45%, E-value=3e-18, Identity=64%"; Hit description =OSIGBa0096F13.8 protein
EGASPGEKSPEAVAAELKEVLGARKESETAEGGGGWWAGVAQEMSEIEWPAPGKVVGTTGVVLGVIAGSTVALLSVNALLAELSDRVFAGRGLQDFFG

SEQ ID NO: 94634 - protein, 83 aa, Setaria italica
  Transcript Sequence Number=SeqID_28660
SDHEYDNGDTMQLKDAASAARAAAESAERAASAANAPADFANKNNHPFDEVEDCKDSAHEYTHPRKRQSMSNSSRPSRKEHTD

SEQ ID NO: 94635 - protein, 145 aa, Setaria italica
  Transcript Sequence Number=SeqID_28661
  Homolog annotation: Hit_ID=Q9XIC8; Match level="QueryCoverage=44%, HitCoverage=11%, E-value=3e-09, Identity=45%"; Hit description =F23M19.10
IEKLSVKKPSGQTKLKVLKDIAKEHQIDWDTTESEQELLKPPEELIKGPSTFVEACNMPVKTTLTPHVVQPIPTNFSSRYSDDEYDNGDTMQFKDAASAARAAAESAERAASAAKAAADFANKNNHPFDEVEDCKDSAHEYTHPR

SEQ ID NO: 94636 - protein, 222 aa, Setaria italica
  misc_feature (95)..(95): Xaa can be any naturally occurring amino acid
  Transcript Sequence Number=SeqID_28662
SDHEYDNGDTMQLKDAASAARAAAESAERAASAANAPADFANKNNHPFDEVEDCKDSAHEYTHPRKRQSMSNSSRPSRKEHTDAFDELKPHGGKXSSTGSFSGTNHVEDTVNYPADLDTRKTRRRNSRAARKVHSEIKFDDSEGLYSESEDENDVEIQSVERPLPPTREPFSENRHSEEEGPDNDFPELPKANHQSRVHPNMPLDYETLTARFEALKIGKLP

SEQ ID NO: 94637 - protein, 54 aa, Setaria italica
  Transcript Sequence Number=SeqID_28663
SNSMTTIPELGILTILEDKLATKTVYSSSSTTVTLFFSNQLSSALCQNSWENWV

SEQ ID NO: 94638 - protein, 199 aa, Setaria italica
  misc_feature (10)..(10): Xaa can be any naturally occurring amino acid
  misc_feature (91)..(91): Xaa can be any naturally occurring amino acid
  misc_feature (163)..(163): Xaa can be any naturally occurring amino acid
  misc_feature (176)..(176): Xaa can be any naturally occurring amino acid
  Transcript Sequence Number=SeqID_28664
  Gene Ontology: Mol. function=nucleoside-triphosphatase activity; Biological process=small GTPase mediated signal transduction
  Homolog annotation: Hit_ID=Q9FK38; Match level="QueryCoverage=98%, HitCoverage=39%, E-value=1e-68, Identity=67%"; Hit description=DNA repair protein-like
SFAGSAGNLXSQVKECTSALLRFAKLTNIPVFLIGHVTKSGDIAGPRLLEHIVDVVLYMEGERCSSHRLLRSVKNRFGSTDELGVFEMAEXGLQAVLNPSQMFLTEHDSDSEILAGLAVAVILDGSRTFAIEVQALCVSGSLHSGQVVGIPSRRADVIISVLXKQAKSRSLKLSRXCYFLNVVSGFELAETAGDLAIAA

SEQ ID NO: 94639 - protein, 233 aa, Setaria italica
  misc_feature (71)..(71): Xaa can be any naturally occurring amino acid
  Transcript Sequence Number=SeqID_28665
  Gene Ontology: Mol. function=unfolded protein binding; Cellular component=cytoplasm; Biological process=response to stress
  Homolog annotation: Hit_ID=Q08277; Match level="QueryCoverage=93%, HitCoverage=30%, E-value=7e-99, Identity=85%"; Hit description=Heat shock protein 82
  Pfam annotation: Domain name=HSP90; Domain location=3-233; Score =123.2; E_value=8.3e-34; Accession=PF00183.10; Description=Hsp90 protein
AAKLVLGGIVELGVVVDSDDLPLNISRETLQQNKILKVIRKNLVKKCIEMFFEIAENKDDYAKFYDAFSVXVVLGIHEDSQNRAKLADLLRYHSTKSGDEMTSLKDYVTRMKEGQKDIYYITGESRKAVENSPFLERLKRKGYEVLFMVDAIDEYAVGQLKEYDGKKLVSATKEGLKLDEDDEEAKKRREERKKQFEDLCKVIKEILGDRVEKVVVSDRIVDSPCCLVTGEYG

SEQ ID NO: 94640 - protein, 44 aa, Setaria italica
  Transcript Sequence Number=SeqID_28666
  Gene Ontology: Mol. function=protein binding; Cellular component =chromosome; Biological process=chromosome organization and biogenesis
  Homolog annotation: Hit_ID=Q6Z6I3; Match level="QueryCoverage=81%, HitCoverage=2%, E-value=1e-10, Identity=91%"; Hit description =Putative SMC3 protein
CGVEGAGADKIYGVTHKNRVSYINVVSKEQALDFIEHDQTHNAS

SEQ ID NO: 94641 - protein, 114 aa, Setaria italica
  Transcript Sequence Number=SeqID_28667
  Gene Ontology: Mol. function=ATP binding; Cellular component =chromosome; Biological process=chromosome organization and biogenesis
  Homolog annotation: Hit_ID=B9HQG8; Match level="QueryCoverage=78%, HitCoverage=7%, E-value=5e-44, Identity=94%"; Hit description =Condensin complex components subunit
  Pfam annotation: Domain name=SMC_N; Domain location=9-114; Score= -54.0; E_value=1.2e-07; Accession=PF02463.11; Description=RecFRecNSMC N terminal domain
DGDAGDDDNDEDGPRDPDPEGRIEKYIGVKVKVSFTGKGETQSMKQLSGGQKTVVALTLIFAIQRCDPAPFYLFDEIDAALDPQYRTAVGNMIRRLADVADTQFIATTFRPEYP

SEQ ID NO: 94642 - protein, 38 aa, Setaria italica
  Transcript Sequence Number=SeqID_28668
  Gene Ontology: Mol. function=protein binding; Cellular component =chromosome; Biological process=chromosome organization and biogenesis
  Homolog annotation: Hit_ID=Q6Z6I3; Match level="QueryCoverage=97%, HitCoverage=3%, E-value=8e-12, Identity=91%"; Hit description =Putative SMC3 protein
VADKIYGVTHKNRVSYINVVSKEQALDFIEHDQTHNAS

SEQ ID NO: 94643 - protein, 178 aa, Setaria italica
  misc_feature (17)..(17): Xaa can be any naturally occurring amino acid
  Transcript Sequence Number=SeqID_28669
  Gene Ontology: Mol. function=protein binding; Cellular component =chromosome; Biological process=chromosome organization and biogenesis
  Homolog annotation: Hit_ID=B9HQG8; Match level="QueryCoverage=96%, HitCoverage=14%, E-value=9e-72, Identity=77%"; Hit description =Condensin complex components subunit
  Pfam annotation: Domain name=ABC_tran; Domain location=3-151; Score= -38.6; E_value=0.0035; Accession=PF00005.19; Description=ABC transporter
  Pfam annotation: Domain name=SMC_N; Domain location=2-156; Score=6.7; E_value=3.9e-12; Accession=PF02463.11; Description=RecFRecNSMC N terminal domain
  Pfam module annotation: Pfam domain module=ABC_tran::SMC_N; Domain location=3-151::2-156
QGTSVEVFSELVQGGRXILVMMEKKDGDAGDDDNDEDGPRDPDPEGRIEKYIGVKVKVSFTGKGETQSMKQLSGGQKTVVALTLIFAIQRCDPAPFYLFDEIDAALDPQYRTAVGNMIRRLADVADTQFIATTFRPEIAKVADKIYGVTHKNRVSYINVVSKEQALDFIEHDQTHNAS

SEQ ID NO: 94644 - protein, 1162 aa, Setaria italica
  Transcript Sequence Number=SeqID_28670
  Gene Ontology: Mol. function=protein binding; Cellular component =chromosome; Biological process=chromosome organization and biogenesis
  Homolog annotation: Hit_ID=Q6Z6I3; Match level="QueryCoverage=100%, HitCoverage=96%, E-value=0.0, Identity=70%"; Hit description =Putative SMC3 protein
  Pfam annotation: Domain name=GBP_C; Domain location=6-306; Score= -149.7; E_value=0.089; Accession=PF02841.6; Description=Guanylate -binding protein, C-terminal domain
  Pfam annotation: Domain name=SMC_N; Domain location=2-1162; Score =296.2; E_value=7e-86; Accession=PF02463.11; Description=RecFRecNSMC N terminal domain
  Pfam annotation: Domain name=SMC_hinge; Domain location=521-634; Score=108.9; E_value=1.8e-29; Accession=PF06470.5; Description=SMC proteins Flexible Hinge Domain
  Pfam module annotation: Pfam domain module=GBP_C::SMC_N::SMC_hinge; Domain location=6-306::2-1162::521-634
MYIKKVIIEGFKSYREEISTEPFSPKVNVVVGANGSGKSNFFHAIRFVLSDMFQNLRSEDRGALLHEGAGHSVVSAFVEIVFDNTDNRIPVDKEEVRLRRTVASKKDEYYLDGKHVSKTEVMNLLESAGFSRSNPYYVVQQGKIASLTLMKDSERLDLLKEIGGTRVYEDRRRESLKIMQDTANKRKQIDQVVRYLEERLRELDEEKEELKKYQQLDKQRRSLEYTILDHELNDARNELASMDDNRRKISESMSHADNEVVDVREMIKSFDKEIKVSTKGINDTKAQKEGVEKRRTEALKVVAQIELDLRDIKDRIVNEKRAKDEAARDLHSVRRESEKSKSELAEISKVHQAKLKEEEEISKSIMDREKRLSILYQKQGRATQFANKAARDNWLQKEIEDLEPVLLSNRKQEGLLQEEIQKLKDEISNLTTYIESRKSESSKLEATLAKRHNDYNDLRKQRDVLQEERKSFWTEETDVGAEIQRLRDELTKAQKSLDHATPGDIRRGLNSVSRIIRDHGISGVFGPVLELVDCEEKFFTAVEVTAANSLFHVVVENDDISTRIIQILTREKGGRVTFIPLNRVKVPDLNCPQSPDFVPLLKKLKYRADHRRAFEQVFGRTVICRDLETATKVARGNSLDCITLDGDQVSKKGGMTGGFYDSRRSKLKFVKIIRDSKIAIEKKTAHLENVGNKLKDIDKKITDLVTRQQQMDAERDHAKSELEQIKVDITSAMKQKGSLEKALGKKEKSLENIRNQIEQIQSSIAMKNDEMGTELIDQLTSEERDLLSRLNPEITELKEKFLLCKNSRIEIETRKEELETNLSTNLIRRQKELEAIISSADSRTLPLEAESKEQELKSSKRNLDELTSLLKANVDAINNFTRKMDDLKRKRDDLKTREAILEQTVQDGAKDLEQLMNSRSTHLAKQEECMKKIRDLGSLPADAFEAYKRKNKKQLQKMLYECNEQLKQFSHVNQKALDQYVNFTEQREQLQRRRAELDAGDQKIMELISVLDQRKDESIERTFKGVARHFREVFSELVQGGHGYLVMMKKKDGDAGDDDNDEDGPRDPDPEGRIEKYIGVKVKVSFTGKGETQSMKQLSGGQKTVVALTLIFAIQRCDPAPFYLFDEIDAALDPQYRTAVGNMIRRLADVADTQFIATTFRP

SEQ ID NO: 94645 - protein, 65 aa, Setaria italica
  Transcript Sequence Number=SeqID_28671
YRENGRGKREMEGCGSHIHRFNLVLYIGANTTCDIKSLLGPTLEPGVHLYIAGALIPVYTRLLFS

SEQ ID NO: 94646 - protein, 167 aa, Setaria italica
  Transcript Sequence Number=SeqID_28672
  Gene Ontology: Mol. function=ATPase activity, coupled to transmembrane movement of substances; Cellular component=integral to membrane; Biological process=transport
  Homolog annotation: Hit_ID=Q7FMW1; Match level="QueryCoverage=100%, HitCoverage=11%, E-value=6e-56, Identity=65%"; Hit description=MRP -like ABC transporter
  Pfam annotation: Domain name=ABC_tran; Domain location=54-167; Score=- 19.2; E_value=0.00012; Accession=PF00005.19; Description=ABC transporter
KPSSYGNRSSIEKQSVAGTVEIEAGQYSWEAPDNILKKTKFTLKIDRKVDIIKGQKVAVSGSVGSGKSSLLCAIMGEIPRVSGAETTVVGSMAYVPQSAWIQTGTIQDNVLFGKAMDKALYDEVLQGCALDKDVELWANGDMTLVGERGMNLSGGQKQRIQLARALY

SEQ ID NO: 94647 - protein, 36 aa, Setaria italica
  Transcript Sequence Number=SeqID_28673
MAAHHLLLLLLAVLLPAAATADPDAVQDYCVPDAGG

SEQ ID NO: 94648 - protein, 67 aa, Setaria italica
  misc_feature (27)..(27): Xaa can be any naturally occurring amino acid
  Transcript Sequence Number=SeqID_28674
  Gene Ontology: Mol. function=ATPase activity, coupled to transmembrane movement of ions, phosphorylative mechanism; Cellular component=integral to membrane; Biological process=phospholipid transport
  Homolog annotation: Hit_ID=Q9XIE6; Match level="QueryCoverage=100%, HitCoverage=6%, E-value=2e-24, Identity=68%"; Hit description =Phospholipid-transporting ATPase 3
RFQNDMSINNAHVDILQGQHWESTPWXRLQIKQDGYFPADLLFLSSTNPDGVCYIETANLDGETNLE

SEQ ID NO: 94649 - protein, 120 aa, Setaria italica
  Transcript Sequence Number=SeqID_28675
VTRSKKTKYYHFITCIPKKKLAGPFKLNIKKHKSKQNVNIPYIPDPHKCTITTVTQVKYQMNSESYFGTLHELFALKQSHYFNFQILWMTTSTREINQLKNYLCFPKSSSMCILPCLQPP

SEQ ID NO: 94650 - protein, 1136 aa, Setaria italica
  misc_feature (1100)..(1100): Xaa can be any naturally occurring amino acid
  Transcript Sequence Number=SeqID_28676
  Gene Ontology: Mol. function=ATPase activity, coupled to transmembrane movement of ions, phosphorylative mechanism; Cellular component=integral to membrane; Biological process=phospholipid transport
  Homolog annotation: Hit_ID=B9HU80; Match level="QueryCoverage=96%, HitCoverage=90%, E-value=0.0, Identity=78%"; Hit description =Aminophospholipid ATPase (Fragment)
  Pfam annotation: Domain name=E1-E2_ATPase; Domain location=37-321; Score=-1.5; E_value=9.8e-05; Accession=PF00122.12; Description=E1-E2 ATPase
  Pfam annotation: Domain name=Hydrolase; Domain location=339-799; Score=-1.6; E_value=0.057; Accession=PF00702.18; Description =haloacid dehalogenase-like hydrolase
  Pfam module annotation: Pfam domain module=E1-E2_ATPase::Hydrolase; Domain location=37-321::339-799
FEQFRRVANLYFLMISILSTTPISPVHPVTNVVPLSLVLLVSLIKEAFEDWKRFQNDMSINNAHVDILQGQHWESTPWKRLQVGDIVRIKQDGYFPADLLFLSSTNPDGVCYIETANLDGETNLKIRKALEKTWDFVTPDKASGFKGEVQCEQPNNSLYTFTGNLIVDKQTIPLSPNQLLLRGCSLRNTEYIVGAVIFTGHETKVMMNSMNVPSKRSTLEKKLDKLILALFATLFSMCVIGAIGSGVFINEKYFYLGLRGRVEDQFNPKNRFVVTILTMFTLITLYSTIIPISLYVSIEMIKFIQCTQFINNDLHMYHAESDTPALARTSNLNEELGQVEYIFSDKTGTLTRNLMEFFKCSIDGETYGTGITEIEKGGAERAGIKIDDEGKRSASAVHEKGFNFDDARIMRGAWRNEPNPEACKEFFRCLAICHTVLPEGEETPEKISYQAASPDEAALVAAAKNFGFFFYRRTPTTVMVRESHVERMGSIQDVPYEILNVLEFNSTRKRQSVVCRFPNGRLVLYCKGADNVVYERLADGNHDMKKTSREHLEQFGSAGLRTLCLAYRDLSREQYESWNEKFVQAKSSLRDRDKKLDEVAELIEKDLILIGCTAIEDKLQDGVPACIETLSAAGIKIWVLTGDKMETAINIAYACSLVNNDTKQFTISSETNAIREAEDRGDPVEIARVIKDSVKQSLKSFHEEARHSLNSTPERKLALIIDGRCLMYALDPTLRVDLLGLSLICHSVVCCRVSPLQKAQVTSLVKKGARKITLSIGDGANDVSMIQAAHVGIGISGQEGMQAVMASDFAIAQFRFLTDLLLVHGRWSYLRLCKVITYFFYKNLTFTLTQFWFTFQTGFSGQRFYDDWFQSLYNVIFTALPVIIVGLFDKDVSASLSKRYPQLYKEGIRNSFFKWRVIAVWGFFAFYQSIVFFYFTAAASRHGHGSSGKILGLWDVSTMAFSCVVVTVNLRLLMACNSITRWHYISVAGSIVAWFLFIFIYSAIMTSFDRQENVYFVIYVLMSTFFFYLTLLLVPIIALFGDFLYLSIQRWLFPYDYQIIQEQHKDEPHEYSRVQLPETSHLSPEEARSYMISMLPRESXSTLASPSIPRATSRSSPRSKVLACHTRRGMWPGEQA

SEQ ID NO: 94651 - protein, 157 aa, Setaria italica
  Transcript Sequence Number=SeqID_28677
  Gene Ontology: Mol. function=RNA binding
  Homolog annotation: Hit_ID=B6T8H1; Match level="QueryCoverage=100%, HitCoverage=62%, E-value=9e-72, Identity=87%"; Hit description=CRS1 / YhbY domain containing protein
  Pfam annotation: Domain name=CRS1_YhbY; Domain location=1-85; Score =70.5; E_value=6.2e-18; Accession=PF01985.13; Description=CRS1  YhbY domain
VKERKELASYAHGLGKKLKSQQVGKGGVTPNLVSAFSDNLESNELLKLKIHGNCPGELPDVILQLEESTGSIAIDQIGRSVILYRPSTSKMKKRQEAAENARRFARSKEEIARRFVKSEESFEERPRNSAGRRFVSTFGSQQKRRPMASKGSSYGRG

SEQ ID NO: 94652 - protein, 152 aa, Setaria italica
  Transcript Sequence Number=SeqID_28678
  Homolog annotation: Hit_ID=B6TS29; Match level="QueryCoverage=78%, HitCoverage=37%, E-value=7e-35, Identity=64%"; Hit description=CAAX prenyl protease 2
  Subcellular localization annotation: CTP_CleavageSite=33; ConfidenceScore=5.55e-01
ARPLPPPTGHPSAFPPPTSLRSGLHRRFACAAVASTASALATAALLRVWSLGDFADMLAVFGIRKDHLLQAVAIPLFLTSLVYAGSFVNKLWPLASSWGGDGDEAGISSAQRLVLRIQAALDDVMVWRNYVVVCSSPSPLSFCTSYNFYKIL

SEQ ID NO: 94653 - protein, 87 aa, Setaria italica
  Transcript Sequence Number=SeqID_28679
KQCLKGSSFTSEVDFFLWRLVSAGGMSKGRKCHLAVFRLKVRKHVLIVLSVQDGAEQAGVSLGTVPCAQQISFRKESCSNRTNGPWM

SEQ ID NO: 94654 - protein, 139 aa, Setaria italica
  misc_feature (1)..(16): Xaa can be any naturally occurring amino acid
  Transcript Sequence Number=SeqID_28680
XXXXXXXXXXXXXXXXFSSSSQAYVTLFASTYKLQLTVYEIPVWHRLITSRGHWFCLNKTPCGRKSAAHKALCLMILQLVRHHPLDIPPALTNLQRKKSTSLVKLDPFRHCFQIVTLTSLQCSNSRQHYISTSIIFCSC

SEQ ID NO: 94655 - protein, 114 aa, Setaria italica
  Transcript Sequence Number=SeqID_28681
  Gene Ontology: Mol. function=metallocarboxypeptidase activity; Biological process=proteolysis
  Homolog annotation: Hit_ID=A1YKF5; Match level="QueryCoverage=73%, HitCoverage=19%, E-value=3e-32, Identity=73%"; Hit description=Zinc carboxy peptidase
TLEISDTKWPKAAELPVIWEHNRMSMLNLLASLIKSGVHGRIFAADTGRPIPGSVMIKGIDSKVIASRAFGDYHRIIVPGKKYEGTSLFLRIYVYGYITCNCKSNWESSDWHVS

SEQ ID NO: 94656 - protein, 208 aa, Setaria italica
  Transcript Sequence Number=SeqID_28682
  Gene Ontology: Mol. function=metallocarboxypeptidase activity; Cellular component=integral to membrane; Biological process =proteolysis
  Homolog annotation: Hit_ID=A1YKF5; Match level="QueryCoverage=98%, HitCoverage=48%, E-value=1e-71, Identity=69%"; Hit description=Zinc carboxy peptidase
MEPFWYPIYGGMQDWNYIHGGCFELTLEISDTKWPKAAELPVIWEHNRMSMLNLLASLIKSGVHGRIFAADTGRPIPGSVMIKGIDSKVRASRAFGDYHRIIVPGKKYEVMASMEGFRSKSTHIVLEQEAVSLDFILDPDGVDGQMKLLRSDYDCRCDNDKMFHVREAHLWLYLLVVCGILALYLVFKRKAASRLLAFRYSPRRPVAV

SEQ ID NO: 94657 - protein, 142 aa, Setaria italica
  Transcript Sequence Number=SeqID_28683
  Gene Ontology: Mol. function=structural constituent of cell wall; Cellular component=anchored to membrane
  Homolog annotation: Hit_ID=Q4KXE0; Match level="QueryCoverage=51%, HitCoverage=22%, E-value=4e-24, Identity=68%"; Hit description=Cold acclimation induced protein 2-1
  Pfam annotation: Domain name=Cu_bind_like; Domain location=1-76; Score=28.8; E_value=6.7e-08; Accession=PF02298.9; Description =Plastocyanin-like domain
NIISSCAGLDHVHERAVFVYPKETDSVLLVEPAAYNSCNTSSYLQKFDDGNTVVKLDRSGPFFFISGNEASCRANEKLIVVVLADRTPPGSRTPPGAPPTMSPPSPSPMPSPSSPPPAAAPALSPSSPPPSGAAPLPAPAAT

SEQ ID NO: 94658 - protein, 46 aa, Setaria italica
  Transcript Sequence Number=SeqID_28684
LAIICCVFQNYFYNSIHIDTLELVVHFYLGARIPEADNLTTGTEFY

SEQ ID NO: 94659 - protein, 54 aa, Setaria italica
  Transcript Sequence Number=SeqID_28685
QVFKPLKNYTLPFIRSELLEQLKQDIRRCLMLLVPWTCKLQPRRSFLRPMANHM

SEQ ID NO: 94660 - protein, 153 aa, Setaria italica
  Transcript Sequence Number=SeqID_28686
  Gene Ontology: Mol. function=protein serine/threonine kinase activity; Biological process=protein amino acid phosphorylation
  Homolog annotation: Hit_ID=Q9XGL2; Match level="QueryCoverage=100%, HitCoverage=29%, E-value=2e-31, Identity=50%"; Hit description=CsPK3
RPGGRLPVAAARFYAAEVLLALEYLHALGFVYRDLKPENILLRGDGHVVLSDFDLALPASVEPAVRRRQVRKQSRRRKSILLPSCFSGANGGSGDDGDELEIDAKERFEFVAEPTSASSKDCVGTHEYLAPELVSGSGHGNGVDWWAFGVFLY

SEQ ID NO: 94661 - protein, 106 aa, Setaria italica
  Transcript Sequence Number=SeqID_28687
LLSSPAPAQTHPQPQPQTQTPPPPAAAQHAANPYTYPHPYQYQQQEAKTHAYAHPTSAPPQPNPSADHGHLLLHSLLRRVAVLESALPGGFPAPPPSRRPPHPKPS

SEQ ID NO: 94662 - protein, 69 aa, Setaria italica
  Transcript Sequence Number=SeqID_28688
CTCSITITGRNSITVQNYYKKRHICHVHTDSNKTCKLVNTSKTNAHKIMDETFLWHTQLEQETSIEGTQ

SEQ ID NO: 94663 - protein, 85 aa, Setaria italica
  Transcript Sequence Number=SeqID_28689
DQAKTLPNGDLPTSQVVGQSESADSKGMDSLKNVEGASTDENPKMLQQIEQFNARSYKDNNKEADGTVRSSTFEEPQKQSSWPKG

SEQ ID NO: 94664 - protein, 41 aa, Setaria italica
  Transcript Sequence Number=SeqID_28690
NKSEAKQHIKSGAVGIYRILKALEGSCIKYEDAIGRNKRAS

SEQ ID NO: 94665 - protein, 230 aa, Setaria italica
  misc_feature (83)..(83): Xaa can be any naturally occurring amino acid
  Transcript Sequence Number=SeqID_28691
  Homolog annotation: Hit_ID=Q01JT0; Match level="QueryCoverage=86%, HitCoverage=45%, E-value=3e-49, Identity=51%"; Hit description =OSIGBa0152L12.4 protein
SVVLLEHEDPLKWKPFSPAWMKPKWWEMLCDHWAKDEIMKVSYQQRKNRYSGKRPCDAAGSQKGLYNGGKLAIGIDSPTKISXGVCCERACQTEDTRDQPNKESQCTQLGSHSVQRQVGSGKRGSYCGAIGIGKKSQHESSSKSSPVCLSKQGQQPMFTKEQVQEMINQALQGLNEAWEKKFLSLEQKMPSMSSSHIVPNVSKLPLSIELIIDRKSWGLLDSSMTFICRV

SEQ ID NO: 94666 - protein, 112 aa, Setaria italica
  Transcript Sequence Number=SeqID_28692
HRHQSGKAFARSSCTTTSSPQQEIYGVLVDKPAGLPCIVELNTTRRHRRCKGCQPLPPTHRQEARARGAPASSEDPAARAETTSPSTRSTIGHRTARRRAPKSDRHHHPRHR

SEQ ID NO: 94667 - protein, 265 aa, Setaria italica
  misc_feature (59)..(59): Xaa can be any naturally occurring amino acid
  Transcript Sequence Number=SeqID_28693
  Gene Ontology: Mol. function=protein serine/threonine kinase activity; Cellular component=plasma membrane; Biological process =protein amino acid phosphorylation
  Homolog annotation: Hit_ID=B9SB26; Match level="QueryCoverage=100%, HitCoverage=30%, E-value=8e-76, Identity=56%"; Hit description =Kinase, putative
  Pfam annotation: Domain name=Pkinase_Tyr; Domain location=154-265; Score=-118.4; E_value=7.4e-06; Accession=PF07714.9; Description =Protein tyrosine kinase
TQQADSLWLQLGADSMTSASGTDALLNGLEIFKLSRNGNLDYVLGHIDMGNQRDSSKGXKRKELWEEVGIGSASVVALTSVVLASWCYIRKKRKAIKKEAPPGWHPLVLHEAMKSTTDARAASKSSLTRNASSIGHRMGRRFSIAEIRAATKNFDESLVIGSGGFGKVYKGEIDEGTTVAIKRANTLCGQGLKEFETEIAMLSKLRHRHLVAMIGYCEEQKEMILVYEYMAKGTLRSHLYGSGLPPLTWKQRIDACIGAARGLHY

SEQ ID NO: 94668 - protein, 171 aa, Setaria italica
  misc_feature (2)..(2): Xaa can be any naturally occurring amino acid
  misc_feature (19)..(19): Xaa can be any naturally occurring amino acid
  Transcript Sequence Number=SeqID_28694
  Gene Ontology: Mol. function=structural molecule activity; Cellular component=thylakoid lumen
  Homolog annotation: Hit_ID=Q2R1S1; Match level="QueryCoverage=95%, HitCoverage=60%, E-value=7e-73, Identity=82%"; Hit description =Harpin binding protein 1, putative, expressed
  Pfam annotation: Domain name=PAP_fibrillin; Domain location=1-169; Score=164.2; E_value=3.7e-46; Accession=PF04755.4; Description=PAP _fibrillin
  Subcellular localization annotation: CTP_CleavageSite=75; ConfidenceScore=5.04e-01
AXRELEAAGGGPVDLNKDXHRLQGRWRLVYSSAFSSRTLGGSRPGPPTGRLLPITLGQVFQRIDVVSRDFDNIVELELGAPWPLPPVEATATLAHKFEVVGTSGIKINFEKTTVKTKGSLSQLPPLEVPRIPDNLRPPSNTGSGEFEVTYLDDDTRVTRGDRGELRVFVIA

SEQ ID NO: 94669 - protein, 73 aa, Setaria italica
  Transcript Sequence Number=SeqID_28695
LKFPWSLHRSILKMIRLLKGGQSLTKRREPAKQKLSLQIKGGRKFIHLSFCQNLQLTRMCRSPEKGLLPNLQF

SEQ ID NO: 94670 - protein, 154 aa, Setaria italica
  misc_feature (60)..(60): Xaa can be any naturally occurring amino acid
  Transcript Sequence Number=SeqID_28696
  Gene Ontology: Mol. function=dopamine beta-monooxygenase activity; Biological process=histidine catabolic process
  Homolog annotation: Hit_ID=B9RNX5; Match level="QueryCoverage=92%, HitCoverage=17%, E-value=4e-37, Identity=52%"; Hit description =Dopamine beta-monooxygenase, putative
  Pfam annotation: Domain name=DOMON; Domain location=18-152; Score =3.7; E_value=0.027; Accession=PF03351.9; Description=DOMON domain
AERAPTMFDNCIPLSETETYRLRWTLNASAGTVDIGLEAAIGSEYYMAFGWADPKANSPXAMIHADVVVAGFTEEGTPFAEDYYISDYTECTLGKDDSPVSGVCPDKVYEDGKNDSILVYGHRRDGVSFVRYVRKLDSEDAKYDVPGGCCGGEW

SEQ ID NO: 94671 - protein, 56 aa, Setaria italica
  Transcript Sequence Number=SeqID_28697
HWIGQYFVVPLGLPYCAEFLYASASICKFWTEFEFIGRARGHRWRNSQCGALSSLE

SEQ ID NO: 94672 - protein, 84 aa, Setaria italica
  Transcript Sequence Number=SeqID_28698
PDAPVHLGGPFLVCLLVLIAVPHLCCLLLINYIVLIGATSMVCFQGICLILISLIFLACSVSWFVYRCDLFSYFLLVYVWPYEV

SEQ ID NO: 94673 - protein, 161 aa, Setaria italica
  misc_feature (22)..(22): Xaa can be any naturally occurring amino acid
  misc_feature (65)..(65): Xaa can be any naturally occurring amino acid
  Transcript Sequence Number=SeqID_28699
  Subcellular localization annotation: CTP_CleavageSite=23; ConfidenceScore=5.34e-01
GRGRRRGSPGAAPSGPFRARAXRAAVAEAPAPPPRRRSRRPRRQLVTPAPAGPAAEAEAGAARTXPPRRQRAPRRRTCGRGARRRGPGARPAGRRGPPPRCGARWRPGWSRSPPRARRSPRRSSRGRRGARGRRRAGGEPPPPLEVGVAMPATAALAAGCR

SEQ ID NO: 94674 - protein, 64 aa, Setaria italica
  Transcript Sequence Number=SeqID_28700
RSYQRSMLELLLPPLCKDVMLPRSVIRPLISPFLGESAVFVNISSQSHPIFLCYFPLLLLYIYT

SEQ ID NO: 94675 - protein, 73 aa, Setaria italica
  Transcript Sequence Number=SeqID_28701
  Subcellular localization annotation: CTP_CleavageSite=39; ConfidenceScore=5.19e-01
MAGAQNWRSYLCCVGGSAAVEDDDSTPRRRQVRGKDSPRSSSRMSFTSLSSSEMLSPEDLSLTLSGSNLHAFT

SEQ ID NO: 94676 - protein, 66 aa, Setaria italica
  Transcript Sequence Number=SeqID_28702
IINRRDRRRFKISGNCSKCWYGSCHVLVASCFISYSHCSAWLGRPGPPCPAWLCCNHYCGSAATKK

SEQ ID NO: 94677 - protein, 84 aa, Setaria italica
  Transcript Sequence Number=SeqID_28703
LKVIRLLGGMQLLVELVGPMACAAITYSSSSKHWNSYYHHMNEVGKMKCAPKSFSLEEKQSEQDSCILDCFYLSYASRDTSKYK

SEQ ID NO: 94678 - protein, 46 aa, Setaria italica
  Transcript Sequence Number=SeqID_28704
ICHLRFSPPFFSRLEQPFSSSLHLTCIALSNRPTMWLYHCRLEYTI

SEQ ID NO: 94679 - protein, 88 aa, Setaria italica
  Transcript Sequence Number=SeqID_28705
  Gene Ontology: Mol. function=transferase activity, transferring glycosyl groups; Biological process=metabolic process
  Homolog annotation: Hit_ID=Q6Z381; Match level="QueryCoverage=75%, HitCoverage=12%, E-value=1e-22, Identity=81%"; Hit description =Putative UDP-glucosyltransferase
  Subcellular localization annotation: CTP_CleavageSite=62; ConfidenceScore=5.04e-01
MAEEIKEASSPLHVVVFPWLAFGHMIPFLELSKRLARRGHAVTFVSTPRNAARLRAVPLELSARVRVVTLDLPAVGGATGRRRVHRRR

SEQ ID NO: 94680 - protein, 108 aa, Setaria italica
  Transcript Sequence Number=SeqID_28706
  Gene Ontology: Mol. function=electron carrier activity; Biological process=gibberellin catabolic process
  Homolog annotation: Hit_ID=A1KXL0; Match level="QueryCoverage=57%, HitCoverage=12%, E-value=6e-25, Identity=84%"; Hit description =Cytochrome P450-like protein (Fragment)
PSSFLSGNLPEMQARAAAAAVAETGGRDFEKEGFDDYCKRIFPYFDKWRKAYGETYLYWLRRRPALYVSDPELIREIGRCVSLDLGKPTYLQKGQEPLFGRGVLKANG

SEQ ID NO: 94681 - protein, 100 aa, Setaria italica
  Transcript Sequence Number=SeqID_28707
  Gene Ontology: Mol. function=sodium:hydrogen antiporter activity; Cellular component=integral to membrane; Biological process=sodium ion transport
  Homolog annotation: Hit_ID=A7X9Z1; Match level="QueryCoverage=90%, HitCoverage=17%, E-value=9e-30, Identity=71%"; Hit description =Sodium/hydrogen exchanger
MNDDVANICFVVMDALDIDKWKTSKASFKTSISLFGIIILLVLLGRAAFVFPISILSNNMSGSSERVPITFKHQFVIWWAGLMRGAVSIALAYNQFTFSV

SEQ ID NO: 94682 - protein, 361 aa, Setaria italica
  misc_feature (54)..(54): Xaa can be any naturally occurring amino acid
  misc_feature (72)..(72): Xaa can be any naturally occurring amino acid
  Transcript Sequence Number=SeqID_28708
  Gene Ontology: Mol. function=sodium:hydrogen antiporter activity; Cellular component=integral to membrane; Biological process=sodium ion transport
  Homolog annotation: Hit_ID=A7X9Z1; Match level="QueryCoverage=96%, HitCoverage=66%, E-value=1e-158, Identity=79%"; Hit description =Sodium/hydrogen exchanger
  Pfam annotation: Domain name=Na_H_Exchanger; Domain location=2-360; Score=93.2; E_value=9.1e-25; Accession=PF00999.13; Description =Sodiumhydrogen exchanger family
RYFSCSQGKHSHIMRFDEQLFFIYVLPPIIFNAGFQVKKKQFFHNFMTIMSFGXFGVFISVAIVSAGCYWLXPKVGFGQLDASDYLALGAIFSSTDTVCTLQVINQDETPRLYSLVFGEGVVNDATAVVLFNAIKNLNISQLKGRAVLKVISDFLYLFATSTVLGISIGLSTAYVLKALYLGRHSTDREVALMALMAYLSYMMAELLELSGILTVFFCGIVMSHYAWHNVTASSRITTKHIFATSSFIAETFIFLYVGMDALDIDKWKTSKASFKTSISLFGIIILLVLLGRAAFVFPISILSNNMSGSSERVPITFKHQFVIWWAGLMRGAVSIALAYNQFTFSGVTSDPVLLSTILLPS

SEQ ID NO: 94683 - protein, 115 aa, Setaria italica
  Transcript Sequence Number=SeqID_28709
MLKHMVGRITTKPGGKPEMGNASVVQRYDRPLPKVRTSKAEPGQSGSRQLPSGALNVQHIQEIIQLYQGKSSTHHGPMSVDDIASKFRVEASVVRNIVQSVSLPQDETPKKKEEY

SEQ ID NO: 94684 - protein, 114 aa, Setaria italica
  Transcript Sequence Number=SeqID_28710
TGLTVYLSGGQGQIVGGAVAGPLVASGPVVIVAACFGNAAYERLPLDDDEPPQHQQTPQGLAGGQSSSSPPPQLPMGAGHPHPPPSLADQLPHSLMNGLPLPGDAYAWAGPGGG

SEQ ID NO: 94685 - protein, 80 aa, Setaria italica
  Transcript Sequence Number=SeqID_28711
  Subcellular localization annotation: CTP_CleavageSite=51; ConfidenceScore=5.60e-01
AAPPVLFPPIVPSAARRLPSTSWSSRRPERPQPVAQRQARSGWTEPTGPISAARGARSPHPLWLSPQSRPPPPSIQTGAR

SEQ ID NO: 94686 - protein, 130 aa, Setaria italica
  Transcript Sequence Number=SeqID_28712
  Gene Ontology: Mol. function=substrate-specific transmembrane transporter activity; Cellular component=integral to membrane; Biological process=transmembrane transport
  Homolog annotation: Hit_ID=Q2R0P9; Match level="QueryCoverage=96%, HitCoverage=27%, E-value=9e-41, Identity=68%"; Hit description=Sugar transporter family protein
  Subcellular localization annotation: CTP_CleavageSite=28; ConfidenceScore=5.06e-01
MAQQAADGTEVPLLPSSAAGRRDRFAFVCATLASMTTMIHSYNLTLMSGAQLFIREDVGLTDAQIEVLAGSMNVFMLVSILGAGWVADRLGRRCVLVLANVFLMAGALAMSMGGSYAALMAARFVTGIGA

SEQ ID NO: 94687 - protein, 405 aa, Setaria italica
  Transcript Sequence Number=SeqID_28713
  Gene Ontology: Mol. function=substrate-specific transmembrane transporter activity; Cellular component=integral to membrane; Biological process=transmembrane transport
  Homolog annotation: Hit_ID=Q2R0P9; Match level="QueryCoverage=82%, HitCoverage=68%, E-value=1e-124, Identity=68%"; Hit description =Sugar transporter family protein
  Pfam annotation: Domain name=MFS_1; Domain location=43-395; Score =70.4; E_value=6.6e-18; Accession=PF07690.8; Description=Major Facilitator Superfamily
  Pfam annotation: Domain name=Sugar_tr; Domain location=28-405; Score =79.4; E_value=1.3e-20; Accession=PF00083.16; Description=Sugar (and other) transporter
  Pfam module annotation: Pfam domain module=MFS_1::Sugar_tr; Domain location=43-395::28-405
MKHPTPYKSLPTRSQERHGAAGCRWHGGAAPPLVGGGSPGQPSMIHSYNLTLMSGAQLFIREDVGLTDAQIEVLAGSMNVFMLVSILGAGWVADRLGRRCVLVLANVFLMAGALAMSMGGSYAALMAARFVTGIGAGFGRVVAPVYNTEISPASTRGVLSSLQNIFINVGTLLSYVSNYAFSGLPVHIGWRLMYGIGVVPPVFVAAAVFFMPESPRWLAMRGRHADARAVLLRTSDTPADADLRLSEIKQDVAHQPEQQGASHGGGGGCGVWKELVFRPSASVRRVLACVIGLEFFVPASGVEAILLYSPLVFKAAGMASKGAALGATVAIGVVKMCFILVGVLLTDRVGRRPLLLVSTAGVAVTTASLALTLSVGTRAAPAAAPAMCLASVLAVVATFSVGYAL

SEQ ID NO: 94688 - protein, 89 aa, Setaria italica
  Transcript Sequence Number=SeqID_28714
  Gene Ontology: Mol. function=protein serine/threonine kinase activity
  Pfam annotation: Domain name=LRR_1; Domain location=21-42; Score=7.7; E_value=10; Accession=PF00560.25; Description=Leucine Rich Repeat
  Pfam annotation: Domain name=LRR_1; Domain location=44-66; Score =15.4; E_value=0.24; Accession=PF00560.25; Description=Leucine Rich Repeat
  Pfam annotation: Domain name=LRR_1; Domain location=68-87; Score=8.2; E_value=8.1; Accession=PF00560.25; Description=Leucine Rich Repeat
  Pfam module annotation: Pfam domain module=LRR_1::LRR_1::LRR_1; Domain location=21-42::44-66::68-87
  Subcellular localization annotation: CTP_CleavageSite=28; ConfidenceScore=5.00e-01
LDLSFNAFSGPLPDVFDAFADLQELSAPSNKLSGELPTLSRCRRLRVLNLRNNSFAGDIGLDFRSLRSLAYLDLGVNSFTGPIPASLPK

SEQ ID NO: 94689 - protein, 38 aa, Setaria italica
  Transcript Sequence Number=SeqID_28715
KYNGTQLHSSNAKVNECSGTIKCQQLQHKEYKQTVNLH

SEQ ID NO: 94690 - protein, 182 aa, Setaria italica
  misc_feature (22)..(22): Xaa can be any naturally occurring amino acid
  misc_feature (48)..(48): Xaa can be any naturally occurring amino acid
  misc_feature (57)..(57): Xaa can be any naturally occurring amino acid
  Transcript Sequence Number=SeqID_28716
  Gene Ontology: Mol. function=translation elongation factor activity; Cellular component=cytoplasm; Biological process=ribosome biogenesis
  Homolog annotation: Hit_ID=UPI00001634E7; Match level="QueryCoverage =100%, HitCoverage=17%, E-value=3e-47, Identity=53%"; Hit description= elongation factor Tu family protein
  Pfam annotation: Domain name=GTP_EFTU; Domain location=1-155; Score= -77.7; E_value=0.0027; Accession=PF00009.19; Description=Elongation factor Tu GTP binding domain
CSEVSSAARLSDSALILVDAVXGVHIQTHAALRQAFVERLRPCLVLNXIDRLITELXPHPAEAYMRLHRIVSDVNSIYSALRSHSYFSLLSALEDNPSSSSSSSTEDLPEDFEDDDDNEDAFQPLKGNVVFACALDGWGFRPQQFAELYARKVGVNPSAFLRGLWGPRYLDKKTGKVVGKES

SEQ ID NO: 94691 - protein, 45 aa, Setaria italica
  Transcript Sequence Number=SeqID_28717
AGSSGGEGSKATPSLPSGAAALRGPAGLVLGLAVSAAVYAVSAAA

SEQ ID NO: 94692 - protein, 77 aa, Setaria italica
  Transcript Sequence Number=SeqID_28718
  Gene Ontology: Mol. function=hydroxymethyl-, formyl- and related transferase activity; Biological process=biosynthetic process
  Homolog annotation: Hit_ID=B4FRN6; Match level="QueryCoverage=100%, HitCoverage=21%, E-value=6e-14, Identity=57%"; Hit description =Methionyl-tRNA formyltransferase
  Subcellular localization annotation: CTP_CleavageSite=50; ConfidenceScore=5.52e-01
MARYSPPLLRRFFSCAASSASPGGGSGAGKKNLVFLGSPQVAASVLDTLLAASGSPESGFQVAAVVTQPPAAKNRGR

SEQ ID NO: 94693 - protein, 286 aa, Setaria italica
  misc_feature (33)..(33): Xaa can be any naturally occurring amino acid
  misc_feature (81)..(81): Xaa can be any naturally occurring amino acid
  misc_feature (186)..(186): Xaa can be any naturally occurring amino acid
  Transcript Sequence Number=SeqID_28719
  Homolog annotation: Hit_ID=P92917; Match level="QueryCoverage=40%, HitCoverage=16%, E-value=4e-10, Identity=42%"; Hit description=Af10 -protein
NHHQIFDPHPHLGGTSSQKVDNEDNNDFNPRGXSISGTTNASYNHVDLFGQSLMDDLVDTTASTSSTVPNVGAASLPEVDXYFANTDFQSANAPLESTTGSHAQMSSQDNIDLFAGRSSFAGSVNSDTEFSVRDTPNKSLELNLPSLTQSSASAFDPFQPSFVASFPSDTEFSVCDTPSKSKTPHXHHSSAADFDPFAAIPVKTLDGSDSFSAFFSNTDSGQTKTEGVKSCDHSPLEELNFGAFTSHTEPPRASATKPMSKSPTKLEPPSISESKPDMKKGAFQVK

SEQ ID NO: 94694 - protein, 91 aa, Setaria italica
  misc_feature (84)..(84): Xaa can be any naturally occurring amino acid
  Transcript Sequence Number=SeqID_28720
  Gene Ontology: Mol. function=oxidoreductase activity, acting on single donors with incorporation of molecular oxygen, incorporation of two atoms of oxygen; Cellular component=chloroplast; Biological process=fatty acid biosynthetic process
  Homolog annotation: Hit_ID=Q8H016; Match level="QueryCoverage=98%, HitCoverage=10%, E-value=2e-29, Identity=74%"; Hit description =Probable lipoxygenase 6
LEATKFMAVVDTLSTHSPDEEYLGEGRDEPWTGDAAAVAAHAMFAADVRRAEETIERRNADQGRKNRCGAGVLPYELLAPSSPXPGVTCRD

SEQ ID NO: 94695 - protein, 123 aa, Setaria italica
  Transcript Sequence Number=SeqID_28721
PGEASPHGSSPGNQRPTERPTPPRGAKPGAPSFLIEDSRIKETPCYDLLGSHIAGGWMASRCRCRSRRRCRGGAVLRCCCCHRLGRARGQPGRIHRAGEGMGGHEADGRTVGRVSPWEGGGRE

SEQ ID NO: 94696 - protein, 61 aa, Setaria italica
  Transcript Sequence Number=SeqID_28722
  Subcellular localization annotation: CTP_CleavageSite=20; ConfidenceScore=5.50e-01
QKAATARTPMDPGPAAGDPACSPRAPSTTLRRRPVPISTDTSRRGDDGAPRELERGAGEAR

SEQ ID NO: 94697 - protein, 54 aa, Setaria italica
  Transcript Sequence Number=SeqID_28723
ILSFNFGRIAVVSFRFIHQLSIFTRILGFTCRSGFITSYPARNRQFRLFLYFVI

SEQ ID NO: 94698 - protein, 204 aa, Setaria italica
  Transcript Sequence Number=SeqID_28724
  Gene Ontology: Mol. function=ATPase activity, coupled to transmembrane movement of substances; Cellular component=integral to membrane; Biological process=transport
  Homolog annotation: Hit_ID=Q8GU76; Match level="QueryCoverage=83%, HitCoverage=13%, E-value=6e-82, Identity=87%"; Hit description=MDR -like ABC transporter
MAESALADGKAEKAASGGGGDAAGEGKKRADQAVAFHELFSFADKWDLMLMAAGSLGALAHGAAMPLFFLLFGDLINGFGKNQTDLRTMTDEVAKYALYFVYLGLVVCVSSYAEIACWMYTGERQVIALRKAYLDAVLRQDVGFFDTDARTGDIVFGVSTDTLLVQDAIGEKVGNFIHYIATFLAGLVVGFVSAWRLALLSSSF

SEQ ID NO: 94699 - protein, 58 aa, Setaria italica
  Transcript Sequence Number=SeqID_28725
  Gene Ontology: Mol. function=nucleoside-triphosphatase activity; Cellular component=chloroplast; Biological process=transport
  Homolog annotation: Hit_ID=B4FT76; Match level="QueryCoverage=100%, HitCoverage=19%, E-value=2e-26, Identity=100%"; Hit description=ATP -dependent transporter ycf16
GLLTPQNSVLMITHYQRLLDLIKPSYVHIMENGKIIKTGDSSIATQINEGGFKSIALV

SEQ ID NO: 94700 - protein, 308 aa, Setaria italica
  Transcript Sequence Number=SeqID_28726
  Gene Ontology: Mol. function=nucleoside-triphosphatase activity; Cellular component=chloroplast; Biological process=transport
  Homolog annotation: Hit_ID=B4FT76; Match level="QueryCoverage=90%, HitCoverage=91%, E-value=1e-142, Identity=92%"; Hit description=ATP -dependent transporter ycf16
  Pfam annotation: Domain name=ABC_tran; Domain location=88-283; Score =121.3; E_value=3.2e-33; Accession=PF00005.19; Description=ABC transporter
  Subcellular localization annotation: CTP_CleavageSite=50; ConfidenceScore=5.81e-01
MAQPLAAAAAVSSSSPLFSLSSSRPLVRRHAPPSYVSMRTRRCSQLAAASAAAETSGSPLLEVRGLTASVKETGQQILAGVDLTIREGEIHAIMGKNGSGKSTLTKVLVGHPHYEVTGGTILFKGEDLVDMEPEDRSLAGLFMSFQAPIEIPGVSNFDFLLMAVNARREKSGLPALGPLEFYSVVSPKIDALNMDPKFLDRNVNEGFSGGERKRNEILQLSVIGADLALLDEIDSGLDVDALEDVANAVNGLLTPQNSVLMITHYQRLLDLIKPSYVHIMENGKIIKTGDSSIATQINEGGFKSIALV

SEQ ID NO: 94701 - protein, 118 aa, Setaria italica
  Transcript Sequence Number=SeqID_28727
  Subcellular localization annotation: CTP_CleavageSite=61; ConfidenceScore=5.56e-01
STRFTFTPKKASVARPWFTRMRPPASHPPDFPFTAGRPLMSTEPSRVYSQHLSCLGGSGVGAAISSSSTRITLIFMSPSLADISSLLTSSSSRLYRWMQREKPRQLASCSCEEAGQEE

SEQ ID NO: 94702 - protein, 147 aa, Setaria italica
  Transcript Sequence Number=SeqID_28728
IGESHTRAENKNMATKGRQSSSLHSDTSNKLKLKTVTPKAMEKDMIIAKGAGLVSEKPKSASQNCARIDFQRQSVSCSISRDNKKSGIISFTSSSPVKFDATSLCSDNGTRTGTAVQGSPVGACPKRHSRRDRQNTYPQRGIVFKDV

SEQ ID NO: 94703 - protein, 308 aa, Setaria italica
  misc_feature (20)..(20): Xaa can be any naturally occurring amino acid
  Transcript Sequence Number=SeqID_28729
  Gene Ontology: Mol. function=protein serine/threonine phosphatase activity; Cellular component=protein serine/threonine phosphatase complex; Biological process=protein amino acid dephosphorylation
  Homolog annotation: Hit_ID=B4FDN2; Match level="QueryCoverage=100%, HitCoverage=85%, E-value=1e-165, Identity=91%"; Hit description =Protein phosphatase 2C
  Pfam annotation: Domain name=FOLN; Domain location=130-151; Score =17.0; E_value=0.037; Accession=PF09289.2; Description=FollistatinOste onectin-like EGF domai
  Pfam annotation: Domain name=PP2C; Domain location=7-265; Score =275.4; E_value=1.3e-79; Accession=PF00481.13; Description=Protein phosphatase 2C
  Pfam module annotation: Pfam domain module=FOLN::PP2C; Domain location=130-151::7-265
EFIPVIRSGGWADIGSRHSXWRDVIIFSDNFMQDFGFESYEEGPSAFYGVFDGHGGKHAADFVCSNLPRFIVEDEGFPREIAKAVSSAFLQTDAAFADACSLNCELDSGTTALAALVVGRSLLVANAGDCRAVLCRRGKAIEMSRDHKPSCNLEKMRIEALGGYVDDGYLNGQLNVARAIGDWHMEGMKVCGGLGPLSAEPEVMTMDLTEEDEFLIMGCDGIWDVFRSQNAVDFARRKLQEHNDPAACCKELVDEAIKRKSGDNLSVVVVCFNSRPPPVLTAPRPRVQRSISAEGLRELQSFLDSLAD

SEQ ID NO: 94704 - protein, 140 aa, Setaria italica
  misc_feature (127)..(127): Xaa can be any naturally occurring amino acid
  Transcript Sequence Number=SeqID_28730
TLEKELNDLYYQLYHERNERLLAENNQGCLPSTSSDDHQSLSTCTCTWEEHISSLRDLKFGGSESMRSTRQDLFPELDDDQDMGEDPEGQQIVSLNRLLEKHRDSSLNRLLEKHRDEEMQESFSMEXRGTEDEKLDVLSL

SEQ ID NO: 94705 - protein, 138 aa, Setaria italica
  Transcript Sequence Number=SeqID_28731
  Gene Ontology: Mol. function=protein serine/threonine kinase activity; Biological process=protein amino acid phosphorylation
  Homolog annotation: Hit_ID=B6U0Y9; Match level="QueryCoverage=97%, HitCoverage=21%, E-value=3e-37, Identity=62%"; Hit description=ATP binding protein
PERRPALSVRVVQVSRIIDEDMGDSIDPDMEMVASNHLPSQLVHPPPAFGSSSNLEALGLETSEGDVRSTNDTDHSVHLISRPMHEITFATVDKPKLLSQLTCLLAELGLDIQEAHAFSTIDGYSLDVFVVTGWHLGS

SEQ ID NO: 94706 - protein, 750 aa, Setaria italica
  misc_feature (44)..(44): Xaa can be any naturally occurring amino acid
  Transcript Sequence Number=SeqID_28732
  Gene Ontology: Mol. function=protein serine/threonine kinase activity; Cellular component=integral to membrane; Biological process=protein amino acid phosphorylation
  Homolog annotation: Hit_ID=Q0ZA03; Match level="QueryCoverage=100%, HitCoverage=84%, E-value=0.0, Identity=63%"; Hit description =Brassinosteroid-insensitive 1
  Pfam annotation: Domain name=LRR_1; Domain location=116-138; Score =13.7; E_value=0.71; Accession=PF00560.25; Description=Leucine Rich Repeat
  Pfam annotation: Domain name=LRR_1; Domain location=20-42; Score=9.4; E_value=4.7; Accession=PF00560.25; Description=Leucine Rich Repeat
  Pfam annotation: Domain name=LRR_1; Domain location=209-231; Score =10.1; E_value=3.5; Accession=PF00560.25; Description=Leucine Rich Repeat
  Pfam annotation: Domain name=LRR_1; Domain location=233-255; Score =5.9; E_value=22; Accession=PF00560.25; Description=Leucine Rich Repeat
  Pfam annotation: Domain name=LRR_1; Domain location=257-279; Score =19.7; E_value=0.012; Accession=PF00560.25; Description=Leucine Rich Repeat
  Pfam annotation: Domain name=LRR_1; Domain location=280-301; Score =16.7; E_value=0.096; Accession=PF00560.25; Description=Leucine Rich Repeat
  Pfam annotation: Domain name=LRR_1; Domain location=44-66; Score =15.3; E_value=0.26; Accession=PF00560.25; Description=Leucine Rich Repeat
  Pfam annotation: Domain name=LRR_1; Domain location=68-90; Score =12.2; E_value=1.4; Accession=PF00560.25; Description=Leucine Rich Repeat
  Pfam annotation: Domain name=LRR_1; Domain location=92-114; Score =15.4; E_value=0.24; Accession=PF00560.25; Description=Leucine Rich Repeat
  Pfam annotation: Domain name=Pkinase; Domain location=435-708; Score =172.5; E_value=1.2e-48; Accession=PF00069.17; Description=Protein kinase domain
  Pfam annotation: Domain name=Pkinase_Tyr; Domain location=435-708; Score=123.0; E_value=9.4e-34; Accession=PF07714.9; Description =Protein tyrosine kinase
  Pfam module annotation: Pfam domain module=LRR_1::LRR_1::LRR_1::LRR _1::LRR_1::LRR_1::LRR_1::LRR_1::LRR_1::Pkinase::Pkinase_Tyr; Domain location=116-138::20-42::209-231::233-255::257-279::280-301::44 -66::68-90::92-114::435-708::435-708
DLSLNNINGTLPASLGKLGELRDLILWQNFLEGEIPASLENNAXLEHLILDYNGLTGTIPPELAKCKELNWISLASNQLSGPIPSWLGQLSNLAILKLSNNSFSGPIPAELGDCQSLVWLDLNSNQLNGSIPAELAKQSGKMNVGLVIGRPYVYLRNDELSSECRGKGSLLEFSSIRPEDLNRMPSKKMCNFTRVYMGSTEYTFNKNGSMIFLDLSFNQLDSEIPKELGSMYYLMIMNLGHNLLSGLIPPELASAKKLAVLDLSHNQLQGPIPNSFSSLSLSEINLSNNQLNGSIPELGSLATFPRMSYENNSGLCGFPLPKCDHSAGPSSSDDNQSHRRRQASLIGSVTMGLLLSLFCIFGIAILAIECKKRKQKNEEASTARDIYIDSQTHSGTMNSNWRLSGTNALSINLAAFDKPLQKLTLADLITATNGFHNDSLVGSGGFGDVYKAQLKDGRIVAIKKLIHVSGQGDREFTAEMETIGKIRHRNLVPLLGYCKAGEERLLVYEYMKYGSLEDVLHDRKKIGVKLSWSARRKIAIGAARGLAFLHHNCIPHIIHRDMKSSNVLIDENLEAKVSDFGMARTVSVVETHLSVSTLAGTPGYVPPEYYQSFRCTTKGDVYSYGVVLLELLTGKPPTDSTDFGEDNNLVGWVKQHSNLKITGVFDPELLEDDPALELELLQHLKVAVACLDDRPSRRPTMLKVMAMFKEIQAGSTVDSKTSSACTGSIDDAGFAAHEMTTLNEDKEEKD

SEQ ID NO: 94707 - protein, 80 aa, Setaria italica
  misc_feature (27)..(27): Xaa can be any naturally occurring amino acid
  Transcript Sequence Number=SeqID_28733
  Gene Ontology: Mol. function=protein serine/threonine kinase activity; Cellular component=plasma membrane; Biological process =protein amino acid phosphorylation
  Homolog annotation: Hit_ID=P53684; Match level="QueryCoverage=96%, HitCoverage=12%, E-value=2e-32, Identity=85%"; Hit description =Calcium-dependent protein kinase isoform 11
NDLSIKAIDFGLSVFFKPCTISNLIHXSQVFTELVGSPYYVAPEVLHKRYGPEADVWSAGVILYVLLSGVPPFWAETQQG

SEQ ID NO: 94708 - protein, 102 aa, Setaria italica
  Transcript Sequence Number=SeqID_28734
  Subcellular localization annotation: CTP_CleavageSite=60; ConfidenceScore=5.08e-01
HTVLISIFFLPIVFVILVPQEAAILCPIRRLDSARASLRSSAPAVGRSLRGSSFGGCESELDSVSSRTNLVFFGIDLACGRPSRRFSWVSALFSPICWWIWC

SEQ ID NO: 94709 - protein, 130 aa, Setaria italica
  Transcript Sequence Number=SeqID_28735
FDRARRPFHCRRSSFVLVGCESELDSVSSRTNLVFFGIDLACGRPSRRFSWVSALFSPICWWIWCSRPVKFGSCAQVAALGTLKLGILCGLAAVLGFRVTRAQPTEEASQGCLWEELFHFWGFQWTRLRD

SEQ ID NO: 94710 - protein, 542 aa, Setaria italica
  misc_feature (528)..(528): Xaa can be any naturally occurring amino acid
  Transcript Sequence Number=SeqID_28736
  Gene Ontology: Mol. function=protein serine/threonine kinase activity; Cellular component=plasma membrane; Biological process =protein amino acid phosphorylation
  Homolog annotation: Hit_ID=P53684; Match level="QueryCoverage=100%, HitCoverage=100%, E-value=0.0, Identity=89%"; Hit description =Calcium-dependent protein kinase isoform 11
  Pfam annotation: Domain name=Pkinase; Domain location=79-337; Score =339.8; E_value=5.2e-99; Accession=PF00069.17; Description=Protein kinase domain
  Pfam annotation: Domain name=Pkinase_Tyr; Domain location=79-335; Score=-33.3; E_value=1.6e-11; Accession=PF07714.9; Description =Protein tyrosine kinase
  Pfam annotation: Domain name=efhand; Domain location=384-412; Score =22.9; E_value=0.0014; Accession=PF00036.24; Description=EF hand
  Pfam annotation: Domain name=efhand; Domain location=420-448; Score =18.7; E_value=0.025; Accession=PF00036.24; Description=EF hand
  Pfam annotation: Domain name=efhand; Domain location=456-484; Score =24.9; E_value=0.00032; Accession=PF00036.24; Description=EF hand
  Pfam annotation: Domain name=efhand; Domain location=490-518; Score =34.5; E_value=4.2e-07; Accession=PF00036.24; Description=EF hand
  Pfam module annotation: Pfam domain module=Pkinase::Pkinase _Tyr::efhand::efhand::efhand::efhand; Domain location=79-337::79 -335::384-412::420-448::456-484::490-518
MGNQCPNGTLGSDYYNRPASRFADGYLEEDSYSDLKKFEKPWPEVNSFKPTAAGILKRGLDPTSITVLERKTADLREHYIIGRKLGQGQFGTTYLCTEISTGCEYACKTIPKRKLITKEDVEDVRREIQIMHHLSGHKNVVAIKDVYEDGQAVHIVMELCAGGELFDRIQEKGHYSEQKAAELIRIIVSIVAMCHSLGVMHRDLKPENFLLLDKEDDLSIKAIDFGLSVFFKPCQVFTELVGSPYYVAPEVLHKRYGPEADVWSAGVILYVLLSGVPPFWAETQQGIFDAVLKGHIDFDSDPWPKISESAKNLIRKMLCPCPSERLKAHEVLRHPWICENGVATDQALDPSVLSRLKQFSAMNKLKKLALRVIAERLSEEEIAGLRQMFKAVDVKNRGVITLGELREGLRRYGTELEDREISDIVEAADKDNNVTINYEEFIAATVPLNKIEREEHLMAAFTYFDKDGSGYITVDKLQRACGEHNMEDSFLEEIILEVDQNNDGQIDYAEFVAMMQGNKVGLGWQPMXTTLNVTLRDAPQVH

SEQ ID NO: 94711 - protein, 69 aa, Setaria italica
  Transcript Sequence Number=SeqID_28737
QNKTTILENTRKWMSKYACIIFLHAVLHLNSHYMGDTQNDTLKGGNLSTENIESSQSTSYVAFFMHTTQ

SEQ ID NO: 94712 - protein, 303 aa, Setaria italica
  misc_feature (69)..(69): Xaa can be any naturally occurring amino acid
  misc_feature (84)..(84): Xaa can be any naturally occurring amino acid
  misc_feature (99)..(99): Xaa can be any naturally occurring amino acid
  Transcript Sequence Number=SeqID_28738
  Gene Ontology: Mol. function=protein serine/threonine kinase activity; Cellular component=cytoplasm; Biological process=protein amino acid phosphorylation
  Homolog annotation: Hit_ID=B6U0R4; Match level="QueryCoverage=100%, HitCoverage=70%, E-value=1e-151, Identity=85%"; Hit description =Casein kinase I isoform delta-like
  Pfam annotation: Domain name=Pkinase; Domain location=1-188; Score= -40.9; E_value=4.7e-06; Accession=PF00069.17; Description=Protein kinase domain
GRSLEDLFVYCGRKFTLKTVLMLADQMITRIEFMHSKGYLHRDIKPDNFLMGLGRKANQVYIIDFGLAXRYRDSTTNRHIPYRXNKNLTGTARYASCNXHLGIEQSRRDDLESLGYVLLYFIRGSLPWQGLKAATKTQKYDKICEKKISTPIEVLCKSCPVEFASYFHYCHSLTFDQRPDYAFVKRLFRDLFTREGYEFDYVFDWTVLKYKQGQKQKQSPGAPARPIQADVQKQAGVNGVFHHNEAREHVETSHPADQAVQSQGKQATNKDWNSSMQRTLNLRQDVAAGKAQLTSVPLLSSPW

SEQ ID NO: 94713 - protein, 246 aa, Setaria italica
  misc_feature (7)..(7): Xaa can be any naturally occurring amino acid
  Transcript Sequence Number=SeqID_28739
  Gene Ontology: Mol. function=ARF guanyl-nucleotide exchange factor activity; Cellular component=intracellular; Biological process =regulation of ARF protein signal transduction
  Homolog annotation: Hit_ID=B9RDE3; Match level="QueryCoverage=100%, HitCoverage=13%, E-value=1e-119, Identity=81%"; Hit description =Cytohesin 1, 2, 3, putative
  Pfam annotation: Domain name=Sec7; Domain location=1-71; Score=-41.6; E_value=3.2e-05; Accession=PF01369.12; Description=Sec7 domain
CKCNPRXSSADTAYVLAYSVIMLNTDAHNPMVKNKMSPEDFIRNNRGIDDGKDLPEEFMRSLYERIWKKEIKMKEDEFVPQQQQSTSSNKILGLDNILNIVVRKRGSSMETSDDLIKHMQEQFKEKARMSESVFYPATDVVVLKFMVEVCWAPMLAAFSVPLDQSDDEIVISQCLEGFRSAIHVTAAMSMKTQRDAFITSLAKFTSLHSAADIRQKNVEAIKAILLIADEDGNYLQEAWEHILTCV

SEQ ID NO: 94714 - protein, 1222 aa, Setaria italica
  misc_feature (29)..(29): Xaa can be any naturally occurring amino acid
  misc_feature (43)..(43): Xaa can be any naturally occurring amino acid
  misc_feature (371)..(371): Xaa can be any naturally occurring amino acid
  Transcript Sequence Number=SeqID_28740
  Gene Ontology: Mol. function=ARF guanyl-nucleotide exchange factor activity; Cellular component=intracellular; Biological process =regulation of ARF protein signal transduction
  Homolog annotation: Hit_ID=B9RDE3; Match level="QueryCoverage=99%, HitCoverage=75%, E-value=0.0, Identity=75%"; Hit description =Cytohesin 1, 2, 3, putative
  Pfam annotation: Domain name=DUF1981; Domain location=604-689; Score =168.2; E_value=2.3e-47; Accession=PF09324.2; Description=Domain of unknown function (DUF1981)
  Pfam annotation: Domain name=Sec7; Domain location=178-363; Score =326.6; E_value=5e-95; Accession=PF01369.12; Description=Sec7 domain
  Pfam module annotation: Pfam domain module=DUF1981::Sec7; Domain location=604-689::178-363
ITSTKGLKAEIGVFFPMIILRVLENIAQXPNYQAKMIVLRFLXKLCGDSQILVDIFLNYDCDVHSSNIFERMVNGLLKTAQGPPAGVATTLVPPQDTTMKSEAMKCLVAILRSMGDWMNKQLRIPDPASPNVESEKNDNDGGNELSPTDNNGDESSEASDSHSELSNGISEAASLEQRRAYKMELQEGISLFNRKPKKGIEFLVNASKVGESPEEIAAFLKSASGLNKTMIGDYLGEREDLSLKVMHAYVDSFDFQGMEFDEAIRAFLQGFRLPGEAQKIDRIMEKFAERYCKCNPKAFSSADTAYVLAYSVIMLNTDAHNPMVKNKMSPEDFIRNNRGIDDGKDLPEEFMRSLYERIWKKETKMNDLPRXAFITSLAKFTSLHSAADIRQKNVEAIKAILLIADEDGNYLQEAWEHILTCVSRFENLHLVGEGAPPDATFFALQQPDVDKSKQAKSSILPVLKKKAPNASSSSKRGSYDSAGVGGKASGVDQMNNEVTSLLEQVGMAEMNRVFVRSQKLNSEGIIDFVKALCKVSMEELRSASDPRVFSLTKIVEIAHYNMNRIRLVWSSIWNVLSDFFVTIGCSENLSIAIFAMDSLRQLSMKFLEREELANYNFQNEFMKPFVVVMRKSRAVEIRELIIRCVSQMVLARVNHVKSGWKSMFMVFATASYDDHKNIVLLAFEIIEKILREYFPYITETESTTFNDCVNCLIAFTNSRFNKDISLNAIGFLRFCAAKLAEGDIGSSRLKDNPTSNSNPPSPHLASDGKQEGAVLADKDDHIHFWFPLLAGLSELTFDLRPEIRKSALQVLFDTLRNHGHLFSLPLWEKVFDSVLFPIFDYVRHAIDPSGSSAQGQSVENDPAELDQDAWLYETCTLALQLVVDLFVRFYDTVNPLLKKVLSLLTSFIKRPHQSLAGIGIAAFVRLMSSAGSMFVDEKWLEVVLSLKEAATETLPDFTYISSGAYLENLPTENGGSSEQREDESQPLEDDNEQSSRSRNLYFAIGDAKCRAAVQLLLIQAVMEVYNMYRAQLSAQNTVILFEALHTVATHAHKINSDNDLRSKLQELGSMTQMQDPPLLRLENESYQLCLTILQNIFLDSAPDHGSTEVVESHLVGLCKEVLEVYLTTARPAQLSSGRQPLGHWLIPVGSSKRRELAARAPLVVATLQAISGLGDSSFEKNLGQFFPLLAGLISCEHGSSEVQVALSDMFGTWVGPLVLQSC

SEQ ID NO: 94715 - protein, 380 aa, Setaria italica
  misc_feature (340)..(340): Xaa can be any naturally occurring amino acid
  Transcript Sequence Number=SeqID_28741
  Gene Ontology: Mol. function=sequence-specific DNA binding; Cellular component=nucleus; Biological process=regulation of transcription, DNA-dependent
  Homolog annotation: Hit_ID=B4FXN9; Match level="QueryCoverage=93%, HitCoverage=100%, E-value=1e-164, Identity=82%"; Hit description =Heat shock factor protein HSF30
  Pfam annotation: Domain name=HSF_DNA-bind; Domain location=36-203; Score=258.5; E_value=1.6e-74; Accession=PF00447.9; Description=HSF -type DNA-binding
MNHGMLNSVKVESRPSEVTANGQPRPMDGLHDGGPPPFLTKTYDMVDDPTTDAVVSWSATNNSFIVWDPHVFGTVLLPRYFKHNNFSSFVRQLNTYGFRKVDPDRWEFANEGFLRGQRNLLKNIRRRKPPHSSPNQQSLGSYLEVGHFGYDEEIDQLKRDKQLLMAEVVKLRQEQQNTKSDLQAMEEKLKDTEQKQQHMMAFMARVMQNPEFMHQLVSQHEMRKGLEDAISKKRRRRIDQGPEADSMGNGSSLEQGSHAVFEPQEPVESLANGVPSDLESSSVEAKGFEVQQGVSSGGSERLKGRPSGELNDDFWEDLLHEGGLGAEAGNAVVQDDMNMXVSEGSLPQWKQHKPRHQQLLFYHNGSEYLYCYPRYIAAWT

SEQ ID NO: 94716 - protein, 82 aa, Setaria italica
  Transcript Sequence Number=SeqID_28742
  Gene Ontology: Mol. function=transferase activity, transferring glycosyl groups; Biological process=metabolic process
  Homolog annotation: Hit_ID=Q7XKK4; Match level="QueryCoverage=100%, HitCoverage=15%, E-value=3e-32, Identity=69%"; Hit description =OSJNBa0038O10.3 protein
EDVLRHRALGCYLTHCGWNSTLEAIQHGVRLLCYPVSGDQFINCAYIVKMWQTGIRLSSTKRSVVEDCVEKIMEGEEGRRMQ

SEQ ID NO: 94717 - protein, 161 aa, Setaria italica
  Transcript Sequence Number=SeqID_28743
  Gene Ontology: Mol. function=protein serine/threonine kinase activity; Cellular component=integral to membrane; Biological process=protein amino acid phosphorylation
  Homolog annotation: Hit_ID=B9RAX9; Match level="QueryCoverage=77%, HitCoverage=42%, E-value=3e-34, Identity=45%"; Hit description =Receptor protein kinase, putative
  Pfam annotation: Domain name=LRR_1; Domain location=121-143; Score =10.2; E_value=3.4; Accession=PF00560.25; Description=Leucine Rich Repeat
  Pfam annotation: Domain name=LRR_1; Domain location=48-70; Score =15.2; E_value=0.27; Accession=PF00560.25; Description=Leucine Rich Repeat
  Pfam annotation: Domain name=LRR_1; Domain location=72-94; Score=3.2; E_value=75; Accession=PF00560.25; Description=Leucine Rich Repeat
  Pfam module annotation: Pfam domain module=LRR_1::LRR_1::LRR_1; Domain location=121-143::48-70::72-94
PARARALHQPHRPGTRQQPDIRRHPRRDRQAHGAAHALPLSLCRPGSKLESLYVNSNRLEGAIPDAIGNLTALRELIFYDHQLEGTIPASIGQMASLEVIRGGGNKNLQGALPPEIGDCSNLTMLGLAETSISGPLPASLGKLKSLDTIAIYNRPYLTYRY

SEQ ID NO: 94718 - protein, 232 aa, Setaria italica
  Transcript Sequence Number=SeqID_28744
  Gene Ontology: Mol. function=RNA-directed RNA polymerase activity
  Homolog annotation: Hit_ID=B6DZR9; Match level="QueryCoverage=96%, HitCoverage=21%, E-value=5e-96, Identity=75%"; Hit description=RNA -directed RNA polymerase 6a (Fragment)
SVALVAALTQLYPDFMQKDEAITYKSDKILGRLYRSIQEASSSDLVPEETCTLNDLPYDTDMEVPGATDFLSSAWLCKCSYEAQLNALLNQYGVRTEAELVTEHIWSLPKYSSRKQGDIKERLKNSYSALRKELRSTFESIETDETEISEDEKNRVYEMKASAWYQVTYHPKWVQKSREMLGPDCEEMPARLSFAWIAVDYLARIKIRCQGEVRSNSQRPVERLAAYISESM

SEQ ID NO: 94719 - protein, 320 aa, Setaria italica
  misc_feature (270)..(270): Xaa can be any naturally occurring amino acid
  Transcript Sequence Number=SeqID_28745
  Gene Ontology: Mol. function=methyltransferase activity; Cellular component=cytoplasm; Biological process=tRNA processing
  Homolog annotation: Hit_ID=Q58EK9; Match level="QueryCoverage=87%, HitCoverage=64%, E-value=8e-34, Identity=33%"; Hit description =Coiled-coil domain containing 76
  Pfam annotation: Domain name=TRM13; Domain location=39-317; Score =288.7; E_value=1.3e-83; Accession=PF05206.6; Description =Methyltransferase TRM13
TTTAAAVAMRESYLITDACDKWMSGQVDRKVPYQEKHVAQQASIVGNMEAFGLLRKGGADVVGGENVAVSAQAVMEFGAGRGYLTQVLVDCYGIRNVFLVERRSYKLKADRSLRQNEDVTLERLRIDIEDLNLHGIEALRGLKYLAIGKHLCGPATDMTMTCCLPEQYDQTEERVHGKHSLQGLALATCCHHLCQWKHYANKSFLSGLGITEEEFHAITWFSSWAVDGDHSSPGSYAEVEDTSSEVREPEKPDPEIIGIERIIRSIPTGXRASLGFMCKDIIDTGRLLWLRHKGLVADLVSYVPSNISPENRLLIAKCTS

SEQ ID NO: 94720 - protein, 304 aa, Setaria italica
  Transcript Sequence Number=SeqID_28746
  Gene Ontology: Mol. function=electron carrier activity; Biological process=oxidation reduction
  Homolog annotation: Hit_ID=B6SXJ1; Match level="QueryCoverage=98%, HitCoverage=56%, E-value=2e-94, Identity=59%"; Hit description =Flavonoid 3-monooxygenase
  Pfam annotation: Domain name=p450; Domain location=2-304; Score= -62.6; E_value=1.2e-08; Accession=PF00067.14; Description=Cytochrome P450
RMACGKYTVYNYSGMLWSHYGAYWRQLRKLWLTELLSAKQLRLTESVRADEVRAMLRDLRAASAGGGGAVVLKDHLLMATLNVVSRMVLGRKYVGEGAGADAAAATPDEFRWMIEEIFFLNGALHVGDMVPWLGWFDPHGYVARMKRLAKMFDAFVEHVLREHDDRRRREGPAFVPKDMVDLLLQLADDPSLDVPIDRNGVKASILELITGGTDTSSVTMEWAMSELLRKPDVLAKATEELDRVVGRDRLVAEGDIPSLPYLDAVVKEAMRLHPVVPLLVPRVSREDTSVAGYDIPKGHAHSSF

SEQ ID NO: 94721 - protein, 64 aa, Setaria italica
  Transcript Sequence Number=SeqID_28747
  Gene Ontology: Mol. function=kinase activity; Cellular component =plasma membrane
  Homolog annotation: Hit_ID=Q9SA62; Match level="QueryCoverage=85%, HitCoverage=3%, E-value=8e-23, Identity=85%"; Hit description =F10O3.10 protein
  Pfam annotation: Domain name=KIP1; Domain location=13-64; Score=78.4; E_value=2.7e-20; Accession=PF07765.4; Description=KIP1-like protein
MAMSPSNPMRKYSWWWDSHISPKNSKWLLENLTDMDSKIKVMIKIIDEDADSFARRAEMYYKRR

SEQ ID NO: 94722 - protein, 136 aa, Setaria italica
  Transcript Sequence Number=SeqID_28748
  Gene Ontology: Mol. function=binding
VIKVECIWGSRSISAEFGESESCKIETVEVGNQIENTAKATKCLDRVLVMQAIESILQTVEGAWTMKTSCNICEAQTILRTCNKELKVLAENSSGSVGAFLSFLCEYLVAIRLIVEIWLLIQLDNSQAFGLTSHDI

SEQ ID NO: 94723 - protein, 96 aa, Setaria italica
  Transcript Sequence Number=SeqID_28749
  Subcellular localization annotation: CTP_CleavageSite=25; ConfidenceScore=5.34e-01
HMPHTDSHDQVHSDQGVGHGPYLKKAQTRRRLSQGSAHSGSQTRVGQLNRLPENSIGLRRNLLNPSIHTIRRGENYAPGLTLYTTMLQHREYSTQG

SEQ ID NO: 94724 - protein, 419 aa, Setaria italica
  misc_feature (33)..(33): Xaa can be any naturally occurring amino acid
  Transcript Sequence Number=SeqID_28750
  Gene Ontology: Mol. function=RNA binding; Cellular component =ribonucleoprotein complex; Biological process=RNA processing
  Homolog annotation: Hit_ID=B9SYS2; Match level="QueryCoverage=27%, HitCoverage=24%, E-value=2e-25, Identity=49%"; Hit description=Lupus la ribonucleoprotein, putative
  Pfam annotation: Domain name=La; Domain location=272-329; Score=94.2; E_value=4.6e-25; Accession=PF05383.9; Description=La domain
  Subcellular localization annotation: CTP_CleavageSite=63; ConfidenceScore=5.26e-01
DANHWPALSEAAAKNTKLAPAPAPDSSRPPESXVPSPAPSSAMANSSNSHKHGSGTHHGRHKPARRGGGGGGEHSPRDHPDRSTGGWDHATGGTSSGGGVRGAHRNHNNGGGRRGNGVTGSGSGVSHHGGAAAGGGSFSGRRRGGYEPFYRGGGPPPMGMGPYMRGAPPPPPPMTVPPPFMGPPPPSVSPMRAFAGPMMFQDMPSPVPPVSPIYFYGPPPPPEALRGLALAPPMVGPPAYPYFQTLSEPQPEPEPEPEPEPEPDVEEERAKLLNQIEFYFSKENLCSDVYLRQQMDGQGWVDISLIAGFKKVLELTNDLQYVKETVKSSSILEMQGDKIRKQNDWEKWVIPRESNPDIPSSSASVPRPNVNHLAARLGGMGLHESAASSSSTTHGDVVQNGPPSGDNEAPVVEDNSGHQ

SEQ ID NO: 94725 - protein, 130 aa, Setaria italica
  misc_feature (25)..(25): Xaa can be any naturally occurring amino acid
  Transcript Sequence Number=SeqID_28751
  Gene Ontology: Mol. function=zinc ion binding; Cellular component =intracellular
  Homolog annotation: Hit_ID=UPI0001A7B01D; Match level="QueryCoverage =78%, HitCoverage=52%, E-value=6e-33, Identity=68%"; Hit description =binding
  Pfam annotation: Domain name=PLATZ; Domain location=28-127; Score =165.8; E_value=1.3e-46; Accession=PF04640.6; Description=PLATZ transcription factor
MMLRRVASSTPVPEWLETLLSTRFXLACGAHPASPRNECNMFCLDCRGAPPPAFCYYCRAHRHAAHRVIQIRRSSYHDVVRVSEVEDVLDITGVQTYVINSARVLFLNECPQPRGAGAAAGKAAASPYNC

SEQ ID NO: 94726 - protein, 152 aa, Setaria italica
  misc_feature (98)..(98): Xaa can be any naturally occurring amino acid
  Transcript Sequence Number=SeqID_28752
  Gene Ontology: Mol. function=RNA binding
  Homolog annotation: Hit_ID=B6UDK8; Match level="QueryCoverage=93%, HitCoverage=21%, E-value=2e-58, Identity=72%"; Hit description =Nucleic acid binding protein
  Pfam annotation: Domain name=KH_1; Domain location=69-112; Score =17.7; E_value=0.0084; Accession=PF00013.21; Description=KH domain
ERVIIIFNYQNQSEQADETAENITSDGSESMKPHCSAQDALLKIHDKIVADEVHDGVANNKSESADDVTARILVQGNQVGCLLGKGGSIIQQLRSDTXSGAPSLVRKALYEISTRLHQHPRKENRPLEEIIDASTRRKRESPPPLPHGNPMS

SEQ ID NO: 94727 - protein, 71 aa, Setaria italica
  misc_feature (57)..(57): Xaa can be any naturally occurring amino acid
  Transcript Sequence Number=SeqID_28753
  Homolog annotation: Hit_ID=B6UFQ8; Match level="QueryCoverage=91%, HitCoverage=9%, E-value=1e-13, Identity=63%"; Hit description=Auxin -independent growth promoter protein
TRPYLASTSQTWVGGEEECPEWIAHSLAMASAKNSEPQNEDYKDELPQDDSSPDTQXESDRSDANKSSKQD

SEQ ID NO: 94728 - protein, 80 aa, Setaria italica
  Transcript Sequence Number=SeqID_28754
  Subcellular localization annotation: CTP_CleavageSite=26; ConfidenceScore=5.41e-01
VAGPPPPQSVFSNPDRPSRPSLARVRLAAEPPPPRAWTPAFVSQRPIFPFLLLSPLHPLGLISRRRQGDQPLPGLLSAGP

SEQ ID NO: 94729 - protein, 80 aa, Setaria italica
  Transcript Sequence Number=SeqID_28755
HLAQSGRKHRAQRLMQLEKEESVAIHHVKSYDTILLGQKSNNVHEYLLTVGPITSPPNYLKSREHCSRNQSWYSAKGNGS

SEQ ID NO: 94730 - protein, 74 aa, Setaria italica
  Transcript Sequence Number=SeqID_28756
  Gene Ontology: Mol. function=GTP binding; Cellular component =intracellular; Biological process=multicellular organismal development
  Homolog annotation: Hit_ID=Q9LNQ8; Match level="QueryCoverage=100%, HitCoverage=17%, E-value=1e-35, Identity=95%"; Hit description =F1L3.17
IYFKRKKTGGISFNTTAPLTHIDEKLCYQILHEYKIHNAEVLFREDATVDDLIDVIEGNRKYIKCVYVYNKIDV

SEQ ID NO: 94731 - protein, 102 aa, Setaria italica
  Transcript Sequence Number=SeqID_28757
  Gene Ontology: Mol. function=peptidyl-prolyl cis-trans isomerase activity; Cellular component=intracellular; Biological process =protein folding
  Homolog annotation: Hit_ID=B9T007; Match level="QueryCoverage=87%, HitCoverage=47%, E-value=3e-39, Identity=82%"; Hit description=Fk506 binding protein, putative
  Pfam annotation: Domain name=FKBP_C; Domain location=1-69; Score =80.6; E_value=5.5e-21; Accession=PF00254.20; Description=FKBP-type peptidyl-prolyl cis-trans isomer
FDTTHEDNSIFSFEVGQGAVIKAWDIALRTMKVGEVAKITCKPEYAYGTAGSPPEIPPNATLIFEVELVACRPRKGSSVGSVSDEKARICIWNCGLTTGDTS

SEQ ID NO: 94732 - protein, 79 aa, Setaria italica
  Transcript Sequence Number=SeqID_28758
RPYFLAATTRRAATARSFVARPSDLRWAPATNIRQQLSGVHMYTHVLNWVRPCRGGAARPIRRCLRQSLCLYMVIEGSI

SEQ ID NO: 94733 - protein, 72 aa, Setaria italica
  Transcript Sequence Number=SeqID_28759
  Gene Ontology: Mol. function=nucleic acid binding; Cellular component= nucleus; Biological process=mRNA processing
  Homolog annotation: Hit_ID=B6SY08; Match level="QueryCoverage=97%, HitCoverage=22%, E-value=3e-36, Identity=100%"; Hit description =Splicing factor U2af 38 kDa subunit
  Pfam annotation: Domain name=zf-CCCH; Domain location=13-39; Score =35.4; E_value=2.2e-07; Accession=PF00642.16; Description=Zinc finger C-x8-C-x5-C-x3-H type (and similar)
MAEHLASIFGTEKDRVNCPFYFKIGACRHGDRCSRLHNRPTISPTLVLANMYQRPDMITPGVDAQGQPIDSL

SEQ ID NO: 94734 - protein, 54 aa, Setaria italica
  Transcript Sequence Number=SeqID_28760
  Gene Ontology: Mol. function=RNA binding
  Homolog annotation: Hit_ID=B6UDK8; Match level="QueryCoverage=92%, HitCoverage=6%, E-value=5e-19, Identity=92%"; Hit description =Nucleic acid binding protein
  Pfam annotation: Domain name=KH_1; Domain location=3-48; Score=21.2; E_value=0.0035; Accession=PF00013.21; Description=KH domain
RIYARILVQGNQVGCLLGKGGSIIQQLRSDTGAGIRVLPSESLPQCALKSDGDE

SEQ ID NO: 94735 - protein, 49 aa, Setaria italica
  Transcript Sequence Number=SeqID_28761
APSSNSRDIVLSDPAIQDELMSVLQQLYHAWVQKQEHPVIYSHVQSSCW

SEQ ID NO: 94736 - protein, 112 aa, Setaria italica
  Transcript Sequence Number=SeqID_28762
RFLRFGPSGHISLSHCLFLSSSPMSLLPLKLPKEGQSFHFKGRGNIFGLMDIPNKTNSMRIYQLIRIWRALKSAQHHLLSLSKDLGTVENHNNRKMHDTENMKGLKVNAIRK

SEQ ID NO: 94737 - protein, 107 aa, Setaria italica
  Transcript Sequence Number=SeqID_28763
  Gene Ontology: Mol. function=nucleic acid binding; Cellular component= nucleus; Biological process=mRNA processing
  Homolog annotation: Hit_ID=B6SY08; Match level="QueryCoverage=65%, HitCoverage=22%, E-value=9e-25, Identity=82%"; Hit description =Splicing factor U2af 38 kDa subunit
RCPRRSPQNAPASSQDQWVGLEHQLQGLSYQGLGKFGEIENLNVCDNLADHMIGNCPMSTFRGKEDRAAAAYNALQGRFYSGRPIIVEFSPVTDFREATTTVAVLFL

SEQ ID NO: 94738 - protein, 63 aa, Setaria italica
  Transcript Sequence Number=SeqID_28764
SSRPRGGEATSLDPFSSRLPLPHPVVAAGAAIDQRLLPDSHPFTAPPFVTDPSGICIDLVRKP

SEQ ID NO: 94739 - protein, 53 aa, Setaria italica
  Transcript Sequence Number=SeqID_28765
MEGNNLPSGSLMQGTNYGSLDLHHNHMQMHAPNSGNQGFNHSQMPSNFPIHLN

SEQ ID NO: 94740 - protein, 151 aa, Setaria italica
  Transcript Sequence Number=SeqID_28766
  Homolog annotation: Hit_ID=B6UFQ8; Match level="QueryCoverage=97%, HitCoverage=22%, E-value=4e-64, Identity=81%"; Hit description=Auxin- independent growth promoter protein
MLLKSKFKLATAIGIMLSMLSLLVHLFLANYSAGGITKGSMRMDDVLPFGPRPRPRRLWGPLSKLDHLHPFAKPIKPYAAPSKHNGFIYAKIYGGFEKIQSSICDLVAVARLLNATLVIPEIQATTRAKGISPKFKSFSYLYDEDHLQLSQ

SEQ ID NO: 94741 - protein, 77 aa, Setaria italica
  Transcript Sequence Number=SeqID_28767
NTARKLTRIAWSRSHALFLGVAVEKKGFYDYNDGSIQILLLPCIILCILQWPICSVVAPNSICVLRCYFVVNFHVQL

SEQ ID NO: 94742 - protein, 84 aa, Setaria italica
  Transcript Sequence Number=SeqID_28768
  Gene Ontology: Mol. function=nucleotide binding; Biological process =fatty acid biosynthetic process
  Homolog annotation: Hit_ID=B9SCG7; Match level="QueryCoverage=97%, HitCoverage=70%, E-value=2e-25, Identity=68%"; Hit description=Snf1 -kinase beta subunit, plants, putative
  Pfam annotation: Domain name=AMPKBI; Domain location=14-84; Score =57.0; E_value=7e-14; Accession=PF04739.7; Description=5'-AMP -activated protein kinase, beta subunit, complex-interacting region
MMQEGVNVVGFEVPPSPDASYNNPVPGNEDEGREPPLVPPHLQHTLLSFPPSQDESSPLPQPQTVVLNHLYIEKESTRSVVALG

SEQ ID NO: 94743 - protein, 303 aa, Setaria italica
  Transcript Sequence Number=SeqID_28769
  Gene Ontology: Mol. function=structural molecule activity; Cellular component=viral capsid; Biological process=chitin-based larval cuticle pattern formation
  Homolog annotation: Hit_ID=Q2PYY1; Match level="QueryCoverage=100%, HitCoverage=99%, E-value=1e-135, Identity=78%"; Hit description =Protein transport SEC13-like protein
  Pfam annotation: Domain name=WD40; Domain location=1-39; Score=24.4; E_value=0.00045; Accession=PF00400.24; Description=WD domain, G-beta repeat
  Pfam annotation: Domain name=WD40; Domain location=140-195; Score =40.7; E_value=5.8e-09; Accession=PF00400.24; Description=WD domain, G-beta repeat
  Pfam annotation: Domain name=WD40; Domain location=203-245; Score =39.0; E_value=1.8e-08; Accession=PF00400.24; Description=WD domain, G-beta repeat
  Pfam annotation: Domain name=WD40; Domain location=252-290; Score =12.5; E_value=1.3; Accession=PF00400.24; Description=WD domain, G -beta repeat
  Pfam annotation: Domain name=WD40; Domain location=45-85; Score=41.3; E_value=3.9e-09; Accession=PF00400.24; Description=WD domain, G-beta repeat
  Pfam annotation: Domain name=WD40; Domain location=93-133; Score =33.9; E_value=6.6e-07; Accession=PF00400.24; Description=WD domain, G-beta repeat
  Pfam module annotation: Pfam domain module=WD40::WD40::WD40::WD40::WD4 0::WD40; Domain location=1-39::140-195::203-245::252-290::45-85::93 -133
MPPHKIETGHQDVVHDVAMDYYGKRIATASSDNTIKIVGVSGTSHQQLATLSGHQGPVWQAAWAHPKFGSMLASCGYDGRVIIWKEGGKPDEWVQAHTFTEHKSSVSSIAWAPHELGLCLACGSSDGNISVFTARADGVWDTTRIDQAHPVGVTSVSWAPAMAPGALITAGPSGQFEYVQKLASGGCDNTVKVWKLQNGSWRMDCFPALQMHKDWVRDVAWAPNLGLPKSTIASASQDGTVVIWTEAKEGEQWVGRILHDFKTPVWRLSWSLTGNILAASDGNNNVTLWKEAVDGEWQQVTTV

SEQ ID NO: 94744 - protein, 74 aa, Setaria italica
  Transcript Sequence Number=SeqID_28770
  Gene Ontology: Mol. function=nucleic acid binding; Cellular component= nucleus; Biological process=mRNA processing
  Homolog annotation: Hit_ID=B6SY08; Match level="QueryCoverage=100%, HitCoverage=24%, E-value=1e-38, Identity=100%"; Hit description =Splicing factor U2af 38 kDa subunit
  Pfam annotation: Domain name=zf-CCCH; Domain location=13-39; Score =35.4; E_value=2.2e-07; Accession=PF00642.16; Description=Zinc finger C-x8-C-x5-C-x3-H type (and similar)
MAEHLASIFGTEKDRVNCPFYFKIGACRHGDRCSRLHNRPTISPTLVLANMYQRPDMITPGVDAQGQPIDPEKM

SEQ ID NO: 94745 - protein, 169 aa, Setaria italica
  Transcript Sequence Number=SeqID_28771
  Gene Ontology: Mol. function=RNA binding
  Homolog annotation: Hit_ID=B6UDK8; Match level="QueryCoverage=99%, HitCoverage=21%, E-value=7e-72, Identity=82%"; Hit description =Nucleic acid binding protein
  Pfam annotation: Domain name=KH_1; Domain location=80-142; Score =47.2; E_value=6.6e-11; Accession=PF00013.21; Description=KH domain
ARVPTRELPSSFSPGADYMSHRSYRDHVPTDSYSSRGTQQLGIARDGNSNAYDYTEAAGQMHGRADHRGHTSVAGRYSSTIELRIPNSSLESIIGVGGVNLAEICQISGAKLRLLEAHAGSSESVVEIQGTLDQAKAAQSLLQGFISANSRGTQQQPQSSRMPLYPSWG

SEQ ID NO: 94746 - protein, 225 aa, Setaria italica
  Transcript Sequence Number=SeqID_28772
  Gene Ontology: Mol. function=DNA binding
  Homolog annotation: Hit_ID=B9T2G2; Match level="QueryCoverage=99%, HitCoverage=50%, E-value=9e-49, Identity=45%"; Hit description =Transcription factor, putative
MEGNNLPSGSLMQGTNYGSLDLHHNHMQMHAPNSGNQGFNHSQMPSNFPIHLNQVTDSDQLSEFQFGEHGKANHHHHHHNQQHTKNSMSDDEEHGVNEDATDSQTGKGKKGSAWHRMKWTDSMVKLLITAASYTGEDPGADSGGRRNCAMMQKKGKWKAILKVMGQRGCLVSPQQCEDKFNDLNKRYKRLTDLLGRGTTCRIVANPELLDSMANLSDKTKDDARK

SEQ ID NO: 94747 - protein, 111 aa, Setaria italica
  Transcript Sequence Number=SeqID_28773
  Gene Ontology: Mol. function=nucleotide binding; Biological process =fatty acid biosynthetic process
  Homolog annotation: Hit_ID=B9SCG7; Match level="QueryCoverage=99%, HitCoverage=94%, E-value=5e-38, Identity=70%"; Hit description=Snf1 -kinase beta subunit, plants, putative
  Pfam annotation: Domain name=AMPKBI; Domain location=20-108; Score =142.6; E_value=1.2e-39; Accession=PF04739.7; Description=5'-AMP -activated protein kinase, beta subunit, complex-interacting region
MDQHGRDDHEGVNVVGFEVPPSPDASYNNPVPGNEDEGREPPLVPPHLQHTLLSFPPSQDESSPLPQPQTVVLNHLYIEKESTRSVVALGITHRFRAKFVTVVLYKPVLRR

SEQ ID NO: 94748 - protein, 259 aa, Setaria italica
  Transcript Sequence Number=SeqID_28774
  Gene Ontology: Mol. function=DNA binding
  Homolog annotation: Hit_ID=B9T2G9; Match level="QueryCoverage=93%, HitCoverage=56%, E-value=1e-50, Identity=45%"; Hit description =Transcription factor, putative
SSSSDLLGRGTTCRIVANPELLDSMANLSDKTKDDARKILSSKHLFYEEMCSYHNNNRFSLPEDPALQRSLQLALKCKDEHDTRRRASGDADEDDQSADTDYEEENDDEHPVVHVNKGTLPVHKRMRYMVDQEDVGFGNSSSSHDCSRRSDPLSITVDINKVFPDGTNLALVQKDLATQSAEIEKQRMEIEAEALELAKQRHKWERFSKKKDRELEKMRLENEQMKIENRRLELEVRHKELELERRLKGNRSQAWHDNI

SEQ ID NO: 94749 - protein, 427 aa, Setaria italica
  Transcript Sequence Number=SeqID_28775
  Gene Ontology: Mol. function=RNA binding
  Homolog annotation: Hit_ID=B6UDK8; Match level="QueryCoverage=100%, HitCoverage=52%, E-value=1e-162, Identity=72%"; Hit description =Nucleic acid binding protein
  Pfam annotation: Domain name=KH_1; Domain location=17-84; Score=47.7; E_value=4.5e-11; Accession=PF00013.21; Description=KH domain
  Pfam annotation: Domain name=KH_1; Domain location=346-408; Score =47.2; E_value=6.6e-11; Accession=PF00013.21; Description=KH domain
  Pfam module annotation: Pfam domain module=KH_1::KH_1; Domain location=17-84::346-408
MLLHDKVSVPSEKRHVSTRLVVPSSKVGCILGEGGKIITEMRRRTEAEIRVYSKADKPKYLSFDDELVQVAGPPAIARGALAEVASRLRTRTLRDTSSTNNPPPAAPFHDHPVDSREFTLYGRPANDPPYGRPAIDPPYGRPAIDPPFGRLTNDPPYGRPAIDLPFGRLTNDSPYGRPAAVPPFGRPTNDPPYGRPANYAPYGKLANDPPYGRPSSNVPYGRLNENAPRDPSHSYPVDYFSKREYPNGSPLFVSNFPSSAYERYAAPARVPTRELPSSFSPGADYMSHRSYRDHVPTDSYSSRGTQQLGIARDGNSNAYDYTEAAGQMHGRADHRGHTSVAGYSSTIELRIPNSSLESIIGVGGVNLAEICQISGAKLRLLEAHAGSSESVVEIQGTLDQAKAAQSLLQGFISANSRGTQQQPQSSR

SEQ ID NO: 94750 - protein, 170 aa, Setaria italica
  Transcript Sequence Number=SeqID_28776
  Gene Ontology: Mol. function=zinc ion binding
  Homolog annotation: Hit_ID=B6U7G3; Match level="QueryCoverage=100%, HitCoverage=52%, E-value=1e-76, Identity=84%"; Hit description=Zinc finger, C3HC4 type family protein
  Pfam annotation: Domain name=zf-C3HC4; Domain location=60-113; Score =35.0; E_value=2.9e-07; Accession=PF00097.17; Description=Zinc finger, C3HC4 type (RING finger)
MDRNQELEEVVPNDSDPLLGRENKEAESSSSVELSAPQPATVTPLEIEDEETDGSSAACCRICLESESEIGDELISPCMCKGTQQFVHRSCLDHWPWFRLQREGFAFSHCTTCKAQFHLRVETWEDNSWRKMKFRIFVARDVLLVFLAVQLTIAIIGAIAYFLDRDGSFR

SEQ ID NO: 94751 - protein, 460 aa, Setaria italica
  misc_feature (15)..(15): Xaa can be any naturally occurring amino acid
  Transcript Sequence Number=SeqID_28777
  Gene Ontology: Mol. function=RNA binding
  Homolog annotation: Hit_ID=B6UDK8; Match level="QueryCoverage=96%, HitCoverage=58%, E-value=0.0, Identity=65%"; Hit description=Nucleic acid binding protein
  Pfam annotation: Domain name=KH_1; Domain location=156-223; Score =60.1; E_value=8.1e-15; Accession=PF00013.21; Description=KH domain
  Pfam annotation: Domain name=KH_1; Domain location=294-363; Score =41.3; E_value=3.9e-09; Accession=PF00013.21; Description=KH domain
  Pfam annotation: Domain name=KH_1; Domain location=377-444; Score =47.7; E_value=4.5e-11; Accession=PF00013.21; Description=KH domain
  Pfam annotation: Domain name=KH_1; Domain location=45-107; Score =43.4; E_value=9.1e-10; Accession=PF00013.21; Description=KH domain
  Pfam annotation: Domain name=KH_2; Domain location=294-342; Score =17.1; E_value=0.005; Accession=PF07650.9; Description=KH domain
  Pfam module annotation: Pfam domain module=KH_1::KH_1::KH_1::KH_1::KH_ 2; Domain location=156-223::294-363::377-444::45-107::294-342
MDYDSSRRSNSKKRXTHSNSDDGKRKRLNSRHDDASMPSEPIETIYRILCPVKKIGSVLGRGGDIVKALREETKSKIRVADSIPGADERVIIIFNYQNQSEQADETAENITSDGSESMKPHCSAQDALLKIHDKIVADEVHDGVANNKSESADDVTARILVQGNQVGCLLGKGGSIIQQLRSDTGAGIRVLPSESLPQCALKSDELVQISGAPSLVRKALYEISTRLHQHPRKENRPLEEIIDASTRRKRESPPPLPHGNPMSHLHIDHPPPIPLLDPYRDGPLRTVAETEEFSVRILCASELIGSVIGKSGANVKRVEQQTGARIKVQEFDKDASGERLIIVSSKETPADPISPTIEALMLLHDKVSVPSEKRHVSTRLVVPSSKVGCILGEGGKIITEMRRRTEAEIRVYSKADKPKYLSFDDELVQVAGPPAIARGALAEVASRLRTRTLRDTSSTN

SEQ ID NO: 94752 - protein, 282 aa, Setaria italica
  Transcript Sequence Number=SeqID_28778
  Gene Ontology: Mol. function=nucleic acid binding; Cellular component= nucleus; Biological process=mRNA processing
  Homolog annotation: Hit_ID=B6SY08; Match level="QueryCoverage=65%, HitCoverage=60%, E-value=1e-102, Identity=92%"; Hit description =Splicing factor U2af 38 kDa subunit
  Pfam annotation: Domain name=RRM_1; Domain location=82-140; Score =6.1; E_value=0.054; Accession=PF00076.14; Description=RNA recognition motif. (a.k.a. RRM, RBD, o
  Pfam annotation: Domain name=zf-CCCH; Domain location=13-39; Score =36.9; E_value=8.3e-08; Accession=PF00642.16; Description=Zinc finger C-x8-C-x5-C-x3-H type (and similar)
  Pfam annotation: Domain name=zf-CCCH; Domain location=149-174; Score =24.1; E_value=0.00059; Accession=PF00642.16; Description=Zinc finger C-x8-C-x5-C-x3-H type (and similar)
  Pfam module annotation: Pfam domain module=RRM_1::zf-CCCH::zf-CCCH; Domain location=82-140::13-39::149-174
MAEHLASIFGTEKDRVNCPFYFKIGACRHGDRCSRIHNRPTISPTLVLVNMYQRPDMITPGVDAQGQPIDPRKMQEHFEDFYEDIFEELSKFGEIENLNVCDNLADHMIGNVYVQFREEDQAAAAHTALQGRFYSGRPIVVDFSPVTDFREATCRQYEENSCNRGGYCNFMHVKQIGRDLRKKLFGRYRRPHRGRSRSPSPVHRRERRDRDDYRHGGGGGGRGRDDYRGGGGGGRGRGRGGGGSRHERYDDGGRRRHGGSPPSRRARSPVRENSEERRAKIE

SEQ ID NO: 94753 - protein, 186 aa, Setaria italica
  Transcript Sequence Number=SeqID_28779
  Gene Ontology: Mol. function=peptidyl-prolyl cis-trans isomerase activity; Cellular component=intracellular; Biological process =protein folding
  Homolog annotation: Hit_ID=B9T007; Match level="QueryCoverage=77%, HitCoverage=77%, E-value=7e-67, Identity=81%"; Hit description=Fk506 binding protein, putative
  Pfam annotation: Domain name=FKBP_C; Domain location=15-118; Score =142.0; E_value=1.8e-39; Accession=PF00254.20; Description=FKBP-type peptidyl-prolyl cis-trans isomer
MAETIDLSGDGGVLKTVVRKAKDDAIAPSDSLPLVDVHYEGTLAENGEVFDTTHEDNSIFSFEVGQGAVIKAWDIALRTMKVGEVAKITCKPEYAYGTAGSPPEIPPNATLIFEVELVACRPRKGSSVGSVSDEKARLEELKKQRELAAATKEEEKKKREEAKAAAAARVQAKLDAKKGKGKGKGK

SEQ ID NO: 94754 - protein, 316 aa, Setaria italica
  Transcript Sequence Number=SeqID_28780
  Gene Ontology: Mol. function=zinc ion binding
  Homolog annotation: Hit_ID=B6U7G3; Match level="QueryCoverage=100%, HitCoverage=100%, E-value=1e-151, Identity=83%"; Hit description =Zinc finger, C3HC4 type family protein
  Pfam annotation: Domain name=zf-C3HC4; Domain location=60-110; Score =43.8; E_value=6.9e-10; Accession=PF00097.17; Description=Zinc finger, C3HC4 type (RING finger)
MDRNQELEEVVPNDSDPLLGRENKEAESSSSVELSAPQPATVTPLEIEDEETDGSSAACCRICLESESEIGDELISPCMCKGTQQFVHRSCLDHWRSVKEGFAFSHCTTCKAQFHLRVETWEDNSWRKMKFRIFVARDVLLVFLAVQLTIAIIGAIAYFLDRDGSFRNSFSDGWDRFLSKHPIPFYYCIGVVVFFVLLGFFGLIVHCSSFNDHQDPCLAGCRNCCYGWGILDCLPASLEACFALVLVFIVVFAILGIAYGFLAATMAVQRIWQRHYHILTKRELTKEYVVEDLHGSYTAPKLDPEHEERLKMLKLL

SEQ ID NO: 94755 - protein, 605 aa, Setaria italica
  misc_feature (103)..(103): Xaa can be any naturally occurring amino acid
  Transcript Sequence Number=SeqID_28781
  Gene Ontology: Cellular component=integral to membrane
  Homolog annotation: Hit_ID=B6UFQ8; Match level="QueryCoverage=100%, HitCoverage=95%, E-value=0.0, Identity=83%"; Hit description=Auxin -independent growth promoter protein
  Pfam annotation: Domain name=DUF246; Domain location=57-399; Score =338.3; E_value=1.5e-98; Accession=PF03138.6; Description=Plant protein family
AGGITKGSMRMDDVLPFGPRPRPRRLWGPLSKLDHLHPFAKPIKPYAAPSKHNGFIYAKIYGGFEKIQSSICDLVAVARLLNATLVIPEIQATTRAKGIRCTXNDVAIVRGLPKDLREARKKIKFPTVSPRNSATPEYYITEVLPRLVKSKVIGIIVNGGNCLKSILPASLEEFQRLRCRVAFHALRLRPQIQALGSQIVGRLRASGRPYLAYHPGLLRDTLAFHGCAELFQDIHTELIQYRRNQMIKRGTVKEPLTVDSVSRKMAGLCPLMPEEVGLLLQALGYPPTTIIFLAGSETFGGQRMLIPLRAMFANLVDRTSLCSQKELSDLVGPEDPLASDLPQSPPPKSEKQLIEEWKRAGPRPRPLPPPPARPFYAHEKEGWYGWIGENDTEPDASSIEFRRQAHRLLWDALDYFVSVEADAFFPGFHNDGSGWPDYSSLIMGHRLYQTPSGITYRPDRKIVAALFENVSDHRYHPPRNWTIAAREHLNRSAGVEGVVSSAMLSRPVSFLSHPLPECSCITPKSPAVQPVKDRNGRLLFGGEEECPEWMARHLAMASAKNSEPQNEDYEDELPEDDSSPGTQQESDRSDANKSSEQDEEMDPDD

SEQ ID NO: 94756 - protein, 294 aa, Setaria italica
  Transcript Sequence Number=SeqID_28782
  Gene Ontology: Mol. function=nucleic acid binding; Cellular component= nucleus; Biological process=mRNA processing
  Homolog annotation: Hit_ID=B6SY08; Match level="QueryCoverage=66%, HitCoverage=63%, E-value=1e-113, Identity=98%"; Hit description =Splicing factor U2af 38 kDa subunit
  Pfam annotation: Domain name=RRM_1; Domain location=82-140; Score =10.3; E_value=0.022; Accession=PF00076.14; Description=RNA recognition motif. (a.k.a. RRM, RBD, o
  Pfam annotation: Domain name=zf-CCCH; Domain location=13-39; Score =35.4; E_value=2.2e-07; Accession=PF00642.16; Description=Zinc finger C-x8-C-x5-C-x3-H type (and similar)
  Pfam annotation: Domain name=zf-CCCH; Domain location=149-174; Score =24.3; E_value=0.00051; Accession=PF00642.16; Description=Zinc finger C-x8-C-x5-C-x3-H type (and similar)
  Pfam module annotation: Pfam domain module=RRM_1::zf-CCCH::zf-CCCH; Domain location=82-140::13-39::149-174
MAEHLASIFGTEKDRVNCPFYFKIGACRHGDRCSRLHNRPTISPTLVLANMYQRPDMITPGVDAQGQPIDPEKMQEHFEDFYEDIYEELGKFGEIENLNVCDNLADHMIGNVYVQFREEEQAAAAYNALQGRFYSGRPIIVEYSPVTDFREATCRQFEENSCNRGGYCNFMHVKQIGKDLRRKLYGRSASRKYHGRSRSRSPPPQRRGHRDRDDYHRDRDDYRGGGGGGRGRGSRHDRYDDGGGRGGRHDRYDDGGRRRHGSPPPRRGRSPVRESSEERRAKIEQWNREREAKQ

SEQ ID NO: 94757 - protein, 399 aa, Setaria italica
  Transcript Sequence Number=SeqID_28783
  Gene Ontology: Mol. function=GTP binding; Cellular component =intracellular
  Homolog annotation: Hit_ID=Q9LNQ8; Match level="QueryCoverage=99%, HitCoverage=99%, E-value=0.0, Identity=85%"; Hit description=F1L3.17
  Pfam annotation: Domain name=Dynamin_N; Domain location=65-173; Score= -21.6; E_value=0.0099; Accession=PF00350.15; Description=Dynamin family
  Pfam annotation: Domain name=MMR_HSR1; Domain location=63-174; Score =121.9; E_value=2.1e-33; Accession=PF01926.15; Description=GTPase of unknown function
  Pfam annotation: Domain name=TGS; Domain location=290-366; Score =131.2; E_value=3.3e-36; Accession=PF02824.13; Description=TGS domain
  Pfam module annotation: Pfam domain module=Dynamin_N::MMR_HSR1::TGS; Domain location=65-173::63-174::290-366
MGILERIKEIEAEMARTQKNKATEYHLGQLKAKLAKLRTQLLEPPKGSSGGGDGFEVTKFGHGRVALIGFPSVGKSTLLTMLTGTHSEAASYEFTTLTCIPGIIHYNDTKIQLLDLPGIIEGASEGKGRGRQVIAVAKSSDLVLMVLDASKSEGHRQILTRELEAVGLRLNKRPPQIYFKRKKTGGISFNTTAPLTHIDEKLCYQILHEYKIHNAEVLFREDATVDDLIDVIEGNRKYIKCVYVYNKIDVVGIDDVDNLARQPNSLVISCNLKLNLDRLLARMWEEMGLVRVYTKPQGQQPDFTDPVVLSTDRGGCTVEDFCNHIHRSLLKDVKYVLVWGTSARHYPQHCGLSHGLQDEDVVQIVKKKEKEEGGRGRFKSHTNAPDRISDRVKKAPLKT

SEQ ID NO: 94758 - protein, 382 aa, Setaria italica
  misc_feature (54)..(54): Xaa can be any naturally occurring amino acid
  misc_feature (73)..(73): Xaa can be any naturally occurring amino acid
  Transcript Sequence Number=SeqID_28784
  Gene Ontology: Mol. function=protein dimerization activity; Cellular component=nucleus; Biological process=regulation of transcription, DNA-dependent
  Homolog annotation: Hit_ID=B6TPS0; Match level="QueryCoverage=98%, HitCoverage=99%, E-value=1e-137, Identity=70%"; Hit description =Transcription factor HBP-1a
  Pfam annotation: Domain name=MFMR; Domain location=1-199; Score =304.1; E_value=2.9e-88; Accession=PF07777.3; Description=G-box binding protein MFMR
  Pfam annotation: Domain name=bZIP_1; Domain location=298-361; Score =82.7; E_value=1.3e-21; Accession=PF00170.13; Description=bZIP transcription factor
  Pfam annotation: Domain name=bZIP_2; Domain location=298-352; Score =30.5; E_value=6.8e-06; Accession=PF07716.7; Description=Basic region leucine zipper
  Pfam module annotation: Pfam domain module=MFMR::bZIP_1::bZIP_2; Domain location=1-199::298-361::298-352
  Subcellular localization annotation: CTP_CleavageSite=9; ConfidenceScore=5.04e-01
MGKGDVATRSKSQKSSAIQNEQSTPTNPPTAYPDWSQFQAYYNTAGTAPVTPPXFFHSSVAPNPQGHPYMWGXPQMMPPYGTPPPYAAMYAQGTPYQQAPMPPGSHPYSPYPMQSPNGTIQTPTSGAGGTETDKSSKNKRKTPLKRSKGSLGSLDVVVAKNNKSPAKPSASSSNEGSSQSESGSGSSSEGSSTNSKSGSRTKDSSERGQGNDSRKGTQSSAVEPTQPSSGPVVLNPMMPFWPVPPPMGGPATTLNMGVDYWGAPASVPMHGKVVAAPTSAPSSNSRDIVLSDPAIQDERELKKQKRKQSNRESARRSRLRKQAEWEEVANRADLLKQENSSLKEELKQLQEKCDSLTSENTSLHEKLKELEDEKSNGNWCKD

SEQ ID NO: 94759 - protein, 443 aa, Setaria italica
  Transcript Sequence Number=SeqID_28785
  Homolog annotation: Hit_ID=B6SXJ9; Match level="QueryCoverage=100%, HitCoverage=100%, E-value=0.0, Identity=85%"; Hit description=Kelch motif family protein
  Pfam annotation: Domain name=Kelch_1; Domain location=234-280; Score =59.1; E_value=1.7e-14; Accession=PF01344.17; Description=Kelch motif
  Pfam annotation: Domain name=Kelch_1; Domain location=282-328; Score =42.3; E_value=1.9e-09; Accession=PF01344.17; Description=Kelch motif
  Pfam annotation: Domain name=Kelch_2; Domain location=234-280; Score =28.7; E_value=2.4e-05; Accession=PF07646.7; Description=Kelch motif
  Pfam annotation: Domain name=Kelch_2; Domain location=282-328; Score =13.9; E_value=0.63; Accession=PF07646.7; Description=Kelch motif
  Pfam annotation: Domain name=Kelch_2; Domain location=335-375; Score =1.7; E_value=26; Accession=PF07646.7; Description=Kelch motif
  Pfam module annotation: Pfam domain module=Kelch_1::Kelch_1::Kelch _2::Kelch_2::Kelch_2; Domain location=234-280::282-328::234-280::282 -328::335-375
MDLCDKREDMALQDGDSCLAPRPLRGGCEMESPWAEGLLQGGSRKRSAPEESEDDVQEIDEVDCGGKRSKPPSPQPHTPDIREAHAPGRRRTVAAGGGDQSNGGGDLIGEIGRDLSINCLLRLSRSEYGSVASLNRDFRSLVRGGEIYRLRRQNNISEHWVYFSCNVLEWDAYDPYRERWISVPKMPPDECFMCSDKESLAVGTELLVFGMAHIVFRYSILTNSWTRGEVMNSPRCLFGSASVGEKAYVAGGTDSLGRILSSAELYNSETHTWTPLPSMNRARKNCSGVFMDGKFYVIGGVTNNNMILTCGEEYDVQSKSWRVIENMSVGLNGVSGAPPLISVVKNELYAADYSEKDVKKYDKQNNKWVTLGKLPERSVSMNGWGLAFRACGERLIVIGGPRTSVGGMIELNSWIPDDKPPVWNLIARRPSGNFVYNCAVMGC

SEQ ID NO: 94760 - protein, 73 aa, Setaria italica
  Transcript Sequence Number=SeqID_28786
  Gene Ontology: Biological process=defense response
  Homolog annotation: Hit_ID=B6TC15; Match level="QueryCoverage=94%, HitCoverage=84%, E-value=7e-18, Identity=60%"; Hit description=Low -molecular-weight cysteine-rich protein LCR70
  Pfam annotation: Domain name=Gamma-thionin; Domain location=35-69; Score=28.7; E_value=2.4e-05; Accession=PF00304.12; Description=Gamma- thionins family
MASTSSRRMVASALFVVLLLLVASEIGPTRVAEARHCVSQSHKFEGTCTRKSNCENVCKTEGFPWGECKWHGI

SEQ ID NO: 94761 - protein, 103 aa, Setaria italica
  Transcript Sequence Number=SeqID_28787
SFPDEVGDCYELPANLRSTNLDEKPSSFSGIRIGCELRTEHLLPSQKQQAEGPSCRRGDGHAHLQPNSRPATGLPPLLRFLTPSPSLFAPSSAAPPRRRLRRR

SEQ ID NO: 94762 - protein, 69 aa, Setaria italica
  Transcript Sequence Number=SeqID_28788
LQYNCLPRKSINLLFYNSLSYQLPSFIICGLKRQKFHQCKEFISSSSRARIPSRPAYHFVNASHMGIIL

SEQ ID NO: 94763 - protein, 293 aa, Setaria italica
  Transcript Sequence Number=SeqID_28789
  Subcellular localization annotation: CTP_CleavageSite=40; ConfidenceScore=5.06e-01
LGINGCQKQFLSFKKQETTGNSLLISSDKKPLDTKQVNVTAPLATAPSLALTGNTKPAETFSFSTVNNEGTNPTGSKAPSGLAPSLQQSSNSFGNNQSGKGGLDSIQSVGTFGGSQNSNKDGAGFGFKSSLFASSGSVPAKIGERSEAGFGNTSPQTSYTADRKVFGPPVALSSGPLPSISPAKPSLIGSSSSGYRTGNSEAPQSLHGSPPSQQTIGKSHNSRTQAPVDYSRNSNMGTIFDSQEDLSKKLYSINEMTKELDALLAYIEKDGGFRDACITFQQRPLSVFEDGLQ

SEQ ID NO: 94764 - protein, 94 aa, Setaria italica
  misc_feature (40)..(40): Xaa can be any naturally occurring amino acid
  misc_feature (47)..(47): Xaa can be any naturally occurring amino acid
  Transcript Sequence Number=SeqID_28790
MYATKPLSLFKSHPEAASRPPPEGRNSGYLVVKVPDDDGXDGETCCXWGTCGGTRVRDLPFPQNRVLTVRYTEQHGESSTTYADAVVFVPVPDQ

SEQ ID NO: 94765 - protein, 161 aa, Setaria italica
  Transcript Sequence Number=SeqID_28791
  Gene Ontology: Mol. function=oxidoreductase activity; Biological process=oxidation reduction
  Homolog annotation: Hit_ID=B6TAU0; Match level="QueryCoverage=80%, HitCoverage=41%, E-value=9e-54, Identity=76%"; Hit description=NADP -dependent D-sorbitol-6-phosphate dehydrogenase
  Pfam annotation: Domain name=Aldo_ket_red; Domain location=24-160; Score=-46.4; E_value=1.5e-05; Accession=PF00248.13; Description =Aldoketo reductase family
MLRVAGRRLSSALSRRPAAAAAAGTRGPLAGWRMEKPAIRGLIHSALRIGYRHLDCAADYQNEAEVGDALEEAFETGLVKREDLFITTKLWNSDHGHVIEACKDSLKKLKLDYLDLYLVHFPVATRHTEVGSLASVIGEDGVLDIDTTVSLEATWHAMEDL

SEQ ID NO: 94766 - protein, 147 aa, Setaria italica
  Transcript Sequence Number=SeqID_28792
  Gene Ontology: Mol. function=oxidoreductase activity; Cellular component=cytoplasm; Biological process=oxidation reduction
  Homolog annotation: Hit_ID=B6TAU0; Match level="QueryCoverage=51%, HitCoverage=24%, E-value=3e-31, Identity=81%"; Hit description=NADP -dependent D-sorbitol-6-phosphate dehydrogenase
  Subcellular localization annotation: CTP_CleavageSite=37; ConfidenceScore=5.45e-01
MAAKDVAPAVTLSNGHHGGGMPAATKLSNGHSMKTVPAVTLSSGHRMPAVGLGVWRMEKTAMRGIIHAAIRKGYRHFDCAAKYQNEAEVGDALEEAFETGLVKREDLFITTKVILVAGNRHFRIAHDHNRSTETSAFVMTVAVEFRS

SEQ ID NO: 94767 - protein, 90 aa, Setaria italica
  Transcript Sequence Number=SeqID_28793
  Gene Ontology: Mol. function=oxidoreductase activity; Cellular component=cytoplasm; Biological process=oxidation reduction
  Homolog annotation: Hit_ID=B6TAU0; Match level="QueryCoverage=85%, HitCoverage=24%, E-value=3e-32, Identity=79%"; Hit description=NADP -dependent D-sorbitol-6-phosphate dehydrogenase
MICQLARRNSIPWQELAEKYGKTPAQLVLRWGLQKNTVVIPKTSKVERLQENLEVFDFDISDEDMEEMKAIDKNHRTNQPAKFWGIDVYS

SEQ ID NO: 94768 - protein, 316 aa, Setaria italica
  Transcript Sequence Number=SeqID_28794
  Gene Ontology: Mol. function=oxidoreductase activity; Cellular component=cytoplasm; Biological process=oxidation reduction
  Homolog annotation: Hit_ID=B6TAU0; Match level="QueryCoverage=98%, HitCoverage=99%, E-value=1e-157, Identity=84%"; Hit description=NADP- dependent D-sorbitol-6-phosphate dehydrogenase
  Pfam annotation: Domain name=Aldo_ket_red; Domain location=12-299; Score=453.7; E_value=2.8e-133; Accession=PF00248.13; Description =Aldoketo reductase family
MAGKGAAPAVALSSGHRMPSVGLGVWRMEKPAIRGLIHSALRIGYRHLDCAADYQNEAEVGDALAEAFETGLVKREDLFITTKLWNSDHGHVIEACKDSLKKLKLDYLDLYLVHFPVATRHTGVGTTSSALGDDGVLDIDTTISLEATWHAMEDLVNMGLVRSIGISNYGVFLTRDCLAYAKIKPAVNQIEMHPYFQRDSLVKFCQKHGICVTAHTPLGGSTANAELFGSLPGLDDPVVKELAEKYSRTPAQLVLRWGLQKNTVVIPKTSKVERLQENFEVFDFEISGEDMEKIKAIDRSYRTNQPAKFWGIDLYA

SEQ ID NO: 94769 - protein, 325 aa, Setaria italica
  Transcript Sequence Number=SeqID_28795
  Gene Ontology: Mol. function=protein serine/threonine kinase activity; Cellular component=plasma membrane; Biological process =protein amino acid phosphorylation
  Homolog annotation: Hit_ID=B9SRU2; Match level="QueryCoverage=98%, HitCoverage=36%, E-value=1e-136, Identity=72%"; Hit description =Kinase, putative
  Pfam annotation: Domain name=Pkinase; Domain location=3-246; Score =44.4; E_value=3.9e-11; Accession=PF00069.17; Description=Protein kinase domain
  Pfam annotation: Domain name=Pkinase_Tyr; Domain location=3-246; Score=39.3; E_value=2.4e-16; Accession=PF07714.9; Description =Protein tyrosine kinase
  Pfam module annotation: Pfam domain module=Pkinase::Pkinase_Tyr; Domain location=3-246::3-246
RQRLDGNPMSEQGVHEFQTEIEMLSKLRHRHLVSLIGYCEDMNEMILVYDYMANGTLREHLYNSKKAPLSWKSRLEICIGAARGLHYLHTGAKYTIIHRDVKTTNILLDDKLIAKVSDFGLSKTGPNVDNTHVSTVVKGSFGYLDPEYFRRQQLTEKSDVYSFGVVLFEVLCARPALSPSLPKEQVSLADWALHCQKKGILGQIIDPYLQGKISLQCFMKFAETAEKCVADHSIDRPSMADVLWNLEFALQLQESAEDNSSLTNGTSSNTSPLIVPRLHSDEPSTDTTTTTSTTMSLTGQSLASMESDGLTPSSVFSQLMNPGGR

SEQ ID NO: 94770 - protein, 64 aa, Setaria italica
  Transcript Sequence Number=SeqID_28796
AGPTRCSVISSIFSLLRSSYHHDLAFRQSLDSSTRHDQCRKTRRGISGSARWDDERTRPPARIL

SEQ ID NO: 94771 - protein, 153 aa, Setaria italica
  Transcript Sequence Number=SeqID_28797
  Gene Ontology: Mol. function=catalytic activity; Biological process =metabolic process
  Homolog annotation: Hit_ID=B9RK10; Match level="QueryCoverage=81%, HitCoverage=17%, E-value=2e-43, Identity=63%"; Hit description=1 -deoxyxylulose-5-phosphate synthase, putative
YRFHPLRYLRCNPTDSRPCQTLSASPLRGVTQRVAALPDVDDFFWEKDPTPILDTIDAPIHLKNLSSKELKQLADEVRSEISFIMSRKCQPCGPGRSVVELTIAIHYVFNAPMDKILWDAGQHAYAHKILTGRRSLFHTIKQKNGLSGFTSRL

SEQ ID NO: 94772 - protein, 96 aa, Setaria italica
  Transcript Sequence Number=SeqID_28798
  Subcellular localization annotation: CTP_CleavageSite=70; ConfidenceScore=5.33e-01
AASSVPTPARPEQHTEPRLASTLLSPNARGSGWIKSRQLQSKTNSRFPKARIKFFLLRRGGKRMGRRVLGRMMGGGIEGRKEGGNGGEQTGRGGSM

SEQ ID NO: 94773 - protein, 97 aa, Setaria italica
  Transcript Sequence Number=SeqID_28799
  Gene Ontology: Mol. function=methyltransferase activity; Cellular component=cytoplasm; Biological process=tRNA processing
  Homolog annotation: Hit_ID=Q75AT3; Match level="QueryCoverage=100%, HitCoverage=22%, E-value=5e-11, Identity=39%"; Hit description=tRNA guanosine-2'-O-methyltransferase TRM13
PNKRRHCANSPLPSSQYCGNHLPESASGAGRRVPCPVDPSHTVLEENLEEHVGKCPLKKQVAALAAQPYYSKGINSGGSEAGRGITSAEKRAAVLQA

SEQ ID NO: 94774 - protein, 69 aa, Setaria italica
  Transcript Sequence Number=SeqID_28800
  Pfam annotation: Domain name=DUF662; Domain location=1-68; Score= -12.9; E_value=2.5e-07; Accession=PF04949.5; Description=Family of unknown function (DUF662)
FAHELTCGVFFFGQLKIKEKEYKEVLEAYNEKSKEKALLGLRLIELVSESERMRMKKLEELNKTVDSLY

SEQ ID NO: 94775 - protein, 169 aa, Setaria italica
  Transcript Sequence Number=SeqID_28801
  Gene Ontology: Cellular component=plasma membrane
  Pfam annotation: Domain name=DUF662; Domain location=10-168; Score =367.6; E_value=2.3e-107; Accession=PF04949.5; Description=Family of unknown function (DUF662)
MQGGGVEQPMQMVLRMKHPSSLGSSVAGDEEEGEGSSRSALSVFKAKEEQIERRKMEVREKVFAHLGRVEEESKRLAFIRQELEGMADPTRKEVESIRKRIDTVNRQLKPLSKSCIKKEKEYKEVLEAYNEKSKEKALLVNRLIELVSESERMRMKKLEELNKTVDSLY

SEQ ID NO: 94776 - protein, 164 aa, Setaria italica
  Transcript Sequence Number=SeqID_28802
  Gene Ontology: Mol. function=nucleoside-triphosphatase activity; Cellular component=plasma membrane; Biological process=transport
  Homolog annotation: Hit_ID=B9N856; Match level="QueryCoverage=88%, HitCoverage=24%, E-value=6e-76, Identity=89%"; Hit description=ABC transporter family protein
  Pfam annotation: Domain name=ABC_tran; Domain location=50-161; Score=- 25.1; E_value=0.00033; Accession=PF00005.19; Description=ABC transporter
RKKPNQTTTNTLDKNVGKLPPPVLQFVEVKFGYTPDNLIYKCLDFGVDLDSRIALVGPNGAGKSTLLKLMTGDLVPLDGMVRRHNHLRIAQYHQHIAEKLDLDMSALAYMMKEYPGTEEEKMRSAVGRFGLSGKAQVMPMKNLSDGQRSRVIFAWLAYKARPTN

SEQ ID NO: 94777 - protein, 119 aa, Setaria italica
  Transcript Sequence Number=SeqID_28803
  Homolog annotation: Hit_ID=Q5N941; Match level="QueryCoverage=84%, HitCoverage=10%, E-value=3e-30, Identity=63%"; Hit description =Probable ion channel DMI1, chloroplastic
QEKIRSCSDGNAGDREGTEKVSWIGRDHGSAFINSGNWNLAPSSSIFALAVPLFLFKYIDQVRRRQTNSMRVRGSEEEVPLKKRIAYKVDVFFSGHPYAKLLALQESTATNNIQCNPTR

SEQ ID NO: 94778 - protein, 214 aa, Setaria italica
  Transcript Sequence Number=SeqID_28804
  Gene Ontology: Mol. function=aspartic-type endopeptidase activity; Cellular component=chromatin; Biological process=DNA integration
  Homolog annotation: Hit_ID=Q6ATH4; Match level="QueryCoverage=52%, HitCoverage=7%, E-value=7e-32, Identity=62%"; Hit description =Putative polyprotein
  Pfam annotation: Domain name=Retrotrans_gag; Domain location=1-81; Score=10.4; E_value=0.0058; Accession=PF03732.9; Description =Retrotransposon gag protein
AMTDNTQTASALWTAISAVFQANKAPRAIFLNHEFHSMTQGDLSIDAYCIRMKEKADELRDVGQPVSEPNLVLNLLRGLNEVYSTVTDTIAGKQPLTFADARHQLLLKELRLHNEEKVRATTALLAAASSPGGNQQQQQGSRRPNTKKGGQQPFPNSYGGFSNTSGSTSTNKRVPWGFNPWTGERVAPGERVTPPGQRRQGGLGAPGGPGAQAG

SEQ ID NO: 94779 - protein, 511 aa, Setaria italica
  Transcript Sequence Number=SeqID_28805
  Gene Ontology: Mol. function=P-P-bond-hydrolysis-driven protein transmembrane transporter activity; Cellular component=integral to membrane; Biological process=intracellular protein transmembrane transport
  Homolog annotation: Hit_ID=O63066; Match level="QueryCoverage=97%, HitCoverage=89%, E-value=0.0, Identity=80%"; Hit description =Preprotein translocase subunit secY, chloroplastic
  Pfam annotation: Domain name=SecY; Domain location=153-488; Score =354.6; E_value=1.8e-103; Accession=PF00344.12; Description =eubacterial secY protein
RCRTAITTVRRRRAALACSPRCTLETAGPAGFDPLGLYKERTSGSASSSRSPLSTFFGILAPVFGSSNGGGARRENRGAAAAIEDSSIDIDDFFKGPLPGKFLKLLGFLALSRLGVYIPLGGVNREAFAGNLDQNSLLGTLDSFSGGGIGRLGICSLGIVPFINAQIVFQLLAQLYPKLQDLQRKEGEAGRKKVLQYTRYASVGFAIVQAIGQVLYLRPYVNDFSTEWVLTSVTLLTLGSVFTTFIGERISDLKLGNGTSLLIFTSIISYLPASFGRTVSQAFQDGNYVGLLTIILSFFLLVLGIVYVQEAERKIPLNYASRYSSRTGGLQRSAYLPFKVNSSGVMPIIFSTSSLALPGTLARFTGLEFLKKAAVALIPGGSLYLPTNVLLIAFFNYYYTFLQLDPDDLSEQLKRQGASIPLVRPGKSTAAYIKTVLSRISVLGSAFLAVLAAGPSVVEQISHLTAFRGFAGTSVLILVGCATDTARKVQAEIISQKYKNIEFYDVNRFDQ

SEQ ID NO: 94780 - protein, 79 aa, Setaria italica
  Transcript Sequence Number=SeqID_28806
  Gene Ontology: Mol. function=transferase activity; Biological process= response to stress
  Homolog annotation: Hit_ID=B6U3T3; Match level="QueryCoverage=98%, HitCoverage=34%, E-value=6e-31, Identity=83%"; Hit description =Glutathione S-transferase
  Pfam annotation: Domain name=GST_N; Domain location=4-77; Score=76.4; E_value=1e-19; Accession=PF02798.12; Description=Glutathione S -transferase, N-terminal domain
MTTEPVTLIGAFGSPFVHRVEVALRLKGVPYELILEDMSNKSELLLKHNPVHKKVPVLLHGDRAVSESLVIVEYVDEAF

SEQ ID NO: 94781 - protein, 515 aa, Setaria italica
  Transcript Sequence Number=SeqID_28807
  Gene Ontology: Mol. function=binding; Cellular component=vacuole
  Homolog annotation: Hit_ID=O48802; Match level="QueryCoverage=93%, HitCoverage=63%, E-value=1e-151, Identity=58%"; Hit description =F2401.12
  Pfam annotation: Domain name=PB1; Domain location=31-125; Score=64.2; E_value=4.8e-16; Accession=PF00564.16; Description=PB1 domain
LPEGHTGHVPVNSSLLATAAPLIDRKVVTRWRPLKLVYDHDIRLGQIPEKCSFRTLREFVAKRFPSSKAVLIKYKDADGDLVTITSTEELRLAESFVDKVGHEVIENGKEGDNKLPGLRLHLVEVSPEQEPPLPSEEEKLEEDEELLVKGEDGTSHTSSEVADTEVTKQDAENRVAEQRMETGKKDCGHAECKEAEIDDWLLQFAELFRNQVGIDADAHLDLHELGMELCSEALEETVTSEEAQALFEMAASKFQEVAALALFNWGNVHMCAARKRIPLDESAPKEVMAAQLRTAYDWVRERYALAGHKYEEALKIKPDFYEGLLALGQQHFETAKLHWSFALADKVDLSTWDSSETFKLFDSAEQNMRAATEMWEKVEEQRMAELKEPGAGEKDEILRKKRKQHSADGQLELTPEEAAEQAAVMRQQIHLFWGNMLFERSQVEFKLSVGDWKKNLDASVERFKLAGASESDISTVLKNHFSNAVSECEEKKVMTSGMEIAQTNDNIEDKCVVES

SEQ ID NO: 94782 - protein, 39 aa, Setaria italica
  Transcript Sequence Number=SeqID_28808
DILHYAPWKASAVRCSLISSTTHYCRSYCLCSGSSGWAR

SEQ ID NO: 94783 - protein, 40 aa, Setaria italica
  Transcript Sequence Number=SeqID_28809
AVVITTYEGKHTHPIPATLRGSSHLLAAQRGRDGVRVLAL

SEQ ID NO: 94784 - protein, 286 aa, Setaria italica
  Transcript Sequence Number=SeqID_28810
  Gene Ontology: Mol. function=binding; Cellular component=chloroplast; Biological process=regulation of transcription, DNA-dependent
  Homolog annotation: Hit_ID=Q8L4S1; Match level="QueryCoverage=100%, HitCoverage=31%, E-value=1e-105, Identity=65%"; Hit description=Crp1- like protein
  Pfam annotation: Domain name=PPR; Domain location=195-229; Score =34.9; E_value=3.2e-07; Accession=PF01535.12; Description=PPR repeat
  Pfam annotation: Domain name=PPR; Domain location=23-56; Score=15.8; E_value=0.12; Accession=PF01535.12; Description=PPR repeat
  Pfam annotation: Domain name=PPR; Domain location=57-91; Score=13.8; E_value=0.21; Accession=PF01535.12; Description=PPR repeat
  Pfam annotation: Domain name=PPR; Domain location=92-126; Score=30.8; E_value=5.6e-06; Accession=PF01535.12; Description=PPR repeat
  Pfam module annotation: Pfam domain module=PPR::PPR::PPR::PPR; Domain location=195-229::23-56::57-91::92-126
NFWKEAQDLYSRMKNMDDGPDIIASNAMLNLYANLGMVTEAKEIFDSLRRNSNADGVSYTTMVYLYKGMGLLSESIKIACELQKSGLLSDCASYNAVMACYVAKGNLRDCAELVQEMVVANIPPDASTFGMIFSLLQNGHVSSEEVFKLESAYSDGKSSAKQAIIAFLFSIAGMHAAALEICEQLLRPDWTIDACAYNVCFKVYASCGKVEKAFSLFMRMNDLGLKPDTVTCIRLATCYGKPGVSEGLRTNALLKYRTDELIPSHNASVSYIETGKNNVAVQLVKK

SEQ ID NO: 94785 - protein, 129 aa, Setaria italica
  Transcript Sequence Number=SeqID_28811
VAARGTPQVGGGVEAPFPGCSAWGIQRRRRALGPSSCIQRRRQPPLTGWHAAWHLTAMWHLVSTSRRDQGSQLLLQIVRSFILSSYIWPWRGTAAWLVQVSCGSRRARRMRSWSCWLLLAVVYHSSQGR

SEQ ID NO: 94786 - protein, 87 aa, Setaria italica
  Transcript Sequence Number=SeqID_28812
  Gene Ontology: Mol. function=acyltransferase activity; Cellular component=integral to membrane; Biological process=metabolic process
  Homolog annotation: Hit_ID=B9S2F2; Match level="QueryCoverage=97%, HitCoverage=16%, E-value=2e-36, Identity=81%"; Hit description=ER glycerol-phosphate acyltransferase
SMFHGTTARGWKGMDPFYFSMNPRPVYTVTFLDKLPADLTCGGGKSSHEVANYVQKVIASTLSYQCTGFTRKDKYRELADNDGVVHA

SEQ ID NO: 94787 - protein, 65 aa, Setaria italica
  Transcript Sequence Number=SeqID_28813
ATSQGRRLAVPSAARSWHIYFGWIDLACLLRLPGDSNVLAVAVDDVHLCSFTYGLVQGNGNIRNN

SEQ ID NO: 94788 - protein, 68 aa, Setaria italica
  Transcript Sequence Number=SeqID_28814
IDRYKETRCIARQLHQINGMADLISLYTKLFFQAMAPKETLGDLRRKRTDRVVNIKKTTTQTNRVAAG

SEQ ID NO: 94789 - protein, 420 aa, Setaria italica
  Transcript Sequence Number=SeqID_28815
  Gene Ontology: Mol. function=molecular_function; Biological process =biological_process
  Homolog annotation: Hit_ID=UPI0000D6217B; Match level="QueryCoverage =90%, HitCoverage=63%, E-value=6e-42, Identity=30%"; Hit description =Protein FAM116B.
  Pfam annotation: Domain name=DUF1630; Domain location=1-393; Score =313.2; E_value=5.3e-91; Accession=PF07792.4; Description=Protein of unknown function (DUF1630)
NPSVPYGLFHDADLFAAFRGLLLHLWTLWELMVVGEPVLVVAPSPAQCSEAVAGLVSLVAPLLYSVDFRPYFTIHDPDFARLNALAEGEVFPPMVLGVTNLFFLKSLKSIPNVVAVGSPNPNSTRVLPVGGQLPGNGTNGTPGKLKLDKLSINKFSPTSLLNSIKLRREGPLSLMTEHKEALWSTYGPTTKPDTSVLNRLIDAGVSPRIEESMSVVNNEILRRHFLELTTNFLAPFGPYLRTTTPSEGSSPFVDPPLLPPFHADEFVNGLAARGPGKFLSKRMRSNWLDLYRRFLEGPNFMPWFRQRRAAAEQEQQRLWRQARMNVDTEKLMSKMSELERIDSFNAVERYLLREMENSGRGSADSAAACQKLKGDLQAAFSVLPKDMQQLLLSNPKRAVLLQGSQEKAPGPNGIVTQTSL

SEQ ID NO: 94790 - protein, 43 aa, Setaria italica
  Transcript Sequence Number=SeqID_28816
EGVWSNFICSREDAQKNVDVAVVFIGSKLQSSDISKDKQVAYL

SEQ ID NO: 94791 - protein, 154 aa, Setaria italica
  misc_feature (33)..(33): Xaa can be any naturally occurring amino acid
  Transcript Sequence Number=SeqID_28817
NNGDINILLSFSMAFPYVSTTDDEKLENSLLSXFAENCNGGFERNRVTYTDTCTVTGQDVKKHHSMDSIRDLVTSRMGNNPSGQTDLIVFCNGGFEDLDPAKSEGEKHSEWYIQLQTSSAWHPILYASQPSALLEKPSDLPLGRYLAEKNQITN

SEQ ID NO: 94792 - protein, 169 aa, Setaria italica
  misc_feature (27)..(27): Xaa can be any naturally occurring amino acid
  Transcript Sequence Number=SeqID_28818
TVGFERNRVTYTDTCTVTGQDVKKQYXSMDSIRDLVTSRMGNNPSGQTDLIVFCNGGFEDLDPAKSEGELLSDLVAMLKKSGAGYTILYASQPSALLEKPSDLPLGRYLAEKTNTTKAGLGKCDGECLVKSTLLEGTFVGIVLLIILISGLMCMMGIDTPSRFEAPQES

SEQ ID NO: 94793 - protein, 314 aa, Setaria italica
  Transcript Sequence Number=SeqID_28819
  Homolog annotation: Hit_ID=Q9ZVV1; Match level="QueryCoverage=19%, HitCoverage=80%, E-value=2e-09, Identity=50%"; Hit description =T5A14.4 protein
MAAAWVALAVLLVAAQVASAAPVLAPAFLWAPKNYGFRSDDAKQVVHYQTVSPKSLAKSVLEEGGWSNLMCSKEDAQKNVNVAIVFLGSELQSSDISKDKQVDPALADTLKLSFTSSEFSMAFPYVSTTDDEKLENSLLSGFAENCNGGFERNRVTYTDTCTVTGQDVKKHHSMDSIRDLVTSRMGNNPSGQTDLIVFCNGGFEDLDPAKSEGELLSDLVAMLKKSGAGYTILYASQPSALLEKPSDLPLGRYLAEKTNTTKAGLGKCDGECLVKSTLLEGTFVGIVLLIILISGLMCMMGIDTPSRFEAPQES

SEQ ID NO: 94794 - protein, 92 aa, Setaria italica
  Transcript Sequence Number=SeqID_28820
IEVMHRAIEVRSLNTNACITEYSTRHVFHGVNMHSGQWRLESKQPLDSSSFFIFMDVHRLASAPHARAHRRHRVRCRRQALWRPRRSRVHLR

SEQ ID NO: 94795 - protein, 40 aa, Setaria italica
  Transcript Sequence Number=SeqID_28821
FGGIPTMPTETPMPALSGHGRTVCVTGAGGFIASWLVKRL

SEQ ID NO: 94796 - protein, 87 aa, Setaria italica
  Transcript Sequence Number=SeqID_28822
VEYKRSRLDEIEFALIELGAGIRAPSYTALLVVEFFVLLHCHVVQEITESINITSTQLRVLSTVGTREKLLLLGISIFVVTKKKKKN

SEQ ID NO: 94797 - protein, 126 aa, Setaria italica
  misc_feature (113)..(113): Xaa can be any naturally occurring amino acid
  Transcript Sequence Number=SeqID_28823
  Gene Ontology: Mol. function=DNA binding
  Homolog annotation: Hit_ID=Q10G93; Match level="QueryCoverage=96%, HitCoverage=10%, E-value=2e-37, Identity=65%"; Hit description=DIRP family protein, expressed
FTLKSLRQQNIVNEYYSRLSEANEDQMKELGNGGGARFTSNLNGADATFHIPPGHPISTLMKQAKAKATVNEVTVATQQAIYNQPSTLSQIQEREADIRALAELSRALDKKEXLLVELRHMNEEVS

SEQ ID NO: 94798 - protein, 194 aa, Setaria italica
  misc_feature (132)..(132): Xaa can be any naturally occurring amino acid
  Transcript Sequence Number=SeqID_28824
  Gene Ontology: Mol. function=DNA binding
  Homolog annotation: Hit_ID=Q10G93; Match level="QueryCoverage=99%, HitCoverage=16%, E-value=3e-64, Identity=61%"; Hit description=DIRP family protein, expressed
VQSYPKSMENGIAFAGAPDPYNLFGYINPESGSQVIEVIETSKCRAKMMVDVAIQAMCKVSEGENPFAKIGQSNASYQEDGTPAPATNNSSRLPNGGNSDGQFPNELISSCVAMMLMIKNCTEKQYHPASLXMLMIKNCTEKQYHPAEVAHILDSALSGLQPCSSQNIPIFREIEMCMGIIKNQMLALIPTASG

SEQ ID NO: 94799 - protein, 1156 aa, Setaria italica
  misc_feature (61)..(61): Xaa can be any naturally occurring amino acid
  misc_feature (193)..(193): Xaa can be any naturally occurring amino acid
  misc_feature (507)..(507): Xaa can be any naturally occurring amino acid
  Transcript Sequence Number=SeqID_28825
  Gene Ontology: Mol. function=DNA binding; Cellular component=nucleus; Biological process=negative regulation of cell cycle
  Homolog annotation: Hit_ID=Q10G93; Match level="QueryCoverage=99%, HitCoverage=92%, E-value=0.0, Identity=77%"; Hit description=DIRP family protein, expressed
  Pfam annotation: Domain name=DIRP; Domain location=623-724; Score =209.2; E_value=1.1e-59; Accession=PF06584.5; Description=DIRP
  Pfam annotation: Domain name=Myb_DNA-binding; Domain location=44-89; Score=39.8; E_value=1.1e-08; Accession=PF00249.23; Description=Myb -like DNA-binding domain
  Pfam module annotation: Pfam domain module=DIRP::Myb_DNA-binding; Domain location=623-724::44-89
MASARKVRNANKRYAKINDDWKIEDTASVPKSKVRKKKLSDMLGPQWSKDELERFYSAYRXYGKDWRKIAGAIRDRTSDMVEALYNMNKAYLSLPEGTATAAGLIAMMTDHYNILDGSNSDHESNDSPKTSRKPQKRGRAKFQSVSKTSDTRYPDQLQSQPASSSYGCLSLLKKKRSGDLFVGNRPRAVGKRXPRVPVASMYHRDERGAPHRQAKPDSNNGDDEGAHVAALALAEVYQRGGSPQVSQTPGRSGDRMFLSPIKSSDRKNADSEMGSSKLHGFQLDADYPEASLGSREAETGDYTKGASYLMTNKGSPSGKPQKKVKRSQKRRKKAVRKTGDQFEYDREACSGTEEGHSARKAKEEPELEALGRKTAWPSSTSNKRSRQLFFDDDISALDALHTLADLSVNILQPSSVVESESSAQIKDENKDNDSDGKPSIPAAVSVYEQKDYSKVWQKKLKRQSEIASTDMVTRKKAKLAKDPHHDGSTTSEVKQQACTCGVKTEKXKRKSSTGKVSKDEKNILKDVEKTEVSAEEGKASSNKETTARGATPPQADLTSKVKSRRKGGIQKSLTQECKPTEGAGDSGSDKLSYSLSNIIDVKDKLSHCLSSRLLRRWCMFEWFYSAIDYPWFAKSEFVEYLNHVKLGHVPRLTRVEWGVIRSSLGKPRRLSKQFLCEEREKLSQYRDSVRQHYAELRSGIREGLPTDLARPLAVGQRVIACHPRTRELHDGNVLTVDDNRCRVQFDRPELGVEFVMDIDCMPLHPPENFPESLRQQNIVNEYYSRLSEANEDQMKELGNGGGARFTSNLNGADATFHIPPGHPISTLMKQAKGDSIDSIAQAKATVNEVTVATQQAIYNQPSTLSQIQEREADIRALAELSRALDKKEALLVELRHMNEEVSGKQRDGEIIRDLEHFRKQYAMVLVQLRDSNDQVAGALLSLRQRNTYHGNPVQSYPKSMENGIAFAGAPDPYNLFGYINPESGSQVIEVIETSKCRAKMMVDVAIQAMCKVSEGENPFAKIGEALDNFNSRGTGSGSSILGIRRIPPDSGQSNASYQENGTPAPATNNSSRLPNGGNSDGQFPNELISSCVAMMLMIKNCTEKQYHPAEVAHILDSALSGLQPCSSQNIPIFREIEMCMGIIKNQMLALIPTASG

SEQ ID NO: 94800 - protein, 117 aa, Setaria italica
  Transcript Sequence Number=SeqID_28826
  Gene Ontology: Mol. function=methyltransferase activity
MFTSKALKHKGMVVFIASKLSCKIDTLSFSVDVTLSDEQTEAAILHGDDYAGSLENSSAKLQSVVKGISFRITVFEQIPGTLVIKGSLLNKALSGTFSSLFSQLEDTLRMECLSKAR

SEQ ID NO: 94801 - protein, 200 aa, Setaria italica
  misc_feature (55)..(55): Xaa can be any naturally occurring amino acid
  misc_feature (64)..(64): Xaa can be any naturally occurring amino acid
  Transcript Sequence Number=SeqID_28827
  Gene Ontology: Mol. function=methyltransferase activity; Cellular component=cellular_component; Biological process=biological_process
  Homolog annotation: Hit_ID=C1FD75; Match level="QueryCoverage=61%, HitCoverage=23%, E-value=8e-25, Identity=43%"; Hit description=Sam -dependent methyltransferase
  Pfam annotation: Domain name=Methyltransf_10; Domain location=3-140; Score=-91.4; E_value=1.8e-08; Accession=PF05971.4; Description =Protein of unknown function (DUF890)
AIVKEAETENILEPVEDAEMQKPPVLVGVVKENESFDFCMCNPPFFESIEEAGLXPKTSCGGTXKEMVCPGGELAFVTRIIEDSVSLKNSFRWFTSMVGRKANLKLLMSKAREAGASVVKTTEFVQGHTARWGLAWSFIAPGNKVLRSSTPAKNHHSFMLQGLRREHGAFQVLKSTEAFFIASKLSCKIDTLSFSVDVTL

SEQ ID NO: 94802 - protein, 98 aa, Setaria italica
  Transcript Sequence Number=SeqID_28828
  Gene Ontology: Mol. function=transferase activity, transferring phosphorus-containing groups; Cellular component=membrane; Biological process=two-component signal transduction system (phosphorelay)
  Homolog annotation: Hit_ID=Q67WC2; Match level="QueryCoverage=100%, HitCoverage=10%, E-value=4e-27, Identity=67%"; Hit description =Putative histidine kinase 1
ASLKKELTLEGCIGDDVPVEVIGDVLRIRQILTNLISNAVKFTHEGKVGINLQVVREQQPGCKIEHEKIQKRAYPGTPITTAAENPCVSPRNCDKDSL

SEQ ID NO: 94803 - protein, 80 aa, Setaria italica
  Transcript Sequence Number=SeqID_28829
  Gene Ontology: Mol. function=protein serine/threonine kinase activity
  Homolog annotation: Hit_ID=Q2R2E4; Match level="QueryCoverage=95%, HitCoverage=6%, E-value=2e-10, Identity=44%"; Hit description =Leucine Rich Repeat family protein, expressed
  Pfam annotation: Domain name=LRRNT_2; Domain location=2-40; Score =51.9; E_value=2.5e-12; Accession=PF08263.4; Description=Leucine rich repeat N-terminal domain
  Subcellular localization annotation: CTP_CleavageSite=38; ConfidenceScore=5.32e-01
NVTADELTLLAFKSAFASAGSLASWNSSSHYCSWPGVVCSRQHPERVTSLRLGSSHLSGRLSPILGNLSFLKVLDLHDNN

SEQ ID NO: 94804 - protein, 91 aa, Setaria italica
  Transcript Sequence Number=SeqID_28830
HRNEPAPTCFYQHQQPTEAVVVHLLFFRGLIEVTGHSFVNSCLSLFLSVFTLILLVKSSSFSSCPVRGCQFLAKGGSEISSSDVCVHFCIL

SEQ ID NO: 94805 - protein, 74 aa, Setaria italica
  Transcript Sequence Number=SeqID_28831
VGQSIPRGDSSLKPTHRRMPRHRKLSEGGTVTETAKMEVVATDHIPVQQVHEFSRTSDSMKPPKIESKCNCAIM

SEQ ID NO: 94806 - protein, 166 aa, Setaria italica
  misc_feature (112)..(112): Xaa can be any naturally occurring amino acid
  Transcript Sequence Number=SeqID_28832
  Gene Ontology: Mol. function=protein serine/threonine kinase activity; Cellular component=integral to membrane; Biological process=protein amino acid phosphorylation
  Homolog annotation: Hit_ID=B9SP66; Match level="QueryCoverage=100%, HitCoverage=36%, E-value=2e-58, Identity=66%"; Hit description =Serine/threonine-protein kinase PBS1, putative
  Pfam annotation: Domain name=Pkinase; Domain location=1-166; Score= -35.5; E_value=2.2e-06; Accession=PF00069.17; Description=Protein kinase domain
  Pfam annotation: Domain name=Pkinase_Tyr; Domain location=1-166; Score=-91.6; E_value=1.2e-07; Accession=PF07714.9; Description =Protein tyrosine kinase
  Pfam module annotation: Pfam domain module=Pkinase::Pkinase_Tyr; Domain location=1-166::1-166
LSRVQHRNVVNLIGYCARGAEDKLLVYEYVPNESLDKILFAPASGHSSSNSHRSRRAELTWARRHEVVVGVARGLLYLHEDAHTPIIHRDIKASNILLDDRWVPKIADFGMXRLFPEAGDGRSRVHTRVAGTNGYMAPEYLMHGDLSTKADVFSFGVVVLEIVSGR

SEQ ID NO: 94807 - protein, 106 aa, Setaria italica
  Transcript Sequence Number=SeqID_28833
VSKEEAKPKPTAEVAAPAADKKQATAEAAAPAADKKQATAEAAAPAADKKQATPTPPQADAERKKAVDPESLAAVTAKRRAEEEKAAVAAEEAERQRTRRGLRERV

SEQ ID NO: 94808 - protein, 90 aa, Setaria italica
  Transcript Sequence Number=SeqID_28834
  Subcellular localization annotation: CTP_CleavageSite=55; ConfidenceScore=5.30e-01
MTKEALESKISSLSPSCLLDKDDVYACHSLMLLSSSSNSSAATSTTAKRPPPSTSADSVGAGSTYESSSFAAAASSNKRARLLELPAVGR

SEQ ID NO: 94809 - protein, 169 aa, Setaria italica
  misc_feature (161)..(161): Xaa can be any naturally occurring amino acid
  Transcript Sequence Number=SeqID_28835
  Gene Ontology: Mol. function=phospholipase A2 activator activity; Cellular component=intracellular; Biological process=phospholipid metabolic process
  Homolog annotation: Hit_ID=B9RZC7; Match level="QueryCoverage=98%, HitCoverage=21%, E-value=3e-59, Identity=63%"; Hit description =Phospholipase A-2-activating protein, putative
  Pfam annotation: Domain name=WD40; Domain location=4-41; Score=25.3; E_value=0.00024; Accession=PF00400.24; Description=WD domain, G-beta repeat
  Pfam annotation: Domain name=WD40; Domain location=50-93; Score=24.3; E_value=0.00051; Accession=PF00400.24; Description=WD domain, G-beta repeat
  Pfam annotation: Domain name=WD40; Domain location=97-134; Score =25.1; E_value=0.00028; Accession=PF00400.24; Description=WD domain, G-beta repeat
  Pfam module annotation: Pfam domain module=WD40::WD40::WD40; Domain location=4-41::50-93::97-134
MAEYRLGVQLHGHADDVRGICVCGDAGIATSSRDRTVKFWTRNPEKESEYVLSKTLAGHSSFVGPLAWIPPSDRFPEGGIVSGGMDTFIFLWDLHKGEVVETMKGHNSQVTGLAVDTNGDIISSSMDCTVSRWRNGNAIEVWEAHKVAVQTVLKLPTGELXFTGSSDST

SEQ ID NO: 94810 - protein, 53 aa, Setaria italica
  Transcript Sequence Number=SeqID_28836
  Homolog annotation: Hit_ID=B6U001; Match level="QueryCoverage=94%, HitCoverage=14%, E-value=3e-15, Identity=80%"; Hit description =Solute carrier family 35, member F1
QSSSKQTAEETAQVTGARDEEAATGNGTAQVPGVGDDGPASNKEFSSAATASR

SEQ ID NO: 94811 - protein, 138 aa, Setaria italica
  misc_feature (22)..(22): Xaa can be any naturally occurring amino acid
  Transcript Sequence Number=SeqID_28837
  Gene Ontology: Mol. function=identical protein binding
  Homolog annotation: Hit_ID=Q10MH2; Match level="QueryCoverage=81%, HitCoverage=10%, E-value=4e-36, Identity=63%"; Hit description=Fip1 motif family protein, expressed
  Pfam annotation: Domain name=Fip1; Domain location=48-104; Score =87.6; E_value=4.3e-23; Accession=PF05182.5; Description=Fip1 motif
RLGNGWWPPVPGTSEKTTLPIXGQVDRDRQHVFQRDYKLFLPRNSTIFDIDIEALQQKPWRQQGVDLTDYFNFNLDEEGWRKYWCSMKQLRLGTRSLANETSGLDQESYKLKSVKAMPKAANYSGFEGRNKTLDQKKP

SEQ ID NO: 94812 - protein, 166 aa, Setaria italica
  Transcript Sequence Number=SeqID_28838
KQHFFPLTSLQIGDLQSYLAELTIFLCPHTKKFLILLDNRPWLLDQDTKPAHLWQLMVTKSRFSPFANSRTRRKRDETEGKLVFSASPISAPHLRNKPSRWYSLIDEAMREKKLQVNKLKDARILNRELHQTLYGFIIFEVDWADVRGINYLNELQIHLWLWSLKI

SEQ ID NO: 94813 - protein, 58 aa, Setaria italica
  Transcript Sequence Number=SeqID_28839
KGTNNSSIQIELILIKSSRTLRLFSSLYQYKDTNKSPNGKVSGWFNNVVPPLQSSLLT

SEQ ID NO: 94814 - protein, 53 aa, Setaria italica
  Transcript Sequence Number=SeqID_28840
MEGYSRDLLGGIGRGDAPAPPQEQGPGPARAEEVELSLGLSLGGRFGVDREGG

SEQ ID NO: 94815 - protein, 58 aa, Setaria italica
  Transcript Sequence Number=SeqID_28841
  Gene Ontology: Mol. function=ARF GTPase activator activity; Cellular component=cytoplasm; Biological process=regulation of ARF GTPase activity
  Homolog annotation: Hit_ID=Q9C6C3; Match level="QueryCoverage=100%, HitCoverage=7%, E-value=4e-13, Identity=63%"; Hit description=ADP -ribosylation factor GTPase-activating protein AGD2
MAAFTKLEDSPMFRKQVNSLEQLTDELKERCSNLHKGCKRFMGSLDEAYAGDLSFADS

SEQ ID NO: 94816 - protein, 128 aa, Setaria italica
  Transcript Sequence Number=SeqID_28842
LEKRLEFDSFRSSTRPPTDPDHGSRNKSGENGPKRPGEIAPGTAPSDRILTGEKKCCPGCARRTEFDGSDQERGNGWLEEGAGSVGPAASGLRASSGSDPCGSSFAERMEREGRRRGRRKEEGRRGKG

SEQ ID NO: 94817 - protein, 142 aa, Setaria italica
  Transcript Sequence Number=SeqID_28843
  Gene Ontology: Mol. function=sequence-specific DNA binding; Cellular component=nucleus; Biological process=regulation of transcription, DNA-dependent
  Homolog annotation: Hit_ID=Q0E3C3; Match level="QueryCoverage=100%, HitCoverage=45%, E-value=7e-77, Identity=96%"; Hit description =Homeobox protein knotted-1-like 2
  Pfam annotation: Domain name=ELK; Domain location=46-67; Score=29.7; E_value=1.2e-05; Accession=PF03789.5; Description=ELK domain
VSDDEDNQVDSESNMFDGNEGSDGMGFGPLMLTEGERSLVERVRQELKNELKQGYKEKLVDIREEILRKRRAGKLPGDTASILKAWWQAHSKWPYPTEDDKARLVQETGLQLKQINNWFINQRKRNWHSNPTSSGEKTKKKR

SEQ ID NO: 94818 - protein, 318 aa, Setaria italica
  misc_feature (72)..(72): Xaa can be any naturally occurring amino acid
  Transcript Sequence Number=SeqID_28844
  Gene Ontology: Mol. function=sequence-specific DNA binding; Cellular component=nucleus; Biological process=regulation of transcription, DNA-dependent
  Homolog annotation: Hit_ID=Q0E3C3; Match level="QueryCoverage=100%, HitCoverage=100%, E-value=1e-133, Identity=75%"; Hit description =Homeobox protein knotted-1-like 2
  Pfam annotation: Domain name=ELK; Domain location=209-230; Score =30.4; E_value=7.1e-06; Accession=PF03789.5; Description=ELK domain
  Pfam annotation: Domain name=KNOX1; Domain location=45-90; Score =55.0; E_value=2.8e-13; Accession=PF03790.5; Description=KNOX1 domain
  Pfam annotation: Domain name=KNOX2; Domain location=98-153; Score =83.6; E_value=7e-22; Accession=PF03791.5; Description=KNOX2 domain
  Pfam module annotation: Pfam domain module=ELK::KNOX1::KNOX2; Domain location=209-230::45-90::98-153
MAFHYPDHALAMDPAAAAAAAGVGAAVNPSFVPGGGGVGGPGGWEREKAAIAAHPLYERLLEAHVACLRVAXTPVDQLPRIDAQIAARPPPMAAAAAAGGAQSGGEELDLFMTHYVLLLCSFKEQLQQHVRVHAMEAVMACWELEQTLQSLTGASPGEGTGATMSDDEDNQVDSESNMFDGNEGSDGMGFGPLMLTEGERSLVERVRQELKHELKQGYREKLVDIREEIMRKRRAGKLPGDTASTLKAWWQAHSKWPYPTEEDKARLVQETGLQLKQINNWFINQRKRNWHSNPASSSSDKSKRKRSTAGDGNAEQSW

SEQ ID NO: 94819 - protein, 96 aa, Setaria italica
  misc_feature (57)..(57): Xaa can be any naturally occurring amino acid
  misc_feature (64)..(64): Xaa can be any naturally occurring amino acid
  Transcript Sequence Number=SeqID_28845
  Gene Ontology: Mol. function=transferase activity, transferring groups other than amino-acyl groups
  Homolog annotation: Hit_ID=B6ST92; Match level="QueryCoverage=94%, HitCoverage=20%, E-value=1e-40, Identity=87%"; Hit description =Agmatine coumaroyltransferase
GLRELGAVEKEGLEATAVLKDVLCPDLEVDSWLTFPFYDLDFGGGCPSYFMPSYFPXTEGMLFXVPSYLGDGSVDAFVPVFEHNLEAFKQCAYSME

SEQ ID NO: 94820 - protein, 311 aa, Setaria italica
  Transcript Sequence Number=SeqID_28846
  Gene Ontology: Mol. function=L-ascorbate peroxidase activity; Cellular component=chloroplast; Biological process=hydrogen peroxide catabolic process
  Homolog annotation: Hit_ID=P0C0L0; Match level="QueryCoverage=99%, HitCoverage=99%, E-value=1e-140, Identity=77%"; Hit description =Probable L-ascorbate peroxidase 5, chloroplastic
  Pfam annotation: Domain name=peroxidase; Domain location=48-280; Score=192.8; E_value=9.5e-55; Accession=PF00141.15; Description =Peroxidase
MAVHHLLRRGVSGGFPLHPLRGLLASQELGRRPLSSAAGDAAAELRGAREDVKQLLKTTSCHPILVRLGWHDAGTYDKNIAEWPKCGGANGSLRFEIELKHGANAGLVNALKLIQPIKDKFSGVTYADLFQLASATAIEEAGGPKIPMIYGRVDITAPEQCPPEGRLPAAGPPSPAEHLREVFYRMGLNDKEIVALSGAHTLGRARPERSGWGKPETKYTKNGPGAPGGQSWTSQWLKFDNSYFKDVKERRDEDLLVLPTDAVLFEDSSFKVYAEKYAEDQDAFFKDYAEAHAKLSNLGAKFDPPKGISLE

SEQ ID NO: 94821 - protein, 69 aa, Setaria italica
  Transcript Sequence Number=SeqID_28847
LENGKFVDIITKRIGISCKVTKPASIQSSDYSHVRWTTIQRILLGGTTARCCWFTHLVIILEASESLES

SEQ ID NO: 94822 - protein, 140 aa, Setaria italica
  Transcript Sequence Number=SeqID_28848
  Gene Ontology: Mol. function=aspartic-type endopeptidase activity; Biological process=proteolysis
  Homolog annotation: Hit_ID=B6TNN1; Match level="QueryCoverage=99%, HitCoverage=29%, E-value=6e-42, Identity=63%"; Hit description =Aspartic proteinase nepenthesin-2
  Subcellular localization annotation: CTP_CleavageSite=38; ConfidenceScore=5.13e-01
TVAGRRLRVPPSAFSAGAVMDSGTIITRLPPKAYRVLRAAFRKEMKMYPRVASSSAILDTCFNISDAVGDDVKVPSVSLVFERGATVELDRSGTILDGCLAFASTGDDESVGIIGNVQQRTLEVLYDIGGGAVGFRRGAC

SEQ ID NO: 94823 - protein, 56 aa, Setaria italica
  misc_feature (45)..(45): Xaa can be any naturally occurring amino acid
  Transcript Sequence Number=SeqID_28849
  Gene Ontology: Mol. function=calcium ion binding; Cellular component =nucleus; Biological process=regulation of transcription, DNA -dependent
  Homolog annotation: Hit_ID=B9SZ48; Match level="QueryCoverage=100%, HitCoverage=37%, E-value=6e-16, Identity=71%"; Hit description =Calmodulin-binding transcription activator (Camta), plants, putative
MAEARRYAIAPQLDIEQILKEAQNRWLRPAEICEILKNYRNFRIXPEPPNRPPSGS

SEQ ID NO: 94824 - protein, 78 aa, Setaria italica
  misc_feature (1)..(1): Xaa can be any naturally occurring amino acid
  Transcript Sequence Number=SeqID_28850
XNLHHSSSRRSHMSTTLTCDAHGASTDPHALYDEVHVTQHPQSQSTSLTPVRHATQFHIHIHQPNPPSLAAGDDLLDP

SEQ ID NO: 94825 - protein, 169 aa, Setaria italica
  Transcript Sequence Number=SeqID_28851
  Gene Ontology: Mol. function=methyltransferase activity; Biological process=metabolic process
  Homolog annotation: Hit_ID=Q307X9; Match level="QueryCoverage=100%, HitCoverage=68%, E-value=1e-42, Identity=54%"; Hit description=SLL2 -S9-protein-like
YGSTLDDDQRYADAAEVLAAAAASANFPSAASDYCSDKDDQDPGDVEGSVLGLQSYWDASYSEDLANFQEHGHAGEIWFGADVMDTVAVWTKSLCNIIQGGIPSGHDSIKSEVDEKLFSNYPVLDVGTGNGLLLQALAKQGFTDLTGTDYSEGAIELARNLSTRDGFTS

SEQ ID NO: 94826 - protein, 237 aa, Setaria italica
  Transcript Sequence Number=SeqID_28852
  Gene Ontology: Mol. function=methyltransferase activity; Biological process=metabolic process
  Homolog annotation: Hit_ID=Q0WRP1; Match level="QueryCoverage=97%, HitCoverage=81%, E-value=7e-75, Identity=58%"; Hit description=AR401 (Fragment)
  Pfam annotation: Domain name=MTS; Domain location=19-171; Score= -75.1; E_value=0.0041; Accession=PF05175.6; Description =Methyltransferase small domain
  Pfam annotation: Domain name=Methyltransf_11; Domain location=67-170; Score=40.9; E_value=5.1e-09; Accession=PF08241.4; Description =Methyltransferase domain
  Pfam annotation: Domain name=Methyltransf_12; Domain location=67-168; Score=44.1; E_value=5.5e-10; Accession=PF08242.4; Description =Methyltransferase domain
  Pfam module annotation: Pfam domain module=MTS::Methyltransf _11::Methyltransf_12; Domain location=19-171::67-170::67-168
TYLIQEDLANFQEHGHAGEIWFGADVMDTVAVWTKSLCNIIQGGIPSGHDSIKSEVDEKLFSNYPVLDVGTGNGLLLQALAKQGFTDLTGTDYSEGAIELARNLSTRDGFTSIKFLVDDILETKLDRKFKIITDKGTLDAIGLHPDGRAKRIKYWESVSNLVEPGGIVVITSCNHTKDELLQEVEEFSRRKFGKENMDEGAAVSQIFRYIDHVGTYPTIMFGGVEGSQVCTVAFQRM

SEQ ID NO: 94827 - protein, 81 aa, Setaria italica
  misc_feature (68)..(68): Xaa can be any naturally occurring amino acid
  Transcript Sequence Number=SeqID_28853
  Gene Ontology: Mol. function=glutathione transferase activity
  Homolog annotation: Hit_ID=B6TQI2; Match level="QueryCoverage=92%, HitCoverage=32%, E-value=2e-28, Identity=85%"; Hit description =Glutathione S-transferase
  Pfam annotation: Domain name=GST_N; Domain location=14-81; Score =22.7; E_value=0.0016; Accession=PF02798.12; Description=Glutathione S-transferase, N-terminal domain
APEPLAAMAADDNKDLVLLDFWVSPFGQRCRIALAEKGIPYEYSEQELLGTKSDLLLRSNPVHKKIPXVLLHAGRPVCESL

SEQ ID NO: 94828 - protein, 173 aa, Setaria italica
  Transcript Sequence Number=SeqID_28854
  Gene Ontology: Mol. function=protein serine/threonine kinase activity; Cellular component=plasma membrane; Biological process =protein amino acid phosphorylation
  Homolog annotation: Hit_ID=Q2L3S0; Match level="QueryCoverage=98%, HitCoverage=35%, E-value=2e-31, Identity=43%"; Hit description =Putative vesicle associated membrane protein
  Pfam annotation: Domain name=Motile_Sperm; Domain location=101-173; Score=4.6; E_value=0.0044; Accession=PF00635.18; Description=MSP (Major sperm protein) domain
HAKSDIYSLGVIILELVTGSKQIPCTTKVLRKWKHRWHKSTKDIQPGYKQVAKCLNLARRCIQTDPVDRPNIWDIISDLNKMDNSDVHISDATECLELEDMLGIEPLEIHLALELNKQISCSVELTNDTDDYFAFRISTTSLRPYCINTNKDILPPRSKCSVTITLQALEKEN

SEQ ID NO: 94829 - protein, 50 aa, Setaria italica
  Transcript Sequence Number=SeqID_28855
LIAKMSLFSCSVQLYICLCSYILFWTIVTCAIHSNTWCCVIHSHTWCWQQ

SEQ ID NO: 94830 - protein, 68 aa, Setaria italica
  Transcript Sequence Number=SeqID_28856
FGNLHCIEIRFEVSEQPAFLGFCKRSLYLFDSLLKKLCPCFTLISALFRTNLPSRLLISLIEILSYSI

SEQ ID NO: 94831 - protein, 112 aa, Setaria italica
  Transcript Sequence Number=SeqID_28857
  Homolog annotation: Hit_ID=Q656N0; Match level="QueryCoverage=32%, HitCoverage=1%, E-value=6e-11, Identity=86%"; Hit description =Putative STH1 protein
PFAEQQLKQLRAQCLVFLAFRNNMEPKKKHLEIALGQCSAEGSGGGEGDQQEADKDDSRGQTGSSSSSPVSFSAATAGLPPPDLAALSSLRLSSHPGGRTRRVIRRGVGKIQ

SEQ ID NO: 94832 - protein, 185 aa, Setaria italica
  Transcript Sequence Number=SeqID_28858
  Gene Ontology: Cellular component=plasma membrane
  Homolog annotation: Hit_ID=Q9SGT5; Match level="QueryCoverage=94%, HitCoverage=47%, E-value=7e-10, Identity=29%"; Hit description =T6H22.12 protein
RAALEDNIKLSKERDSLAQTSKKLARDLQKLESFKRHLMQSLRDDSSSPQETIDITTCDQSVASKASSCGDGGSASHPTPNVLSESFDVGSTNREGTATRPLIQKYALSSHITPRLTPEATPKILSTSTSPRRMSTTATPKLMSGATSPTRARIEGHMSMTPWYPSSKQSSAANSPPRGRPNPGR

SEQ ID NO: 94833 - protein, 81 aa, Setaria italica
  Transcript Sequence Number=SeqID_28859
  Gene Ontology: Mol. function=transferase activity; Cellular component= cytoplasmic vesicle membrane; Biological process=vesicle-mediated transport
  Homolog annotation: Hit_ID=B6JWX4; Match level="QueryCoverage=100%, HitCoverage=41%, E-value=2e-18, Identity=48%"; Hit description=SNARE Ykt6
YVHVRQDNTAGVVICDHDYPSRVAFSLIAKCADEFTKRYPKSAWTGKPSDTPFPELDSYLQKYQKPEEADSLMKVQKDLDE

SEQ ID NO: 94834 - protein, 610 aa, Setaria italica
  Transcript Sequence Number=SeqID_28860
  Homolog annotation: Hit_ID=B9SXD1; Match level="QueryCoverage=88%, HitCoverage=86%, E-value=1e-151, Identity=52%"; Hit description =Electron transporter, putative
  Pfam annotation: Domain name=DUF547; Domain location=411-553; Score =250.7; E_value=3.6e-72; Accession=PF04784.6; Description=Protein of unknown function, DUF547
MEETMEQAGGVVTEGQEPTDDNDDAKNGEVEAAVSPACAPKAAAAMPPSLPRHRRSKSASSDRNAEACKHGPPHGHGAVEQRCGQAPSAISPCSSKNPTDARRSCATTAGGSVHQAPRDHRPNASPNHRVSLENDVRQLQLNLHQERSMRVMLDRAIGRASSTLSPGHRHFPAQTKELIAEIELLEEEIANREQHVLTLYRSIFDQCMSGPSSGQSSGISSPAHTKNITTRTARRQPSIISSAFCSSKKLPLQPFHIMESLSESGRTKNMLKAKIKHQSFSSETLDIHPISFPPDPKKLPYSGSSSLARTLKDHLYQCPSKISEEMVRCMASIYYLLRTEAPEKPEKARSPFLSRSSTNVILPRRVNGEENSSSNNKCTVEIASISVDKNQMPDVSYAITHYRLLVEQLERVDLSMSDYSIKLAFWINVYNSLIMHAYLAYGIPNSSLKRMALFHKAAYNIGGHAVTANSIEHALLCFKSPRIGRWFESILSTAMRKKCADEKQLVQLKFGLPDCQPLALFALCTGASSDPMLRVYTAKNVMEELERAKREFLQATVVARKSKKKVFLPRLVERYAREACLGPDDVLLWAQREGGVGASARPYGPYRLAG

SEQ ID NO: 94835 - protein, 92 aa, Setaria italica
  Transcript Sequence Number=SeqID_28861
  Homolog annotation: Hit_ID=Q6K7T6; Match level="QueryCoverage=84%, HitCoverage=15%, E-value=1e-12, Identity=53%"; Hit description =Putative tesmin/TSO1-like CXC domain-containing protein
MQMQFQEVSHLDASQIASSTGLEGSTGNFHSKSKLVYRSPLANTIHPSDVNDLANRLVIVCRKAAEGFTTIADNKVEMEMIGKFHNTYQNST

SEQ ID NO: 94836 - protein, 73 aa, Setaria italica
  misc_feature (16)..(16): Xaa can be any naturally occurring amino acid
  Transcript Sequence Number=SeqID_28862
  Homolog annotation: Hit_ID=Q10B98; Match level="QueryCoverage=83%, HitCoverage=21%, E-value=1e-09, Identity=62%"; Hit description=Zinc finger CCCH domain-containing protein 25
ETRSRSRRDDRRAEDXEKYRHDRSPERSRGERQRNDDRYSQGREERSERRKYDDMDRKRSRYDDNSERRERRG

SEQ ID NO: 94837 - protein, 159 aa, Setaria italica
  Transcript Sequence Number=SeqID_28863
  Gene Ontology: Mol. function=protein serine/threonine kinase activity; Biological process=protein amino acid phosphorylation
  Homolog annotation: Hit_ID=Q65X94; Match level="QueryCoverage=98%, HitCoverage=16%, E-value=1e-71, Identity=83%"; Hit description =Putative receptor like protein kinase
  Pfam annotation: Domain name=Pkinase; Domain location=1-159; Score= -27.4; E_value=7.4e-07; Accession=PF00069.17; Description=Protein kinase domain
  Pfam annotation: Domain name=Pkinase_Tyr; Domain location=1-159; Score=-18.4; E_value=1.7e-12; Accession=PF07714.9; Description =Protein tyrosine kinase
  Pfam module annotation: Pfam domain module=Pkinase::Pkinase_Tyr; Domain location=1-159::1-159
RVLGRGGFGYVYDGFLEDGTQVAVKLRSDSSNQGVKEFLAEAQTLTRIHHKNLVSMIGYCKDGDYMALVYEYMSEGTLQEHISGNGRNTGFLSWRQRLKIALESAQGLEYLHKGCNPPLIHRDVKAANILLNAKLEAKIADFGLTKAYHDNDTHVSNKH

SEQ ID NO: 94838 - protein, 153 aa, Setaria italica
  Transcript Sequence Number=SeqID_28864
  Gene Ontology: Mol. function=ATP binding
  Homolog annotation: Hit_ID=Q84T10; Match level="QueryCoverage=96%, HitCoverage=5%, E-value=1e-46, Identity=66%"; Hit description=Unknow protein
VQKEKHSSAKLTSTASEVATRENSNLLISSDVDMMDERRKLFPSTNDQVGIDNKDSKVLNPVGTEADIAESHTKQSSMMGETNLEEASLVIETIRREEFGLDQALSYTENSLLKKQHARLGRALHCLSQELYSQDSHLLLELVQNADDNAYPD

SEQ ID NO: 94839 - protein, 59 aa, Setaria italica
  Transcript Sequence Number=SeqID_28865
RWDADAARQWMCGRGWCGLYSHSLSPGLMCDRAPACHLYLAAEPRGRRCRQLSRSGQRG

SEQ ID NO: 94840 - protein, 287 aa, Setaria italica
  misc_feature (13)..(13): Xaa can be any naturally occurring amino acid
  misc_feature (241)..(241): Xaa can be any naturally occurring amino acid
  misc_feature (252)..(252): Xaa can be any naturally occurring amino acid
  Transcript Sequence Number=SeqID_28866
  Gene Ontology: Mol. function=oxidoreductase activity, acting on paired donors, with incorporation or reduction of molecular oxygen, 2-oxoglutarate as one donor, and incorporation of one atom each of oxygen into both ...
  Gene Ontology: Mol. function=donors; Cellular component=plasma membrane; Biological process=protein metabolic process
  Homolog annotation: Hit_ID=B6TKD8; Match level="QueryCoverage=85%, HitCoverage=84%, E-value=1e-130, Identity=91%"; Hit description =Prolyl 4-hydroxylase
  Pfam annotation: Domain name=2OG-FeII_Oxy; Domain location=166-284; Score=55.8; E_value=1.7e-13; Accession=PF03171.12; Description=2OG -Fe(II) oxygenase superfamily
RAAGGGAGGVGLXLRTRLRLPVVLLSCSLFFLAGFFGSLLFTQDPEDADMPVRRERLLEAALPEMPFGESGEAAPSLIPYQILSWQPRALYFPQFATSEQCENIVKTAKERLAPSTLALRRGETTESTKGIRTSSGTFLSANEDPTGTLAEVEKKIARATMIPRNHGEPFNVLRYEIGQRYASHYDAFDPAQYGPQKNQRVASFLLYLTDVEEGGETMFPYENGENMNIGYNYEDCIGLKXKPRKGDGLLFXLMVNGTIDPTSLHGSCPVIKGEKWVATKWIRSNTV

SEQ ID NO: 94841 - protein, 79 aa, Setaria italica
  Transcript Sequence Number=SeqID_28867
KEFHDSDICVSGFDESNMVVAEDTKELLFIPTESDKIEPPRNLGPGEYMIPGQLVFPEPGKLKFRDVMFQQSTPGGNPS

SEQ ID NO: 94842 - protein, 219 aa, Setaria italica
  Transcript Sequence Number=SeqID_28868
PKTPKSCCSFLLNLTRLSHHGISALSTPGGIRANYLDAHAFITKNLLQPGIPVPDDIKHQLKLMKSPESATMGPLISRHASVVPWGLRRGLVMSYIPYIRHVLPHVDPAAEATVLSEMPYLDDWIERAKNNKLLELFFNHRRDKYRADATGLLDFFYDISINKMEWCWSRCFKPDGGYPPGESGYKPDETEIVTTVTYPELMPKIQESLWKTNHLQKAR

SEQ ID NO: 94843 - protein, 76 aa, Setaria italica
  Transcript Sequence Number=SeqID_28869
LKCHKAHIYGVALEHNNPSNTHDYRAFCRWFVFQSDSWILGINSGYVTVVTISVSSGLYPDSPGGYPPSGLKQRRT

SEQ ID NO: 94844 - protein, 145 aa, Setaria italica
  Transcript Sequence Number=SeqID_28870
  Gene Ontology: Mol. function=protein serine/threonine kinase activity; Biological process=protein amino acid phosphorylation
  Homolog annotation: Hit_ID=Q53MD2; Match level="QueryCoverage=100%, HitCoverage=42%, E-value=6e-64, Identity=40%"; Hit description =Leucine Rich Repeat family protein, expressed
  Pfam annotation: Domain name=LRR_1; Domain location=108-130; Score =16.6; E_value=0.11; Accession=PF00560.25; Description=Leucine Rich Repeat
  Pfam annotation: Domain name=LRR_1; Domain location=36-58; Score=9.7; E_value=4.3; Accession=PF00560.25; Description=Leucine Rich Repeat
  Pfam annotation: Domain name=LRR_1; Domain location=60-82; Score=9.7; E_value=4.2; Accession=PF00560.25; Description=Leucine Rich Repeat
  Pfam annotation: Domain name=LRR_1; Domain location=84-106; Score =11.7; E_value=1.7; Accession=PF00560.25; Description=Leucine Rich Repeat
  Pfam module annotation: Pfam domain module=LRR_1::LRR_1::LRR_1::LRR _1; Domain location=108-130::36-58::60-82::84-106
RFPAWVGNLTALTTLSVGLNGYDQGETPASIGNLKNLTYLYLAESGLTGAMPESIFGLAALETLDMSMNNLAGAIPAAIGNLRNLWKIELYKNNLTGELPPELGKLAKLREIDVSRNQISGGIPPAFAALKGFTVIQLYHNNLSG

SEQ ID NO: 94845 - protein, 65 aa, Setaria italica
  Transcript Sequence Number=SeqID_28871
FACYMLCGSMLLSWMWVGPSSGASYAWLHQQQARAGAMLLTKHSTAMASWMCARPIKWRTKRMVD

SEQ ID NO: 94846 - protein, 69 aa, Setaria italica
  Transcript Sequence Number=SeqID_28872
MVMEATAASRAEVDTSRPFQSVRQAVEVFGERYAGGGSGSSNASSESSVKLSAPPAASSMALELDYLKK

SEQ ID NO: 94847 - protein, 111 aa, Setaria italica
  misc_feature (10)..(10): Xaa can be any naturally occurring amino acid
  Transcript Sequence Number=SeqID_28873
LDRDTRKKIXEQKIAKWVRPGRTLFIASNERTPGFFSPLSDRYKLAYSSNFSSILAPIIENNYQLFMVERLIMQGAKTFVKTMKEFDKDLALCDDPKKNTKDWQEPVYTDD

SEQ ID NO: 94848 - protein, 81 aa, Setaria italica
  Transcript Sequence Number=SeqID_28874
QCRIALTSMPTNQAKIFFKSSNEATDFIFLCKISQKLEFTMKFLSLKRRWEITEMLELADSTILTPNQTTAEIETPNTQAE

SEQ ID NO: 94849 - protein, 77 aa, Setaria italica
  Transcript Sequence Number=SeqID_28875
MASLVHQASMPARAMPACDEELVPQGFSCFGRSLSRASSSSRLEYRALQQQQQQEQGEERCAAQDAWSARAKLRWKA

SEQ ID NO: 94850 - protein, 221 aa, Setaria italica
  misc_feature (185)..(185): Xaa can be any naturally occurring amino acid
  Transcript Sequence Number=SeqID_28876
  Homolog annotation: Hit_ID=C3TX73; Match level="QueryCoverage=99%, HitCoverage=47%, E-value=2e-45, Identity=44%"; Hit description=F-box protein family-like protein
  Pfam annotation: Domain name=DUF295; Domain location=94-142; Score =11.3; E_value=0.048; Accession=PF03478.10; Description=Protein of unknown function (DUF295)
MYALKYGVKFQSWDGESSKYFQGQRSEFAMLYCKPVLHKGLWYCIGERGRLGVFDPMKSEWSVLEEPNGFGTELKYKNCTPINVLRLNEEEMAWERVESLGSRAIFTGTLSSRSMDKPPGAMANKVYLPKFYGCPQVIQAELTNSVGRLGFVPQREERQLPSSSNAAGSVDDMMLCKHGADGDSXCAWCYDLELDSEVDKRIVGCKSLMQYIWVDLGRASP

SEQ ID NO: 94851 - protein, 156 aa, Setaria italica
  Transcript Sequence Number=SeqID_28877
  Homolog annotation: Hit_ID=C3TX73; Match level="QueryCoverage=90%, HitCoverage=32%, E-value=5e-21, Identity=40%"; Hit description=F-box protein family-like protein
PESRISSGDAIGWAMLRGPEKTVSLASPLDGSTFDTTESEFYGGYFCSSREDVTGVPELRGVVGMYALKYGVKFQSWDGESSKYFQGQRSEFAMLYCKPVLHKGLWYCIGERGRLGVFDPMKSEWSVLEEPNGFGTELKYKNCTPINVSCRSLNVG

SEQ ID NO: 94852 - protein, 88 aa, Setaria italica
  Transcript Sequence Number=SeqID_28878
AAGASNLGSGKVKRQSSPEEYVPVRSVVYWSRSSVALPAAATAEAVGYEPFAVCEGCRCCLPSNASSCVDTSCCYSIDCNLPGKPFGT

SEQ ID NO: 94853 - protein, 74 aa, Setaria italica
  Transcript Sequence Number=SeqID_28879
  Gene Ontology: Mol. function=signal transducer activity; Cellular component=plasma membrane; Biological process=response to light stimulus
  Homolog annotation: Hit_ID=Q5KS50; Match level="QueryCoverage=72%, HitCoverage=7%, E-value=3e-17, Identity=81%"; Hit description =Coleoptile phototropism protein 1
GGLHMIIAGGGGKDDIAASAPAREQRMVVESLISITPPQRDSVSCGFLLRLLRLAIMLKAAPALVTELEKRVGM

SEQ ID NO: 94854 - protein, 95 aa, Setaria italica
  Transcript Sequence Number=SeqID_28880
ASTFVISVITLRASHYKHFDYNMYLFNELVLAPGRHFIQAKVYCSNAVAVLFHFLLLKPLAPSRGHSCSLITLLQLFPNSFAQLCYFSWPARPLA

SEQ ID NO: 94855 - protein, 173 aa, Setaria italica
  Transcript Sequence Number=SeqID_28881
  Gene Ontology: Mol. function=binding; Cellular component=cytoplasm; Biological process=protein folding
  Homolog annotation: Hit_ID=O04843; Match level="QueryCoverage=99%, HitCoverage=29%, E-value=5e-60, Identity=70%"; Hit description =Peptidylprolyl isomerase
  Pfam annotation: Domain name=TPR_1; Domain location=48-81; Score =20.4; E_value=0.0075; Accession=PF00515.20; Description =Tetratricopeptide repeat
  Pfam annotation: Domain name=TPR_1; Domain location=82-115; Score =31.0; E_value=5e-06; Accession=PF00515.20; Description =Tetratricopeptide repeat
  Pfam annotation: Domain name=TPR_2; Domain location=48-81; Score =14.2; E_value=0.53; Accession=PF07719.9; Description=Tetratricopeptid e repeat
  Pfam annotation: Domain name=TPR_2; Domain location=6-39; Score=8.9; E_value=2.6; Accession=PF07719.9; Description=Tetratricopeptide repeat
  Pfam annotation: Domain name=TPR_2; Domain location=82-115; Score =24.4; E_value=0.00048; Accession=PF07719.9; Description =Tetratricopeptide repeat
  Pfam module annotation: Pfam domain module=TPR_1::TPR_1::TPR_2::TPR _2::TPR_2; Domain location=48-81::82-115::48-81::6-39::82-115
KKKDEGNAWFKMGKYAKASKRYEKAAKYIEYDSSFSEDEKKQSKALKISCKLNNAACKLKLKEYREAEKLCTKVLELESTNVKALYRRAQAYIELVDLELAELDVKKALEFDPDNRDVKLVYKTLKEKMREYNRRDAKFYGNMFAKWRKLEHMDTKKVPGKQEPQPMAIDSAA

SEQ ID NO: 94856 - protein, 53 aa, Setaria italica
  Transcript Sequence Number=SeqID_28882
MGDTGANMAHWAGIYGCGSGAPAATEATVVTAAVAGTVSSPTSGGSGAAPPTP

SEQ ID NO: 94857 - protein, 77 aa, Setaria italica
  Transcript Sequence Number=SeqID_28883
  Gene Ontology: Mol. function=hydrogen ion transporting ATP synthase activity, rotational mechanism; Cellular component=proton -transporting two-sector ATPase complex; Biological process=ATP synthesis coupled proton transport
  Homolog annotation: Hit_ID=B3TLP5; Match level="QueryCoverage=59%, HitCoverage=27%, E-value=6e-17, Identity=89%"; Hit description =Mitochondrial F0 ATP synthase D chain
LGLELVVDVLEGAAEGGELKEAEKASLKESERIEKEIAELREMKKKISTMTADEYFEKHPEVKQKFDDEIRNDYWGY

SEQ ID NO: 94858 - protein, 114 aa, Setaria italica
  misc_feature (65)..(65): Xaa can be any naturally occurring amino acid
  Transcript Sequence Number=SeqID_28884
  Gene Ontology: Mol. function=hydrogen ion transporting ATP synthase activity, rotational mechanism; Cellular component=proton -transporting two-sector ATPase complex; Biological process=ATP synthesis coupled proton transport
  Homolog annotation: Hit_ID=B3TLP5; Match level="QueryCoverage=74%, HitCoverage=49%, E-value=5e-29, Identity=75%"; Hit description =Mitochondrial F0 ATP synthase D chain
NTSQGDCLSNIYPLLYTSFSLIFNLEINAGIEIPKYVDTVTPEYKPKFDALVVELKEAEKASLKXKSERIEKEIAELREMKKKISTMTADEYFEKHPEVKQKFDDEIRNDYWGY

SEQ ID NO: 94859 - protein, 131 aa, Setaria italica
  Transcript Sequence Number=SeqID_28885
  Gene Ontology: Mol. function=hydrogen ion transporting ATP synthase activity, rotational mechanism; Cellular component=proton -transporting two-sector ATPase complex; Biological process=ATP synthesis coupled proton transport
  Homolog annotation: Hit_ID=B4FS99; Match level="QueryCoverage=100%, HitCoverage=77%, E-value=1e-41, Identity=64%"; Hit description=ATP synthase D chain, mitochondrial
MSGNGVVKKVADAAAKAGKAIDWDGLAKMLVSEEARKEFATLRRTFEDVNHQLQTKFSQEPQPIDWEYYRKGIGSKVVDMYKEAYESIEIPKYVDTVTPQYKPKFDALLVEMKEAEKASLKESERIEKEIA

SEQ ID NO: 94860 - protein, 158 aa, Setaria italica
  Transcript Sequence Number=SeqID_28886
  Gene Ontology: Mol. function=hydrogen ion transporting ATP synthase activity, rotational mechanism; Cellular component=proton -transporting two-sector ATPase complex; Biological process=ATP synthesis coupled proton transport
  Homolog annotation: Hit_ID=B3TLP5; Match level="QueryCoverage=99%, HitCoverage=92%, E-value=3e-67, Identity=77%"; Hit description =Mitochondrial F0 ATP synthase D chain
  Pfam annotation: Domain name=Mt_ATP-synt_D; Domain location=2-153; Score=-16.9; E_value=0.00013; Accession=PF05873.4; Description=ATP synthase D chain, mitochondrial (ATP5H)
MAVKAGKAIDWDGMAKMLVSEEARKEFATLRRTFEDVNHQLQTKFSQEPQPIDWEYYRKGIGSKVVDMYKEAYESIEIPKYVDTVTPEYKPKFDALVVELKEAEKASLKESERIEKEIAELREMKKKISTMTADEYFEKHPEVKQKFDDEIRNDYWGY

SEQ ID NO: 94861 - protein, 168 aa, Setaria italica
  Transcript Sequence Number=SeqID_28887
  Gene Ontology: Mol. function=hydrogen ion transporting ATP synthase activity, rotational mechanism; Cellular component=proton -transporting two-sector ATPase complex; Biological process=ATP synthesis coupled proton transport
  Homolog annotation: Hit_ID=B4FS99; Match level="QueryCoverage=100%, HitCoverage=100%, E-value=1e-70, Identity=76%"; Hit description=ATP synthase D chain, mitochondrial
  Pfam annotation: Domain name=Mt_ATP-synt_D; Domain location=12-163; Score=-16.9; E_value=0.00013; Accession=PF05873.4; Description=ATP synthase D chain, mitochondrial (ATP5H)
MSGNGKKVVDMAVKAGKAIDWDGMAKMLVSEEARKEFATLRRTFEDVNHQLQTKFSQEPQPIDWEYYRKGIGSKVVDMYKEAYESIEIPKYVDTVTPEYKPKFDALVVELKEAEKASLKESERIEKEIAELREMKKKISTMTADEYFEKHPEVKQKFDDEIRNDYWGY

SEQ ID NO: 94862 - protein, 77 aa, Setaria italica
  Transcript Sequence Number=SeqID_28888
  Subcellular localization annotation: CTP_CleavageSite=27; ConfidenceScore=5.23e-01
PHFTTPCLTLRPRRQPRRSRAPAPPPLAAGRAPTAPGNAEPEDAQASFAPRRPPLARRLAGACRGGGRRRRRERDVG

SEQ ID NO: 94863 - protein, 61 aa, Setaria italica
  Transcript Sequence Number=SeqID_28889
HRPQELNIRSNDHCKHKRDRTIETLDKFHQIKAEVLLPLLVYDAKVVMAKAGVLWYRYCKA

SEQ ID NO: 94864 - protein, 65 aa, Setaria italica
  misc_feature (1)..(6): Xaa can be any naturally occurring amino acid
  Transcript Sequence Number=SeqID_28890
XXXXXXFFFSWAGQRKLDGVSALSNNHTHILLLLYTIRLNTSSTPYHIDMEVASITHKHYSTCSC

SEQ ID NO: 94865 - protein, 61 aa, Setaria italica
  Transcript Sequence Number=SeqID_28891
KKEMNIISMCSVPKSPILMPKQKKFPSEMTPSVQKEKLYICHDSRSDLAKSWGSLLANANH

SEQ ID NO: 94866 - protein, 134 aa, Setaria italica
  Transcript Sequence Number=SeqID_28892
  Gene Ontology: Mol. function=binding; Cellular component=NuA4 histone acetyltransferase complex; Biological process=regulation of transcription, DNA-dependent
  Homolog annotation: Hit_ID=UPI0000162BA0; Match level="QueryCoverage =77%, HitCoverage=2%, E-value=8e-45, Identity=79%"; Hit description =FAT domain-containing protein / phosphatidylinositol 3- and 4-kinase family protein
RVCIETLRPLAYTLLAELVHYVREDISLPQLSRIIYLFSRNMHDSSLTLIIHTTSARLMLNLVEPIYQKGVDQQSMDEARVLLGRILDAFVGKFRTLKRTIPQVPSMIRDSFVEQVILGGETLNLYDQLMEMRV

SEQ ID NO: 94867 - protein, 64 aa, Setaria italica
  misc_feature (3)..(3): Xaa can be any naturally occurring amino acid
  Transcript Sequence Number=SeqID_28893
MWXNLIHNLNYLQPRSVNMCLFQFRAKVRCSDAFLHEVLGSVLYPELLILVFTRFTSARFLFVS

SEQ ID NO: 94868 - protein, 65 aa, Setaria italica
  Transcript Sequence Number=SeqID_28894
SRNKQDDINSHNRINRTSRILTSQSTVEQRSIDSDQQSINSSSIQRQPHELRIPFSISILSCGKT

SEQ ID NO: 94869 - protein, 94 aa, Setaria italica
  Transcript Sequence Number=SeqID_28895
RSRGKESGRIRNRSKGGDLWLGKAASAELAQSENGLPECQRGEEFEDHQRSVENERGKECQWTENSSNILAIDARCPKLQNLKRSLCKSERKET

SEQ ID NO: 94870 - protein, 55 aa, Setaria italica
  Transcript Sequence Number=SeqID_28896
LVYSTGTKDLVPVGITNWDKGVASVPNFLAVTTGTKAPSVGSLRCIIFDPGLKTL

SEQ ID NO: 94871 - protein, 44 aa, Setaria italica
  Transcript Sequence Number=SeqID_28897
QSEETNKMKNKEVTNIKQKTQSKNKIHAQNRAENLKCIIANGSY

SEQ ID NO: 94872 - protein, 556 aa, Setaria italica
  misc_feature (17)..(17): Xaa can be any naturally occurring amino acid
  Transcript Sequence Number=SeqID_28898
  Gene Ontology: Mol. function=protein binding
  Homolog annotation: Hit_ID=Q00VX1; Match level="QueryCoverage=87%, HitCoverage=81%, E-value=4e-44, Identity=25%"; Hit description =Inframe stop codon
KFRVLSNFQSLIEERTXCCFLYWIKEMLSTWLSMVYGDACKLSWLQNIVDAFSDGTSLLELGNMGPVALQSYEEDIENALREEVVAPLCRDIETDLRLHVHSTRLKGAVVVNPTKTGVRNLSWYLRMKPLRLPFKFVDVKLLVENHLNSAFYTYSVMPNYDNKIYAEMHELGQLKYGVELEDFHLTVDTLDQGFDFRNTIQHLDSFCEKYSYSIAKQMFIENDLDGQGRKNLVLCVEHIASSTAMCSLQQISAALDTILMFLDRMFLDLDALLQSDTELDFLKDLKRLENTRVSSVHPAIHGELKVAFGKHGLGDHTLDFLGQVQAVVARIGNALGLMRILAAGCTRYSNSISRYARKSNYDYSASCKKVGLVDDIAEVGKMLDTEARNREALDERIQTFAILVTHISQKLQSNELKAMKDFFQIVPLLIGNMVDHRLLHKDKLLRRGHDGKSVIHTYDSFLLGVAFVLKVLKQESSFDELNWFASTKTKFEGVSEDENNKMDTSPSRAAFTSLKLWRAAPSVRTEPHKGVDKGKRYQQEIELIECTLRLARTVLG

SEQ ID NO: 94873 - protein, 122 aa, Setaria italica
  Transcript Sequence Number=SeqID_28899
  Homolog annotation: Hit_ID=B0BL98; Match level="QueryCoverage=60%, HitCoverage=10%, E-value=1e-17, Identity=54%"; Hit description =CM0216.530.nc protein
  Subcellular localization annotation: CTP_CleavageSite=45; ConfidenceScore=5.13e-01
MTAATVSASASPARRPAVRVLTRGKVLFPEEAPGSGSGLGRATCSSTMKEAKFPDALDLAPGATDAEGPAALRVCPYTYCSLNGHTHLPAVPLRSFLASRRRLIKTQQSMKLKGVSAFRKKS

SEQ ID NO: 94874 - protein, 105 aa, Setaria italica
  Transcript Sequence Number=SeqID_28900
  Homolog annotation: Hit_ID=B6UGD9; Match level="QueryCoverage=100%, HitCoverage=100%, E-value=6e-39, Identity=81%"; Hit description =Drought-induced protein 1
MVAPVVIASAGLGMLAGLAMANRSLGDGIPAASRWDARPRCATCGGSGRVECLCNRWSDGDSGCRTCAGSGRMPCRSCGGSGTGRPLPARLTIQHQKPRPPAGYN

SEQ ID NO: 94875 - protein, 378 aa, Setaria italica
  misc_feature (75)..(75): Xaa can be any naturally occurring amino acid
  Transcript Sequence Number=SeqID_28901
  Gene Ontology: Mol. function=protein binding; Cellular component=cell wall
  Homolog annotation: Hit_ID=B6UAZ2; Match level="QueryCoverage=87%, HitCoverage=84%, E-value=1e-137, Identity=70%"; Hit description =Systemin receptor SR160
  Pfam annotation: Domain name=LRRNT_2; Domain location=48-88; Score =14.6; E_value=0.029; Accession=PF08263.4; Description=Leucine rich repeat N-terminal domain
  Pfam annotation: Domain name=LRR_1; Domain location=122-144; Score =9.4; E_value=4.8; Accession=PF00560.25; Description=Leucine Rich Repeat
  Pfam annotation: Domain name=LRR_1; Domain location=146-168; Score =10.5; E_value=3; Accession=PF00560.25; Description=Leucine Rich Repeat
  Pfam annotation: Domain name=LRR_1; Domain location=170-193; Score =10.3; E_value=3.3; Accession=PF00560.25; Description=Leucine Rich Repeat
  Pfam annotation: Domain name=LRR_1; Domain location=265-287; Score =13.7; E_value=0.72; Accession=PF00560.25; Description=Leucine Rich Repeat
  Pfam annotation: Domain name=LRR_1; Domain location=289-311; Score =3.4; E_value=69; Accession=PF00560.25; Description=Leucine Rich Repeat
  Pfam annotation: Domain name=LRR_1; Domain location=98-120; Score =0.6; E_value=2.3e+02; Accession=PF00560.25; Description=Leucine Rich Repeat
  Pfam module annotation: Pfam domain module=LRRNT_2::LRR_1::LRR_1::LRR_ 1::LRR_1::LRR_1::LRR_1; Domain location=48-88::122-144::146-168::170 -193::265-287::289-311::98-120
  Subcellular localization annotation: CTP_CleavageSite=55; ConfidenceScore=5.13e-01
MAMHHGMKRKASPALVVLALLLSSAVAAVSGQQAPQPGKQTAANNPRLQRAYVALQALKRAITDDPKNLTRGWCXGPDVCAYFGVFCAAAPDDPHALTVAGLDLNHGDLAGTFPEELGMLSDLALLHLNSNRFAGGLPESLPKLHLLHELDVSNNRLSGGFPQHILCLPNVKYVDLRFNNLCGPVPPAIFDKPLDALFLNDNHFDFELPENFGNSPASVVVLANIRLRGCIPQSVGRMAGTLNELVILNSGLRSCIPQEVGWLRELTVLDLSFNQLQGMLPESMAGMHKLEQLDVAHNELWGHIPEGICALPSLRNFTYSYNYFCTEPRRCLDIRRVDDRQNCIAGRPDQRPGDQCLAFLHRPPPHCDEHGCFGPPHY

SEQ ID NO: 94876 - protein, 129 aa, Setaria italica
  Transcript Sequence Number=SeqID_28902
  Gene Ontology: Mol. function=electron carrier activity; Biological process=oxidation reduction
  Homolog annotation: Hit_ID=B6SSX8; Match level="QueryCoverage=100%, HitCoverage=24%, E-value=1e-35, Identity=55%"; Hit description =Flavonoid 3-monooxygenase
KYGELVHLRFGSYSVVVGSSVDMARLFLKTHDLLFLDRPRTAAGKHTTYNYADITWSPYGAYWRHARRICATQLFSPGRIASFEHVRADEVRSLVRGLFAAASGGAAAVPVRLNRDHLSTLSMNVITRM

SEQ ID NO: 94877 - protein, 205 aa, Setaria italica
  misc_feature (86)..(86): Xaa can be any naturally occurring amino acid
  Transcript Sequence Number=SeqID_28903
  Gene Ontology: Mol. function=signal transducer activity; Cellular component=integral to membrane; Biological process=signal transduction
  Homolog annotation: Hit_ID=B6TRH2; Match level="QueryCoverage=100%, HitCoverage=46%, E-value=5e-87, Identity=81%"; Hit description =Sad1/unc-84-like protein 2
  Pfam annotation: Domain name=Sad1_UNC; Domain location=108-205; Score= 19.1; E_value=6.2e-06; Accession=PF07738.5; Description=Sad1  UNC -like C-terminal
LNRLDARAGELGDALAGLSRMEFLRKDEFEKFWEEVKGGLASGSGSEVDLDQVRALAREIAMREIEKHAADGIGRVDYAVASGGGXVVHHSVPYEPKRGIFSGLLGGGNPDPQKMIQPSFGEPGQCFAVQGSSGFVEIKLKSGIIPEAVTLEHVSKDVAYDRSTAPKDCRVSGWYDETSGETQSSHAAKMAALAEFTYDLDKNNI

SEQ ID NO: 94878 - protein, 103 aa, Setaria italica
  Transcript Sequence Number=SeqID_28904
  Gene Ontology: Mol. function=signal transducer activity; Cellular component=integral to membrane; Biological process=signal transduction
  Homolog annotation: Hit_ID=B6TRH2; Match level="QueryCoverage=95%, HitCoverage=22%, E-value=2e-44, Identity=84%"; Hit description =Sad1/unc-84-like protein 2
  Pfam annotation: Domain name=Sad1_UNC; Domain location=1-92; Score =24.0; E_value=2.6e-06; Accession=PF07738.5; Description=Sad1  UNC -like C-terminal
MQDVAYDRSTAPKDCRVSGWYDETSGETQSSHAAKMAALAEFTYDLDKNNIQTFDVTAPDVGVINMIRLDFTSNHGSSLLTCIYRLRVHGREPVSPGTAGFRA

SEQ ID NO: 94879 - protein, 128 aa, Setaria italica
  Transcript Sequence Number=SeqID_28905
  Gene Ontology: Mol. function=binding
  Homolog annotation: Hit_ID=Q8L5R3; Match level="QueryCoverage=98%, HitCoverage=10%, E-value=3e-33, Identity=55%"; Hit description =Tubulin folding cofactor D
TISSTTALRQESTGEMETKCVVLLWLYILVLIPFDISTVDTSIASADSVDGTEVVPLVTKILDICKDYLSSSGPMRRISGLLLARLLTRPDMANAFSSFMEWAHNMLLSVTDDFVGQFRSIGIVEALA

SEQ ID NO: 94880 - protein, 60 aa, Setaria italica
  Transcript Sequence Number=SeqID_28906
  Subcellular localization annotation: CTP_CleavageSite=13; ConfidenceScore=5.24e-01
IQLLPSCSTAPPPCAAGATSRPIAMPASASPPVEPAPPPPPAPPPASPAPAVRDASSLFW

SEQ ID NO: 94881 - protein, 84 aa, Setaria italica
  misc_feature (80)..(80): Xaa can be any naturally occurring amino acid
  Transcript Sequence Number=SeqID_28907
  Gene Ontology: Mol. function=oxidoreductase activity; Cellular component=chloroplast; Biological process=cell redox homeostasis
  Homolog annotation: Hit_ID=P0C5D5; Match level="QueryCoverage=72%, HitCoverage=28%, E-value=6e-27, Identity=91%"; Hit description =Peroxiredoxin Q, chloroplastic
PVVRLLRSFRRLVSYRSCPFLRLVLADEGNRVRKEWGVPGDLFGTLPGRQTYVLDKNGVVQYIYNNQFQPEKHIGETLKXLQSL

SEQ ID NO: 94882 - protein, 43 aa, Setaria italica
  Transcript Sequence Number=SeqID_28908
  Gene Ontology: Mol. function=oxidoreductase activity; Cellular component=chloroplast; Biological process=cell redox homeostasis
  Homolog annotation: Hit_ID=P0C5D5; Match level="QueryCoverage=100%, HitCoverage=19%, E-value=2e-17, Identity=93%"; Hit description =Peroxiredoxin Q, chloroplastic
MYWTLPGRQTYVLDKNGVVQYIYNNQFQPEKHIGETLKILQSL

SEQ ID NO: 94883 - protein, 171 aa, Setaria italica
  Transcript Sequence Number=SeqID_28909
  Gene Ontology: Mol. function=oxidoreductase activity; Cellular component=chloroplast; Biological process=cell redox homeostasis
  Homolog annotation: Hit_ID=B4FS55; Match level="QueryCoverage=89%, HitCoverage=70%, E-value=7e-82, Identity=94%"; Hit description =Peroxiredoxin bcp
  Pfam annotation: Domain name=AhpC-TSA; Domain location=26-150; Score =181.6; E_value=2.2e-51; Accession=PF00578.13; Description=AhpCTSA family
  Pfam annotation: Domain name=Redoxin; Domain location=25-168; Score =96.8; E_value=7.4e-26; Accession=PF08534.2; Description=Redoxin
  Pfam module annotation: Pfam domain module=AhpC-TSA::Redoxin; Domain location=26-150::25-168
  Subcellular localization annotation: CTP_CleavageSite=20; ConfidenceScore=5.25e-01
ATSAAPAPRWRRAASSTAIVCGKVTKGSVPPNFTLKDQNGKPVSLNKFKGKPVVVYFYPADETPGCTKQACAFRDSYEKYKKAGAEVIGISGDDPASHKAFAQKYRLPFTLLADEGNRVRKEWGVPGDLFGTLPGRQTYVLDKNGVVQYIYNNQFQPEKHIGETLKILQSL

SEQ ID NO: 94884 - protein, 58 aa, Setaria italica
  Transcript Sequence Number=SeqID_28910
VCNGTSQKHQVQDEFLSNFQENSVESVNLMTNSSLEVHQASTTVKMTKTEGPATDIFG

SEQ ID NO: 94885 - protein, 79 aa, Setaria italica
  Transcript Sequence Number=SeqID_28911
  Gene Ontology: Mol. function=protein tyrosine kinase activity; Cellular component=plasma membrane; Biological process=protein amino acid phosphorylation
  Homolog annotation: Hit_ID=Q10E34; Match level="QueryCoverage=100%, HitCoverage=9%, E-value=6e-27, Identity=77%"; Hit description =Receptor protein kinase CLAVATA1, putative, expressed
  Pfam annotation: Domain name=LRR_1; Domain location=28-50; Score=8.7; E_value=6.7; Accession=PF00560.25; Description=Leucine Rich Repeat
  Pfam annotation: Domain name=LRR_1; Domain location=4-26; Score=8.6; E_value=6.9; Accession=PF00560.25; Description=Leucine Rich Repeat
  Pfam annotation: Domain name=LRR_1; Domain location=52-71; Score =15.2; E_value=0.28; Accession=PF00560.25; Description=Leucine Rich Repeat
  Pfam module annotation: Pfam domain module=LRR_1::LRR_1::LRR_1; Domain location=28-50::4-26::52-71
ELKNLTLLNLFRNKLRGDIPDFVGDMPSLEVLQLWENNFTGGVPRRLGRNGRLQLLDLSSNKLTGTLPPELCAGGKLQT

SEQ ID NO: 94886 - protein, 89 aa, Setaria italica
  misc_feature (57)..(57): Xaa can be any naturally occurring amino acid
  Transcript Sequence Number=SeqID_28912
  Gene Ontology: Mol. function=electron carrier activity; Cellular component=cytoplasmic vesicle membrane; Biological process=oxidation reduction
  Homolog annotation: Hit_ID=Q2R6X3; Match level="QueryCoverage=100%, HitCoverage=18%, E-value=1e-33, Identity=75%"; Hit description =Cytochrome P450 family protein, expressed
LTDNPKVVETLKEEHEIILKKREDKNSGFTWEEYKSLTFTTQVMNEITRMGNIAPGXFRKTLKDVQVNGYTIPAGWLVMISPMTVHLNP

SEQ ID NO: 94887 - protein, 57 aa, Setaria italica
  Transcript Sequence Number=SeqID_28913
TGWGDCGSQILIHICIQQNISCIRTDYIFYRFFDVNTCTLSEQLPDKIAGLEVNVLL

SEQ ID NO: 94888 - protein, 150 aa, Setaria italica
  misc_feature (122)..(122): Xaa can be any naturally occurring amino acid
  misc_feature (146)..(146): Xaa can be any naturally occurring amino acid
  Transcript Sequence Number=SeqID_28914
  Gene Ontology: Mol. function=DNA binding
FFLPDEIQKYLKSPVKEKEIFLASGNGIGLADINPLEAVAGKCTVICISKDERNRQPSPQEQAMADYIFYRFFDVNTCTLSEQLPDKIAGLEVNVLLNPKDELVISSPNAANVLLNANVDEXLAATVPPSRSVVKEEESPDAAVPXSASS

SEQ ID NO: 94889 - protein, 1189 aa, Setaria italica
  misc_feature (659)..(659): Xaa can be any naturally occurring amino acid
  misc_feature (671)..(671): Xaa can be any naturally occurring amino acid
  Transcript Sequence Number=SeqID_28915
  Gene Ontology: Mol. function=1,3-beta-glucan synthase activity; Cellular component=1,3-beta-glucan synthase complex; Biological process=1,3-beta-glucan biosynthetic process
  Homolog annotation: Hit_ID=Q8W0J2; Match level="QueryCoverage=100%, HitCoverage=67%, E-value=0.0, Identity=90%"; Hit description=1,3 -beta-glucan synthase component-like
  Pfam annotation: Domain name=Glucan_synthase; Domain location=426 -1189; Score=1076.7; E_value=0; Accession=PF02364.7; Description=1,3 -beta-glucan synthase component
WVRNALEKTNWKICYALTWWFHSRSFVGRGLRESTIDNVKYSFFWVLLLAVKFAFSYFLQIRPLVKPTKEIYKLSGIKYTWHEFFGQSNRFAVFVLWLPVVLIYLMDIQIWYAIFSSLTGALVGLFAHLGEIRDMKQLRLRFQFFASAMSFNIMPEEQQVNESFLPNRLRNFWQRVQLRYGFSRSFRKIESNQVEARRFALVWNEIISKFREEDIVSDREVELLELPPELWNVRVIRWPCFLLCNELSLALGQAKEVKGPDRRLWRKICKNDYRRCAVVEVYDSAKHLLLEIIKEGTEEHGIVTQLFNDFDGSMATEKFTVEYKMTELHNVHTRLVALLSLLLKPTKDFTKIVNALQTLYDVVIRDFQAEKRSMEQLRNEGLAQSRPTSLLFVDAVVLPGEENATFYKQVRRMHTILTSRDSMINVPMNLEARRRIAFFSNSLFMNIPRATQVEKMMAFSVLTPYYNEEVLYSKDQLYKENEDGISILYYLQQIYPDEWEYFVERMKREGMSDIKELYSEKERLRDLRHWVSYRGQTLSRTVRGMMYYYEALKMLTFLDSASEHDLKAGSRELATMGSSRIGSSRHDGVAGGSGYYSRASSSRALSRASSSVSSLFKGSEYGTVLMKYTYVVACQIYGQQKAKNDPRAFEILELMKNYXALRVAYVDERQXHGGETEYFSVLVKYDQLLQREVEIYRVKLPGELKLGEGKPENQNHALIFTRGDAVQTIDMNQDNYFEEALKMRNLLEEFNRYYGIRKPKILGVREHVFTGSVSSLAWFMSAQETSFVTLGQRVLADPLKVRMHYGHPDVFDRLWFLGRGGISKASKVINISEDIFAGFNCTLRGGNVTHHEYIQVGKGRDVGLNQVSMFEAKVASGNGEQTLSRDVYRLGHRLDFFRMLSFFYTTVGFYFNTMMVVLTVYAFVWGRFYLALSGLEDYISKNTSSTNNAALGAVLNQQFVIQLGLFTALPMIIENSLEHGFLTAVWDFMKMQLQFASVFYTFSMGTKTHYYGRTILHGGAKYRATGRGFVVEHKKFAENYRLYARSHFIKAIELGVILTVYASYGSASGNTLVYILLTISSWFLVSSWILAPFIFNPSGLDWLKNFNDFEDFLNWIWFRGGISVKSDQSWETWWEEETDHLRTTGLWGSILEIILDLRFFFFQYAIVYRLHIAGQSRSILVYLLSWACI

SEQ ID NO: 94890 - protein, 233 aa, Setaria italica
  misc_feature (18)..(18): Xaa can be any naturally occurring amino acid
  misc_feature (104)..(104): Xaa can be any naturally occurring amino acid
  Transcript Sequence Number=SeqID_28916
  Gene Ontology: Mol. function=1,3-beta-glucan synthase activity; Cellular component=1,3-beta-glucan synthase complex; Biological process=1,3-beta-glucan biosynthetic process
  Homolog annotation: Hit_ID=Q8W0J2; Match level="QueryCoverage=98%, HitCoverage=13%, E-value=1e-107, Identity=81%"; Hit description=1,3 -beta-glucan synthase component-like
FVWLKTLFDFLNWFRGGXSVKSDQSWETWWEEETDHLRTTGLWGSILEIILDLRFFFFQYAIVYRLHIAGQSRSILVYLLSWACILLAFVALVTVAYFRDRYSXKKHIRYRLVQAIIVGGTVAAIVVLLKFTKFQFVDTFTSLLAFLPTGWGIISIALVFKPYLRRSEIVWKTVVTVARLYDILFGVIVIAPVAVLSWLPGLQEMQTRILFNEAFSRGLHISQIITGKKAHAF

SEQ ID NO: 94891 - protein, 198 aa, Setaria italica
  Transcript Sequence Number=SeqID_28917
  Gene Ontology: Mol. function=1,3-beta-glucan synthase activity; Cellular component=1,3-beta-glucan synthase complex; Biological process=cell wall organization and biogenesis
  Homolog annotation: Hit_ID=B9RVZ6; Match level="QueryCoverage=98%, HitCoverage=11%, E-value=4e-79, Identity=70%"; Hit description =Transferase, transferring glycosyl groups, putative
KGMEQLRQERLAPSSPQESSLLFEDVIKCPSNDDISFYKQVRRLHTILTSRDSMNNVPKNPEAQRRITFFSNSLFMNMPRAPTVEKMMAFSVLTPYYNEDVMYNRDQLRRENEDGVSILFYLQKIYEDDWGNFLERMRREGMTDDDEIWTVKYQELRLWASYRGQTLARTVRGMMYYHRALKMLAFLDTASEVDITEG

SEQ ID NO: 94892 - protein, 790 aa, Setaria italica
  Transcript Sequence Number=SeqID_28918
  Gene Ontology: Mol. function=1,3-beta-glucan synthase activity; Cellular component=1,3-beta-glucan synthase complex; Biological process=1,3-beta-glucan biosynthetic process
  Homolog annotation: Hit_ID=B9RVZ6; Match level="QueryCoverage=98%, HitCoverage=43%, E-value=0.0, Identity=74%"; Hit description =Transferase, transferring glycosyl groups, putative
  Pfam annotation: Domain name=Glucan_synthase; Domain location=2-667; Score=771.4; E_value=6.1e-229; Accession=PF02364.7; Description=1,3 -beta-glucan synthase component
HPQRGDWIPVDLMALASLDTASEVDITEGTKHLASFGSVRHENDMYPMNGGLQRRPQRRLDRGTSTVSQLFKGQEDGAALMKYTYVLACQIYGNQKIARDQRAEDILNLMKKNEALRVAYVDEVHHQGYTQYYSVLVKFDQGLQREVEIYRIRLPGPLKLGEGKPENQNHAIIFTRGDAVQTIDMNQDNYFEEALKMRNLLEQYDYYHGSRKPTLLGVREHVFTGSVSSLAWFMSAQETSFVTLGQRVLANPLKVRMHYGHPDVFDRLWFLTRGGLSKASRVINISEDIFAGFNCTLRGGNVSHHEYIQVGKGRDVGLNQISMFEAKVSSGNGEQTLSRDVYRLGHRLDFFRMLSVFYTTVGFYFNTMLVVLTVYTFVWGRLYLALSGLEAGIQGSANSTNNKALGTVLNQQFIIQIGLFTALPMIIENSLEQGFLPAIWDFFTMQMNFSSLFYTFSMGTKSHYYGRTILHGGAKYRATGRGFVVQHKSFAENYRLYARSHFIKAIELGIILTVYAAHSVIARNTLVYIVMNISSWFLVVSWIMAPFAFNPLGFDWLKTVYDFDDFMNWIWYPGSLFSKPDQSWEVWWFEEQDHLRTTGLWGKILEILLDLRYFFFQYGVVYQLKIANDSRSIAVYLLSWICVAVIFGVFVLMSYTRDKYAAKQHLYYRVVQTAVIILAVLVLILFLKFTKFEIVDIFTSLLAFIPTGWGLISIAQVIRPFIESTVVWNSVISVARLYEILLGVFVMAPVALLSWLPGFQEMQTRVLFNEGFSRGLQISRILTGKKANTA

SEQ ID NO: 94893 - protein, 86 aa, Setaria italica
  Transcript Sequence Number=SeqID_28919
  Subcellular localization annotation: CTP_CleavageSite=81; ConfidenceScore=5.70e-01
PPPSGPSRRPGPAKPFAARAGCAGRSSEGLHAPPSAVRAPRRRGGPFRQRPGTPRGRSGPSRRRPGAWPPPAAHPPEPLARASADS

SEQ ID NO: 94894 - protein, 74 aa, Setaria italica
  Transcript Sequence Number=SeqID_28920
LDFGFAQSHPIAPLSLHQSLPCLCRTSTESEEVLESQIEPAAVQSKPRSGVRKLRQPGPYSPLYDLSTLASQIL

SEQ ID NO: 94895 - protein, 51 aa, Setaria italica
  Transcript Sequence Number=SeqID_28921
  Gene Ontology: Mol. function=transferase activity
  Homolog annotation: Hit_ID=Q5EXM0; Match level="QueryCoverage=96%, HitCoverage=9%, E-value=3e-10, Identity=65%"; Hit description=HGA2
VKNNGKVECKMEGRSDTCEVDGDVRTNGTALSVTLVPATRSSERREWMIRP

SEQ ID NO: 94896 - protein, 182 aa, Setaria italica
  misc_feature (95)..(95): Xaa can be any naturally occurring amino acid
  Transcript Sequence Number=SeqID_28922
  Gene Ontology: Mol. function=acetylglucosaminyltransferase activity; Cellular component=membrane
  Homolog annotation: Hit_ID=B9SYJ3; Match level="QueryCoverage=95%, HitCoverage=42%, E-value=6e-47, Identity=54%"; Hit description =Acetylglucosaminyltransferase, putative
  Pfam annotation: Domain name=Branch; Domain location=1-182; Score =91.5; E_value=2.9e-24; Accession=PF02485.13; Description=Core-2I -Branching enzyme
AEAVRTEEPAWREFRNVDVDRGRIRGRPDRVLGRSPPCCTGAVLLRRGPHWDWLVTLSAEDYPLVTQDDLLYAFSSVPRDLNFIDHTSDLGWKEXFCWHERFEKIIVDPSLYMDRNTEPILSKETRRMPDAFQIFTGSPWLILSRSFTEHCVHGWDNLPRKLLMYFANTAYSMESYFQTLIC

SEQ ID NO: 94897 - protein, 172 aa, Setaria italica
  Transcript Sequence Number=SeqID_28923
  Gene Ontology: Cellular component=chromosome, centromeric region; Biological process=meiotic chromosome segregation
  Homolog annotation: Hit_ID=B6TQG1; Match level="QueryCoverage=79%, HitCoverage=43%, E-value=1e-40, Identity=65%"; Hit description =Shugoshin-1
  Subcellular localization annotation: CTP_CleavageSite=37; ConfidenceScore=5.41e-01
MEVEAPVPPPQPAVSPPAASPAKKALAAAPTSALKTRAARRKTLCDITNLSRRELAEVPDQSACPAAAAGAAGVERFAQLVKENADLVSLIAERDEIIQLSGTEIQKLRLANWELARTNSQMMAELNLGRNKLKALQHELVCSKAALKVKTSELEDAKKAMLRRNINIQRTQ

SEQ ID NO: 94898 - protein, 124 aa, Setaria italica
  misc_feature (114)..(114): Xaa can be any naturally occurring amino acid
  Transcript Sequence Number=SeqID_28924
  Gene Ontology: Mol. function=diacylglycerol kinase activity; Biological process=activation of protein kinase C activity
  Homolog annotation: Hit_ID=Q2L3W7; Match level="QueryCoverage=100%, HitCoverage=19%, E-value=6e-25, Identity=42%"; Hit description =Selenium binding protein
LMAGCRFHKNVELAEYVVKHWILLEPDKSGAYVLLANIYAASGRHNSAREIRHLMREKGVDKTPGCSTVEMKGIIHQFIVGDLSHPRIKDILAKWHEIDSRIRLEEGYIPDKKXEVLLDIEEEE

SEQ ID NO: 94899 - protein, 36 aa, Setaria italica
  Transcript Sequence Number=SeqID_28925
MDAADSGGGGAADAGEPIWDWGNLLDFVVDGDDSLV

SEQ ID NO: 94900 - protein, 109 aa, Setaria italica
  Transcript Sequence Number=SeqID_28926
MRPHRRSLFPVNGPGAVECDGYVCTPPSPPVPSSPYHGPAPSPAPASSPIPACPPIHFPPSPSPSAHRGRRNQGGGMHGHGPPPPPSGVGGGGDDHRWHYVRYVLIAVG

SEQ ID NO: 94901 - protein, 100 aa, Setaria italica
  Transcript Sequence Number=SeqID_28927
  Gene Ontology: Mol. function=mRNA (guanine-N7-)-methyltransferase activity; Cellular component=nucleus; Biological process=mRNA processing
  Homolog annotation: Hit_ID=Q6Z9U7; Match level="QueryCoverage=95%, HitCoverage=25%, E-value=6e-49, Identity=93%"; Hit description=mRNA cap guanine-N7 methyltransferase 1
  Pfam annotation: Domain name=Pox_MCEL; Domain location=1-100; Score= -190.8; E_value=0.041; Accession=PF03291.8; Description=mRNA capping enzyme
PLSIFQFALHYSWSTEARARQALANVSALLRPGGIFIGTMPDANVIIKRLRESEGLEFGNSVYWVSFGEEYAEKKFPASRPFGIKYKFHLEDAVDCPEWV

SEQ ID NO: 94902 - protein, 234 aa, Setaria italica
  Transcript Sequence Number=SeqID_28928
  Gene Ontology: Mol. function=mRNA (guanine-N7-)-methyltransferase activity; Cellular component=nucleus; Biological process=mRNA processing
  Homolog annotation: Hit_ID=Q6Z9U7; Match level="QueryCoverage=100%, HitCoverage=63%, E-value=1e-127, Identity=91%"; Hit description=mRNA cap guanine-N7 methyltransferase 1
  Pfam annotation: Domain name=Pox_MCEL; Domain location=1-205; Score =134.4; E_value=3.7e-37; Accession=PF03291.8; Description=mRNA capping enzyme
RKKFSFPARLICTDCYEARLDEYLSEDAPFDICSCQFALHYSWSTEARARQALANVSALLRPGGIFIGTMPDANVIIKRLRESEGLEFGNSVYWVSFGEEYAEKKFPASRPFGIKYKFHLEDAVDCPEWVVPFHLFKLLAEEYGLELVLMKNFHEFVHEYLQKAEFTELMRRLGALGDGRHDQSTLSQDEWEVSYLYLAFVLRKRGQPPSQRRSNNANRGKMFLTEGDIEVLGI

SEQ ID NO: 94903 - protein, 177 aa, Setaria italica
  Transcript Sequence Number=SeqID_28929
  Gene Ontology: Mol. function=mRNA (guanine-N7-)-methyltransferase activity; Cellular component=nucleus; Biological process=mRNA processing
  Homolog annotation: Hit_ID=Q6Z9U7; Match level="QueryCoverage=100%, HitCoverage=47%, E-value=1e-87, Identity=88%"; Hit description=mRNA cap guanine-N7 methyltransferase 1
  Pfam annotation: Domain name=Pox_MCEL; Domain location=30-177; Score=- 42.1; E_value=6.9e-12; Accession=PF03291.8; Description=mRNA capping enzyme
MNKRPRDDPSSSFASAPKRQYGGGGGYGAQQGYSEDRGSARRVADHYSARSNQTLEERENSPIIHLKKLNNWIKSVLIQLYARPGDCVLDLACGKGGDLIKWDKAKVGYYVGVDIAEGSIKDCMTRYNGDTDQQRRKKFSFPARLICTDCYEARLDEYLSEDAPFDICSCQFALHYS

SEQ ID NO: 94904 - protein, 73 aa, Setaria italica
  Transcript Sequence Number=SeqID_28930
QGCPCHRSRRGARLQRLWWPQTAHFTAASPASSTAAAQGRHRRLRGRHGCLEGRLHLWTATAPLETGETRWPE

SEQ ID NO: 94905 - protein, 53 aa, Setaria italica
  Transcript Sequence Number=SeqID_28931
  Gene Ontology: Mol. function=electron transporter, transferring electrons within cytochrome b6/f complex of photosystem II activity; Cellular component=integral to membrane; Biological process =respiratory electron transport chain
  Homolog annotation: Hit_ID=A7M927; Match level="QueryCoverage=67%, HitCoverage=16%, E-value=2e-14, Identity=97%"; Hit description =Cytochrome b6
MKFSYTVLGGGIGLVTYLNKVYDWFEERLEIQAIADDITSKYVPPHVNIFYCL

SEQ ID NO: 94906 - protein, 215 aa, Setaria italica
  Transcript Sequence Number=SeqID_28932
  Gene Ontology: Mol. function=electron transporter, transferring electrons within cytochrome b6/f complex of photosystem II activity; Cellular component=integral to membrane; Biological process =respiratory electron transport chain
  Homolog annotation: Hit_ID=P56773; Match level="QueryCoverage=100%, HitCoverage=100%, E-value=1e-121, Identity=99%"; Hit description =Cytochrome b6
  Pfam annotation: Domain name=Cytochrom_B_N; Domain location=9-210; Score=460.0; E_value=3.6e-135; Accession=PF00033.11; Description =Cytochrome b(N-terminal)b6petB
MSKVYDWFEERLEIQAIADDITSKYVPPHVNIFYCLGGITLTCFLVQVATGFAMTFYYRPTVTEAFSSVQYIMTEANFGWLIRSVHRWSASMMVLMMILHVFRVYLTGGFKKPRELTWVTGVVLAVLTASFGVTGYSLPWDQIGYWAVKIVTGVPDAIPVIGSPLVELLRGSASVGQSTLTRFYSLHTFVLPLLTAVFMLMHFLMIRKQGISGPL

SEQ ID NO: 94907 - protein, 56 aa, Setaria italica
  Transcript Sequence Number=SeqID_28933
  Subcellular localization annotation: CTP_CleavageSite=49; ConfidenceScore=5.27e-01
RLPGNQFNQYRVPSNQSIVRKRACPFQKRGPHSYMTFRTSVRTSAHCVQCVPPWQK

SEQ ID NO: 94908 - protein, 219 aa, Setaria italica
  Transcript Sequence Number=SeqID_28934
  Gene Ontology: Mol. function=pyridoxal phosphate binding
  Homolog annotation: Hit_ID=Q25A99; Match level="QueryCoverage=91%, HitCoverage=45%, E-value=1e-107, Identity=95%"; Hit description =H0410G08.15 protein
  Pfam annotation: Domain name=Alum_res; Domain location=1-219; Score =150.9; E_value=3.9e-42; Accession=PF06838.3; Description=Aluminium resistance protein
MQNPNCMVMVDNCYGEFVETSEPAMVGADLIAGSLIKNPGGTIAPCGGYVAGKKHLVEAAAARLSAPGLGVEFGSTPGHVMRSLFQGLFLAPQMVGEAIKGGLLIAEVMSAKGYRVQPLPRVPRHDIVQAVELGNRDRLIAFCEVVQQTCPVGSFVKPTAGETPGYASEVIFADGTFIDGSTSELSCDGPLRDPYAVFCQGGTHWTQWALVLTEVLKVI

SEQ ID NO: 94909 - protein, 125 aa, Setaria italica
  Transcript Sequence Number=SeqID_28935
  Homolog annotation: Hit_ID=Q9SPP7; Match level="QueryCoverage=96%, HitCoverage=43%, E-value=1e-18, Identity=47%"; Hit description =Fertilin alpha subunit
AGLTDYSFYGGMDNDAISHFDSSASAAGYGDQSTNAQLDSTDPKYLETLYPGWKYDAATQQWYQVDTPSAQSYVADNTGAVAVLGSGVQQQQQFNASYLQNSLHSALETIAEESSANAATWGAAT

SEQ ID NO: 94910 - protein, 88 aa, Setaria italica
  Transcript Sequence Number=SeqID_28936
MAFAARRNIATRLSHHLTRRVHPCVPHALTSHSSDEQASSSKPLPIPLPPLHTPLQHRSGAAQTVGFLPFSLHLAGPTRRSFSSSAPA

SEQ ID NO: 94911 - protein, 68 aa, Setaria italica
  Transcript Sequence Number=SeqID_28937
LTTLSGKDLLEDKNRSGLKDLPEDKNKSQDADASFSLFQFNLPIASPVTPSSKDDGVPVQPANSFACN

SEQ ID NO: 94912 - protein, 692 aa, Setaria italica
  Transcript Sequence Number=SeqID_28938
  Pfam annotation: Domain name=Nha1_C; Domain location=3-379; Score= -173.7; E_value=0.084; Accession=PF08619.2; Description=Alkali metal cationH+ antiporter Nha
YYLEKQNKLLEEEEKEKREEQERRMKRRTREREKKLRRKERLKEKENKGKRLVELKSPDDVSSLALSNLSTSTNDDSTNTLDSRDSATEEEDNAEVVNPRSCDSHIDQSSCMEINGQNSVRCNAMAEFSLMDSSDLCTSEQSKSSKRSPRLREDFPQDQSCWYDDCQDEYGRIGDLQWQSRERARSSDQSCNAVSTTNNRTRDRHAYNSCSCGHQEDYGVVNNCFLSTARSGREMKMARKSGVDKPRVQYRRCYPLDNFIVSKATRIASTQKNAILKQVWEPMDARKTTNLDNTDNVACSIDNVDPLESVDCDTSGCQKLAARCESQPLASESSSDVCKSDQQCGTAERSQAAACDGTLTVNKQNCYPGNDEGSRHDEELMMNSAGSDGSSSCMSEGDRESSSSSMTSLSAQNPESSSSESEESPDRTKSTVGTPSSRTASRSLLEACAGNGFREYQPKATRLAHNDRLGFNTSPFQDQLLRQQSMHVSPYSPATMGLHNRSWAAQTNGNFHYARPTHLYSSPLVFGAPGNHFVDYPVQYSSVNPYLAPAFSHMPPEPIHTTPASFRAMPLSTPFRNGPQHIAGHAHREMNLERPPCKNRSGLKDLPEDKNKSQDADASFSLFQFNLPIASPVTPSSKDDKNGELTARTPLLQVQAQLCSREQADVKEYNLFSSKDNGIFSCSKDNDIFSFM

SEQ ID NO: 94913 - protein, 43 aa, Setaria italica
  Transcript Sequence Number=SeqID_28939
MASNYVDTAAEEGRFHGHYHHHSTTPTGAAAASPKHMRRSWSS

SEQ ID NO: 94914 - protein, 82 aa, Setaria italica
  Transcript Sequence Number=SeqID_28940
MASNYVDTAAEEGRFHGHYHHHSTTPTGAAAASPKHMRRSWSSASSAHGHGHAPKCVCAPATHAGSFKCRLHRSSSHGHGHP

SEQ ID NO: 94915 - protein, 60 aa, Setaria italica
  Transcript Sequence Number=SeqID_28941
  Gene Ontology: Mol. function=nucleotide binding; Cellular component =plasma membrane; Biological process=small GTPase mediated signal transduction
  Homolog annotation: Hit_ID=Q40191; Match level="QueryCoverage=98%, HitCoverage=27%, E-value=1e-11, Identity=56%"; Hit description=Ras -related protein Rab11A
ATNVENAFQTVLTEIFKIHSKKNMAADPKANGAAPSLAGKKVLVPGPAQEIPKSKCCSSM

SEQ ID NO: 94916 - protein, 98 aa, Setaria italica
  Transcript Sequence Number=SeqID_28942
  Gene Ontology: Mol. function=nucleotide binding; Cellular component =plasma membrane; Biological process=small GTPase mediated signal transduction
  Homolog annotation: Hit_ID=Q40520; Match level="QueryCoverage=98%, HitCoverage=44%, E-value=1e-28, Identity=64%"; Hit description=Ras -related protein Rab11C
  Pfam annotation: Domain name=Ras; Domain location=1-55; Score=-63.0; E_value=0.00014; Accession=PF00071.14; Description=Ras family
MLVGNKSDLEEQRAVSTEDAKEFAEKENLFFLETSALQATNVESAFQTVLTEIFKIHSKKNMVSEPKSNGAAPAMPGKKVLVPGPAQEIPKSKCCSSM

SEQ ID NO: 94917 - protein, 123 aa, Setaria italica
  Transcript Sequence Number=SeqID_28943
  Gene Ontology: Mol. function=nucleotide binding; Cellular component =plasma membrane; Biological process=small GTPase mediated signal transduction
  Homolog annotation: Hit_ID=Q40520; Match level="QueryCoverage=97%, HitCoverage=54%, E-value=9e-60, Identity=89%"; Hit description=Ras -related protein Rab11C
  Pfam annotation: Domain name=MMR_HSR1; Domain location=12-114; Score=- 19.3; E_value=0.06; Accession=PF01926.15; Description=GTPase of unknown function
  Pfam annotation: Domain name=Miro; Domain location=13-123; Score =48.0; E_value=3.8e-11; Accession=PF08477.5; Description=Miro-like protein
  Pfam annotation: Domain name=Ras; Domain location=13-123; Score =144.4; E_value=3.5e-40; Accession=PF00071.14; Description=Ras family
  Pfam module annotation: Pfam domain module=MMR_HSR1::Miro::Ras; Domain location=12-114::13-123::13-123
MAGAGEKVDYVFKVVLIGDSAVGKSQILARFARNEFSLDSKATIGVEFQTRTLVIDHRSVKAQIWDTAGQERYRAVTSAYYRGALGALLVYDITRRQSFDHIPRWLDELRAHADKNIVIMLVG

SEQ ID NO: 94918 - protein, 101 aa, Setaria italica
  Transcript Sequence Number=SeqID_28944
  Gene Ontology: Mol. function=nucleotide binding; Cellular component =plasma membrane; Biological process=small GTPase mediated signal transduction
  Homolog annotation: Hit_ID=Q40191; Match level="QueryCoverage=94%, HitCoverage=42%, E-value=2e-46, Identity=92%"; Hit description=Ras -related protein Rab11A
  Pfam annotation: Domain name=Miro; Domain location=13-101; Score=4.5; E_value=0.0041; Accession=PF08477.5; Description=Miro-like protein
  Pfam annotation: Domain name=Ras; Domain location=13-101; Score=60.5; E_value=6.2e-15; Accession=PF00071.14; Description=Ras family
  Pfam module annotation: Pfam domain module=Miro::Ras; Domain location= 13-101::13-101
MAGGADKVDYVFKVVLIGDSAVGKSQILARFARNEFSLDSKATIGVEFQTRTLVIDHKSVKAQIWDTAGQERYRAVTSAYYRGALGPLLVYDITKRQSFDH

SEQ ID NO: 94919 - protein, 220 aa, Setaria italica
  misc_feature (207)..(207): Xaa can be any naturally occurring amino acid
  Transcript Sequence Number=SeqID_28945
  Gene Ontology: Mol. function=nucleotide binding; Cellular component =plasma membrane; Biological process=small GTPase mediated signal transduction
  Homolog annotation: Hit_ID=Q40520; Match level="QueryCoverage=98%, HitCoverage=97%, E-value=9e-97, Identity=79%"; Hit description=Ras -related protein Rab11C
  Pfam annotation: Domain name=Arf; Domain location=1-174; Score=-57.2; E_value=4e-05; Accession=PF00025.13; Description=ADP-ribosylation factor family
  Pfam annotation: Domain name=GTP_EFTU; Domain location=16-176; Score=- 92.4; E_value=0.044; Accession=PF00009.19; Description=Elongation factor Tu GTP binding domain
  Pfam annotation: Domain name=MMR_HSR1; Domain location=14-129; Score=- 5.3; E_value=0.0031; Accession=PF01926.15; Description=GTPase of unknown function
  Pfam annotation: Domain name=Miro; Domain location=15-129; Score =74.6; E_value=3.5e-19; Accession=PF08477.5; Description=Miro-like protein
  Pfam annotation: Domain name=Ras; Domain location=15-176; Score =340.0; E_value=4.6e-99; Accession=PF00071.14; Description=Ras family
  Pfam module annotation: Pfam domain module=Arf::GTP_EFTU::MMR _HSR1::Miro::Ras; Domain location=1-174::16-176::14-129::15-129::15 -176
MSRGELGQKIDYVFKVVLIGDSAVGKSQILARFARNEFSLDSKATIGVEFQTRTLVIDHRTVKAQIWDTAGQERYRAVTSAYYRGALGALLVYDITKRQSFDHIPRWLDELRGHADKNIVIMLVGNKSDLEEQRAVSTEDAKEFAEKENLFFLETSALQATNVENAFQTVLTEIFKIHSKKNMAADPKANGAAPSLAGKKVLVPGPXAQEIPKSKCCSSM

SEQ ID NO: 94920 - protein, 204 aa, Setaria italica
  Transcript Sequence Number=SeqID_28946
  Gene Ontology: Mol. function=nucleotide binding; Cellular component =nucleus; Biological process=small GTPase mediated signal transduction
  Homolog annotation: Hit_ID=Q9ST41; Match level="QueryCoverage=86%, HitCoverage=75%, E-value=3e-66, Identity=68%"; Hit description=PRA2
  Pfam annotation: Domain name=Arf; Domain location=17-186; Score= -52.7; E_value=1.8e-05; Accession=PF00025.13; Description=ADP -ribosylation factor family
  Pfam annotation: Domain name=GTP_EFTU; Domain location=27-189; Score=- 60.0; E_value=9.6e-05; Accession=PF00009.19; Description=Elongation factor Tu GTP binding domain
  Pfam annotation: Domain name=MMR_HSR1; Domain location=25-140; Score=- 9.7; E_value=0.0079; Accession=PF01926.15; Description=GTPase of unknown function
  Pfam annotation: Domain name=Miro; Domain location=26-140; Score =64.8; E_value=3.1e-16; Accession=PF08477.5; Description=Miro-like protein
  Pfam annotation: Domain name=Ras; Domain location=26-188; Score =286.7; E_value=5.2e-83; Accession=PF00071.14; Description=Ras family
  Pfam module annotation: Pfam domain module=Arf::GTP_EFTU::MMR _HSR1::Miro::Ras; Domain location=17-186::27-189::25-140::26-140::26 -188
MVARGKEAEEEEARWEGEAEIDYVFKVVVVGDSAVGKTQLLARFTRDEFALDSKSTIGVEFQTRTLTIHRKRVKAQIWDTAGQERYRAVTSAYYRGALGAMVVYDVTRRATFEHVARWVEELRAHADGSTVVALIGNKADMPAARREVAADEAARLAEEQGLFFSEASALTGDNVERAFLTLLEEVFAVVSRRALELERRNPNR

SEQ ID NO: 94921 - protein, 170 aa, Setaria italica
  Transcript Sequence Number=SeqID_28947
  Gene Ontology: Mol. function=nucleotide binding; Cellular component =plasma membrane; Biological process=small GTPase mediated signal transduction
  Homolog annotation: Hit_ID=Q40520; Match level="QueryCoverage=99%, HitCoverage=77%, E-value=6e-74, Identity=77%"; Hit description=Ras -related protein Rab11C
  Pfam annotation: Domain name=Miro; Domain location=1-80; Score=0.4; E_ value=0.01; Accession=PF08477.5; Description=Miro-like protein
  Pfam annotation: Domain name=Ras; Domain location=1-127; Score=208.2; E_value=2.2e-59; Accession=PF00071.14; Description=Ras family
  Pfam module annotation: Pfam domain module=Miro::Ras; Domain location= 1-80::1-127
FQTRTLVIDHKSVKAQIWDTAGQERYRAVTSAYYRGALGALLVYDITKRQSFDHIPRWLEELRGHADKNIVIMLVGNKSDLEEERAVSTEDAKEFAEKENLFFLETSALQATNVENAFQTVLTEIFKIHSKKNMAADPKANGAAPSLAGKKVLVPGPAQEIPKSKCCSSM

SEQ ID NO: 94922 - protein, 346 aa, Setaria italica
  Transcript Sequence Number=SeqID_28948
  Gene Ontology: Mol. function=metal ion binding
  Homolog annotation: Hit_ID=B6TVD0; Match level="QueryCoverage=99%, HitCoverage=89%, E-value=1e-143, Identity=72%"; Hit description =Protein binding protein
  Pfam annotation: Domain name=zf-C3HC4; Domain location=5-45; Score =28.6; E_value=2.6e-05; Accession=PF00097.17; Description=Zinc finger, C3HC4 type (RING finger)
ACLTCPLCGRLLRDAATITECLHTFCRKCISEEFIKKEVCWCPVCSIDLGCAPLEKLRMDHSLQYVRSKIFPRRQKFEAPEVTSPVTSPIKRKERSLSSLTIHAPQVSMQKCLTKRRTKASCLHNLSLHSKLRGSNITKKVGGWKPLGSHFKAAKNKRSLGSKSEDVKTTEDKSDDPVDETPTSQAKTKRQYRRRGNLEKRTGNKKLLILKGKQKKIKPKLLNKKRKLQALWLYLVAAFDQKGQPPLPQVPSKFLRIKDVDLPASFIQKYLVQKLNLSSEAEVEILCGGKPVSPGMTLHDLADCWLNKGQKGRVRSYVGTPAAGFIAKVFYGRSGASIPETENNQG

SEQ ID NO: 94923 - protein, 94 aa, Setaria italica
  misc_feature (39)..(39): Xaa can be any naturally occurring amino acid
  misc_feature (69)..(69): Xaa can be any naturally occurring amino acid
  Transcript Sequence Number=SeqID_28949
RTRPTVAACSLPHPPPPPPPPPVAARPAADHGDGGRGQXEPPGLGPRTRRSAATRETGDMAGGAGEGEXEGPLGYVLSLPAASLPLPVAVSCLD

SEQ ID NO: 94924 - protein, 150 aa, Setaria italica
  Transcript Sequence Number=SeqID_28950
  Gene Ontology: Mol. function=transferase activity, transferring glycosyl groups; Cellular component=intracellular; Biological process=protein amino acid ADP-ribosylation
  Homolog annotation: Hit_ID=Q9ZSV1; Match level="QueryCoverage=99%, HitCoverage=15%, E-value=1e-63, Identity=79%"; Hit description=Poly [ADP-ribose] polymerase 1
  Pfam annotation: Domain name=zf-PARP; Domain location=17-91; Score =44.2; E_value=5e-10; Accession=PF00645.10; Description=Poly(ADP -ribose) polymerase and DNA-Ligase Zn-finger region
  Subcellular localization annotation: CTP_CleavageSite=41; ConfidenceScore=5.24e-01
SAATSSTATVPDKCTIDVAPSARTSCRRCSQKITKGTVRVSAKLEGQASKGIPWYHVNCFLEVSISATVEKFSGWDTLSDEDKRTVLDLVKKDVGHNEPTKGSKRKKGENDMQSCKAPKLDESTSEGTVRNKGKLVDPRDSNASSADIHS

SEQ ID NO: 94925 - protein, 153 aa, Setaria italica
  Transcript Sequence Number=SeqID_28951
  Homolog annotation: Hit_ID=B5SVV3; Match level="QueryCoverage=61%, HitCoverage=13%, E-value=2e-18, Identity=52%"; Hit description =Mutant low phytic acid protein 1
IQRLGSSRKLMAIINVDGSVSKAWPVESSGDGKCSSDNSTQKSVGNPIYGPLNIGRAESVNLQFGTFGISAWPTDTGCTSQAGNADESWTNATEGSSRHVPSSSGSPKKSDGHCKEIKESSAASGSDEEEEEEADVQPNSGSDEDLSEVDNRE

SEQ ID NO: 94926 - protein, 67 aa, Setaria italica
  Transcript Sequence Number=SeqID_28952
SLSLGSEKTHAHINRQRRGGITLPESLPFLASILPTQREELHLIVDPRIFRWFHLGSQDEAPGVLLQ

SEQ ID NO: 94927 - protein, 75 aa, Setaria italica
  Transcript Sequence Number=SeqID_28953
IFILLIHFSVVSELEIFVPKLEIGICHTLFFSFAPLTHMFIFRHSYLLWVVLHSWEQGVMMYPGSVNIMYCILHI

SEQ ID NO: 94928 - protein, 135 aa, Setaria italica
  Transcript Sequence Number=SeqID_28954
  Gene Ontology: Mol. function=triacylglycerol lipase activity; Biological process=lipid metabolic process
  Homolog annotation: Hit_ID=B9SKY0; Match level="QueryCoverage=91%, HitCoverage=31%, E-value=3e-53, Identity=75%"; Hit description =Triacylglycerol lipase, putative
VVVAAADAEAEGHPYDFHVSGPRNLPPPNWKEIIRSSWKDPNYKRMVMACFIQAVYLLELDRQDQKGEEDGLAPKWWKPFKYKVTQTLVDERDGSIYGAVLEWDRSSALSDFILIRPSGAPRAVLALRGTLLQKP

SEQ ID NO: 94929 - protein, 51 aa, Setaria italica
  Transcript Sequence Number=SeqID_28955
SGEIQQQTCQQIIAHSSNSSVSIRGLQISEPTANCFSELLIASNVYKAENC

SEQ ID NO: 94930 - protein, 141 aa, Setaria italica
  Transcript Sequence Number=SeqID_28956
  Gene Ontology: Mol. function=aspartic-type endopeptidase activity; Biological process=xylan catabolic process
  Homolog annotation: Hit_ID=B6UHL4; Match level="QueryCoverage=78%, HitCoverage=26%, E-value=8e-40, Identity=72%"; Hit description =Xylanase inhibitor TAXI-IV
MAQLKPAVLLAVSLCCLSALLPWCAAASYGGKPLVTAITKDAATKLYTAPLKDGRPLVLDLSGPLIWSTCPPKHPSFECHHHVCAHAHSYHPPGCPRTGHGVADDDDPFRCKCTAHPYNPIARKSGSGDLTRVTVTANDTD

SEQ ID NO: 94931 - protein, 154 aa, Setaria italica
  misc_feature (103)..(103): Xaa can be any naturally occurring amino acid
  Transcript Sequence Number=SeqID_28957
KHEIPTEVARPSKKRRIFVRSVSDLLKYAKREPSNGRSASILSSIIASPILNSSVRDDGKTSDLSSSAQRLKESSHVEDTSKSPKSNAQVQNSVIRTPSKSCXELSPTFSPVNPSTGSNRSLSKSSVARELLKLDPESALSNQQRNDSRRRMDM

SEQ ID NO: 94932 - protein, 105 aa, Setaria italica
  Transcript Sequence Number=SeqID_28958
  Gene Ontology: Mol. function=ligase activity; Biological process =response to auxin stimulus
  Homolog annotation: Hit_ID=B6EBQ1; Match level="QueryCoverage=100%, HitCoverage=17%, E-value=2e-39, Identity=81%"; Hit description =Indole-3-acetic acid amido synthetase
MAVMAEVSTTTGAALRGPASPAQSPVKDGDAEKLRFIEEMTSDVDAVQERVLEEILTRNADTEYLIKCGLAGATDRATFRAKVPMATYEDLQPYIRRIADGDRTP

SEQ ID NO: 94933 - protein, 82 aa, Setaria italica
  Transcript Sequence Number=SeqID_28959
VNSTESKSCYSTESKSCSNSQIKHRYVNHESMIHTVHGSVYTSQPQNSEHSTCLHIPITSIRFNNKRRWPSRLEILIQKKKK

SEQ ID NO: 94934 - protein, 74 aa, Setaria italica
  Transcript Sequence Number=SeqID_28960
  Subcellular localization annotation: CTP_CleavageSite=35; ConfidenceScore=5.54e-01
RHTGKPQTSQAVKSSPSADSPHSSASSHPDEPPVSARHRIASPRVCAPTGCLPNPSGSSSSTSGSESTVQLAED

SEQ ID NO: 94935 - protein, 93 aa, Setaria italica
  Transcript Sequence Number=SeqID_28961
AYEQIILNRPIIMQTRDRSRPNPSDYPVSAKPNFPCYPIKTDLTLNRNRNKRAAEPRPGIERIEHRKVQATQSIRLARAPITSSPRHDGASRT

SEQ ID NO: 94936 - protein, 70 aa, Setaria italica
  Transcript Sequence Number=SeqID_28962
FVRTPNFVMETVPDTCYWNMEASGVLRILRFLHWACSSHGSQSHPEGLVMIRYGCLGVFGIYKYMVSICC

SEQ ID NO: 94937 - protein, 125 aa, Setaria italica
  misc_feature (62)..(62): Xaa can be any naturally occurring amino acid
  misc_feature (116)..(116): Xaa can be any naturally occurring amino acid
  Transcript Sequence Number=SeqID_28963
  Gene Ontology: Mol. function=transferase activity, transferring glycosyl groups; Cellular component=integral to membrane; Biological process=cellulose biosynthetic process
  Homolog annotation: Hit_ID=Q4U0Z7; Match level="QueryCoverage=100%, HitCoverage=11%, E-value=2e-57, Identity=88%"; Hit description =Cellulose synthase BoCesA4
GTQACPQCKTKYKRHKGSPAIRGEEGDDTDADDASDFNYPASGNDDQKQKIADRMRSWRMNXVGAGGDVGRPKYDSGEIGLTKYDSGEIPRGYIPSVTNSQISGEIPGASPDHHMXSPTGNIGKR

SEQ ID NO: 94938 - protein, 163 aa, Setaria italica
  Transcript Sequence Number=SeqID_28964
  Homolog annotation: Hit_ID=B4FSP2; Match level="QueryCoverage=98%, HitCoverage=29%, E-value=1e-47, Identity=57%"; Hit description=HECT domain and RCC1-like domain-containing protein 2
  Subcellular localization annotation: CTP_CleavageSite=51; ConfidenceScore=5.13e-01
MDATTSRGASSSLPLHLIVDDTLALVSPLQQSFQRSQRLCFGDSAPGEFPLAANPSIVLHVLTSCNLDPEDLAHLEATCTFFRKPANFPPDFDLSMSELAALDMCQKRAIFKPMTAHERELFKQRCGGSWKLVLRFIMAGEACCRREKSQAIAGPGHSIAVTA

SEQ ID NO: 94939 - protein, 1079 aa, Setaria italica
  Transcript Sequence Number=SeqID_28965
  Gene Ontology: Mol. function=transferase activity, transferring glycosyl groups; Cellular component=integral to membrane; Biological process=cellulose biosynthetic process
  Homolog annotation: Hit_ID=Q84ZN6; Match level="QueryCoverage=100%, HitCoverage=100%, E-value=0.0, Identity=87%"; Hit description =Probable cellulose synthase A catalytic subunit 8 [UDP-forming]
  Pfam annotation: Domain name=Cellulose_synt; Domain location=259 -1074; Score=2146.6; E_value=0; Accession=PF03552.6; Description =Cellulose synthase
  Pfam annotation: Domain name=PHD; Domain location=19-68; Score=5.5; E_ value=0.0065; Accession=PF00628.21; Description=PHD-finger
  Pfam annotation: Domain name=zf-C3HC4; Domain location=20-65; Score =2.1; E_value=0.058; Accession=PF00097.17; Description=Zinc finger, C3HC4 type (RING finger)
  Pfam module annotation: Pfam domain module=Cellulose_synt::PHD::zf -C3HC4; Domain location=259-1074::19-68::20-65
MDGGGRDAANSGKHRAGQVCQICGDGVGTAADGELFTACDVCGFPVCRPCYEYERKDGTQACPQCKTKYKRHKGSPPVHGEENEDVDTDDVSDYNYPASGNQDQKQKIAERMLTWRTNSRGSDVGLAKYDSGEIGHGKYDSGEIPRGYIPSLTHSQISGEIPGASPDHMMSPVGNIGRRGHQFPYVNHSPNPSREFSGSLGNVAWKERVDGWKMKDKGAIPMTNGTSIAPSEGRGVGDIDASTDYNMEDALLNDETRQPLSRKVPIPSSRINPYRMVIVLRLIVLCIFLHYRITNPVRNAYPLWLLSVICEIWFALSWILDQFPKWSPINRETYLDRLALRYDREGEPSQLAPVDIFVSTVDPMKEPPLVTANTVLSILAVDYPVDKVSCYVSDDGAAMLTFDALAETSEFARKWVPFCKKYNIEPRAPEWYFAQKIDYLKDKVQTSFVKDRRAMKREYEEFKVRINGLVAKAQKVPEEGWIMQDGTPWPGNNTRDHPGMIQVFLGHSGGLDAEGNELPRLVYVSREKRPGFQHHKKAGAMNALVRVSAVLTNGQYLLNLDCDHYINNSKALREAMCFLMDPNLGRSVCYVQFPQRFDGIDRNDRYANRNTVFFDINLRGLDGLQGPVYVGTGCVFNRTALYGYEPPIKKKKPGFFSSLCGGRKKTSKSKKKSSEKKKSHKHADSSVPVFNLEDIEEGIEGSQFDDEKSLIMSQMSLEKRFGQSSVFVASTLMEYGGVPQSATPESLLKEAIHVISCGYEDKTDWGSEIGWIYGSVTEDILTGFKMHARGWRSIYCMPKRPAFKGSAPINLSDRLNQVLRWALGSIEILFSRHCPIWYGYGGRLKFLERFAYVNTTIYPLTSIPLLLYCILPAVCLLTGKFIIPEISNFASIWFISLFISIFATGILEMRWSGVGIDEWWRNEQFWVIGGISAHLFAVFQGLLKVLAGIDTSFTVTSKATDEEGDFAELYMFKWTTLLIPPTTILIINLVGVVAGISYAINSGYQSWGPLFGKLFFAFWVIVHLYPFLKGLMGRQNRTPTIVVVWAILLASIFSLLWVRIDPFTTRVTGPDIVKCGINC

SEQ ID NO: 94940 - protein, 115 aa, Setaria italica
  Transcript Sequence Number=SeqID_28966
TEIETKELQNLRYQQIVISHKSTQNYFPKQRDPGGSRGIIQPRPGIERIEHRKVQATQSIRLARAPDQPIDKTNMRSKITAAGSPTTYPSPVHHDTMEQATRALFVSAYPAYWRK

SEQ ID NO: 94941 - protein, 170 aa, Setaria italica
  misc_feature (107)..(107): Xaa can be any naturally occurring amino acid
  Transcript Sequence Number=SeqID_28967
  Gene Ontology: Mol. function=phosphatidylinositol N-acetylglucosaminyl transferase activity; Cellular component=integral to membrane; Biological process=GPI anchor biosynthetic process
  Homolog annotation: Hit_ID=Q2HRH2; Match level="QueryCoverage=86%, HitCoverage=16%, E-value=4e-09, Identity=25%"; Hit description=N -acetylglucosaminyl transferase component
GSVGNGDQHPSYDHRRWGCDCCVLDGFLDAFRKSAVKEGSWVHFFCKSGKSFKSNLNQVPVFCHLYSDGQQVDINHCHVILYEVPTFGRNHFSLGVDAPRKLKASFXKPNWINDLQKQPSFLDLVCAWVNLHDITFFINKSAKSLHICLKDSIILALNCSNAARLPVYSS

SEQ ID NO: 94942 - protein, 122 aa, Setaria italica
  Transcript Sequence Number=SeqID_28968
  Gene Ontology: Mol. function=protein serine/threonine kinase activity; Biological process=protein amino acid phosphorylation
  Homolog annotation: Hit_ID=B9RSY9; Match level="QueryCoverage=57%, HitCoverage=5%, E-value=8e-19, Identity=57%"; Hit description=ATP binding protein, putative
EAFWHPTDLAVKPVMPSRKADKAVDTVPTLPFEALTACDYIKLPQEQLNAFNSQILQSLSGTFQVSEKQNTIRYLEMLSMNSDAANKITNGPIMLLLIKMLRLSKTAVLRVQIASLMGLLIR

SEQ ID NO: 94943 - protein, 70 aa, Setaria italica
  Transcript Sequence Number=SeqID_28969
NTIALFCIKQQRAADNHLRNYIPVTCNPVSSLHDAYTGVQMPDVNPFQFRALASTLKCRNAQRQQLSGKY

SEQ ID NO: 94944 - protein, 75 aa, Setaria italica
  Transcript Sequence Number=SeqID_28970
IRLLLGWAVLQSRTDTYQPTYQHLSLLFLLRILLSTYPWRIQYGYVSDTRYVTSPSYPCNIGYEPFVAATLVVPF

SEQ ID NO: 94945 - protein, 68 aa, Setaria italica
  Transcript Sequence Number=SeqID_28971
APPRLESDCEDDFYSVNGDLTPARSFSSQTSRIAPYAANKNLPTLGAILKAEPLKPPAPQMRKLGDPA

SEQ ID NO: 94946 - protein, 70 aa, Setaria italica
  Transcript Sequence Number=SeqID_28972
GRSVGMSNELPVEGVVRVKKVERIEAYNVATKPSQTATAKVTRSLTVNVVRVGDVDEKPDSFVSVPIVHN

SEQ ID NO: 94947 - protein, 66 aa, Setaria italica
  Transcript Sequence Number=SeqID_28973
  Gene Ontology: Mol. function=protein binding; Cellular component =nucleus; Biological process=regulation of transcription, DNA -dependent
  Homolog annotation: Hit_ID=B6UAV5; Match level="QueryCoverage=92%, HitCoverage=12%, E-value=9e-23, Identity=81%"; Hit description =Scarecrow-like 6
  Subcellular localization annotation: CTP_CleavageSite=20; ConfidenceScore=5.09e-01
TNQWQAMLASAGFSPVQLSSAAEAQAECLLRRTATPGFHVEKRQTALALRWQQSELVTVSAWQCSR

SEQ ID NO: 94948 - protein, 147 aa, Setaria italica
  Transcript Sequence Number=SeqID_28974
  Subcellular localization annotation: CTP_CleavageSite=41; ConfidenceScore=5.06e-01
LVQTSKHYGSSFMPVYSKCHSISGPITLCHGLSCKFMEFTSASAVTCPRALTDAKMVIILHQDVNWWPVVFMSTSFKTCPIALADANVLAFTNTIAQAFGLFASNGAFAKSRCALGERLVIKVVMTAFSLLFSVLCRPNLVNPRPVS

SEQ ID NO: 94949 - protein, 76 aa, Setaria italica
  Transcript Sequence Number=SeqID_28975
HNYQTNYVHFNTDSKWGKHVDIQKGAGKNPGLQENDTTLATYEAMTEFKYDGKSIVSITQEWSNLDNGMIRYFNDH

SEQ ID NO: 94950 - protein, 191 aa, Setaria italica
  misc_feature (13)..(13): Xaa can be any naturally occurring amino acid
  misc_feature (39)..(39): Xaa can be any naturally occurring amino acid
  Transcript Sequence Number=SeqID_28976
  Gene Ontology: Mol. function=protein serine/threonine kinase activity; Cellular component=integral to membrane; Biological process=protein amino acid phosphorylation
  Homolog annotation: Hit_ID=Q208N4; Match level="QueryCoverage=100%, HitCoverage=36%, E-value=1e-100, Identity=93%"; Hit description =Calcium and calcium/calmodulin-dependent serine/threonine -proteinkinase
  Pfam annotation: Domain name=efhand; Domain location=144-172; Score =19.5; E_value=0.014; Accession=PF00036.24; Description=EF hand
ILQGEFSFQDHTXKTISSSAKELISSLLSVEPYKRPTAXLLRHPWVIGDCAKQDLMDAEVVSKLQRFNARRKLRAAAIASVLSSKVALRTKRLRNLLGTHDLSSEELDNLRVHFARICADGENATLEEFEQVLKAMKMDALVPLAPRVFDLFDNNRDGTVDMREILCGLSSLRNSRGDDALRLCFQMYDAD

SEQ ID NO: 94951 - protein, 74 aa, Setaria italica
  Transcript Sequence Number=SeqID_28977
  Gene Ontology: Mol. function=catalytic activity; Cellular component =plasma membrane; Biological process=cellular metabolic process
  Homolog annotation: Hit_ID=B9R8T8; Match level="QueryCoverage=75%, HitCoverage=17%, E-value=3e-12, Identity=57%"; Hit description =Cinnamoyl-CoA reductase, putative
PIPCVPCLSSVACLSPEEEMMAPTVKGTVNVFEACSAMNVKKVILVSSLASVSFNPNWPEDKLIDESCWSDIEF

SEQ ID NO: 94952 - protein, 41 aa, Setaria italica
  Transcript Sequence Number=SeqID_28978
FFPPLCFAVAPISNANMDLPATPIRFQLYADSHCCPLCLKC

SEQ ID NO: 94953 - protein, 44 aa, Setaria italica
  Transcript Sequence Number=SeqID_28979
  Homolog annotation: Hit_ID=B6U0K6; Match level="QueryCoverage=100%, HitCoverage=6%, E-value=6e-12, Identity=77%"; Hit description=L -aspartate oxidase 1
MANLTNGFASFQCARLMHIEKVHMQASGLPSLCFRRCAQLDNSR

SEQ ID NO: 94954 - protein, 59 aa, Setaria italica
  Transcript Sequence Number=SeqID_28980
LFVLVVIEIRVVYLIFLIINKCMCIEIREIISIDHSIGSMHFSIYFFISVSVDVIREPH

SEQ ID NO: 94955 - protein, 160 aa, Setaria italica
  misc_feature (138)..(138): Xaa can be any naturally occurring amino acid
  misc_feature (149)..(149): Xaa can be any naturally occurring amino acid
  Transcript Sequence Number=SeqID_28981
  Gene Ontology: Mol. function=binding; Cellular component=microtubule
  Homolog annotation: Hit_ID=Q84VS2; Match level="QueryCoverage=91%, HitCoverage=16%, E-value=5e-24, Identity=46%"; Hit description =Potyviral helper component protease-interacting protein 2
SDRDTHHIAVEDLDRIIRAPPSPDAVPMLLNALASDSQGLASPARRESLRLLATLCASHPDAAAPHLHKALAHLARRLKDPASDTSVRDACRDAAGQLAAVYLRPLAASGVAEAGNATVTLFVKPLFEVMGEQSKAVXGGAAACLAKTXVEGAGPGPGVI

SEQ ID NO: 94956 - protein, 171 aa, Setaria italica
  Transcript Sequence Number=SeqID_28982
PGLVFFLLPISSCCEISPAFVLARPDARGLHPLIPHTHPPPHVPRLHHLESSPLVSSGFFRPDFSLLGCALGGTPRVPNEGVVRRERFWCASSAPNPIPKTLFQYHRFFLRGEFVGSIGQFRALAADCSGNGRVLEGSAAKDWIFNLISRGFSRRRIPQAAGRRCRRSSIC

SEQ ID NO: 94957 - protein, 135 aa, Setaria italica
  Transcript Sequence Number=SeqID_28983
PRRAARRRRAVVLDREGVRLLALLLLRLLGLLAAAAVGGGSPRRHAAVAHPPPPRRSDCPGVAESKNRTGRGDLQGRGREIEKAAEKRTARARLVCGVVGSEGGERGEGLNRGEGFGVDGVSGGGAWPRVGTRQW

SEQ ID NO: 94958 - protein, 70 aa, Setaria italica
  Transcript Sequence Number=SeqID_28984
  Subcellular localization annotation: CTP_CleavageSite=56; ConfidenceScore=5.24e-01
CAVLATYCISSCPLFYLLANPVQDVWFTKTKVTSWFLFSSFVVGPTVIAGKLVFVLSVSRQNGSINAYER

SEQ ID NO: 94959 - protein, 151 aa, Setaria italica
  Transcript Sequence Number=SeqID_28985
  Gene Ontology: Mol. function=RNA binding; Cellular component =chloroplast
  Homolog annotation: Hit_ID=B6TW67; Match level="QueryCoverage=99%, HitCoverage=38%, E-value=7e-68, Identity=84%"; Hit description=CFM6
  Pfam annotation: Domain name=CRS1_YhbY; Domain location=43-127; Score= 107.8; E_value=3.7e-29; Accession=PF01985.13; Description=CRS1  YhbY domain
PTAEARLKYKIDKAKLKEAMLVEKLKKYEVAKAQGPMAKPDDLSCEERFYLKKVSQKKSNYVPVGRRGVFGGVILNMHLHWKKHETVKVICKPCKPGQIQEYANEIARLSGGIPVNIIGDDTIVFYRGKNYVQPEVMSPVDTLSKKRHLKN

SEQ ID NO: 94960 - protein, 64 aa, Setaria italica
  Transcript Sequence Number=SeqID_28986
  Gene Ontology: Mol. function=protein tyrosine kinase activity; Biological process=protein amino acid phosphorylation
MEQLRQLGEAVGSINALMAFEPELRVNPRQCRLLADACAHALAAVTGEVRASLRFEERGTKWRA

SEQ ID NO: 94961 - protein, 77 aa, Setaria italica
  Transcript Sequence Number=SeqID_28987
PRPRAAAAGTTTRRPRRSLHEERPRAAPPHAAASAPLLLLACAVDAPPPLCSALATCSAARRFPLPPLCVLCGRAIE

SEQ ID NO: 94962 - protein, 60 aa, Setaria italica
  Transcript Sequence Number=SeqID_28988
MEYQGQHGHATNQANEYGNPVAAGHGATGVGAAGDQVQPMRDDHKTDGLLRRSGSSSSSS

SEQ ID NO: 94963 - protein, 79 aa, Setaria italica
  Transcript Sequence Number=SeqID_28989
  Gene Ontology: Mol. function=peptidase activity; Biological process =lipid transport
  Homolog annotation: Hit_ID=Q39100; Match level="QueryCoverage=96%, HitCoverage=57%, E-value=1e-14, Identity=57%"; Hit description=ExtA protein
  Pfam annotation: Domain name=Tryp_alpha_amyl; Domain location=1-76; Score=29.6; E_value=1.3e-05; Accession=PF00234.14; Description =Protease inhibitorseed storageLTP f
LQVCASVLDGLVKISLPEEREKCCRLLDGLVDIDAAACLCTVLKTNLLGISLHVPIDISLSLNRCGRKDYPPGLTCPRY

SEQ ID NO: 94964 - protein, 92 aa, Setaria italica
  Transcript Sequence Number=SeqID_28990
  Subcellular localization annotation: CTP_CleavageSite=31; ConfidenceScore=5.48e-01
PARRQPPVLPLRGGRLPLPHLRTRLRRRPVRASAARLRTPTHRRRCKPARGWLFVRFKDSLIWLALAGEVISNHTCTVKKVNGLEVRVNMED

SEQ ID NO: 94965 - protein, 137 aa, Setaria italica
  Transcript Sequence Number=SeqID_28991
  Gene Ontology: Mol. function=protein serine/threonine kinase activity; Cellular component=integral to membrane; Biological process=protein amino acid phosphorylation
  Homolog annotation: Hit_ID=B9RWM9; Match level="QueryCoverage=100%, HitCoverage=11%, E-value=2e-70, Identity=86%"; Hit description =Leucine-rich repeat receptor protein kinase EXS, putative
  Pfam annotation: Domain name=Pkinase; Domain location=1-137; Score= -82.4; E_value=0.0014; Accession=PF00069.17; Description=Protein kinase domain
  Pfam annotation: Domain name=Pkinase_Tyr; Domain location=1-134; Score=-139.8; E_value=0.0002; Accession=PF07714.9; Description =Protein tyrosine kinase
  Pfam module annotation: Pfam domain module=Pkinase::Pkinase_Tyr; Domain location=1-137::1-134
HKNIVRFLGCCWNKTTRLLMYDYMANGSLGAVLHERRGAGAQLEWDVRYRIVLGAAQGLAYLHHDCVPPIVHRDIKANNILIGLDFEAYIADFGLAKLVEDGDFGRSSNTVAGSYGYIAPEYGYMMKITEKSDVYSY

SEQ ID NO: 94966 - protein, 123 aa, Setaria italica
  Transcript Sequence Number=SeqID_28992
EKSLEIRTFASSSSDSSSHSSGTRETDSWVMHDAEHDHSGLMLQPHDDLERIYNVLEQYDDLMKDELASDDVYGSAAHIMDEKLYSNGVDDFQILSTGQGGYHGEKKLTVDQEFEQYFSNLML

SEQ ID NO: 94967 - protein, 364 aa, Setaria italica
  Transcript Sequence Number=SeqID_28993
  Gene Ontology: Mol. function=methyltransferase activity; Cellular component=plasma membrane; Biological process=metabolic process
  Homolog annotation: Hit_ID=Q00TN0; Match level="QueryCoverage=82%, HitCoverage=32%, E-value=4e-75, Identity=45%"; Hit description =UbiE/COQ5 methyltransferase (ISS)
MSGRKNAGRTSPWLLILISVGCFFATYNFLTMHGRGRDGPRKFLGGAGDRDSAVSYGSGSGSDPAKRFHVALTATDALYSQWQSRIMHYWYKEMRNRPGSDMGGFTRILHSGKPDGLMDEIHTMVVDPLPEGKDKGYIVLNRPWAFVQWLQRAKIEEDYILMAEPDHVFVKPLPNLAHGDEPAAFPFFYIKPTENEKILRKFFPEEKGPVSKIDPIGNSPVIIKKAQLEKIAPTWMNVSLKMKEDQETDKAFGWVLEMYAYAVASALHGVHHSLRKDFMIQPPWDLKTDNTFIIHYTYGCDYTMKGQLTYGKIGEWRFDKRSYIQSPPPRNLSLPPPGVPESVVTLVKMVNEATANIPGWEDER

SEQ ID NO: 94968 - protein, 133 aa, Setaria italica
  Transcript Sequence Number=SeqID_28994
  Gene Ontology: Mol. function=microtubule motor activity; Cellular component=microtubule associated complex; Biological process =microtubule-based movement
  Homolog annotation: Hit_ID=Q0DV28; Match level="QueryCoverage=99%, HitCoverage=13%, E-value=4e-53, Identity=78%"; Hit description =Armadillo repeat-containing kinesin-like protein 1
  Pfam annotation: Domain name=Arm; Domain location=10-50; Score=10.6; E_value=0.54; Accession=PF00514.15; Description=Armadillobeta -catenin-like repeat
  Pfam annotation: Domain name=Arm; Domain location=51-92; Score=30.4; E_value=7.4e-06; Accession=PF00514.15; Description=Armadillobeta -catenin-like repeat
  Pfam annotation: Domain name=Arm; Domain location=93-133; Score=2.1; E_value=6.6; Accession=PF00514.15; Description=Armadillobeta-catenin- like repeat
  Pfam module annotation: Pfam domain module=Arm::Arm::Arm; Domain location=10-50::51-92::93-133
RKIREALSGQRGTISKIFEEVGLANVLALLKSEDLDVQIHAVKVVANLAAEDINQERIVEEGGLDALLSLLETSENTTIHRVTAGAVANLAMNGSNQGVIMNKGGARLLANVASKTDDPQTLRMVAGAIANLC

SEQ ID NO: 94969 - protein, 84 aa, Setaria italica
  Transcript Sequence Number=SeqID_28995
  Subcellular localization annotation: CTP_CleavageSite=52; ConfidenceScore=5.29e-01
NGGITCHADLPYYNSTLQVSLHVLRSKKTTMPQHKTSNLTSDYDLLSAVAFRASSAVTLCGTKSERNFKPFWVQTAVEKIYSLN

SEQ ID NO: 94970 - protein, 134 aa, Setaria italica
  Transcript Sequence Number=SeqID_28996
  Gene Ontology: Mol. function=transferase activity, transferring glycosyl groups; Biological process=metabolic process
  Homolog annotation: Hit_ID=B6TRK5; Match level="QueryCoverage=100%, HitCoverage=28%, E-value=1e-45, Identity=68%"; Hit description =Anthocyanidin 3-O-glucosyltransferase
GRHAKTNLEDLTVVPDYVPFPTTVAYRAFEAREIFEPGLVPDDSGVSEGYRFAMAIQGSQLVGIRSSVGFEPEWLRVLGELYQKPVIPVGLFPPPPTQDVAGHEATLQWLNRQAPRSVVYAAFGSEAKLASAQL

SEQ ID NO: 94971 - protein, 91 aa, Setaria italica
  Transcript Sequence Number=SeqID_28997
  Gene Ontology: Mol. function=transferase activity, transferring groups other than amino-acyl groups
  Homolog annotation: Hit_ID=Q5VP58; Match level="QueryCoverage=95%, HitCoverage=31%, E-value=3e-22, Identity=63%"; Hit description =Anthocyanin 5-aromatic acyltransferase-like
PFPCLVRSLRSSLAAALGDFLPLAGKLSYRPSAGDLVVDCSPAAVYPGVRFVEAQYDGSIGDMRRLACGEEHDPEDLLRLGPELEVGASRP

SEQ ID NO: 94972 - protein, 43 aa, Setaria italica
  Transcript Sequence Number=SeqID_28998
NSDRKRICHVADAAPICIPDQIIFYNQFSKLQLQNAAVDSQHL

SEQ ID NO: 94973 - protein, 529 aa, Setaria italica
  Transcript Sequence Number=SeqID_28999
  Gene Ontology: Mol. function=ribonuclease III activity; Biological process=RNA processing
  Homolog annotation: Hit_ID=B9T4J0; Match level="QueryCoverage=89%, HitCoverage=88%, E-value=0.0, Identity=77%"; Hit description=RNA binding protein, putative
  Pfam annotation: Domain name=Ribonuclease_3; Domain location=185-275; Score=60.7; E_value=5.6e-15; Accession=PF00636.18; Description=RNase3 domain
  Subcellular localization annotation: CTP_CleavageSite=30; ConfidenceScore=5.64e-01
MAPPAMAFQVLTLTPLPLSLPSSNRRFRVRVLAVAADQTPPPPPVPPSEPANSPSRLLRELAQRKKAVSPKKKHPPRRFILKPPLDDERLTRRFLSSPQLSLKALPLLSSCLPSAPLSTADRTWMDEYLLEAKQALGYPLAPSETLGEGDDCPARHFDVLLYLAFQHLDPSCERTRTRHVRNGHSRLWFLGQYVLELAFCEFFLQRYPRESPGPMRERVFALIGKKVLPKWLKAASLHNLVFPYDDLDKMIRKDREPPSKAVFWALFGAIYLCFGMPEVYRVLFEAFGMDPDDESCQPKLRRQLEDVDYVSVEFEKRQLTWQDVAAYRPPPDALFAHPRLFRACVPPGMHRFRGNIWDFDSRPKVMNTLGYPLPMNDRIPEITEARNIELGLGLQLCFLHPSKHKFEHPRFCFERLEYVGQKIQDLVLAERLLMKHLDAPGRWLAEKHRRMLMNKYCGRYLRDKHLHHYVIYGESVQEKFEHNRRLRNPSTTSVQQALHGLAYCVYGKPDVRRLMFEVFDFEQVQPKAV

SEQ ID NO: 94974 - protein, 280 aa, Setaria italica
  Transcript Sequence Number=SeqID_29000
  Gene Ontology: Mol. function=aspartic-type endopeptidase activity; Cellular component=chromatin; Biological process=DNA integration
  Homolog annotation: Hit_ID=Q01JL4; Match level="QueryCoverage=100%, HitCoverage=34%, E-value=1e-126, Identity=78%"; Hit description =H0112G12.6 protein
  Pfam annotation: Domain name=RVT_2; Domain location=1-80; Score= -110.0; E_value=8e-09; Accession=PF07727.6; Description=Reverse transcriptase (RNA-dependent DNA pol
LYVDDIVLTASSPSLLRRIITSLQQEFAMKDLGVLHHFLGVTVEPRQAGLFLHQRQYTLDILERAGMTDCKPCSTPVDTQAKLSEAAGTPVTDATAYRSLAGALQYLTFTRPDITYAVQQICLHMHDPREPHLTALKRLLRYLRGTVDYGLLLHRSPSTELVVYTDADWAGCPDTRRSTSGYAVFLGGNLVSWSSKRQPVVSRSSAEAEYRAVANGVAEASWLRQLLVELHTPSSRSTLVYCDNVSAVYLSTNPVQHQRTKHVEIDLHFVRDRVAIGDVR

SEQ ID NO: 94975 - protein, 95 aa, Setaria italica
  Transcript Sequence Number=SeqID_29001
  Gene Ontology: Mol. function=hydrolase activity
  Homolog annotation: Hit_ID=B6TUZ9; Match level="QueryCoverage=73%, HitCoverage=25%, E-value=3e-20, Identity=68%"; Hit description =Receptor protein kinase-like protein
MLLLLLLLLLLASSPAALADVPPSDKLIFILAGQSNMAGRGGVVANRWDGVVPSDCAPSPSVLRLSPDLRWEQAREPLHQGIDASNNHAVGVGPG

SEQ ID NO: 94976 - protein, 83 aa, Setaria italica
  Transcript Sequence Number=SeqID_29002
LAPRLHVLLLARRRRVGLHVFLGHELVLLDLVAAPVARAVHDVDVHGAGVAALPCLPPRQQEATNRGEAQRLVIYGGLANCTS

SEQ ID NO: 94977 - protein, 80 aa, Setaria italica
  Transcript Sequence Number=SeqID_29003
  Subcellular localization annotation: CTP_CleavageSite=28; ConfidenceScore=5.28e-01
MSMALSRFTQWLWPGGAAARVSTHELSSAGLTSSSFPDFPSGFREPDTVTFYTGGGGGAGGRRTRPRRVRNRRRSRGESR

SEQ ID NO: 94978 - protein, 152 aa, Setaria italica
  misc_feature (123)..(123): Xaa can be any naturally occurring amino acid
  misc_feature (134)..(134): Xaa can be any naturally occurring amino acid
  Transcript Sequence Number=SeqID_29004
  Subcellular localization annotation: CTP_CleavageSite=52; ConfidenceScore=5.28e-01
ASKPSSNKPRQKKPSSDFNATEGFYYYAGFGPFRSKRHCRSGGTNEPVPAVKQEEEEVPEDASPPAADQAQTAEDTNRAAPHNDVSSCDDDIAGIAGVDEDSSDDDYDGIGIAGSSMDGSGDXHASNGDGKRKXPWKRWRKPVKARSLKSLM

SEQ ID NO: 94979 - protein, 120 aa, Setaria italica
  misc_feature (29)..(29): Xaa can be any naturally occurring amino acid
  Transcript Sequence Number=SeqID_29005
  Gene Ontology: Mol. function=drug transporter activity; Cellular component=membrane; Biological process=multidrug transport
  Homolog annotation: Hit_ID=Q10A00; Match level="QueryCoverage=91%, HitCoverage=22%, E-value=7e-38, Identity=69%"; Hit description=MATE efflux family protein, expressed
MQCHVRFLQMQRLVLPVDAVLWHRSPGAXHPAVCWLLVNRLGLGSKGVALANAVSYLVNLSLMALYIRLSPSCKATWTGFSGEAFRGIPGFLKLAVPSAAMVCMEWWSFELLVLLAGLLP

SEQ ID NO: 94980 - protein, 79 aa, Setaria italica
  Transcript Sequence Number=SeqID_29006
  Subcellular localization annotation: CTP_CleavageSite=43; ConfidenceScore=5.02e-01
SFPDRMFETPHLGVGTEAINLHRLATARRGGDGGRSSRREPCRRSQPGSPCGGSCFSSSPFSRSTPSAGPKTLAPTPIT

SEQ ID NO: 94981 - protein, 109 aa, Setaria italica
  misc_feature (7)..(7): Xaa can be any naturally occurring amino acid
  Transcript Sequence Number=SeqID_29007
  Gene Ontology: Mol. function=oxidoreductase activity, acting on the CH-OH group of donors, NAD or NADP as acceptor; Biological process =metabolic process
  Homolog annotation: Hit_ID=B6U1W6; Match level="QueryCoverage=97%, HitCoverage=16%, E-value=6e-45, Identity=83%"; Hit description =Angustifolia
AMSSRDXVVSSSSRFASPEDFKYKQKSLVDSPMEITSEKKVPILLSRKYPDKLKDGFVVALRARDNSGYHVARQRVVGGGGWILDVVSNATNRDPAAQFLVTFKNKVCL

SEQ ID NO: 94982 - protein, 536 aa, Setaria italica
  Transcript Sequence Number=SeqID_29008
  Gene Ontology: Mol. function=oxidoreductase activity, acting on the CH-OH group of donors, NAD or NADP as acceptor; Cellular component =cytoplasm; Biological process=metabolic process
  Homolog annotation: Hit_ID=B6U1W6; Match level="QueryCoverage=100%, HitCoverage=82%, E-value=0.0, Identity=82%"; Hit description =Angustifolia
  Pfam annotation: Domain name=2-Hacid_dh_C; Domain location=16-208; Score=88.2; E_value=3e-23; Accession=PF02826.11; Description=D -isomer specific 2-hydroxyacid dehydr
  Subcellular localization annotation: CTP_CleavageSite=73; ConfidenceScore=5.02e-01
VHVDANRAEEVADTVMALILGLLRRTHLLSRQASSAPAAVAAGWLGSVQPMCRGMRRCRGLVLGIIGRSAAARCLATRSLAFRMSVLYFDPRYVANGETKRPSIVFPSAARRMDTLNDLLAASDLVSLHCALTNDTMHILNADCLQHIKPGAFIVNTGSCQLIDDCALKQLLIDGTIAGCALDGAEGPQWMEAWVREMPNVLILPRSADYSEEVWMEIREKAITMLQSFFFDGILPTSAISDEDDEISEAGNEDDHLDTQAKDSQSQIFDAEIDESHLTLEYEKKRAVSHHKEPQASGKSVNIGSRSEGRRSRSGKKGKKRPAHRRSQQKPDDLSAVESDSNYSSRRDDDTAMSSRDQVVSSSSRFASPEDSKYKQKSLVDSPMEITSEKKVPILLSRKYPDKLKDGFVVALRARDNSGYHVARQRVVGGGGWILDVVSNATNRDPAAQFLVTFKNKDTMGLRSFVAGGKLLQINRKTEFVFASHSFDVWESWMLDGSLLEGCKLINCRNPSAVLDVCIEILAAASEEDGVTRWLD

SEQ ID NO: 94983 - protein, 117 aa, Setaria italica
  Transcript Sequence Number=SeqID_29009
  Gene Ontology: Mol. function=electron carrier activity; Biological process=oxidation reduction
  Homolog annotation: Hit_ID=Q6Z6D6; Match level="QueryCoverage=96%, HitCoverage=20%, E-value=1e-44, Identity=80%"; Hit description =Cytochrome P450 monooxygenase
HVGRSVAALAEEWRAMAASGGSGEVEVDVAEWFQAVTEEAITRATFGRSYHDGRAVFAMQGRLMAFASEAFRKVLVPGYRFLPTKKNWQSWKLDREIRRSLTRLIARRSDEAEAENA

SEQ ID NO: 94984 - protein, 111 aa, Setaria italica
  misc_feature (98)..(98): Xaa can be any naturally occurring amino acid
  Transcript Sequence Number=SeqID_29010
  Gene Ontology: Mol. function=DNA binding; Cellular component=nucleus; Biological process=regulation of transcription
  Homolog annotation: Hit_ID=Q6H7C6; Match level="QueryCoverage=100%, HitCoverage=34%, E-value=5e-47, Identity=78%"; Hit description =ATMYB4-like protein
  Pfam annotation: Domain name=Myb_DNA-binding; Domain location=15-62; Score=48.6; E_value=2.4e-11; Accession=PF00249.23; Description=Myb -like DNA-binding domain
  Pfam annotation: Domain name=Myb_DNA-binding; Domain location=68-111; Score=20.5; E_value=0.0068; Accession=PF00249.23; Description=Myb -like DNA-binding domain
  Pfam module annotation: Pfam domain module=Myb_DNA-binding::Myb_DNA -binding; Domain location=15-62::68-111
MGCRSCEKPKMNYRKGLWSPEEDQRLRDYILKHGLGCWSAVPAKAGLQRNGKSCRLRWINYLRPGLKRGMFSQEEEDVVINLQAKLGNNYTKHIAMHXPGRTDNEVKNYWN

SEQ ID NO: 94985 - protein, 298 aa, Setaria italica
  misc_feature (7)..(7): Xaa can be any naturally occurring amino acid
  misc_feature (24)..(24): Xaa can be any naturally occurring amino acid
  misc_feature (41)..(41): Xaa can be any naturally occurring amino acid
  Transcript Sequence Number=SeqID_29011
  Subcellular localization annotation: CTP_CleavageSite=70; ConfidenceScore=5.10e-01
VEGAQPXERSQRRPRSALRGALGXLPIAASFLFSFLVGLAXGLALGGLSSTASVSMPSTCRILSTGVDIRSSKVCELGLLNYRAKHVFYPSSKRRFRCHDDYYWASVFQVEYTEYFSGQLSYAVAETPKEALPHNCRPDFGAAWSTTSKFKVNESYSCRYTLGSNKADIHSDKLFNCSAEEPSTREILKRILTLFSKSYTSEDFSSERMLGYVAAGVVLGMLSSMIITVLFRGFFGLLLAAARWAVRKHSIRVFASRLKRACLLVAYVSAVGWITLQYSKFIGLKELLSDSELIERFF

SEQ ID NO: 94986 - protein, 60 aa, Setaria italica
  Transcript Sequence Number=SeqID_29012
TLIGAQQNDHQLIWRIEGKMGIYTAMSSNLQLHLEAGLPAELRSQRIMIICDSFSLLKLH

SEQ ID NO: 94987 - protein, 115 aa, Setaria italica
  misc_feature (107)..(107): Xaa can be any naturally occurring amino acid
  Transcript Sequence Number=SeqID_29013
  Subcellular localization annotation: CTP_CleavageSite=67; ConfidenceScore=5.23e-01
GPVPACPLGELGKTPPARRNHSWWRGKPDPTWRTNPSSRRRRGPPSAPRVAWGGWRRRPGGSEGGARHGMGRKAEARHDGGSARRRHKLGAWMGGVSAWRRRGWARXRIRGWEEH

SEQ ID NO: 94988 - protein, 298 aa, Setaria italica
  Transcript Sequence Number=SeqID_29014
  Gene Ontology: Mol. function=pyridoxal phosphate binding; Cellular component=plasma membrane
  Homolog annotation: Hit_ID=B9R9I6; Match level="QueryCoverage=81%, HitCoverage=37%, E-value=2e-42, Identity=37%"; Hit description =Molybdopterin cofactor sulfurase, putative
STKYLRSKNAPAGGGGGGRGGGDEMAPAASNREHRDRDRDRDRDLYLCLPGCVPVRAKRGSTTAASAATVTTTTRTSRHNFVKAAASGLLAGAQFTNHESLPPLPDAYAEFAAAFPLYGALARADAIRDEEYPHLDRHVCLDYTGINLFSHAQMNSSLPSTSAPPASAASVAWQPPFFDIAYKSASLRAQVQCGDAATGVGAAVTRRIMASLKIPEDEYAMVCTANRTTAFRLLAESYSFQPGKQLLPVYDYESEAVAAMADSARRRGAEVTPASFAWPSMRIHGADLRKKLCRGRRR

SEQ ID NO: 94989 - protein, 197 aa, Setaria italica
  misc_feature (147)..(147): Xaa can be any naturally occurring amino acid
  misc_feature (190)..(190): Xaa can be any naturally occurring amino acid
  Transcript Sequence Number=SeqID_29015
  Homolog annotation: Hit_ID=B6SSC4; Match level="QueryCoverage=100%, HitCoverage=30%, E-value=4e-92, Identity=82%"; Hit description =Pentatricopeptide repeat protein PPR868-14
ACRLHKNMALGQRIADYLVANGLANSGMYVLLSNIYAAVGNWREVGRVRSMMKASGIQKEPGCSAIEVGRRVSEFVAGDTSHPRTDEIYAKLEEVMSVVVREHGHVPQTELVLHDLDEAAKEKALAVHSEKLAVAFGLISTPPGETXIKIVKNLRACADCHAVMKLVSKITGRRIVFRDRNRFHHFVDGXCSCGITW

SEQ ID NO: 94990 - protein, 115 aa, Setaria italica
  Transcript Sequence Number=SeqID_29016
  Subcellular localization annotation: CTP_CleavageSite=3; ConfidenceScore=5.04e-01
LFRASANPPREWREAPPPGCSPAPLVPSAPSHHHHRAPRPLFLLPNSRSKITTSSSNLPRPSPGREPGPSLFHEISDIVAPAVSGAALRPELNDEACRDDHGAAGVRCGGRCSEE

SEQ ID NO: 94991 - protein, 130 aa, Setaria italica
  misc_feature (86)..(86): Xaa can be any naturally occurring amino acid
  Transcript Sequence Number=SeqID_29017
MAALRCYCLQSTATIVQRRKSSRKMMIRASMDACPSSELKKSPKSVSFTGKVHKVYEDKNMGILCYTDKNGELVCEGLDEGPRLTXGQDMEKLNMEKNAKNQGDQMQRTLPVAGIIDWSSLPAAISMGKN

SEQ ID NO: 94992 - protein, 357 aa, Setaria italica
  Transcript Sequence Number=SeqID_29018
  Gene Ontology: Mol. function=signal transducer activity; Cellular component=plasma membrane; Biological process=response to light stimulus
  Homolog annotation: Hit_ID=Q8GVF8; Match level="QueryCoverage=67%, HitCoverage=59%, E-value=5e-64, Identity=54%"; Hit description=NPH3 domain containing protein-like
  Pfam annotation: Domain name=NPH3; Domain location=201-357; Score =15.4; E_value=1.9e-11; Accession=PF03000.6; Description=NPH3 family
LPSDVVFEVHDMTFHLHKFPLMAKSRKIHRMLTEQEEQRPARGRRRRRSSDGGDSGDDGAAETEIEEADDEEEEGAEEQQVRREDDGQVYSIAFPDFPGGPGTFEAAAKFCYGVRVDLTAWNVAPLRCAAEYLEMTEDHAEDNLAARAEAYLDKTVLQHPGDATKALKSCEELLPLAEELGIVARCVEAIAARSSATSRSWFDDLAVLGLRMYKRVMAAMAARDDVRAEARESCLVSYARGTIPGLSRSMRRRLASAPVSSEVEQKELLEAVVASLPADRCSGRVVTAKFLFALLRTAHILRASDAARAALERKAATQLEQATLEDVLIPSYSGAAETLYDVDCVERIVGYFLAEEE

SEQ ID NO: 94993 - protein, 74 aa, Setaria italica
  Transcript Sequence Number=SeqID_29019
CFTQELVRTELQIASQTACQAKMASSLSSRALLAGAVLVAAALLLPARHAMATNDDKARAPTSANDKAAPAPSY

SEQ ID NO: 94994 - protein, 66 aa, Setaria italica
  Transcript Sequence Number=SeqID_29020
PSRSAKFLQQLKLHGRTRVLPLLSLCIALLLHHVLSHMLSFGCRTCNCSIWHLDAHLRRRALLDLT

SEQ ID NO: 94995 - protein, 81 aa, Setaria italica
  Transcript Sequence Number=SeqID_29021
  Gene Ontology: Mol. function=protein serine/threonine kinase activity; Biological process=protein amino acid phosphorylation
  Homolog annotation: Hit_ID=Q6ZK06; Match level="QueryCoverage=100%, HitCoverage=10%, E-value=7e-22, Identity=63%"; Hit description =Putative wall-associated serine/threonine kinase
IAIDQSGVTTGIQGTFGYLDPEYYYTRRLTDKSDVYSYGVMLVELLTRKKIMYISPEGVGLVAHFVTSLDQGELNEILDEQ

SEQ ID NO: 94996 - protein, 253 aa, Setaria italica
  misc_feature (154)..(154): Xaa can be any naturally occurring amino acid
  Transcript Sequence Number=SeqID_29022
  Gene Ontology: Mol. function=transferase activity; Cellular component= endoplasmic reticulum membrane; Biological process=determination of left/right symmetry
  Homolog annotation: Hit_ID=B9SXX8; Match level="QueryCoverage=99%, HitCoverage=54%, E-value=5e-66, Identity=53%"; Hit description =Dolichyl-phosphate beta-glucosyltransferase, putative
GMLHSRGELLLMLDADGATKVTDLEKLEAQVHALAQKVNSSPGTSTGSPQKVSDVEIAVFGSRAHLEKQALATVNLLTPGYPQLHDFLSFSPYLFVFIYDLSQRKWYRNFLMKGFHLVVLLTAGPGIRDTQVCFICLISSNKRVQLILHVLSSXLHCSLSTICAFFYKFQCGFKMFTRAAARKLFTNIRLKRWCFDVELVYLCKHLRIPMVEVSVNWTEIPGSKVRMTSIMHMVFELLLIRVGYGLGIWKIYT

SEQ ID NO: 94997 - protein, 351 aa, Setaria italica
  Transcript Sequence Number=SeqID_29023
  Gene Ontology: Mol. function=transferase activity; Cellular component= endoplasmic reticulum membrane; Biological process=determination of left/right symmetry
  Homolog annotation: Hit_ID=B9SXX8; Match level="QueryCoverage=82%, HitCoverage=87%, E-value=1e-127, Identity=73%"; Hit description =Dolichyl-phosphate beta-glucosyltransferase, putative
  Pfam annotation: Domain name=Glycos_transf_2; Domain location=86-283; Score=84.5; E_value=3.8e-22; Accession=PF00535.18; Description =Glycosyl transferase
MVAVAWPLSAVAGLIPASTTLTLLIATLVSILVLGAAAFFFEHIRRIGCMHSLERSAVSDAFFEDPNSLNKVPCPSIFDPPEKYISLIVPAYNEEHRLPEALTETLNYLKRRAAADKSFSYEVLIVDDGSTDRTSKVGFKFVKEHKIDNVRVLLLGRNHGKGEAVRKGMLHSRGELLLMLDADGATKVTDLEKLEAQVHALAQKVNSSPGTSTGSPQKVSDVEIAVFGSRAHLEKQALATRKWYRNFLMKGFHLVVLLTAGPGIRDTQCGFKMFTRAAARKLFTNIRLKRWCFDVELVYLCKHLRIPMVEVSVNWTEIPGSKVRMTSIMHMVFELLLIRVGYGLGIWKIYT

SEQ ID NO: 94998 - protein, 44 aa, Setaria italica
  Transcript Sequence Number=SeqID_29024
LLQFITQKQGKYSLIKQKWAATVRWESVHFICNHPSKITEKPQN

SEQ ID NO: 94999 - protein, 78 aa, Setaria italica
  Transcript Sequence Number=SeqID_29025
  Gene Ontology: Mol. function=hydrolase activity, hydrolyzing O -glycosyl compounds; Biological process=carbohydrate metabolic process
  Homolog annotation: Hit_ID=A6N1U5; Match level="QueryCoverage=98%, HitCoverage=72%, E-value=3e-26, Identity=71%"; Hit description=Endo -1,4-beta-xylanase (Fragment)
PAALVNADGTVNGAGQRFVELRNEWTTDARGRLDGDGQFRFRGFHGTYVAQVTTAAGKMLKAFTVDKGDAALVLDMDV

SEQ ID NO: 95000 - protein, 110 aa, Setaria italica
  Transcript Sequence Number=SeqID_29026
  Gene Ontology: Mol. function=hydrolase activity, hydrolyzing O -glycosyl compounds; Biological process=carbohydrate metabolic process
  Homolog annotation: Hit_ID=B6SW51; Match level="QueryCoverage=100%, HitCoverage=19%, E-value=3e-27, Identity=55%"; Hit description=Endo -1,4-beta-xylanase
WTEIKGAFRLKKSPCAAAVYVQGAPAGVDVKVMDLQVYATDRRARFRKLRRKTDKVRKRDVVLNFGSAASGISGASVRVFQMDSSFPFGACINPSVIQNPAFVDFFTKHF

SEQ ID NO: 95001 - protein, 261 aa, Setaria italica
  misc_feature (55)..(55): Xaa can be any naturally occurring amino acid
  Transcript Sequence Number=SeqID_29027
  Gene Ontology: Mol. function=hydrolase activity, hydrolyzing O -glycosyl compounds; Biological process=carbohydrate metabolic process
  Homolog annotation: Hit_ID=B6SW51; Match level="QueryCoverage=88%, HitCoverage=40%, E-value=6e-74, Identity=58%"; Hit description=Endo -1,4-beta-xylanase
  Pfam annotation: Domain name=Glyco_hydro_10; Domain location=109-261; Score=-131.8; E_value=4.3e-05; Accession=PF00331.12; Description =Glycosyl hydrolase family 10
EDGAGHPVRVSIRVGGDGDGSRVVDGGAVCAEPGRWAEIKGAFRLKESRGAAAVXVHGAPAGVDVKVMDLRIIATDRKARFSHLKDKTDKVRKRDVVLRCASAASAGASVRVVQLDNAFPLGSCINCEVIKIPAFVDFFTTHFDWAVFENELKWYWTEAQRGQLNYADADRLLDFCDRAGKPVRGHCIFWAVDGDVQQWIKDIPAGDRDQLAAAVESRVRGLLGRYAGRFPHYDVNNEMLHGRFFRDRLGDAVAPLMFREA

SEQ ID NO: 95002 - protein, 130 aa, Setaria italica
  misc_feature (105)..(105): Xaa can be any naturally occurring amino acid
  Transcript Sequence Number=SeqID_29028
  Gene Ontology: Mol. function=hydrolase activity, hydrolyzing O -glycosyl compounds; Biological process=carbohydrate metabolic process
  Homolog annotation: Hit_ID=Q5ZCK6; Match level="QueryCoverage=100%, HitCoverage=22%, E-value=1e-37, Identity=63%"; Hit description =Putative (1,4)-beta-xylan endohydrolase
ELDVCESDVDLRAEDLEVVLREAYAHPAVEGVVFWGFMQGHMWRQDACLVNSDGTVNDAGERPVANQTNRLSITDSRTPNRSTKNRIWPTDYRWLTCTLCSAPAXFVDLRREWTSHARGHIDSAGHFKFR

SEQ ID NO: 95003 - protein, 192 aa, Setaria italica
  misc_feature (163)..(163): Xaa can be any naturally occurring amino acid
  Transcript Sequence Number=SeqID_29029
  Gene Ontology: Mol. function=hydrolase activity, hydrolyzing O -glycosyl compounds; Biological process=carbohydrate metabolic process
  Homolog annotation: Hit_ID=Q5ZCK6; Match level="QueryCoverage=93%, HitCoverage=45%, E-value=5e-67, Identity=71%"; Hit description =Putative (1,4)-beta-xylan endohydrolase
  Pfam annotation: Domain name=Glyco_hydro_10; Domain location=1-180; Score=-97.0; E_value=6.9e-07; Accession=PF00331.12; Description =Glycosyl hydrolase family 10
VTSFLVVLPSPAYAGRFPHYDVNNEMLHGRFFRDRLGDAVAPLMFREAARLDPGAALFVNDYNVECGNDPNATPEKYVELIAELQRGGAQVGGIGLQGHVSNPVGEVICDALDKLSAATGLPVWITELDVCEADEALRADDLEVVLREAYAHPAVEGVMLWGXFMQGHMWRSHGQLVNADGIVFYRRFRFLV

SEQ ID NO: 95004 - protein, 570 aa, Setaria italica
  misc_feature (211)..(211): Xaa can be any naturally occurring amino acid
  Transcript Sequence Number=SeqID_29030
  Gene Ontology: Mol. function=hydrolase activity, hydrolyzing O -glycosyl compounds; Biological process=carbohydrate metabolic process
  Homolog annotation: Hit_ID=B6SW51; Match level="QueryCoverage=100%, HitCoverage=100%, E-value=0.0, Identity=77%"; Hit description=Endo-1, 4-beta-xylanase
  Pfam annotation: Domain name=CBM_4_9; Domain location=11-180; Score =27.0; E_value=1.4e-05; Accession=PF02018.9; Description=Carbohydrate binding domain
  Pfam annotation: Domain name=Glyco_hydro_10; Domain location=220-514; Score=202.9; E_value=8.7e-58; Accession=PF00331.12; Description =Glycosyl hydrolase family 10
  Pfam module annotation: Pfam domain module=CBM_4_9::Glyco_hydro_10; Domain location=11-180::220-514
MACTQEVVFDVNLIENSALEDGLAGWAPVGSCTALSVHEEEPAKVPTETINDVAEDYRPSGRYILASGRADETDGLRQAIKGALKPRVTYRVSGWISLGGGAATTAEEGAGGHAVCVNLRLDDECVVKGGAVCAEVGRWTEIKGAFRVDDDEPPRCAKVYVHGPPAGVDIKVMDLQVCAVNKIPRLRHLRKKADRVRKRDVILKVSDRARXGVSSISGASVRVFQLDNSFPFGTCINPRVIQNPAFVDFFTKHFDWAVFENELKWYHTEAQQGQLNYADSDALLDFCDQHGKPVRGHCIFWAVENTVQQWVKNLDDDQLKSAVQERLQSLLTRYAGRFPHYDVNNEMLHGSYYRSRLGDDIDAFMFRETARLDPGATLFVNDYNVEGGSDPNATPEKYIEQIAALQQKGAAVGGIGLQGHVTNPVGEVICDALDKLSAATDLPVWLTELDVCESDVDLRAEDLEVVLREAYAHPAVEGVVFWGFMQGHMWRQDACLVNSDGTVNDAGERFVDLRREWTSHARGHIDSAGHFKFRGYHGSYVVQLATATGKVHKTFSVEKGDTPLVLDMNL

SEQ ID NO: 95005 - protein, 70 aa, Setaria italica
  Transcript Sequence Number=SeqID_29031
  Subcellular localization annotation: CTP_CleavageSite=54; ConfidenceScore=5.29e-01
NNGVIEGFSSMVLHHRVFVTFLNFISSAFFSFHSLQIACFVSITRFRTLVFTKEGSHKSEGRIRWHHIPK

SEQ ID NO: 95006 - protein, 113 aa, Setaria italica
  Transcript Sequence Number=SeqID_29032
  Gene Ontology: Mol. function=transcription regulator activity; Cellular component=nucleus; Biological process=regulation of transcription
  Homolog annotation: Hit_ID=Q2QLR0; Match level="QueryCoverage=68%, HitCoverage=22%, E-value=2e-22, Identity=72%"; Hit description=Helix- loop-helix DNA-binding domain containing protein
  Pfam annotation: Domain name=HLH; Domain location=26-75; Score=54.6; E_value=3.8e-13; Accession=PF00010.18; Description=Helix-loop-helix DNA-binding domain
TRSLPELTCGPPLTRRTGLKSVGSMYAQDHIIAERKRREKINQRFIELSTVIPGLKKMDKATILSDATKYVKELQEKLKDLEAGGSNGHRSIETVVVVKRPCLHAPAVPDDDR

SEQ ID NO: 95007 - protein, 69 aa, Setaria italica
  Transcript Sequence Number=SeqID_29033
QAAGGRPVPQLDINERRRGTTLTLRPRARGSFGNDSWLASSLASSWLSLSIDRSLHDQEVITCTLSYGL

SEQ ID NO: 95008 - protein, 109 aa, Setaria italica
  Transcript Sequence Number=SeqID_29034
  Gene Ontology: Mol. function=glycerol-3-phosphate O-acyltransferase activity; Cellular component=integral to membrane; Biological process=phospholipid biosynthetic process
  Homolog annotation: Hit_ID=B6TCX0; Match level="QueryCoverage=96%, HitCoverage=21%, E-value=1e-44, Identity=75%"; Hit description =Glycerol-3-phosphate acyltransferase 8
LFAQLTDRIVPVAIDARETMFHGSTARGHGSMDPYFFFMNPRPAYEVTFLNQLPRELTCGGGRSPVEVASYVQKVLAAQLGFECTGITRKDKYGILAGSEGRVPSKKEG

SEQ ID NO: 95009 - protein, 58 aa, Setaria italica
  misc_feature (51)..(51): Xaa can be any naturally occurring amino acid
  Transcript Sequence Number=SeqID_29035
MDFSSGDVKAAIMRPAGVVVGGDAAAGTPALVRGWFEFQRSAAPARFLCFXSGGWVDV

SEQ ID NO: 95010 - protein, 90 aa, Setaria italica
  Transcript Sequence Number=SeqID_29036
SRSRSCRRRHASPPLAWKGKEGRRPLTVARSAGRLLVDAEFLSELREKYALPPPQRAVVANLELGIERLTADRAAPRDVKIRSLRYSIHL

SEQ ID NO: 95011 - protein, 122 aa, Setaria italica
  Transcript Sequence Number=SeqID_29037
  Gene Ontology: Mol. function=hydrolase activity, hydrolyzing O -glycosyl compounds; Biological process=carbohydrate metabolic process
  Homolog annotation: Hit_ID=B6SKG0; Match level="QueryCoverage=100%, HitCoverage=23%, E-value=7e-54, Identity=80%"; Hit description=Non -cyanogenic beta-glucosidase
NHYTSVYVSDRSNSADTGPRDYNGDVAATFRFSRNDPPTGQFIPINMPTDPQGLQCMLEYLSNTYKNVAVYVQENGYGAFFNDSIEDHKRVEYLSGYIGSTLTALRNGANVKGYFVWSFLDV

SEQ ID NO: 95012 - protein, 712 aa, Setaria italica
  Transcript Sequence Number=SeqID_29038
  Gene Ontology: Mol. function=single-stranded DNA binding; Cellular component=nucleus; Biological process=nucleotide-excision repair
  Homolog annotation: Hit_ID=Q9ATY5; Match level="QueryCoverage=90%, HitCoverage=40%, E-value=1e-126, Identity=44%"; Hit description=DNA repair protein UVH3
  Pfam annotation: Domain name=XPG_I; Domain location=116-204; Score =154.7; E_value=2.7e-43; Accession=PF00867.10; Description=XPG I -region
QSMNPNQTKCSQDVAIIGETLKSPQKDLLVDEPVADTTEPKENDTEGDLMVSTSEINYTQVGDNDDNHGISATYLDEELSRLRQEQVDLGHERRKLESHAESVSSEMFTECQELLQMFGLPYIIAPMEAEAQCAYMEMSKLVDGVVTDDSDVFLFGARNVYKNIFDDRKYVETYFMKDIESELGLTRQQLIRMALLLGSDYTEGVSGIGIVNAIEVVHAFPEEDGLQKFKEWIESPDPSIFGQLHMETSSKSKKRKPGGNYSDGKGKGLEPECDQGSDDLSANETERIKLVFMSKHRNVSKNWHIPAAFPSESVISAYITPQVDNSTEPFSWGRPDLGLLRKLCWERFGEYNKHETQLRMEAFYSFNERFAKIRSKRIKKAIKGITGKSFPDTDETEQDNPSASKTTKKKDASSSSHARGRGRGKMRSSEIRNMESPEDKETSDPNSFADVVELTKESNNTNKSKKGRPPGCSKGRGRSRKNAGHGATGSQVDSDTKYSSSASDEDSHKTHAGNYKSEGIAPRRSSRKRKQVSYMEDGDEADGNDVPVHQNSENDPGEAAANTDIVGQDTELNPVHQDASELNSNQMQTDTGTAEDISGDSQGFELREDHQADSAPKDYLFTGGGFCMEDGDEQEPAGDRCGAEMEEPGTSDPSDLIIGVSDSGKSASLSTAGECTENAGMEARGASSSEQRRNASRGLSAMPTLTKRRRKS

SEQ ID NO: 95013 - protein, 62 aa, Setaria italica
  Transcript Sequence Number=SeqID_29039
NKQVSKYMEDRSGQVCQFWSSTHGLTSTEQNGYQGVFLWHQHFWALGACILNAHPVTFRYVP

SEQ ID NO: 95014 - protein, 84 aa, Setaria italica
  Transcript Sequence Number=SeqID_29040
  Homolog annotation: Hit_ID=B6UE27; Match level="QueryCoverage=100%, HitCoverage=12%, E-value=3e-40, Identity=89%"; Hit description =Ternary complex factor MIP1
  Pfam annotation: Domain name=DUF547; Domain location=50-84; Score= -45.4; E_value=0.013; Accession=PF04784.6; Description=Protein of unknown function, DUF547
NPFHVEGLKEFSGPYNTMVEVPMISRDSRRLKEAEDLLQTYKLILYRLETVDLRRMTNEEKIAFWVNIHNALLMHAYLKNGVPQ

SEQ ID NO: 95015 - protein, 41 aa, Setaria italica
  misc_feature (17)..(17): Xaa can be any naturally occurring amino acid
  Transcript Sequence Number=SeqID_29041
PACAFLAKRILPGLGWXLSDDIVIPLATSGSVAYLIKSKRL

SEQ ID NO: 95016 - protein, 68 aa, Setaria italica
  Transcript Sequence Number=SeqID_29042
DNVLYVCPKVCVLELSCVPHTSPLPVNQIKWRERKGRGEGRRQQSILCPIPQPRNRPCFRCDQTLVCF

SEQ ID NO: 95017 - protein, 98 aa, Setaria italica
  Transcript Sequence Number=SeqID_29043
  Homolog annotation: Hit_ID=B6TDG6; Match level="QueryCoverage=88%, HitCoverage=29%, E-value=6e-13, Identity=50%"; Hit description=NAC domain-containing protein 21/22
GPAVAVAGRPCSPLKEDWVLCRVFYKSRTTTAIPACPDETSSLLSGELISLPLPQMPSADAYLAFDHGAVAAIGGYYQQDDDAGLPASHHQPALPLDK

SEQ ID NO: 95018 - protein, 112 aa, Setaria italica
  Transcript Sequence Number=SeqID_29044
  Gene Ontology: Mol. function=hydrolase activity, acting on glycosyl bonds; Biological process=cell wall organization and biogenesis
  Homolog annotation: Hit_ID=B9SPH9; Match level="QueryCoverage=99%, HitCoverage=22%, E-value=8e-23, Identity=49%"; Hit description =Polygalacturonase, putative
RTVLLPSGHRFLVSPVTLQGPCSARLTLQVDGTVLAPPDMDSWPKPRRPLQWLNFKWLNGFTIQGAGTVDGQSITSLQNSSPANAPQRSTGHWHSSGAKPTLVRFYSSFNVT

SEQ ID NO: 95019 - protein, 85 aa, Setaria italica
  Transcript Sequence Number=SeqID_29045
  Subcellular localization annotation: CTP_CleavageSite=31; ConfidenceScore=5.09e-01
TPKLLTSPVRRPPLLRPVAFFFPRFSSKISKYSEKSSSIPRRERPDGVRADHFAAAPHSDHHRRRGPLHRLPLAECPTKKHPPLP

SEQ ID NO: 95020 - protein, 189 aa, Setaria italica
  Transcript Sequence Number=SeqID_29046
  Gene Ontology: Mol. function=endonuclease activity; Cellular component=intracellular; Biological process=DNA repair
  Homolog annotation: Hit_ID=Q8W0T1; Match level="QueryCoverage=96%, HitCoverage=55%, E-value=6e-93, Identity=84%"; Hit description =Putative AP endonuclease
  Pfam annotation: Domain name=Exo_endo_phos; Domain location=4-174; Score=-15.0; E_value=0.04; Accession=PF03372.15; Description =EndonucleaseExonucleasephosphatase family
LTRNNLIAPNNGWKEEENSFQRRRKWDKRMLEFVQCVDKPLIWCGDLNVSHEEIDVSHPDFFSSAKQNGYTPPNKEDCGQPGFTLAERRRFGNILSQGKLVDAYRHLHKEKDMDSGFSWSGHPIGKYRGKRMRIDYFIVSEQLKGRVISCEMHGRGIELEGFYGSDHCPVSLELSKAATEVPEPPKPSS

SEQ ID NO: 95021 - protein, 164 aa, Setaria italica
  Transcript Sequence Number=SeqID_29047
  Gene Ontology: Mol. function=enzyme inhibitor activity; Cellular component=cell wall; Biological process=cell wall modification
FLSAAGATLNTSANSTLLDPQAEDVQTLLSAILTNQQTCADGLQAAAAAWSVRDGLSVPMVNSTKLYSVSLSLFTRAWVPAGKKSKGSKPPRHGHGRGLFDATDDEMVRRMALDGAAAAVPVVGEVTVDQGGAGNFTTVGAAVAAAPSNLGGSSGYFVIRVAAG

SEQ ID NO: 95022 - protein, 86 aa, Setaria italica
  Transcript Sequence Number=SeqID_29048
  Gene Ontology: Mol. function=nucleotide binding; Biological process =defense response
  Homolog annotation: Hit_ID=B5UBC1; Match level="QueryCoverage=82%, HitCoverage=10%, E-value=5e-11, Identity=53%"; Hit description=NBS -LRR class disease resistance protein
  Pfam annotation: Domain name=LRR_1; Domain location=31-52; Score =11.4; E_value=2; Accession=PF00560.25; Description=Leucine Rich Repeat
  Pfam annotation: Domain name=LRR_1; Domain location=54-74; Score=9.3; E_value=5; Accession=PF00560.25; Description=Leucine Rich Repeat
  Pfam module annotation: Pfam domain module=LRR_1::LRR_1; Domain location=31-52::54-74
DICGLIWLKCLVLTRCYQITELPREIGRLQNLETLYVAGTGISKLPTEIGKLQHLETLDVSDTEVTELTWIEKLQYLKTLDVSGTR

SEQ ID NO: 95023 - protein, 91 aa, Setaria italica
  Transcript Sequence Number=SeqID_29049
  Gene Ontology: Mol. function=transferase activity, transferring glycosyl groups; Biological process=metabolic process
  Homolog annotation: Hit_ID=B6SXW3; Match level="QueryCoverage=100%, HitCoverage=18%, E-value=6e-38, Identity=82%"; Hit description =Cytokinin-O-glucosyltransferase 2
LCWPFFAEQQTNCRYKCMEWGVAMEIGHDVRREAVEEKIREVMGGEKGKEMRRRAVEWRETAVRATRPGGRSYANLDKLVSDVLLSGGKSS

SEQ ID NO: 95024 - protein, 486 aa, Setaria italica
  Transcript Sequence Number=SeqID_29050
  Gene Ontology: Mol. function=GTP binding; Cellular component =intracellular
  Homolog annotation: Hit_ID=B6SXP6; Match level="QueryCoverage=99%, HitCoverage=86%, E-value=0.0, Identity=86%"; Hit description=GTP -binding protein hflX
  Pfam annotation: Domain name=Arf; Domain location=241-419; Score= -100.1; E_value=0.068; Accession=PF00025.13; Description=ADP -ribosylation factor family
  Pfam annotation: Domain name=Dynamin_N; Domain location=264-383; Score=-18.4; E_value=0.006; Accession=PF00350.15; Description =Dynamin family
  Pfam annotation: Domain name=GTP_EFTU; Domain location=259-425; Score= -29.7; E_value=3.1e-07; Accession=PF00009.19; Description=Elongation factor Tu GTP binding domain
  Pfam annotation: Domain name=MMR_HSR1; Domain location=262-384; Score= 144.6; E_value=3e-40; Accession=PF01926.15; Description=GTPase of unknown function
  Pfam annotation: Domain name=Miro; Domain location=263-384; Score= -6.3; E_value=0.042; Accession=PF08477.5; Description=Miro-like protein
  Pfam module annotation: Pfam domain module=Arf::Dynamin_N::GTP _EFTU::MMR_HSR1::Miro; Domain location=241-419::264-383::259-425::262- 384::263-384
GACKDDGGVEFGDAEGDGVGAQEVVEEEQRPPARAFVKSRRQRQEEEEAAAGQDRFKLINGKEIFQEKAYLVGVEFKRTGGNLFGIEESLKELEQLADTAGLVVVGSTYQKLSTPNPRTYIGSGKVSEIRSAIQALDVETVIFDDELSPGQLRNLEKSFGGSVRVCDRTALILDIFNQRAATHEAALQVTLAQMEYQLPRLTKMWNHLERQAGGQVKGMGEKQIEVDKRILRTQIGALKKELESVRKHRKLYRNRRQSVPIPVVSLVGYTNAGKSTLLNRLTGADVLAEDKLFATLDPTTRRVLMKNGTEFLLTDTVGFIQKLPTMLVAAFRATLEEISESSVIVHLVDISHPLAQQQIDAVDRVLKELDVESIPKLVVWNKIDNTDEPLRVKEEAENQGIICISAMNGDGLEEFCNTIQAKLKDSMVPIEAFVPYDKGDLLNDIHKVGMVEKMEYKENGTFVKAHVPLPLARLLTPLRQQVVAAV

SEQ ID NO: 95025 - protein, 101 aa, Setaria italica
  Transcript Sequence Number=SeqID_29051
  Gene Ontology: Mol. function=metal ion binding; Cellular component =integral to membrane; Biological process=ubiquitin-dependent protein catabolic process
  Homolog annotation: Hit_ID=Q84W40; Match level="QueryCoverage=66%, HitCoverage=16%, E-value=9e-15, Identity=50%"; Hit description=RING -H2 finger protein ATL1N
  Pfam annotation: Domain name=PHD; Domain location=34-79; Score=-2.6; E_value=0.051; Accession=PF00628.21; Description=PHD-finger
  Pfam annotation: Domain name=zf-C3HC4; Domain location=35-76; Score =39.3; E_value=1.6e-08; Accession=PF00097.17; Description=Zinc finger, C3HC4 type (RING finger)
  Pfam annotation: Domain name=zf-RING-like; Domain location=35-76; Score=7.6; E_value=0.022; Accession=PF08746.3; Description=RING-like domain
  Pfam module annotation: Pfam domain module=PHD::zf-C3HC4::zf-RING -like; Domain location=34-79::35-76::35-76
ALAALPVTEYRRKVEADGDDGSTSTTGGAAAATDCAVCLSELADGEKVRALPSCGHVFHVECVDAWLRSRTTCPVCRAEVRPDKGAGGAGARSPALATPPP

SEQ ID NO: 95026 - protein, 65 aa, Setaria italica
  Transcript Sequence Number=SeqID_29052
FRRRDPPEPPPHPQEPQERRLLLRRPRHRRQPGAPEPAGRRLRPRPPPGHGRRRVQHRDAVHHAA

SEQ ID NO: 95027 - protein, 55 aa, Setaria italica
  Transcript Sequence Number=SeqID_29053
YCRCLFFLNTKESYIELYKQEEKGLRRLITQPKRVRVLLVVTCYCTSYLYMKTLC

SEQ ID NO: 95028 - protein, 60 aa, Setaria italica
  Transcript Sequence Number=SeqID_29054
MARIRGMPMLALLAAAVVIAAAARAEARVPDYHPSTFTVTGQVQCQDCTKNWNAYAYNAR

SEQ ID NO: 95029 - protein, 136 aa, Setaria italica
  misc_feature (26)..(26): Xaa can be any naturally occurring amino acid
  Transcript Sequence Number=SeqID_29055
CGADDGFVAEIDRILESINAESAPTXAPPPPPPAPAPAPAPVAPPQLQPQLQEVAKAVAHNAVAVVDAAQRNHAVEARKEPRRESPVAVANGRGGGGEWRDGKRQRLTAGGTGESRHDCRRRPMPPPPSRGWDGPA

SEQ ID NO: 95030 - protein, 252 aa, Setaria italica
  Transcript Sequence Number=SeqID_29056
  Gene Ontology: Mol. function=hydrolase activity, acting on ester bonds; Biological process=lipid metabolic process
  Homolog annotation: Hit_ID=B6TRC2; Match level="QueryCoverage=84%, HitCoverage=54%, E-value=5e-93, Identity=75%"; Hit description =Anther-specific proline-rich protein APG
  Pfam annotation: Domain name=Lipase_GDSL; Domain location=45-250; Score=38.3; E_value=3.1e-08; Accession=PF00657.14; Description=GDSL -like LipaseAcylhydrolase
MASLTAGRGISGHAFCQVVLLLAVVLSPGVVHGSGSGGFEKISAILMFGDSIVDPGNNNHRLTEARANFPPYGQDFPGGVATGRFSNGLVPGDLLASKLGVKELLPPYLSDKLQPNDLLTGVAFASGGSGYDPLTSTLSTARSSAEQLELFHDYKEELAALVGEEEMTRVISQAVFFTIMGANDIVNNYFAVPLRRHDYDLPSYMDFLVSSAINFTTTLNVMGAKKIGIVGVPPLGCCPSQITLGGSPSREC

SEQ ID NO: 95031 - protein, 222 aa, Setaria italica
  Transcript Sequence Number=SeqID_29057
  Pfam annotation: Domain name=SnoaL; Domain location=59-180; Score= -17.3; E_value=0.024; Accession=PF07366.4; Description=SnoaL-like polyketide cyclase
  Subcellular localization annotation: CTP_CleavageSite=43; ConfidenceScore=5.31e-01
MQPPLPLLGCLTASSSSALPLSVLVRKHKLGLLFSTAMDDGVSSQDKKTSPPPAGGVAERIMPHLLNIYGSRATARDFEIYAPNATFEDPLMRAHGVQQIKSSFYALPKVFGESKIVEYTVHENPTGPGKAEILIDNKQHYKVLGKAVELTTLIRLQLQDGKVVTHEDWWDKKPLKNRDTVGFPLLGRVAEATRRGAMLLTHALMGFGKDPPAHPPPASSSS

SEQ ID NO: 95032 - protein, 34 aa, Setaria italica
  Transcript Sequence Number=SeqID_29058
NKTPNELPVFLYLALTSWRLLLSLHVNPHDKHLK

SEQ ID NO: 95033 - protein, 108 aa, Setaria italica
  misc_feature (56)..(56): Xaa can be any naturally occurring amino acid
  Transcript Sequence Number=SeqID_29059
SASPVACREGDSEAAAEASPSSSPSAWRSQGDGPAAAEEVETYDSPSASSSGCAAXGGEESPSVVESREEPGSVDTGSAASPSEQLARGAEEHESPMATPRAGSPLRE

SEQ ID NO: 95034 - protein, 173 aa, Setaria italica
  Transcript Sequence Number=SeqID_29060
  Homolog annotation: Hit_ID=C3SBK3; Match level="QueryCoverage=100%, HitCoverage=14%, E-value=2e-24, Identity=42%"; Hit description=Pi5-1
KRKLIQQWISLNMVEPATHGSVTAEMNAENIIKQLKAIHLLQVDNHAEGSSGATGEVLRMHYMAYELARFTSNKDILVVLEGEEAAVSSFPQERDEANRTCCFSQEKEQTSLTYCDHRYAQLPVFTKHRPQKVRSLILIPTTNLQEHKPVIPVAVSEVISGNKYLRVLDLSGC

SEQ ID NO: 95035 - protein, 51 aa, Setaria italica
  Transcript Sequence Number=SeqID_29061
  Gene Ontology: Mol. function=protein serine/threonine phosphatase activity; Cellular component=protein serine/threonine phosphatase complex; Biological process=protein amino acid dephosphorylation
  Homolog annotation: Hit_ID=Q9SM39; Match level="QueryCoverage=68%, HitCoverage=12%, E-value=4e-13, Identity=100%"; Hit description =Putative serine/threonine phosphatase type 2c (Fragment)
RQTLQCDLRACSSPFQGGFVVNYRGTWRVQGSLAVSRGIGDAHLKQWIVAD

SEQ ID NO: 95036 - protein, 308 aa, Setaria italica
  Transcript Sequence Number=SeqID_29062
  Gene Ontology: Mol. function=protein serine/threonine phosphatase activity; Cellular component=protein serine/threonine phosphatase complex; Biological process=protein amino acid dephosphorylation
  Homolog annotation: Hit_ID=Q9SM39; Match level="QueryCoverage=84%, HitCoverage=96%, E-value=1e-138, Identity=91%"; Hit description =Putative serine/threonine phosphatase type 2c (Fragment)
  Pfam annotation: Domain name=PP2C; Domain location=50-295; Score =259.1; E_value=1e-74; Accession=PF00481.13; Description=Protein phosphatase 2C
SFLSTLAGPVLKRRRPAPLVVPPTGTAAAAVAAVEVDPRNEVEEEGEEFAAYCRRGKGRRRVEMEDRHVAKVALGGDPQVALFGVFDGHGGKNAAEFAAENMPKFMAEELKKVNGGEIEGAVKRGYLKTDEEFLKRDESGGACCVTAVLQKGGLFVSNAGDCRAVLSRAGKAEALTSDHRASREDEKERIENLGGFVVNYRGTWRVQGSLAVSRGIGDAHLKQWIVADPDTRTLLVDQQCEFLILASDGLWDKIDNQEAVDLARPLCINNDKPSRMAACRMLTETSISRGSTDDISVVIIQLQKFTSS

SEQ ID NO: 95037 - protein, 81 aa, Setaria italica
  Transcript Sequence Number=SeqID_29063
GRVISGSGREMDEITLSFDRSILPCCMSMAMTTKLALQRALVCFACLLALPVSMSGDRSVRGDAAGAAAAASGAGPRVGVA

SEQ ID NO: 95038 - protein, 91 aa, Setaria italica
  Transcript Sequence Number=SeqID_29064
  Subcellular localization annotation: CTP_CleavageSite=12; ConfidenceScore=5.33e-01
MRPTMLAPRSLRKASVPPALLSDPTPGSLQPTRLAVHVNGAGSSCSAYLASGCRVYKIEISMDGAMVSKGKESLLIPDNAQVISSSVVDRC

SEQ ID NO: 95039 - protein, 69 aa, Setaria italica
  Transcript Sequence Number=SeqID_29065
  Subcellular localization annotation: CTP_CleavageSite=46; ConfidenceScore=5.09e-01
TNAIFASVKGAYHLIAPFTCASFSKHCSFINATAINNKEIFCLSKSCSVGGKRFLVPLCWSKLIKVFID

SEQ ID NO: 95040 - protein, 95 aa, Setaria italica
  Transcript Sequence Number=SeqID_29066
  Gene Ontology: Mol. function=transporter activity; Cellular component= membrane; Biological process=oligopeptide transport
  Homolog annotation: Hit_ID=B6TII9; Match level="QueryCoverage=94%, HitCoverage=15%, E-value=3e-12, Identity=41%"; Hit description =Peptide transporter PTR2
NLSVLSVKVPAATMGSFEVVCVLTWVLLYGKAIVPALRGCGFSFGGHGEPSQLQRMGVGRILMALSMAVAALVEMKRLASAARGEEITIAWQIPQ

SEQ ID NO: 95041 - protein, 106 aa, Setaria italica
  Transcript Sequence Number=SeqID_29067
AAAARAEARVPDYHPSTFTVTGQVQCQDCTKNWNAYAYNARPIPGSVVGITCKDDRERPVYYGSDATDGQGVFNVEVPSKVNGCDLTASRCLVRLASSGDPGCAVP

SEQ ID NO: 95042 - protein, 172 aa, Setaria italica
  Transcript Sequence Number=SeqID_29068
  Gene Ontology: Mol. function=pseudouridylate synthase activity; Biological process=pseudouridine synthesis
  Homolog annotation: Hit_ID=B6U7U0; Match level="QueryCoverage=100%, HitCoverage=42%, E-value=5e-94, Identity=95%"; Hit description =Ribosomal large subunit pseudouridine synthase B
  Pfam annotation: Domain name=PseudoU_synth_2; Domain location=4-130; Score=13.2; E_value=4.7e-06; Accession=PF00849.14; Description=RNA pseudouridylate synthase
EESKSVVSLFNDYLKGWNKIQPGLPKPRLFTVGRLDVATTGLIIVTNDGEFAQKLAHPSSNVTKEYVVTIDGAVHKKHLIAISEGTKIDGVMCVPDLVEPLSAQSDTRKTRLKIVVHEGRNHEVRELVQNAGLKVYALKRVRVGRFRLPADLGIGKFVELKQADIKALEGNN

SEQ ID NO: 95043 - protein, 188 aa, Setaria italica
  Transcript Sequence Number=SeqID_29069
  Gene Ontology: Mol. function=pseudouridylate synthase activity; Biological process=pseudouridine synthesis
  Homolog annotation: Hit_ID=B6U7U0; Match level="QueryCoverage=82%, HitCoverage=38%, E-value=2e-84, Identity=96%"; Hit description =Ribosomal large subunit pseudouridine synthase B
  Pfam annotation: Domain name=S4; Domain location=46-93; Score=52.0; E_ value=2.3e-12; Accession=PF01479.17; Description=S4 domain
  Subcellular localization annotation: CTP_CleavageSite=3; ConfidenceScore=5.03e-01
AVAAAAAASSASVKAKERKVAPAAPPKFSKAARRFYNENIKDHEPQRLAKVLAAAGVASRRTSEELIFQGKVTVNGSVCTSPQTKVDIAKDSIYVNGNRISKKLPPKLYFAVNKPKGYICSCGEESKSVVSLFNDYLKGWNKIQPGLPKPRLFTVGRLDVATTGLIIVTNDGEFAQKLAHPSSNVTKE

SEQ ID NO: 95044 - protein, 52 aa, Setaria italica
  Transcript Sequence Number=SeqID_29070
  Subcellular localization annotation: CTP_CleavageSite=35; ConfidenceScore=5.08e-01
PPSVSFSPSHCHSAMCLPNEAKTSEERIWSTPTTRSFRSSSSCGPAFLPAPP

SEQ ID NO: 95045 - protein, 217 aa, Setaria italica
  Transcript Sequence Number=SeqID_29071
  Gene Ontology: Mol. function=motor activity; Cellular component =myosin complex; Biological process=chemotaxis
  Homolog annotation: Hit_ID=UPI000186D679; Match level="QueryCoverage =80%, HitCoverage=16%, E-value=3e-14, Identity=29%"; Hit description =myosin Ie, putative
  Pfam annotation: Domain name=Myosin_TH1; Domain location=39-214; Score=82.5; E_value=1.5e-21; Accession=PF06017.5; Description=Myosin tail
MDRFRPLRRIQVEPEPAEPPAPAAGAGGDAEGDESPAPAAGLLMGAKVRRRAAVYRDCKGDYIGVPNDPCLTKILSKQGDNKVLFADKVLKFTQSGKMKRRILVITDFALYLVDPDADILKRRIALAAVDKLCISNLSDNFFAIIVPTEYDCLMASTRKKEIVDVIVKAIKSTSEYEPEVASANRFEYHAAAEVIKVVEFEDADGGIKTRITNKEKS

SEQ ID NO: 95046 - protein, 204 aa, Setaria italica
  misc_feature (21)..(21): Xaa can be any naturally occurring amino acid
  misc_feature (127)..(127): Xaa can be any naturally occurring amino acid
  Transcript Sequence Number=SeqID_29072
  Gene Ontology: Mol. function=microtubule motor activity; Cellular component=microtubule associated complex; Biological process =microtubule-based movement
  Homolog annotation: Hit_ID=Q93XF4; Match level="QueryCoverage=67%, HitCoverage=15%, E-value=4e-56, Identity=80%"; Hit description =Kinesin heavy chain (Fragment)
  Pfam annotation: Domain name=Kinesin; Domain location=1-204; Score =1.2; E_value=1.3e-15; Accession=PF00225.15; Description=Kinesin motor domain
HILVCYGQSGTGKTYTMWGPXGAMVDSGSDHADRGVVPRVFQDLFSRIQRTQESSREKQTSYQCRCSFLEVHNDQINDLLEPSQRDLQIRENAGNGIHVENLTDEYVSTVEDINQILMKGLSNRKVXGTNSMNLKSSRSHVIFTCIIEAWSKGSSNGFSSSRTSRITFVDLAGPENDELDGAAKHCTKEERHLKKSLSRLGKLV

SEQ ID NO: 95047 - protein, 101 aa, Setaria italica
  Transcript Sequence Number=SeqID_29073
  Gene Ontology: Mol. function=nucleoside-triphosphatase activity; Cellular component=membrane; Biological process=transport
  Homolog annotation: Hit_ID=B9P510; Match level="QueryCoverage=100%, HitCoverage=16%, E-value=4e-42, Identity=81%"; Hit description=White- brown-complex ABC transporter family (Fragment)
  Pfam annotation: Domain name=ABC_tran; Domain location=3-101; Score= -51.8; E_value=0.035; Accession=PF00005.19; Description=ABC transporter
SYGTSAYVTQDDVLMTTLTVREAVHYSAQLQLPSAMSASAKRERAEETLREMGLEGAADTRIGGWMHKGISGGQRRRVSICMEILTRPALLFLDEPTSGLD

SEQ ID NO: 95048 - protein, 110 aa, Setaria italica
  Transcript Sequence Number=SeqID_29074
  Gene Ontology: Cellular component=membrane
  Homolog annotation: Hit_ID=Q8RYR7; Match level="QueryCoverage=85%, HitCoverage=25%, E-value=4e-34, Identity=64%"; Hit description =Putative MtN21
LTTLSTTSWALWTVLQGPMLEAYPSKLLNTTLQMIFATIQSFFIALVAERDFAKWRLGLDARLIAVVYSGILVSGVAYYMQVWVIDKSGPVFLAMTMPITLLVTIILSLF

SEQ ID NO: 95049 - protein, 111 aa, Setaria italica
  Transcript Sequence Number=SeqID_29075
  Gene Ontology: Cellular component=membrane
  Homolog annotation: Hit_ID=Q8RYR7; Match level="QueryCoverage=79%, HitCoverage=27%, E-value=3e-21, Identity=51%"; Hit description =Putative MtN21
VEHYQQYECDAWLFESAEHIMQGILVSGVAYYMQVWVIDKSGPVFLAMTMPITLLVTIILSLFLGEAVTLGSILGGVIMVGGLYSVLWAKRSEHVVVRKQHMAAPVEAAQV

SEQ ID NO: 95050 - protein, 67 aa, Setaria italica
  Transcript Sequence Number=SeqID_29076
SSKPSLDTRYANLGRRDKGDNKGIPSGENGDRNRTKNLVSSAPQRSPEPPNLGHLDLHGPSCRLLAL

SEQ ID NO: 95051 - protein, 68 aa, Setaria italica
  Transcript Sequence Number=SeqID_29077
  Gene Ontology: Cellular component=membrane
  Homolog annotation: Hit_ID=Q2RAV3; Match level="QueryCoverage=98%, HitCoverage=24%, E-value=5e-25, Identity=79%"; Hit description =Integral membrane protein DUF6 containing protein
QGFVVTGVSYYLQAWCMEMKGPVFLAMWNPLCFVFTIFCSSFFLGEIVHLGSIVGGALLVGGLYSVLW

SEQ ID NO: 95052 - protein, 130 aa, Setaria italica
  Transcript Sequence Number=SeqID_29078
  Gene Ontology: Mol. function=receptor activity; Cellular component =integral to membrane
  Homolog annotation: Hit_ID=Q53PX8; Match level="QueryCoverage=69%, HitCoverage=18%, E-value=4e-15, Identity=51%"; Hit description=PAN domain containing protein
MEAVMARINLVLVLCVAAAALMASFVAAAGEGAAATAKELRRGFSVTHDQSYSQFQPVLSDPTGAFALGFLRVDTTMLDLAVLHLPSAFPLWRAIPDRPAPWSAAASLSFDGGLVLTDHAVNKVLWSTAA

SEQ ID NO: 95053 - protein, 78 aa, Setaria italica
  Transcript Sequence Number=SeqID_29079
LFLAQLLLQSPSQKSSVTLWSEERPHSSQVLICFWARNHLAGRGNKAAAATINSFLIISVHRSVDHIAALSQREEGES

SEQ ID NO: 95054 - protein, 134 aa, Setaria italica
  Transcript Sequence Number=SeqID_29080
  Homolog annotation: Hit_ID=B9RN68; Match level="QueryCoverage=96%, HitCoverage=9%, E-value=9e-32, Identity=49%"; Hit description =Nucleotide binding protein, putative
SKETTIGRGIWRCLFDPHSLLLVTAGFDSAIKVHHLCSSTFHDKVEDKAVSDGLNYDYEIFVVSSPSVSGQYGPLDSKSEYVRCLHFAEENVLYVATNNGYLHHAELSNVEDVRWTEIIQVTEKAPIICMDVTT

SEQ ID NO: 95055 - protein, 119 aa, Setaria italica
  Transcript Sequence Number=SeqID_29081
  Homolog annotation: Hit_ID=B6STI1; Match level="QueryCoverage=99%, HitCoverage=44%, E-value=8e-60, Identity=95%"; Hit description =Protein YIF1A
  Pfam annotation: Domain name=YIF1; Domain location=1-115; Score= -37.0; E_value=9.6e-08; Accession=PF03878.7; Description=YIF1
LQFTRALIGWAFQLVILKGLLYSMGGGEVPLLDLVAYGGYLFAGLSLAVVARLIWAYSYYVMMPWMSLCMGVFLVRTMKRVLFTEMRSSERHSSRQHYFLLFMAIAQFPLFFWLGSIGA

SEQ ID NO: 95056 - protein, 71 aa, Setaria italica
  Transcript Sequence Number=SeqID_29082
  Gene Ontology: Mol. function=ubiquinol-cytochrome-c reductase activity; Cellular component=mitochondrial respiratory chain; Biological process=electron transport chain
  Homolog annotation: Hit_ID=B4F892; Match level="QueryCoverage=90%, HitCoverage=23%, E-value=2e-32, Identity=95%"; Hit description =Ubiquinol-cytochrome c reductase iron-sulfur subunit
  Pfam annotation: Domain name=Rieske; Domain location=1-71; Score= -8.0; E_value=0.04; Accession=PF00355.18; Description=Rieske [2Fe-2S] domain
RRRTEDDIKLANSVDVASLRDPQQDAERVKNPEWLVVIGVCTHLGCIPLPNAGDFGGWFCPCHAPIRHLVG

SEQ ID NO: 95057 - protein, 119 aa, Setaria italica
  misc_feature (95)..(95): Xaa can be any naturally occurring amino acid
  misc_feature (112)..(112): Xaa can be any naturally occurring amino acid
  Transcript Sequence Number=SeqID_29083
  Gene Ontology: Mol. function=ATPase activity, coupled to transmembrane movement of ions, phosphorylative mechanism; Cellular component=membrane; Biological process=calcium ion transport
  Homolog annotation: Hit_ID=Q10DF1; Match level="QueryCoverage=89%, HitCoverage=10%, E-value=1e-52, Identity=93%"; Hit description =Calcium-transporting ATPase 3, endoplasmic reticulum-type, putative, expressed
GLFLGFNHYTLVISQSASDMVLADDNFATIVAAVAEGRAIYNNTKQFIRYMISSNIGEVVCIFVAAVLGMPDTLVPVQLLWVNLVTDGLPATAIXFNKPDSNIMTVKPRKVXEAVVSGW

SEQ ID NO: 95058 - protein, 394 aa, Setaria italica
  Transcript Sequence Number=SeqID_29084
  Gene Ontology: Mol. function=ATPase activity, coupled to transmembrane movement of ions, phosphorylative mechanism; Cellular component=membrane; Biological process=calcium ion transport
  Homolog annotation: Hit_ID=Q10DF1; Match level="QueryCoverage=99%, HitCoverage=37%, E-value=0.0, Identity=90%"; Hit description=Calcium- transporting ATPase 3, endoplasmic reticulum-type, putative, expressed
  Pfam annotation: Domain name=Cation_ATPase_C; Domain location=168 -368; Score=200.4; E_value=4.7e-57; Accession=PF00689.13; Description= Cation transporting ATPase, C-terminus
GEYRVIVVTGDNKSTAESLCRQIGAFEHLDDFAGYSYTASEFEGLPPLERTNALQRMVLFSRVEPSHKKMLVEALQTHNEVVAMTGDGVNDAPALKKADIGIAMGSGTAVAKSASDMVLADDNFATIVAAVAEGRAIYNNTKQFIRYMISSNIGEVVCIFVAAVLGMPDTLVPVQLLWVNLVTDGLPATAIGFNKPDSNIMTVKPRKVNEAVVSGWLFFRYLVIGAYVGLATIAGFVWWFVYSENGPGLPYSELVNFDSCSARQTSYPCSIFEDRHPSTVSMTVLVVVEMFNALNNLSENQSLLVIHPWSNLWLVGSIILTMLLHVAVLYIEPLAALFSVSPLSWAEWKVVLYLSFPVILIDEVLKLFSRSPRGRRFPLRLWRREILPKESRDN

SEQ ID NO: 95059 - protein, 363 aa, Setaria italica
  misc_feature (96)..(96): Xaa can be any naturally occurring amino acid
  Transcript Sequence Number=SeqID_29085
  Gene Ontology: Mol. function=ATPase activity, coupled to transmembrane movement of ions, phosphorylative mechanism; Cellular component=membrane; Biological process=cation transport
  Homolog annotation: Hit_ID=Q10DF1; Match level="QueryCoverage=93%, HitCoverage=32%, E-value=0.0, Identity=92%"; Hit description=Calcium- transporting ATPase 3, endoplasmic reticulum-type, putative, expressed
  Subcellular localization annotation: CTP_CleavageSite=32; ConfidenceScore=5.08e-01
VETLGCTTGIYSAKTGTLTTNMMSVSKVCVVRSVHQRPMTDEYSISGTTFAPEGFIYDADGLQLEFPPQSPCLLHLAMCSALCNESTLQYNPDKNXYEKIGESTEVALRVLVEKVGLPGFDSMPSALNMLTKHERASYCNRYWENQFRKISVLEFSRDRKMMSVLCSRKQQEIMFSKGAPESIMARCTHILCNDDGSSVPLTMDIRNELEARFQSFAGKDTLRCLALALKRMPAGQQSICYDDEANLTFIGLVGMLDPPREEVRDAIHSCMSAGIRVIVVTGDNKSTAESLCRQIGAFEHLDDFAGYSYTASEFEGLPPLERTNALQRMVLFSRVEPSHTQSNFSGSNFFIHFYQVYVEWTRC

SEQ ID NO: 95060 - protein, 67 aa, Setaria italica
  Transcript Sequence Number=SeqID_29086
  Gene Ontology: Mol. function=ATPase activity, coupled to transmembrane movement of ions, phosphorylative mechanism; Cellular component=membrane; Biological process=calcium ion transport
  Homolog annotation: Hit_ID=Q10DF1; Match level="QueryCoverage=100%, HitCoverage=6%, E-value=1e-20, Identity=77%"; Hit description =Calcium-transporting ATPase 3, endoplasmic reticulum-type, putative, expressed
VLYIEPLAALFSVSPLSWAEWKVVLYLSFPVILIDEVLKLFSRSPRGRRFPLRLWRREILPKESRDN

SEQ ID NO: 95061 - protein, 75 aa, Setaria italica
  Transcript Sequence Number=SeqID_29087
  Gene Ontology: Mol. function=nutrient reservoir activity; Cellular component=extracellular region
  Homolog annotation: Hit_ID=B6UEL1; Match level="QueryCoverage=81%, HitCoverage=27%, E-value=2e-22, Identity=85%"; Hit description =Germin-like protein subfamily 1 member 11
MAASSYFLLAAFFAIVISRAIASDPSPLQDFCVADMHSPVKVNGFVCKDPMAVNPDDFFKAANLDKPRDTMHSKV

SEQ ID NO: 95062 - protein, 307 aa, Setaria italica
  Transcript Sequence Number=SeqID_29088
  Gene Ontology: Mol. function=oxidoreductase activity; Cellular component=mitochondrion; Biological process=oxidation reduction
  Homolog annotation: Hit_ID=Q9ST63; Match level="QueryCoverage=100%, HitCoverage=61%, E-value=1e-138, Identity=81%"; Hit description =Putative internal rotenone-insensitive NADH dehydrogenase
  Pfam annotation: Domain name=Pyr_redox; Domain location=40-140; Score= 25.8; E_value=2.5e-05; Accession=PF00070.19; Description=Pyridine nucleotide-disulphide oxidore
  Pfam annotation: Domain name=Pyr_redox_2; Domain location=40-185; Score=-57.0; E_value=0.017; Accession=PF07992.6; Description =Pyridine nucleotide-disulphide oxidore
  Pfam module annotation: Pfam domain module=Pyr_redox::Pyr_redox_2; Domain location=40-140::40-185
HAIFLREVHHAQEIRRRLLLNLMLSDVPGLSEEEKRRLLHCVVVGGGPTGVEFSGELSDFIMRDVKQRYSHVKDYIHVTLIEANEILSSFDVRLRQYATNQLIKSGVRLVQGIVKDVQPNKLILDNGEEVPYGLLVWSTGVGASPFVKSLPFPKSPGGRIGVDEWLRVPSVRDVYAIGDCSGFHESTGKDVLPALAQVAERQGKYLANLLNHVMKAGGGHANSEVEADPGPPFVYKHLGSMATVGRYKALVDLRQSKESRGISLAGFVSFFIWRSAYLTRVVSWRNRFYVAINWLTTLLFGRDISRI

SEQ ID NO: 95063 - protein, 136 aa, Setaria italica
  Transcript Sequence Number=SeqID_29089
  Gene Ontology: Mol. function=protein serine/threonine kinase activity; Cellular component=plasma membrane; Biological process =protein amino acid phosphorylation
  Homolog annotation: Hit_ID=B6TE08; Match level="QueryCoverage=100%, HitCoverage=35%, E-value=8e-74, Identity=94%"; Hit description=ATP binding protein
  Pfam annotation: Domain name=Pkinase_Tyr; Domain location=2-106; Score=-95.1; E_value=2.1e-07; Accession=PF07714.9; Description =Protein tyrosine kinase
VEASNPGDMTGETGTLGYMAPEVLNGHPYNRKCDVYSFGICLWEIYCCDMPYPDLSFSEVTSAVVRQNLRPEIPRCCPSSLANVMKRCWDANPDKRPEMAEVVSMLEAIDTSKGGGMIPTDQTQGCFSCLRRTRGP

SEQ ID NO: 95064 - protein, 51 aa, Setaria italica
  Transcript Sequence Number=SeqID_29090
LKLQRYETNGNRKMMQGKLTRVLSSVVEAKEKNLTCMTHIKSDHFNFSKLI

SEQ ID NO: 95065 - protein, 58 aa, Setaria italica
  Transcript Sequence Number=SeqID_29091
FLSFDAFTYVPAVHFGICSSRPHIVSINLKRLKYGCSSMNLLKSILEPFQVNANNMRP

SEQ ID NO: 95066 - protein, 41 aa, Setaria italica
  Transcript Sequence Number=SeqID_29092
LSCLMLTPLSCGESVRSFSDLAVVYSRFVASQIVKTVNMNK

SEQ ID NO: 95067 - protein, 173 aa, Setaria italica
  misc_feature (20)..(20): Xaa can be any naturally occurring amino acid
  Transcript Sequence Number=SeqID_29093
  Gene Ontology: Mol. function=electron carrier activity; Cellular component=integral to membrane; Biological process=oxidation reduction
  Homolog annotation: Hit_ID=Q7G234; Match level="QueryCoverage=98%, HitCoverage=33%, E-value=1e-75, Identity=78%"; Hit description =Cytochrome P450 family protein, expressed
LPNASETATVDEFAQSLTDXEALNNMHYLHATLTETLRLYPSVPLDNKQCFGDDVLPDGSSVSKGDIVFYVPYAMGRMEYLWGEDAGVFRPERWLDDSGEFQQQSPFKFTAFQAGPRICLGKEFAYRQMKIFAAVLLRSFAFRLRDGDKATVNYRTMITLHIDQGLHLTATAR

SEQ ID NO: 95068 - protein, 187 aa, Setaria italica
  misc_feature (120)..(120): Xaa can be any naturally occurring amino acid
  Transcript Sequence Number=SeqID_29094
  Gene Ontology: Mol. function=ubiquitin protein ligase binding; Cellular component=cullin-RING ubiquitin ligase complex; Biological process=ubiquitin-dependent protein catabolic process
  Homolog annotation: Hit_ID=Q01IF9; Match level="QueryCoverage=100%, HitCoverage=21%, E-value=2e-92, Identity=89%"; Hit description =H0805A05.11 protein
  Pfam annotation: Domain name=Cullin; Domain location=3-187; Score =53.4; E_value=1.2e-14; Accession=PF00888.14; Description=Cullin family
NKSDFEIDSDIRTLELLKIHFGESSMQKCEIMLNDLIDSKRTNSNIKTSLLKTSQTVAGQEEAEISHDVLDATIISSNFWPPIQTEDLVVPASVDQLLSDYAKRFHQIKTPRKLLWKKNXLGTVKLELEFEGRSMQFTVAPVHAAIIMRFQEKSSWTSKTLATEIGIPMDSLNRRISFWTSKGVLTE

SEQ ID NO: 95069 - protein, 159 aa, Setaria italica
  misc_feature (20)..(20): Xaa can be any naturally occurring amino acid
  misc_feature (28)..(28): Xaa can be any naturally occurring amino acid
  Transcript Sequence Number=SeqID_29095
  Gene Ontology: Mol. function=protein tyrosine kinase activity; Cellular component=plasma membrane; Biological process=protein amino acid phosphorylation
  Homolog annotation: Hit_ID=Q10MS0; Match level="QueryCoverage=89%, HitCoverage=38%, E-value=6e-64, Identity=46%"; Hit description =Leucine Rich Repeat family protein, expressed
  Pfam annotation: Domain name=LRR_1; Domain location=119-141; Score =8.2; E_value=8.2; Accession=PF00560.25; Description=Leucine Rich Repeat
  Pfam annotation: Domain name=LRR_1; Domain location=143-157; Score =2.9; E_value=84; Accession=PF00560.25; Description=Leucine Rich Repeat
  Pfam annotation: Domain name=LRR_1; Domain location=47-69; Score=4.5; E_value=42; Accession=PF00560.25; Description=Leucine Rich Repeat
  Pfam annotation: Domain name=LRR_1; Domain location=71-93; Score=6.8; E_value=15; Accession=PF00560.25; Description=Leucine Rich Repeat
  Pfam annotation: Domain name=LRR_1; Domain location=95-117; Score =14.5; E_value=0.45; Accession=PF00560.25; Description=Leucine Rich Repeat
  Pfam module annotation: Pfam domain module=LRR_1::LRR_1::LRR_1::LRR _1::LRR_1; Domain location=119-141::143-157::47-69::71-93::95-117
WNGTGLDACSGGWAGIKCAXGKVVAIQXLPFKGLAGSLSDKVGQLTALRRLSFHDNIIGGQVPAAIGFLRDLRGVYLHNNRFAGAVPPALGGCALLQTLDLSGNYLSGSIPSTLANATRIYRINLAYNNLSGVVPGSLTSLPFLESLELGNNNLSGVMP

SEQ ID NO: 95070 - protein, 84 aa, Setaria italica
  Transcript Sequence Number=SeqID_29096
  Subcellular localization annotation: CTP_CleavageSite=47; ConfidenceScore=5.44e-01
INWSQRMKPASYFSQTKGLVKDLCSLGLRPQVSYTSRIEVPKQKKFSSMSFQQILLSTTSVTTKYNKQLTTAKRLRQKKSPHNT

SEQ ID NO: 95071 - protein, 71 aa, Setaria italica
  Transcript Sequence Number=SeqID_29097
  Gene Ontology: Mol. function=DNA-directed DNA polymerase activity; Cellular component=DNA polymerase III complex; Biological process =DNA replication
  Homolog annotation: Hit_ID=Q53M12; Match level="QueryCoverage=100%, HitCoverage=6%, E-value=3e-30, Identity=97%"; Hit description=ATPase, AAA family protein
LIALNSDGSLRDAETMLDQLCLLGKKITPSLVNDLVGVVSEEKLLDLLEIAMSSDTAETVKRSRELMDSGV

SEQ ID NO: 95072 - protein, 139 aa, Setaria italica
  Transcript Sequence Number=SeqID_29098
  Gene Ontology: Mol. function=binding; Biological process=cell redox homeostasis
  Homolog annotation: Hit_ID=B9S079; Match level="QueryCoverage=84%, HitCoverage=46%, E-value=8e-30, Identity=48%"; Hit description =Pentatricopeptide repeat-containing protein, putative
  Pfam annotation: Domain name=PPR; Domain location=52-86; Score=55.8; E_value=1.6e-13; Accession=PF01535.12; Description=PPR repeat
  Pfam annotation: Domain name=TPR_4; Domain location=19-44; Score =15.8; E_value=0.18; Accession=PF07721.6; Description=Tetratricopeptid e repeat
  Pfam annotation: Domain name=TPR_4; Domain location=51-76; Score =11.4; E_value=1.9; Accession=PF07721.6; Description=Tetratricopeptide repeat
  Pfam module annotation: Pfam domain module=PPR::TPR_4::TPR_4; Domain location=52-86::19-44::51-76
ALAREAHRRVAAAEVALDVVAWNALVDMYAKCGDVAAARRWFRAMPAGKTVVSWNTMISALARAGEHGEALALFREMQRAGVRPDDATLVAILGACAQLGALDTGRWVHAYMGRQLGRREAADGVVGNALLDMYAKCGA

SEQ ID NO: 95073 - protein, 129 aa, Setaria italica
  Transcript Sequence Number=SeqID_29099
  Gene Ontology: Mol. function=catalytic activity; Biological process =cellular metabolic process
  Homolog annotation: Hit_ID=B6T983; Match level="QueryCoverage=100%, HitCoverage=19%, E-value=5e-69, Identity=96%"; Hit description=RHM1
  Pfam annotation: Domain name=Epimerase; Domain location=1-106; Score=- 23.6; E_value=2.3e-05; Accession=PF01370.13; Description=NAD dependent epimerasedehydratase family
GNKEASQLLPTNPYAATKAGAEMLVMAYGRSYGLPVITTRGNNVYGPNQFPEKLIPKFILLAMRGEPLPIHGDGTNVRSYLYCEDVAEAFEVILHHGEVGHVYNIGTKRERTVIDVAKDVCKLFNLEAD

SEQ ID NO: 95074 - protein, 275 aa, Setaria italica
  Transcript Sequence Number=SeqID_29100
  Gene Ontology: Cellular component=nucleus; Biological process=cell division
  Homolog annotation: Hit_ID=B6T5K0; Match level="QueryCoverage=100%, HitCoverage=74%, E-value=1e-112, Identity=71%"; Hit description =Cyclin-A1
  Pfam annotation: Domain name=Cyclin_C; Domain location=151-272; Score= 177.5; E_value=3.8e-50; Accession=PF02984.11; Description=Cyclin, C -terminal domain
  Pfam annotation: Domain name=Cyclin_N; Domain location=24-149; Score =231.9; E_value=1.6e-66; Accession=PF00134.15; Description=Cyclin, N -terminal domain
  Pfam module annotation: Pfam domain module=Cyclin_C::Cyclin_N; Domain location=151-272::24-149
KRLIEDIDKLDGNNQLAMVDYVEDIYKFYKATEHESRPSDYMGHQSEVNPKMRAILTDWMAEVHGKFELMPETLYLTMYIVDRYLSLQPVLKRELQLVGIAAMLIACKYEEIWAPLVNDFISISDDAFSQQQILVMEKAILNTLEWNLTLPTTYHFLVRFAKAAGRGDKQLEHMILFFGELALMDYRMVTIRPSVIAASAVYAARCTLKKSPLWTDTLKHHTGLHEQQLMEGAKMLVSSHAAAPEGKLKTIYQKYASEQFGCVALHPPAAGPGLV

SEQ ID NO: 95075 - protein, 52 aa, Setaria italica
  Transcript Sequence Number=SeqID_29101
SKYCLRNNYRQSTRKANQQSNCLAKIQGNLLSLLITITHGENKFTLLNSVHF

SEQ ID NO: 95076 - protein, 256 aa, Setaria italica
  Transcript Sequence Number=SeqID_29102
  Homolog annotation: Hit_ID=Q9GSB0; Match level="QueryCoverage=80%, HitCoverage=48%, E-value=1e-09, Identity=25%"; Hit description =Putative transmembrane protein
VSLGAVLSGASIPILSQSYLVWQLLLSAIFLKRRYRINEITGCFLVAVGVIITVASGSVTGASLKSTGIVWPLLMIISFFLQAADTVLKEIIFIDASKKLKCGSVDLFVVNSYGSAYQALFMCLLLPFLSKLWGVPFHLLPAYIKDGAACFLNTGSISGCEGAPLLPLLFVLVNMGYNISLLHLIKISSAVVSSLASTFSVPLSIYAFTLPLPYIGVASTLPPGFVAGAAVLTAGLLLYSLPQAQHSGNSFHNKND

SEQ ID NO: 95077 - protein, 101 aa, Setaria italica
  Transcript Sequence Number=SeqID_29103
  Gene Ontology: Mol. function=nucleic acid binding
  Homolog annotation: Hit_ID=B9RGI1; Match level="QueryCoverage=100%, HitCoverage=10%, E-value=6e-33, Identity=67%"; Hit description=DNA repair helicase rad5,16, putative
LRRTKETLISRDPILKLPPKTIQLSKIDFTQEERAFYLTLEEGSRQKFKAYDAAGTINENYANILVLLLRLRQACDHPLLLKGQESDLVVTVSIEMAKQLP

SEQ ID NO: 95078 - protein, 156 aa, Setaria italica
  Transcript Sequence Number=SeqID_29104
  Pfam annotation: Domain name=GRP; Domain location=1-130; Score=50.6; E_value=6.1e-12; Accession=PF07172.3; Description=Glycine rich protein family
MASKSLLLIGVVLASLLLVTKDVVAARNQFVEANESEGKNTKLTGGADFRDEKGGHAYYGGGYGGGYGGGYGGGYGGYVPGRGWYGGGYGYPDFGGGYGGGGGGGGGRYGGGGGYGGGYGGGGGGYGGGYPGAEYYGGGGAGTRSYIQECFNNITK

SEQ ID NO: 95079 - protein, 52 aa, Setaria italica
  Transcript Sequence Number=SeqID_29105
  Gene Ontology: Mol. function=nucleic acid binding; Cellular component= nucleus; Biological process=response to stress
  Homolog annotation: Hit_ID=B6TDT8; Match level="QueryCoverage=75%, HitCoverage=19%, E-value=2e-12, Identity=87%"; Hit description =Glycine-rich RNA-binding protein 2
MAASDVEYRCFVGGLAWATDDNSLHNAFSPFGEVLESKVRMISFGWRTKRDF

SEQ ID NO: 95080 - protein, 155 aa, Setaria italica
  Transcript Sequence Number=SeqID_29106
  Gene Ontology: Mol. function=protein dimerization activity; Cellular component=nucleus; Biological process=regulation of transcription, DNA-dependent
  Homolog annotation: Hit_ID=Q06979; Match level="QueryCoverage=80%, HitCoverage=26%, E-value=2e-48, Identity=76%"; Hit description=Ocs -element binding factor 3.2
MESRRGGSAAAAAAAAAEDAGGAMPSFGPPQHSIHTDMNSMQPSRVADFGALAQSAGFRIEDLANINTGTLFNLKTNTHTISNNPLQFGNYGKPISPSHINTTTAATAAARIDPQSLEQQTGAQPNLVALPTGNIENWGESAMADSPMTDTSTDP

SEQ ID NO: 95081 - protein, 59 aa, Setaria italica
  Transcript Sequence Number=SeqID_29107
MGHGVSCARTGDEHDYFRAAQLGDLDALAALLAADPSLARRATLYDRLSALHIAAANGR

SEQ ID NO: 95082 - protein, 59 aa, Setaria italica
  misc_feature (22)..(22): Xaa can be any naturally occurring amino acid
  Transcript Sequence Number=SeqID_29108
  Gene Ontology: Mol. function=transposase activity; Biological process= transposition, DNA-mediated
  Homolog annotation: Hit_ID=Q2QPZ8; Match level="QueryCoverage=79%, HitCoverage=5%, E-value=2e-10, Identity=57%"; Hit description =Transposon protein, putative, CACTA, En/Spm sub-class
SLRNVVERAFGVLKSRWHILRXVPLYSRERQTKIVIACFALHNYLLDLANDSSAGSSKA

SEQ ID NO: 95083 - protein, 103 aa, Setaria italica
  Transcript Sequence Number=SeqID_29109
FSYEKNCSVCFFEDLLMFYSNYSEICCFAIYIIHTHKAIFCIQLLLWHYAVMPVIRQSAEIDEWYKWRENRGKALVPNLLKFSSVTNNKLFSNQNMHDALLHF

SEQ ID NO: 95084 - protein, 57 aa, Setaria italica
  Transcript Sequence Number=SeqID_29110
RMGTCNSGTNVLPPVLNVCVINLRTEGIKVMQFGTVIHLQQALYCKKQSISWNSYFV

SEQ ID NO: 95085 - protein, 97 aa, Setaria italica
  Transcript Sequence Number=SeqID_29111
PSCRRPGDQPKQRKRDATPVSAVGEKEGIDETASAEGWRWRRDRRRASLGFSPSCPTRGRREDDGRRMGRPHGGPSCPTRGRRMGRPHGAACDGPRA

SEQ ID NO: 95086 - protein, 194 aa, Setaria italica
  Transcript Sequence Number=SeqID_29112
  Gene Ontology: Mol. function=serine-type peptidase activity; Cellular component=thylakoid lumen; Biological process=proteolysis
  Homolog annotation: Hit_ID=Q8S3I9; Match level="QueryCoverage=99%, HitCoverage=49%, E-value=2e-90, Identity=81%"; Hit description=D1 protease (Fragment)
  Pfam annotation: Domain name=PDZ; Domain location=2-84; Score=24.8; E_ value=0.00036; Accession=PF00595.16; Description=PDZ domain (Also known as DHR or GLGF)
  Pfam annotation: Domain name=Peptidase_S41; Domain location=119-194; Score=-30.2; E_value=0.0045; Accession=PF03572.10; Description =Peptidase family S41B
  Pfam module annotation: Pfam domain module=PDZ::Peptidase_S41; Domain location=2-84::119-194
RKSGTQGALTGVGLSISYPMAVNGSPTGVAVMTATPGGPAEKAGILPGDIILAIDNRSTEDMDIYDAAERLQGPEGSSVDLSIRSGANTRHIVLTRQTVTLNPVRSRMCEIPGAKDSSKIGYIKLTTFNQNAAESVKEAIKTLRDNNVKSFVLDLRNNSGGLFPEGIQIAKIWMDKGVIVYICDSQGVRDIYEA

SEQ ID NO: 95087 - protein, 96 aa, Setaria italica
  misc_feature (42)..(42): Xaa can be any naturally occurring amino acid
  misc_feature (69)..(69): Xaa can be any naturally occurring amino acid
  Transcript Sequence Number=SeqID_29113
  Gene Ontology: Mol. function=serine-type peptidase activity; Cellular component=thylakoid lumen; Biological process=proteolysis
  Homolog annotation: Hit_ID=Q8S3I9; Match level="QueryCoverage=97%, HitCoverage=16%, E-value=1e-24, Identity=68%"; Hit description=D1 protease (Fragment)
  Pfam annotation: Domain name=Peptidase_S41; Domain location=1-94; Score=-46.1; E_value=0.066; Accession=PF03572.10; Description =Peptidase family S41B
VNKGTASASEILAGALKDNKRAVVYGEPTYGKGYCLPSLYHXIPCSDSECSLSHSCYLLTFRKIQSVFXLSDGSGLAVTVARYETPAHTDIDKVSN

SEQ ID NO: 95088 - protein, 158 aa, Setaria italica
  misc_feature (57)..(57): Xaa can be any naturally occurring amino acid
  misc_feature (90)..(90): Xaa can be any naturally occurring amino acid
  misc_feature (108)..(108): Xaa can be any naturally occurring amino acid
  misc_feature (120)..(120): Xaa can be any naturally occurring amino acid
  Transcript Sequence Number=SeqID_29114
  Gene Ontology: Mol. function=serine-type peptidase activity; Cellular component=thylakoid lumen; Biological process=proteolysis
  Homolog annotation: Hit_ID=Q8S3I9; Match level="QueryCoverage=98%, HitCoverage=39%, E-value=2e-76, Identity=91%"; Hit description=D1 protease (Fragment)
  Pfam annotation: Domain name=Peptidase_S41; Domain location=3-125; Score=107.5; E_value=4.5e-29; Accession=PF03572.10; Description =Peptidase family S41B
LVGGLFPEGIQIAKICMDKGVIVYICDSQGVRDIYEADGADTIAASEPLVVLVNKGXASASEILAGALKDNKRAVVYGEPTYGKGKIQSXFGLSDGSGLAVTVARYEXPAHTDIDKVGVXPDRPLPASFPTDEDGFCSCLRDSTAPCNLNAAQLFARS

SEQ ID NO: 95089 - protein, 90 aa, Setaria italica
  Transcript Sequence Number=SeqID_29115
  Gene Ontology: Mol. function=metal ion binding; Cellular component =integral to membrane
  Homolog annotation: Hit_ID=B9RDK3; Match level="QueryCoverage=86%, HitCoverage=37%, E-value=6e-16, Identity=47%"; Hit description=Ring finger protein, putative
  Pfam annotation: Domain name=PHD; Domain location=36-81; Score=-0.6; E_value=0.031; Accession=PF00628.21; Description=PHD-finger
  Pfam annotation: Domain name=zf-C3HC4; Domain location=37-78; Score =33.2; E_value=1.1e-06; Accession=PF00097.17; Description=Zinc finger, C3HC4 type (RING finger)
  Pfam module annotation: Pfam domain module=PHD::zf-C3HC4; Domain location=36-81::37-78
VERGIHGLQPSVVTTFPTVKLSDGGPQRPPVPEESQCTVCLEEYEAKDVVRVLPTCGHAFHAPCIDAWLRQHPTCPVCRASLRAKQSSGN

SEQ ID NO: 95090 - protein, 49 aa, Setaria italica
  Transcript Sequence Number=SeqID_29116
  Homolog annotation: Hit_ID=B6U5N0; Match level="QueryCoverage=100%, HitCoverage=12%, E-value=3e-18, Identity=85%"; Hit description =Protein binding protein
RERPKWEWKDLEPYIRDLRVPGVSSEGLLIKYTRRTQPSSEAEPIFTAR

SEQ ID NO: 95091 - protein, 54 aa, Setaria italica
  Transcript Sequence Number=SeqID_29117
PCQSVPGHYIILFCFSLLLEAVYIFHETKEKIETNCHSDTVPFETSWTRGSLFL

SEQ ID NO: 95092 - protein, 148 aa, Setaria italica
  Transcript Sequence Number=SeqID_29118
TFSRPDGAREGSIAYAAWKYTSSLNDSSSLDEERLSWLALAWDRQVQVAKFVKSKIVKHKEWKLDSAAIGVAWLDDQMLVVLNLRGQLCLFSKDGSELRRTTFVPDGLLFDDTILHHAHFSNRFGNPEKHFNSSVAVRGATVYILGPT

SEQ ID NO: 95093 - protein, 81 aa, Setaria italica
  Transcript Sequence Number=SeqID_29119
KIKMTCNLKNGLSISFKKTLTNNFEMILYKTLHKLILLGSLSHAWDCLTCHLHRGRTPCFRSSFRETVASAKTKSSTTPSP

SEQ ID NO: 95094 - protein, 67 aa, Setaria italica
  Transcript Sequence Number=SeqID_29120
TCLTEHGLASINITQIMHMKEKLLQMEKIRAIQEQLSRFLLDEVVNPAGKFHNDGSNLHHRQDSGSE

SEQ ID NO: 95095 - protein, 78 aa, Setaria italica
  Transcript Sequence Number=SeqID_29121
RAEEAMEKVAGEVTHTFPSNENLKEATSKIKTVNDATEEDAEKAEAPIQKCEGAGPADGDIDDGKWQHRRLQEVAARY

SEQ ID NO: 95096 - protein, 160 aa, Setaria italica
  Transcript Sequence Number=SeqID_29122
  Subcellular localization annotation: CTP_CleavageSite=39; ConfidenceScore=5.05e-01
KKGKKRMFRQRNSEHNSLSGTFTRFSVDGSKSLCKGNPSSAAANSLLKIHNVQKGPRKRIAWDNELLYIPKEGITEMLRSFLDQFLSGAYNILMQSVCDDIMNEHHSIEKSDISTFFKVARFVLAFQHEKASNDQKSVKGIQPSEVSPSNEHDDNLPFHW

SEQ ID NO: 95097 - protein, 133 aa, Setaria italica
  misc_feature (2)..(2): Xaa can be any naturally occurring amino acid
  Transcript Sequence Number=SeqID_29123
EXNGGDQTRIHLPTSSESILTKKCTNFGKARARRDFALTPESNAPYFTWAVLFAPGAPAHRKPSAMASLSLPACFAASLNSRVPRRSLPGKPHARPPAATAIPGTRADNSGVSRREGCYVHSVIGCGGVVELC

SEQ ID NO: 95098 - protein, 127 aa, Setaria italica
  Transcript Sequence Number=SeqID_29124
  Gene Ontology: Mol. function=binding
  Homolog annotation: Hit_ID=B9SP95; Match level="QueryCoverage=91%, HitCoverage=15%, E-value=7e-14, Identity=36%"; Hit description =Microtubule-associated protein TORTIFOLIA1, putative
YEIADEDSKFDYDILDDKQECSSVSEVASRSCETKHVTTAQECIEDCESTQVTERCPRGQESKSIDSTVTDVTAHGTHSCCLNTMNELALIRKQLQEMERKQANLFDLLQEFMSTSVENMTVLNLKA

SEQ ID NO: 95099 - protein, 51 aa, Setaria italica
  misc_feature (15)..(15): Xaa can be any naturally occurring amino acid
  misc_feature (45)..(45): Xaa can be any naturally occurring amino acid
  Transcript Sequence Number=SeqID_29125
  Gene Ontology: Mol. function=mismatched DNA binding; Biological process=mismatch repair
EAEEFQEEEDEEMAXTGIDSQVHMACVMQGRRVGVAYYDTNTRQXFVLEIW

SEQ ID NO: 95100 - protein, 95 aa, Setaria italica
  Transcript Sequence Number=SeqID_29126
  Subcellular localization annotation: CTP_CleavageSite=52; ConfidenceScore=5.35e-01
RCVQVMLHAMILQHFPLKSRSPPKLYLDLPFLRTTSAQLKTSRHVLPPPLLSATTRVDSNLLQSYAKDAFCRLRFFPSEPCELLELFFLLFSAAA

SEQ ID NO: 95101 - protein, 48 aa, Setaria italica
  Transcript Sequence Number=SeqID_29127
GFMIRAMHKPPLRLQSYHKADQLEGRVIHCHSPLLALLVKLQYTSVSN

SEQ ID NO: 95102 - protein, 50 aa, Setaria italica
  Transcript Sequence Number=SeqID_29128
MTNQDVVVSEMGIAAGAALPGPRPALLACRGAAAGAMSHRYLDLAAAAAR

SEQ ID NO: 95103 - protein, 80 aa, Setaria italica
  Transcript Sequence Number=SeqID_29129
METRLNKRYIGYPNYLHFTPYYSHFPCTLRKPRSILNRTDTSSKRKSSHTRYDNDMAAQECQMHPLPSITHKVKAVLPFS

SEQ ID NO: 95104 - protein, 107 aa, Setaria italica
  Transcript Sequence Number=SeqID_29130
  Gene Ontology: Mol. function=oxidoreductase activity, acting on CH-OH group of donors; Cellular component=vacuole; Biological process =cellular alcohol metabolic process
  Homolog annotation: Hit_ID=B6SW64; Match level="QueryCoverage=100%, HitCoverage=17%, E-value=1e-41, Identity=82%"; Hit description =Protein HOTHEAD
MDLISRRVVFKALVFLCFIRSSQGRDHFTKLNLPTFLEASRFPTFQYEAYDYIIVGGGTAGCPLAATLSQKYKVLLLERGGSPYGNRNITLLENFHICLADVSPESP

SEQ ID NO: 95105 - protein, 144 aa, Setaria italica
  Transcript Sequence Number=SeqID_29131
GLGGTTLHANKRISKKDMKHQANMIFSTLPSRYLSLHHLSAYWNVLHSANKSQAYSDAILELQADHGSSEESILARQGFSSRVTRPIGTSYRFKPCRWKIYNPLPVYRAPCSQLSQQQCVAWMLAHLCHAPNQHEEIGHLLQRS

SEQ ID NO: 95106 - protein, 67 aa, Setaria italica
  Transcript Sequence Number=SeqID_29132
AASSRGDCFVMLVHIFPRHPSIRCFTNCEYAHDSHWLLSLVYIEIHLLDYNFSSKFLSWKSVSALFF

SEQ ID NO: 95107 - protein, 173 aa, Setaria italica
  misc_feature (87)..(87): Xaa can be any naturally occurring amino acid
  misc_feature (90)..(90): Xaa can be any naturally occurring amino acid
  Transcript Sequence Number=SeqID_29133
FLGKNATKECHCIDADALLNELKNDVGNKNGGIGSSKGWRGPINIADSLGDDEADLVIPQAPYDADNDGDLSAGEHGDDFRKSSTTXKRXRLMSLSDSEAEENERNHVSRGSLNSEVPKRRGHSIFTEEQEKLIRDLYEKYKDDRKCSHLIAEALDSTGKISSTQVSRKLTQL

SEQ ID NO: 95108 - protein, 109 aa, Setaria italica
  Transcript Sequence Number=SeqID_29134
  Gene Ontology: Mol. function=protein serine/threonine kinase activity; Biological process=protein amino acid phosphorylation
  Homolog annotation: Hit_ID=Q9AXH6; Match level="QueryCoverage=100%, HitCoverage=15%, E-value=5e-39, Identity=70%"; Hit description=Wall -associated protein kinase
  Pfam annotation: Domain name=Pkinase_Tyr; Domain location=1-109; Score=-152.3; E_value=0.0013; Accession=PF07714.9; Description =Protein tyrosine kinase
ITFQFRISHANLVRLVGCCLETDVPMLVFEFVPRGSLHSVLHGAGKTLPLSLPVRLDIAIGSAEALTYMHSHGGHNHVHGDVKSGNILLDDNLTPKVSDFGSAKLVSVA

SEQ ID NO: 95109 - protein, 51 aa, Setaria italica
  Transcript Sequence Number=SeqID_29135
YKMVGPPMPCCAYSFVKSNSFRENSNNIWHNLNSIYKSTARPQSQPNSVIK

SEQ ID NO: 95110 - protein, 354 aa, Setaria italica
  misc_feature (285)..(285): Xaa can be any naturally occurring amino acid
  Transcript Sequence Number=SeqID_29136
MAMDGPSCRSISWFTCFAACVLLESIVSAHSWCTPHPRPRQEARFRQKTNKFWEYQEQSNTWVEISMPFNLMSCINGTCTKVGSIARKTGSPVHSQEEEDARLDGEDEEDRNDPVLPIRKRISLTRMSESSVWVTGQSGSIYERFWNGVMWVIAPHELPTSAGYATATFIVNTTILALSEAGILYQLQLNEHAQPIWTEMAFNSDQHFTNLGLKTQSQTMRIRNGIVSNDGRKLYLSIMNGSLLEVTEIQPLRWNFHGRPPGGDVSYISDAGNLRPGTLFTVSAXSTGDLYEFDKGTKPSWKKHIWSEELAGSISLSSSAGCALHGLLGSNSVSLFLISKVCYNLFYHSESQIT

SEQ ID NO: 95111 - protein, 145 aa, Setaria italica
  Transcript Sequence Number=SeqID_29137
  Subcellular localization annotation: CTP_CleavageSite=84; ConfidenceScore=5.61e-01
MLLLRGARAASAASTAVAAGASARRSISMRLTAMAAMSSGGRRRKGQRRGEAKSPPPSPPPPPPPLPRHGETPSSKKKSGARPSVEAKKNRPAELEEARGPRRPEGGEARKGGAQQRPQEKAKAKRAVRWKCASGCGACCKLDKG

SEQ ID NO: 95112 - protein, 110 aa, Setaria italica
  Transcript Sequence Number=SeqID_29138
  Subcellular localization annotation: CTP_CleavageSite=45; ConfidenceScore=5.43e-01
DITTSSPPASMPLTFRTTTHESSRPQLAPFVAMCLPHSPQLAVFRASNGPARTWQDLQPKSQGRCSNKIWVYKQFKTNLTVYIKASLVLYLRPSVVCIFHDKDKFLLNFQ

SEQ ID NO: 95113 - protein, 53 aa, Setaria italica
  Transcript Sequence Number=SeqID_29139
EWLLCFSSSSPLLESLVSSHGRWFHGLPPSAGGAVVSGGVGPSIRRPIYSCGR

SEQ ID NO: 95114 - protein, 351 aa, Setaria italica
  Transcript Sequence Number=SeqID_29140
  Gene Ontology: Mol. function=hydrolase activity, hydrolyzing O -glycosyl compounds; Cellular component=cell wall; Biological process= carbohydrate metabolic process
  Homolog annotation: Hit_ID=C0IRH3; Match level="QueryCoverage=84%, HitCoverage=82%, E-value=3e-91, Identity=53%"; Hit description =Xyloglucan endotransglucosylase/hydrolase 14
  Pfam annotation: Domain name=Glyco_hydro_16; Domain location=38-223; Score=285.0; E_value=1.7e-82; Accession=PF00722.13; Description =Glycosyl hydrolases family 16
  Pfam annotation: Domain name=XET_C; Domain location=266-315; Score =21.6; E_value=9e-05; Accession=PF06955.4; Description=Xyloglucan endo-transglycosylase (XET)
  Pfam module annotation: Pfam domain module=Glyco_hydro_16::XET_C; Domain location=38-223::266-315
MAACWHHYQVPVALLVAALTMMIMARPAAGSDVPTIAFDEGFTPLFGEANMERSPDDRTVRLTLNRYSGSGFISSHYYHHGFFSAAIRLPKDHTAGVVVAFYLSNGDVFEKNHDELDFEFLGNRRRHEWRLQTNVYGNGSTDRGREERYLMPFDPTAEAHRFSILWSSRVVIFYVDGVAVREVPRSGAMGGDYPSKPMALYATIWDGSTWATDNGRYKVNYKRGPFTAEFSDLVLRGCPAAAVMRHEDTAALQLQLGAAAENRDRCAGAEFELMTADYAIVTPRKRMEMRRWRQRQMLYTVCYDTNRYPAPFPECDVNMAERQKFWEWGESKVVRPRVRGRSGRRRPATQL

SEQ ID NO: 95115 - protein, 80 aa, Setaria italica
  Transcript Sequence Number=SeqID_29141
KDHDKMLGRTKPSIVRSFLHCTDIVDEINIFIAVGADGHRIIFIFDFHTNDLNLTLQQCAFLVNRKDRSKPKGTCRSYVF

SEQ ID NO: 95116 - protein, 89 aa, Setaria italica
  Transcript Sequence Number=SeqID_29142
QVRGVVNNEIGFSGLDILQSINEVQLSVYIPWDKERIIAAKDPKTREKIEEEERQEQRRKKGELKKKVQEQLARNRNEPILTFDNIYLG

SEQ ID NO: 95117 - protein, 112 aa, Setaria italica
  Transcript Sequence Number=SeqID_29143
  Gene Ontology: Mol. function=DNA binding
QVDGSNADASNDLEGHEWEQTSEPEKSQNNAWELANKLQENAQHIHTILKEEADEDAGQNHALAGSVSPDAMKTARQKADELIKSLGGLVSYLNQFTELVKENGFENIVGMT

SEQ ID NO: 95118 - protein, 97 aa, Setaria italica
  misc_feature (11)..(11): Xaa can be any naturally occurring amino acid
  Transcript Sequence Number=SeqID_29144
KIQVGKTTRHXRYVSIDLNKTQCKLSLECFLQVYRVCLTLQTKLAILKRNANLTFQAISEFEERVSKLIWENQTNPFHILQSPGNKNFKEVSELLLP

SEQ ID NO: 95119 - protein, 87 aa, Setaria italica
  Transcript Sequence Number=SeqID_29145
KKLVVLSCMHIVDVSFSLEVSQLVCLNSIQIRIICCCACQFCLWLQYLLLFPTFLFGCFVSLSNNKLEHRLICWLSSTVLSYNAMLF

SEQ ID NO: 95120 - protein, 91 aa, Setaria italica
  Transcript Sequence Number=SeqID_29146
  Gene Ontology: Mol. function=metal ion binding; Cellular component =chromosome
  Homolog annotation: Hit_ID=Q336R3; Match level="QueryCoverage=81%, HitCoverage=8%, E-value=4e-22, Identity=70%"; Hit description=E3 ubiquitin-protein ligase BRE1-like 2
DNLQGELEESMAELEESRRKLVVLQLQKHGSVMDASGVNAVNGGISTDKSSDQSMSWQDLKDAVDAAKTLAGNRLLELHQTQEDNLILSKE

SEQ ID NO: 95121 - protein, 120 aa, Setaria italica
  Transcript Sequence Number=SeqID_29147
  Gene Ontology: Mol. function=ATP-dependent helicase activity; Cellular component=vacuole; Biological process=nuclear-transcribed mRNA catabolic process, nonsense-mediated decay
  Homolog annotation: Hit_ID=Q2QZE8; Match level="QueryCoverage=75%, HitCoverage=6%, E-value=3e-14, Identity=50%"; Hit description =Retrotransposon protein, putative, unclassified, expressed
  Pfam annotation: Domain name=WW; Domain location=12-40; Score=35.7; E_ value=1.9e-07; Accession=PF00397.18; Description=WW domain
GSLRFAPDDPTLPAPWKALIDGATLYYWNPETNVTQYEKPGAAAAAPPLPAGPPPTIPAQVPEPAPGAFSQPGMQFGQAGQGVHQERPGQATYPQAGQLGQQQQQQTQQPAQQQPFQTCL

SEQ ID NO: 95122 - protein, 71 aa, Setaria italica
  misc_feature (31)..(31): Xaa can be any naturally occurring amino acid
  Transcript Sequence Number=SeqID_29148
DVTCNAIRRDLTVDGGRWAPTQQGRRVVSGXAEAAEAVLQIERLVFKDLVADTIRELADADRPLPRRKLVF

SEQ ID NO: 95123 - protein, 65 aa, Setaria italica
  Transcript Sequence Number=SeqID_29149
CSGYLSTIFFSIYILLFIALPQKIQNYNRKHYCWKTNALLTLYRSPVVTEAKFYKFVKTETRGYL

SEQ ID NO: 95124 - protein, 289 aa, Setaria italica
  misc_feature (137)..(137): Xaa can be any naturally occurring amino acid
  misc_feature (276)..(276): Xaa can be any naturally occurring amino acid
  Transcript Sequence Number=SeqID_29150
  Homolog annotation: Hit_ID=Q10KZ9; Match level="QueryCoverage=99%, HitCoverage=85%, E-value=1e-135, Identity=76%"; Hit description =Nodulation protein, putative, expressed
NEEEQTKSICSKPAVPHEQRRYVHFPKPMTYDRGECACTPVRFFVIVSMQRSGSGWFETLLNSHPNVSSNGEIFSVRDRRENISTILRTLDKLHSMDWLTSAAKNECTSAFGLKWMLNQGLMEHHEDIIDYLNRKGXMVILLFRRNTLRRLISVLANNHDRRTKQLNGIHKSHVHSKEEAEILARFKPKMDVSTLIPSIRNAEHSMRTCLGHFSKTRHMILYYEDVISDKNALSRVQEFLGVPVTKLSSQHVKIHTRPLPDLVENWEDVSDMLNGXKYARFLDDADYVK

SEQ ID NO: 95125 - protein, 87 aa, Setaria italica
  misc_feature (47)..(47): Xaa can be any naturally occurring amino acid
  Transcript Sequence Number=SeqID_29151
  Homolog annotation: Hit_ID=Q10KZ9; Match level="QueryCoverage=93%, HitCoverage=24%, E-value=4e-17, Identity=50%"; Hit description =Nodulation protein, putative, expressed
MLSQERMSVYSLKGSKGPVFPLRSILVFFIALFGFYVCYFSFNQFNXENEEKMTNEEEQTKSICSKPAVPHEQRRYVHFPKPMTYDR

SEQ ID NO: 95126 - protein, 199 aa, Setaria italica
  misc_feature (6)..(6): Xaa can be any naturally occurring amino acid
  misc_feature (12)..(12): Xaa can be any naturally occurring amino acid
  Transcript Sequence Number=SeqID_29152
  Gene Ontology: Mol. function=calcium ion binding; Cellular component =integral to membrane; Biological process=multicellular organismal development
  Homolog annotation: Hit_ID=Q0IKM2; Match level="QueryCoverage=82%, HitCoverage=21%, E-value=1e-81, Identity=89%"; Hit description=Ca2+ binding protein cbp1
  Pfam annotation: Domain name=LETM1; Domain location=1-111; Score= -39.5; E_value=6.3e-08; Accession=PF07766.5; Description=LETM1-like protein
NFAKLXNDELTXDNMSRPRLVNMCKYMGIQPFGTDHYLRFMLRKKLQDIKNDDKMIQAEGVESLSEYELRQACRERGHLGLLSTEEMRQQLRDWLDLSLNHSVPSSLLILSRAFTVSGRMKPEEAVVATLSSLPDEVVDTVGTVLPSEDSVSERKRKLEFLEMQEELIKEEEKKKEKEEKAKLEEPKAIEEDLALKEMT

SEQ ID NO: 95127 - protein, 82 aa, Setaria italica
  Transcript Sequence Number=SeqID_29153
PAILEFYWCDGFDRFICWIFFSLHPEEPKVKPPKRTAYLSKHSLLTVWMLTPTFAKCRDDMVYLYNRVYPKSLKKSETWNAT

SEQ ID NO: 95128 - protein, 85 aa, Setaria italica
  Transcript Sequence Number=SeqID_29154
  Gene Ontology: Mol. function=cysteine-type endopeptidase activity; Cellular component=vacuole; Biological process=proteolysis
  Homolog annotation: Hit_ID=Q6F6A5; Match level="QueryCoverage=100%, HitCoverage=17%, E-value=5e-31, Identity=68%"; Hit description =Cysteine protease
  Pfam annotation: Domain name=Peptidase_C1; Domain location=1-85; Score=-36.4; E_value=5.5e-09; Accession=PF00112.15; Description =Papain family cysteine protease
KNQGACGGCWAFSAVAAMEGINKIATGKLVSLSEQELIDCDRKSHGCKGGRMDYAFQFVISNGGIDTEADYPYTGRDGTCNEAKK

SEQ ID NO: 95129 - protein, 95 aa, Setaria italica
  Transcript Sequence Number=SeqID_29155
  Gene Ontology: Mol. function=transferase activity, transferring groups other than amino-acyl groups
  Homolog annotation: Hit_ID=B6SRZ2; Match level="QueryCoverage=100%, HitCoverage=22%, E-value=3e-41, Identity=88%"; Hit description =Anthranilate N-benzoyltransferase protein 1
  Subcellular localization annotation: CTP_CleavageSite=33; ConfidenceScore=5.02e-01
GASTYCAVTAHLWRAMCAARGLAPGVDTRLRVPANVRHRLRPPLPRSYFGNAIVRDLVTARVEDVLARPLGFVARAIGDAVGRVDDAYARSVVDY

SEQ ID NO: 95130 - protein, 87 aa, Setaria italica
  Transcript Sequence Number=SeqID_29156
KIWAGQGEFTSRVSVGRACEARERLAKPPSVFLYASVHVPLFLSHTHCTCVYVYSLNPVTTCVRMTRGERAGNGIYYMRTRVIRREG

SEQ ID NO: 95131 - protein, 142 aa, Setaria italica
  Transcript Sequence Number=SeqID_29157
  Gene Ontology: Mol. function=transcription activator activity; Cellular component=nucleus; Biological process=regulation of transcription, DNA-dependent
  Homolog annotation: Hit_ID=B6UCL5; Match level="QueryCoverage=87%, HitCoverage=54%, E-value=2e-67, Identity=98%"; Hit description =Homeobox-leucine zipper protein ATHB-4
  Pfam annotation: Domain name=HALZ; Domain location=65-109; Score =82.5; E_value=1.5e-21; Accession=PF02183.10; Description=Homeobox associated leucine zipper
  Pfam annotation: Domain name=Homeobox; Domain location=10-64; Score =68.5; E_value=2.5e-17; Accession=PF00046.21; Description=Homeobox domain
  Pfam module annotation: Pfam domain module=HALZ::Homeobox; Domain location=65-109::10-64
GSCGIDGSRKKLRLSKDQSAVLEDSFREHPTLNPRQKAALAQQLGLRPRQVEVWFQNRRARTKLKQTEVDCEFLKRCCETLTEENRRLQKEVQELRALKLVSPHLYMHMSPPTTLTMCPSCERVSSSGANSTGAAASSDRRA

SEQ ID NO: 95132 - protein, 84 aa, Setaria italica
  Transcript Sequence Number=SeqID_29158
  Subcellular localization annotation: CTP_CleavageSite=31; ConfidenceScore=5.33e-01
AKNLVPYLSSIGFSTCIQYPNRSMHVPALPRVASAGAARRASRPSPITIYKKLTPKLCTQGAYLQQSSMTSLLGGGGRRGRQQI

SEQ ID NO: 95133 - protein, 596 aa, Setaria italica
  Transcript Sequence Number=SeqID_29159
  Gene Ontology: Mol. function=serine-type peptidase activity; Cellular component=membrane; Biological process=proteolysis
  Homolog annotation: Hit_ID=B9RSG5; Match level="QueryCoverage=100%, HitCoverage=79%, E-value=0.0, Identity=68%"; Hit description =Dipeptidyl peptidase IV, putative
  Pfam annotation: Domain name=BAAT_C; Domain location=437-594; Score= -85.0; E_value=0.082; Accession=PF08840.3; Description=BAAT  Acyl-CoA thioester hydrolase C t
  Pfam annotation: Domain name=DPPIV_N; Domain location=1-310; Score =201.3; E_value=2.5e-57; Accession=PF00930.13; Description=Dipeptidyl peptidase IV (DPP IV) N-term
  Pfam annotation: Domain name=Peptidase_S15; Domain location=353-569; Score=-93.2; E_value=0.0041; Accession=PF02129.10; Description=X-Pro dipeptidyl-peptidase (S15 family)
  Pfam annotation: Domain name=Peptidase_S9; Domain location=395-595; Score=167.6; E_value=3.7e-47; Accession=PF00326.13; Description =Prolyl oligopeptidase family
  Pfam module annotation: Pfam domain module=BAAT_C::DPPIV_N::Peptidase_ S15::Peptidase_S9; Domain location=437-594::1-310::353-569::395-595
MIAYVKDDELHTLGFSNGENKQLTFGARESRKIHGLAEYIAQEEMERKMGFWWSPDSKHLAFTEVDSTEIPLYRIMHQGKSSVGPDAQEDHAYPFAGAANVKVRLGVVSSHGGEVTWMDLLCGDPNGSHGDEEYLARVNWMNNNALAVQVLNRSHTKLKLLKFDITTGKREVLLEEQHDTWITLHDCFTPLDKGVNSKHPGGFIWASEKTGFRHLYVHDKNGVCLGPLTQGDWMVEQIAAVNESSGIVYFTGTLDGPLETNLYQTNLFAGWDLPLQPPKRLTHGTGRHSVILEHQLLRFIDVYDSIKSPPVILLCSLLDGRVIMPLFEQPSTVPSLKKFQQLSPEIVEITAKDGTTLYGTLYLPDERKYGPPPYKTLVNVYGGPGVQLVSDTWMSTVDMRAQYLRSKGILVWKMDNRGSARRGLHFEGQLKYNIGRVDAEDQLEGAEWLINKGLAKPGHIGIYGWSYGGFLSAMCLARFPDTFCCAVSGAPVTAWDGYDTFYTEKFMGIPSEHPDAYEYGSIMHHTKNLKGKLLLIHGMIDENVHFRHTARLINSLMAEGKPYEILLFPDERHMPRRLSDRIYMEERIWDFVERSL

SEQ ID NO: 95134 - protein, 191 aa, Setaria italica
  Transcript Sequence Number=SeqID_29160
  Gene Ontology: Mol. function=nucleoside-triphosphatase activity; Cellular component=cytoplasm; Biological process=protein metabolic process
  Homolog annotation: Hit_ID=Q9SYS9; Match level="QueryCoverage=92%, HitCoverage=30%, E-value=4e-91, Identity=93%"; Hit description=101 kDa heat shock protein (Fragment)
  Pfam annotation: Domain name=ClpB_D2-small; Domain location=47-136; Score=119.9; E_value=8.4e-33; Accession=PF10431.1; Description=C -terminal, D2-small domain, of ClpB pr
TRNNLLAGMVGKNSMKVARDLVMQEVRRHFRPELLNRLDEIVIFDPLSHEQLRKVARLQMKDVAVRLAERGIALAVTDAALDIILSLSYDPVYGARPIRRWIEKRVVTQLSKMLIQEEIDENCTVYIDAAAAKDELAYKVDRSGGLVNAETGQKSDILIQVPNGAVRADAAQAVKKMRIMEEEDEDGMDEE

SEQ ID NO: 95135 - protein, 254 aa, Setaria italica
  Transcript Sequence Number=SeqID_29161
MLDIQKRRVRLMLLILGVLALSMTAEKFRELVGKEAASKSGQFTLMNCFDMGSGSLACTAKEGVKLYVNNLRTAHLERVRQHAMEKALADAMTEGLTPAEAAKQAQKVSAKAAKVAARQANRILGPIISSGWDFFEAMYFGGSMTEGFLRGTGTLFGTYAGGFHGEERFGKLGYLVGSQLGSWGGGRIGLMIYDIISGLKYMLQSIQPENESPSYASEDGSEYTDSYTSHEREESTYYETSEEQQEESKWFGLF

SEQ ID NO: 95136 - protein, 116 aa, Setaria italica
  Transcript Sequence Number=SeqID_29162
MTKDLDNLLLQAAGRTGKSQSRPSNPRWNSGGSGSDGFDDDSDSDAAPSYSRKKPPPQVPLKKRHQPEKGGRRAGGWRGDGDEDDEEDDDDDGRRSGGEDSDSAPSVGSDLYKDEE

SEQ ID NO: 95137 - protein, 78 aa, Setaria italica
  Transcript Sequence Number=SeqID_29163
TSSRSSAACRTREWQVLRSVLFCAVHLHQSGTCTQCQSGRVHTCHVDIADTSEVQKNGKNLYAADVFFQSFMMLWTDQ

SEQ ID NO: 95138 - protein, 324 aa, Setaria italica
  Transcript Sequence Number=SeqID_29164
  Gene Ontology: Cellular component=integral to membrane
  Homolog annotation: Hit_ID=B6UAE4; Match level="QueryCoverage=100%, HitCoverage=70%, E-value=1e-167, Identity=86%"; Hit description=AAP7
  Pfam annotation: Domain name=Aa_trans; Domain location=1-320; Score =150.2; E_value=6.2e-42; Accession=PF01490.10; Description =Transmembrane amino acid transporter protein
ILKANCYHDHGHDAPCDYGGSYYMLVFGAAQLFLSFIPDFHDMAWLSVVAAVMSFSYAFIGLGLGMATTISNGRIKGSVTGVPMRTPMQKIWRVSQAIGDIAFAYPYSLILLEIQDTLKSPPAENKTMKRASMISILVTTFFYLCCGCFGYAAFGSDAPGNLLTGFGFYEPYWLIDFANACIILHLLGGYQVYSQPIFQFADRFFAERFPDSGFVNDFHTMRVPCLPPWRVNLLRVCFRTVYVASTTAVAVAFPYFNEVLALLGALNFWPLAIYFPVEMYFIQRNVPRWSARWVVLQTFSVVCLLVSAFALVGSIEGLVTQKLG

SEQ ID NO: 95139 - protein, 231 aa, Setaria italica
  Transcript Sequence Number=SeqID_29165
  Homolog annotation: Hit_ID=B9T2I7; Match level="QueryCoverage=50%, HitCoverage=53%, E-value=3e-45, Identity=71%"; Hit description=RNA binding protein, putative
  Pfam annotation: Domain name=Med19; Domain location=22-189; Score= -49.9; E_value=0.0061; Accession=PF10278.1; Description=Mediator of RNA pol II transcription
RCTSGRSSSNLMDSDEKKFGKGPRELTGAVDLINHYKLLPHHDFFCKKPLPPAISDTHYLHNVVGDTEIRKGEGMELDQLVQNAYMRDKPAFIQPFDMEILGQAFQLRETAPVDLPSAEKGIPTISGKPKSESKDKEKKHKKHKDKDRDKDKEHKKHKHRHKDRSKDKDKDKNKEKKLDKSVHHDSAGDHSKKHHDKKRKHEGNEDSADVHKHKKSKHKSSKTDEMGNGLS

SEQ ID NO: 95140 - protein, 108 aa, Setaria italica
  Transcript Sequence Number=SeqID_29166
AATSRAAHHATRLIVAAAGHAGSLLGSASAGGEQGTGLPAHSQRPAYSPREGVDRAVARAIPARGCGGGRIGPDLGSAARDLQTPSAPARARRGGWICENGEWGSGVC

SEQ ID NO: 95141 - protein, 95 aa, Setaria italica
  Transcript Sequence Number=SeqID_29167
FLFPTCLVTTTTGINTKMLGISSTNSRAEHAVGVIVNKMLEEYVRVGYINKLNSRKKVWLKFSSATQNDQVQSQICLMKVHTSNYRFICTILAHF

SEQ ID NO: 95142 - protein, 84 aa, Setaria italica
  Transcript Sequence Number=SeqID_29168
PVPGRCGNSFQLSDALVGGELRREDAGGLPFHPSSITRHARAPDLLAPSGSLVARRRLLASPFLPSRLDPAPLGRRGSSPVLSD

SEQ ID NO: 95143 - protein, 72 aa, Setaria italica
  Transcript Sequence Number=SeqID_29169
  Gene Ontology: Mol. function=protein serine/threonine kinase activity; Biological process=protein amino acid phosphorylation
  Homolog annotation: Hit_ID=B6U0Y9; Match level="QueryCoverage=81%, HitCoverage=9%, E-value=4e-28, Identity=96%"; Hit description=ATP binding protein
IIFPSLPEYMSGGSVYDYLHKHKGVFKLPALVGVAMDVSKGMSYLHQNNIIHRDLKTANLLMDENGVSNLNI

SEQ ID NO: 95144 - protein, 578 aa, Setaria italica
  Transcript Sequence Number=SeqID_29170
  Gene Ontology: Mol. function=protein serine/threonine kinase activity; Biological process=protein amino acid phosphorylation
  Homolog annotation: Hit_ID=B6U0Y9; Match level="QueryCoverage=94%, HitCoverage=85%, E-value=0.0, Identity=93%"; Hit description=ATP binding protein
  Pfam annotation: Domain name=ACT; Domain location=182-248; Score =44.0; E_value=5.8e-10; Accession=PF01842.17; Description=ACT domain
  Pfam annotation: Domain name=Pkinase; Domain location=297-546; Score =271.4; E_value=2e-78; Accession=PF00069.17; Description=Protein kinase domain
  Pfam annotation: Domain name=Pkinase_Tyr; Domain location=297-546; Score=309.6; E_value=6.3e-90; Accession=PF07714.9; Description =Protein tyrosine kinase
  Pfam module annotation: Pfam domain module=ACT::Pkinase::Pkinase_Tyr; Domain location=182-248::297-546::297-546
  Subcellular localization annotation: CTP_CleavageSite=19; ConfidenceScore=5.19e-01
ASGGGAAGPATSSSSAAVAAQARKQQQQQRHKLEVYTEVLRRLHESGLPEARAPGFDDELWNHFNRLPARYAMDVNVERAEDVLTHRRLLEQARDPAQRPAFAVRAVQVSPILDGNQTDADSNTAGEEVASRLLNRQQSIHPPPAFGSSTNLEALALEVSKSQGQDHDSTSDNGRSLYRPMHEITFSTIDKPKLLSELTSLLGELGLNIQEAHAFSTNDGYSLDVFVVVGWHDEETEDLVEAVQKEIGRIEETQAWSSSHSWSTPVENMQIAENPAADRVEIPTDGSSEWEIDVKLLKFGNKVASGSYGDLYRGTYCSQDVAIKVLKPERINADMQREFAQEVYIMRKVRHKNVVQFIGACTKPPNLCIVTEYMSGGSVYDYLHKHKGVFKLPALVGVAMDVSKGMSYLHQNNIIHRDLKTANLLMDENGTVKVADFGVARVKAQSGVMTAETGTYRWMAPEVIEHKPYDHKADVFSFGILLWELLTGKIPYEYLTPLQAAVGVVQKGLRPTIPKHTHAKLCELLQKCWQQDPAQRPDFSEILETLQRISEEVGDEHEGKHKDKLLGGFFSALRGRGH

SEQ ID NO: 95145 - protein, 260 aa, Setaria italica
  Transcript Sequence Number=SeqID_29171
  Gene Ontology: Mol. function=protein binding; Cellular component =chloroplast
  Homolog annotation: Hit_ID=O49534; Match level="QueryCoverage=31%, HitCoverage=18%, E-value=2e-26, Identity=68%"; Hit description=LRR -like protein
  Subcellular localization annotation: CTP_CleavageSite=82; ConfidenceScore=5.69e-01
MAAPVATSLAPRVSLPPPARPTAASSRGLDLVSLPGLRHRHLRLRRSPSPVGTAAASSPSVPSSSPDPGSGIGEALGGVEIYSAATGEPVLFRDLWDQNEGMAVVALLRHFGCPCCWELASVLRDTKERFDLAGVKLIAIGVGTPDKARILAERLPFPLEYLYADPERKAYDLLGLYFGVGRTFFNPASAKVFSRFDSLKEAVKNYTIEATPDDRAGVLQQGGMFVFKGKELLYARKDEGTGDHAPLDDVLNICCKVPVS

SEQ ID NO: 95146 - protein, 75 aa, Setaria italica
  Transcript Sequence Number=SeqID_29172
ILYPYFCSTRECRCGVIHGFLFANAAAVFGGLRPSRPASGVQAPLIMTRPDDLPAGGRWFCLIFQQTVEERLSMR

SEQ ID NO: 95147 - protein, 99 aa, Setaria italica
  Transcript Sequence Number=SeqID_29173
  Gene Ontology: Mol. function=ATP-dependent DNA helicase activity; Biological process=DNA repair
  Homolog annotation: Hit_ID=B9RA07; Match level="QueryCoverage=100%, HitCoverage=9%, E-value=3e-36, Identity=68%"; Hit description=ATP -dependent DNA helicase pcrA, putative
TVKECHSEDSQCAFVIDKIIETTSTSADSCNFGNIAVLYRRQITGKAFQVAFRNRKIPFNVHGVAFYRKKVIKAIMAILRTTLPGCDDGPWRQAFKGPF

SEQ ID NO: 95148 - protein, 157 aa, Setaria italica
  Transcript Sequence Number=SeqID_29174
  Gene Ontology: Mol. function=protein serine/threonine kinase activity; Biological process=protein amino acid phosphorylation
  Homolog annotation: Hit_ID=Q25AG2; Match level="QueryCoverage=100%, HitCoverage=19%, E-value=3e-50, Identity=60%"; Hit description =H0512B01.12 protein
  Pfam annotation: Domain name=PAN_2; Domain location=18-87; Score= -11.7; E_value=0.025; Accession=PF08276.3; Description=PAN-like domain
DEERKYKGCKPDFQPQSCDLDEAAASMQFKLIPMNSVDWPLADYEEYSPITKDQCQQLCLTDCFCAVAVFHDQDNTCWKKKMPLSNGKMGDNVERTLFVKVRKNNSTQAELVGSNKWKEDKKNWILGSSLFLGSSVLVNILLTSVILFGTYCTITVK

SEQ ID NO: 95149 - protein, 87 aa, Setaria italica
  Transcript Sequence Number=SeqID_29175
RRLSRRHAYLEYPCSSDDGLPGTSAVLRNVSDQFLRDMSGADAQRLGAPNIGATPLNNSTSNKWTEEDTGRKSIPFRRSDQNVPCQN

SEQ ID NO: 95150 - protein, 210 aa, Setaria italica
  misc_feature (21)..(21): Xaa can be any naturally occurring amino acid
  Transcript Sequence Number=SeqID_29176
  Gene Ontology: Mol. function=actin binding; Cellular component =integral to membrane; Biological process=actin cytoskeleton organization and biogenesis
  Homolog annotation: Hit_ID=B6SPE7; Match level="QueryCoverage=99%, HitCoverage=27%, E-value=7e-89, Identity=80%"; Hit description=AFH1
  Pfam annotation: Domain name=FH2; Domain location=1-210; Score=85.0; E_value=2.8e-22; Accession=PF02181.15; Description=Formin Homology 2 Domain
EEMIETLFVSNSTRRSSKSGXQGPNSSLCSQENKVLDPKKSQNIAIMLRALNATKEEVCKALLDGQAESLGTELLEMLLKMAPTREEEIKLKEFREDALCKLGPAESFLKAVLAIPFAFKRVEAMLYITNFDSEVDYLKTSFKTLEAACEELRGSRLFHKILDAVLKTGNRMNTGTNRGNAHAFKLDALLKLVDVKGADGKTTLLHFVGS

SEQ ID NO: 95151 - protein, 188 aa, Setaria italica
  Transcript Sequence Number=SeqID_29177
  Homolog annotation: Hit_ID=Q9AWU7; Match level="QueryCoverage=79%, HitCoverage=42%, E-value=2e-73, Identity=90%"; Hit description =P0044F08.15 protein
LKVKVIIRSICPESDEDDMTLWSGSEDDDDDDIPSEAHPSERSDSYIDKVFEFDESPKYRTISELLKAENEPPELSPGKQARKLAVENALKKLKKGPDGRYINVFDVVTDIDILIGAFENIVSGPEYAELREGGPKKLNIQFFKDIQARMRDPNFKFSPELKLKPKSKLVSRKKWQKAKARKRKNDRR

SEQ ID NO: 95152 - protein, 71 aa, Setaria italica
  Transcript Sequence Number=SeqID_29178
  Gene Ontology: Mol. function=RNA methyltransferase activity; Biological process=RNA processing
  Homolog annotation: Hit_ID=Q10T58; Match level="QueryCoverage=98%, HitCoverage=4%, E-value=2e-28, Identity=82%"; Hit description=RNA methyltransferase, TrmH family protein, expressed
DNRNFTSIGISYETMMQLAKSSWILHLSCNKRRVAPIAALLSAILHPAIFCKLEMHQTNEEGPGPLKWFIE

SEQ ID NO: 95153 - protein, 56 aa, Setaria italica
  Transcript Sequence Number=SeqID_29179
TNITIQSLRSVAPVFCGGTRWDLQNHHKKPKLCLLLIMRDNNARTLVTKSYVHDIR

SEQ ID NO: 95154 - protein, 131 aa, Setaria italica
  misc_feature (107)..(107): Xaa can be any naturally occurring amino acid
  Transcript Sequence Number=SeqID_29180
  Homolog annotation: Hit_ID=B9RST1; Match level="QueryCoverage=71%, HitCoverage=13%, E-value=2e-13, Identity=43%"; Hit description =Catalytic, putative
IFCLRVYFLYFNFLTYVPQFYFDSITIFFHNVLNPPEVPEDHYFMTPHGSLGQGHWDTEHDIEYRFAQSPTGTAHATTTEDAIAQLRSRRLMSRMEVPSGATTEDRXDRTEVLLGASLFHFFCSVALKFPT

SEQ ID NO: 95155 - protein, 203 aa, Setaria italica
  Transcript Sequence Number=SeqID_29181
  Gene Ontology: Mol. function=hydrolase activity
  Homolog annotation: Hit_ID=B9RST1; Match level="QueryCoverage=100%, HitCoverage=26%, E-value=1e-101, Identity=83%"; Hit description =Catalytic, putative
MDQLVNFIIRPPRADYSPNDDLLEQEFMLKGRWFQRKDLEVKNDLGKKLQCSHYMPVVIPEGKALPCVIYCHGNSGCRADASEAAIILLPTNITVFTLDFSGSGLSEGEHVTLGWNEKEDLKAVVNYLRTDGNVSCIALWGRSMGAVTSLMYGAEDPSIAGMVLDSPFSNLVDLMMELVDTYKYPLPKFTVKLAIQHMRKIVK

SEQ ID NO: 95156 - protein, 446 aa, Setaria italica
  Transcript Sequence Number=SeqID_29182
  Gene Ontology: Mol. function=hydrolase activity
  Homolog annotation: Hit_ID=B9RST1; Match level="QueryCoverage=95%, HitCoverage=56%, E-value=7e-91, Identity=45%"; Hit description =Catalytic, putative
FRLICYSLSISLCGVRSMGAVTSLMYGAEDPSIAGMVLDSPFSNLVDLMMELVDTYKYPLPKFTVKLAIQHMRKIVKRKANFDIMDLDTIQVAKRCFVPALFGHATEDDFILPHHSDKIYESYIGDKNIIKFDGDHNSPRPQFYFDSITIFFHNVLNPPEVPEDHYFMTPHGSLGQGHWDTEHDIEYRFAQSPTGTAHATTTEDAIAQLRSRRLMSRMEVPSGATTEDRGDRTEGLDSDVGPSSSSVSTATPPNGRNGRLLTPTSDDGEYVEYSFDSLSDMPYTMEDEDRMLMRAIMESLKDYEQSSTKNAQSVSSDAASKENNTVKDCNGVAGAALEPDASLVPTDAPGKHTAVCNSGAKAGEVQSVDTQAVNNTASANASGSSEPLASTQITNGKLVSAESQKTTQNVSGEDGTRATLVVQKSRTGGLIDGLTQKWGSFFKNND

SEQ ID NO: 95157 - protein, 138 aa, Setaria italica
  Transcript Sequence Number=SeqID_29183
  Gene Ontology: Mol. function=microtubule motor activity; Cellular component=microtubule associated complex; Biological process =microtubule-based movement
  Homolog annotation: Hit_ID=Q75LL2; Match level="QueryCoverage=100%, HitCoverage=10%, E-value=9e-53, Identity=76%"; Hit description =Kinesin-like protein
VQKNDYDAALVAAFRREQEKEAQLKATIAAKQIAEQLVCSSKAEEVRSFKMRLKFREDRIKRLEQVASGKLSAEALLLQERESLVKELEVLRSQLDHNPEITKFAMENLQLKEELRRLQSFVDESEREMMHDQIIILQ

SEQ ID NO: 95158 - protein, 201 aa, Setaria italica
  Transcript Sequence Number=SeqID_29184
  Gene Ontology: Mol. function=protein binding; Cellular component =integral to membrane; Biological process=regulation of exocytosis
  Homolog annotation: Hit_ID=Q6GPW4; Match level="QueryCoverage=74%, HitCoverage=81%, E-value=3e-22, Identity=35%"; Hit description =Transmembrane protein 205
GGAFLAAGVLFAPDALRLSGSSDGGGTAAAARLVHLLAFATAWGAGLWVTFIGGIVMFKYLPRHQFGSLQGKMFPAYFMLISACSAISVAAFAYLHPWKTASTIESYQLGFLLSALGCNLSNLLVFTPMTVEMMMKRHKMEKDLGIGSEVGYSKNAETAKRSPALAAMNRKFGMIHGLSSLANILSFGSLAPIVYSWLPSS

SEQ ID NO: 95159 - protein, 309 aa, Setaria italica
  misc_feature (152)..(152): Xaa can be any naturally occurring amino acid
  Transcript Sequence Number=SeqID_29185
  Gene Ontology: Mol. function=diacylglycerol kinase activity; Cellular component=plasma membrane; Biological process=activation of protein kinase C activity
  Homolog annotation: Hit_ID=C3SAE9; Match level="QueryCoverage=99%, HitCoverage=67%, E-value=1e-139, Identity=79%"; Hit description =Sphingosin kinase
  Pfam annotation: Domain name=DAGK_cat; Domain location=1-96; Score =33.5; E_value=8.8e-07; Accession=PF00781.16; Description =Diacylglycerol kinase catalytic domain
TAYAGHAKVLASTVDLKKFPDGIVCVGGDGIVNEVLNGLLGRDDFEVAIRLPIGIIPAGSDNSLVWTVLGIKDPVSAAIALAKGSFTPIDVFAVKWIQAGVTHFGLTASYYGFVADVLQLSENFRLQLGPFRYVAAGLLKFLSLPQYRFEVXYLPLSPGTNPELKSPTEKSHEQLSDDGKVTGGIQLDGRIGDSWVTRKGEFLGIFVCNHFCKPARGLLSPIIAPKAQHDDGSLDLILVRGSGRLKLFCFFVAYQLCWHLLLPYVEYVKVKQVKIRPVGNTHNGCGVDGELLRGEGKTEWQCSLLPAQG

SEQ ID NO: 95160 - protein, 87 aa, Setaria italica
  Transcript Sequence Number=SeqID_29186
  Homolog annotation: Hit_ID=Q5N730; Match level="QueryCoverage=100%, HitCoverage=6%, E-value=2e-28, Identity=81%"; Hit description =Erythroid differentiation-related factor 1-like protein
DHKLWKLVLLLGESYLALGEAYKNDGQLQRTLKVVELACLVYGSMPGHLDGDEFISSMSNSSLGREDACLKTKLVLDEAGYCKSTKC

SEQ ID NO: 95161 - protein, 118 aa, Setaria italica
  misc_feature (113)..(113): Xaa can be any naturally occurring amino acid
  Transcript Sequence Number=SeqID_29187
  Gene Ontology: Mol. function=nucleoside-triphosphatase activity; Cellular component=mitochondrion
  Homolog annotation: Hit_ID=Q5ZDA1; Match level="QueryCoverage=75%, HitCoverage=26%, E-value=2e-26, Identity=54%"; Hit description=BCS1 protein-like
MKEVMVTPAEVAEVLMRNDDADVALHDLIDLLPHIVATAKAMKDQHRNLKMHMIEYDAWTAVDLRHPSTFDTLAMDKKLLYGPPGTGKSSLIAAMANYLKFDIYDLELTEVKXTRTSE

SEQ ID NO: 95162 - protein, 97 aa, Setaria italica
  misc_feature (10)..(10): Xaa can be any naturally occurring amino acid
  Transcript Sequence Number=SeqID_29188
  Gene Ontology: Mol. function=serine-type endopeptidase activity; Cellular component=intracellular; Biological process=protein modification process
  Homolog annotation: Hit_ID=Q0WRN6; Match level="QueryCoverage=100%, HitCoverage=99%, E-value=3e-47, Identity=88%"; Hit description =Polyubiquitin 4 UBQ4
  Pfam annotation: Domain name=ubiquitin; Domain location=1-49; Score =60.2; E_value=7.6e-15; Accession=PF00240.15; Description=Ubiquitin family
  Pfam annotation: Domain name=ubiquitin; Domain location=57-97; Score =16.1; E_value=0.0072; Accession=PF00240.15; Description=Ubiquitin family
  Pfam module annotation: Pfam domain module=ubiquitin::ubiquitin; Domain location=1-49::57-97
KAKIQDKEGXIPPDQQRLIFAGKQLEDGRTLADYNIQKESTLHLVLRLRGGMQIFVKTLTGKTITLEVESSDTIDNVKAKIQDKEGIPPDQQRLIFA

SEQ ID NO: 95163 - protein, 109 aa, Setaria italica
  Transcript Sequence Number=SeqID_29189
  Gene Ontology: Mol. function=serine-type endopeptidase activity; Cellular component=plasma membrane; Biological process=protein modification process
  Homolog annotation: Hit_ID=O64955; Match level="QueryCoverage=84%, HitCoverage=91%, E-value=4e-44, Identity=92%"; Hit description =Polyubiquitin (Fragment)
  Pfam annotation: Domain name=ubiquitin; Domain location=38-106; Score= 138.0; E_value=2.9e-38; Accession=PF00240.15; Description=Ubiquitin family
GAAILKLLASKDEPLLVRRDCTLHLVLRLRGGMQIFVKTLTGKTITLEVESSDTIDNVKAKIQDKEGIPPDQQRLIFAGKQLEDGRTLADYNIQKESTLHLVLRLRGGH

SEQ ID NO: 95164 - protein, 76 aa, Setaria italica
  Transcript Sequence Number=SeqID_29190
FFVCKMIHVTIALYNVMERERSSLYRNQIKKMEIQALIIQMHRPPPTQCKKNSTHSQWRSQSNQQKKRRTREDANN

SEQ ID NO: 95165 - protein, 123 aa, Setaria italica
  Transcript Sequence Number=SeqID_29191
LSLTGENECAWRCFIDHLEAAGTSAKNTSAVAWRHYARVAVVRPCQRRARARRLQLASGYDAIYDRPGPASLKFPNRRAAHYSAIEMRRVNGPARHARAHRASPSPPVGGPGSGPGQDQIQTA

SEQ ID NO: 95166 - protein, 255 aa, Setaria italica
  Transcript Sequence Number=SeqID_29192
  Gene Ontology: Mol. function=transferase activity, transferring glycosyl groups; Biological process=metabolic process
  Homolog annotation: Hit_ID=C4MF42; Match level="QueryCoverage=97%, HitCoverage=51%, E-value=2e-73, Identity=56%"; Hit description=UDP -glycosyltransferase UGT99C4
RPRPSCIISDWCSPWTAGVASSLGIPRLFFHGPSCFFALCEIMAVDHGLLELIAAAGDDERHLVPGMPVPVTVTKATPPGLFCYPGTELLRREAMEAMRTADGAVLNTFSDLEAQFLEGYEAALGKPVWALGPLSLCNRDEDSTTSRGKTAVDGKQAIMAWLDEQAPGSVVYVSFGSVARKLPKQLFEIGHGLEDSGRSFLWVVKEREAAAPEVREWLDALEARTAGRGLVVRGWAPQLAVLSHRAVGGLRHPTV

SEQ ID NO: 95167 - protein, 72 aa, Setaria italica
  misc_feature (13)..(13): Xaa can be any naturally occurring amino acid
  Transcript Sequence Number=SeqID_29193
  Gene Ontology: Mol. function=hydrolase activity
  Homolog annotation: Hit_ID=B6T7F6; Match level="QueryCoverage=77%, HitCoverage=16%, E-value=1e-15, Identity=75%"; Hit description =Histone deacetylase 11
SPEGVAIRDERFXIAKDQSIPLLMLTSGGYMKSSARVIADSIINLSKKNLIDIGEKSPWIVAESYPGLVFGM

SEQ ID NO: 95168 - protein, 299 aa, Setaria italica
  misc_feature (98)..(98): Xaa can be any naturally occurring amino acid
  misc_feature (113)..(113): Xaa can be any naturally occurring amino acid
  misc_feature (194)..(194): Xaa can be any naturally occurring amino acid
  Transcript Sequence Number=SeqID_29194
  Gene Ontology: Mol. function=hydrolase activity; Cellular component =histone deacetylase complex; Biological process=regulation of transcription, DNA-dependent
  Homolog annotation: Hit_ID=B6T7F6; Match level="QueryCoverage=93%, HitCoverage=78%, E-value=1e-109, Identity=71%"; Hit description =Histone deacetylase 11
  Pfam annotation: Domain name=Hist_deacetyl; Domain location=2-271; Score=178.7; E_value=1.7e-50; Accession=PF00850.11; Description =Histone deacetylase family
AGLLQSDRIVEPLEASEDDLLLVHSESYLNSLKSSEEVARIVEVPAVALLPNLLVQQKLLYPFRKQVGGSVLSAKLALERGWAINIGGGHHCSAEEGXGFCAYADISLCIQFXAFVCLNISRVMIIDLDAHQGNGHEKDFGGDGRVYTLDMYNSGIYPFDHVAKKYIDQKVELDSGTKTEDYLENLDKALNVTXAESRFLPQLIVYNAGTDILDGDPLGRLKVSPEGVAIRDEKVFRFAKDQSIPLQTMTSGGYMKSSARVIADSIINLSKKNLIDIGTRCIEIDNGDNYVCLMDVPSV

SEQ ID NO: 95169 - protein, 169 aa, Setaria italica
  misc_feature (148)..(148): Xaa can be any naturally occurring amino acid
  Transcript Sequence Number=SeqID_29195
  Homolog annotation: Hit_ID=Q7XTS2; Match level="QueryCoverage=99%, HitCoverage=17%, E-value=1e-54, Identity=63%"; Hit description =OSJNBa0008M17.13 protein
KSSGHSFTDQLTHMAQNDYLLNSSHEALGSTGKKKCEVARRRNDLETNKRKKARKGQPDETEGGPSGELNITSGNIQTEPRNTSNQFIPDQLMQGHYVLGHNFGLGISQNLHNNLNQFDQAASVSTLQQQPFPGNGQLTQGYPSDMHXLQFVETTPQIDHQNGDEGQSS

SEQ ID NO: 95170 - protein, 186 aa, Setaria italica
  Transcript Sequence Number=SeqID_29196
  Gene Ontology: Mol. function=hydrolase activity
  Homolog annotation: Hit_ID=Q5XLS1; Match level="QueryCoverage=99%, HitCoverage=74%, E-value=1e-37, Identity=42%"; Hit description =Protein S
  Pfam annotation: Domain name=Abhydrolase_1; Domain location=1-180; Score=-10.6; E_value=0.042; Accession=PF00561.12; Description =alphabeta hydrolase fold
QALPDGERAVLVGHSFGGMSVALAAEAFPDKVAAAVFVTAFLPDCTNPRSHVIEKLTLTDWMDSVTDAEHDPPSVFLGPEFLREKLYQLSPPEDYTLSQSLARVSSHYVADLRGQPPFSEARYGAVRKVYVVCDQDQAMLEPYQRAMIAGCPVAEVRAIAGADHMAMFSAPAELAGHLADVANTYA

SEQ ID NO: 95171 - protein, 84 aa, Setaria italica
  Transcript Sequence Number=SeqID_29197
  Gene Ontology: Mol. function=transporter activity; Cellular component= membrane; Biological process=oligopeptide transport
  Homolog annotation: Hit_ID=B9T1Z5; Match level="QueryCoverage=96%, HitCoverage=14%, E-value=1e-12, Identity=48%"; Hit description =Peptide transporter, putative
  Subcellular localization annotation: CTP_CleavageSite=52; ConfidenceScore=5.22e-01
RGSGILPLWSSSIVLSVAFGTQINFTVLQALAMDRALGGFTVPAGSMTVVILVSIVASLILLDRALLPLWRRLTGHTPTPLQRI

SEQ ID NO: 95172 - protein, 82 aa, Setaria italica
  Transcript Sequence Number=SeqID_29198
  Gene Ontology: Mol. function=translation initiation factor activity; Cellular component=fibrillar center; Biological process=translation
  Homolog annotation: Hit_ID=B6SYA1; Match level="QueryCoverage=86%, HitCoverage=14%, E-value=2e-28, Identity=84%"; Hit description =Eukaryotic translation initiation factor 3 subunit 6-interacting protein
KLVLWAQRQANCQQNKLIDENVSSQLKEKYNDKMTKMQRYDDEAYAAYDELFSYACPKFITPSPPVLDQPTYHNDAYLFKTK

SEQ ID NO: 95173 - protein, 520 aa, Setaria italica
  Transcript Sequence Number=SeqID_29199
  Gene Ontology: Mol. function=translation initiation factor activity; Cellular component=fibrillar center; Biological process=translation
  Homolog annotation: Hit_ID=B6SYA1; Match level="QueryCoverage=99%, HitCoverage=99%, E-value=0.0, Identity=95%"; Hit description =Eukaryotic translation initiation factor 3 subunit 6-interacting protein
  Pfam annotation: Domain name=Paf67; Domain location=110-508; Score =797.6; E_value=8e-237; Accession=PF10255.1; Description=RNA polymerase I-associated factor PA
MAAPYDREDGLAPAPPQHAPDAYDPNYVPDSVKTFVVHLYRHIRDKNVYEIHQMYEGGFQRLSDRLFRDAPWPSAEAVAPYCDGDHVFLLLYRELWYRHAHARLSPLTAAHRAESWTNYCDLFSVVLHGVVNMQLPNQWLWDMVDEFVYQFQSFCQYRAKLKNKTEDELQQLKQFDKAWNVYGVLNYLQALVEKSMITQILEREKEGLEQFTATDGYDYEGGSNVLKVLGYYSMIGLLRIHCLLGDYHTGLKCLAPIDLNQQGVYTIVIGSHISTIYHYGFANLMMRRYVDATREFNKILLYILKYKQYHQKSPQYDQILKKNEQMYALLAICLSLCPQNKLIDENVSSQLKEKYNDKMTKMQRYDDEAYAAYDELFSYACPKFITPSPPVLDQPLTNYNQDAYRLQLKLFLYEVKQQQLLSGIRSYLKLYSTITIGKLAQYMEVDEATLKSILMTYKHKMHAVDSDGKIVSSADFDFYIVEDIIHVVESKPTKSHGDYFLRQILKFEEMMGELEKVQLD

SEQ ID NO: 95174 - protein, 82 aa, Setaria italica
  Transcript Sequence Number=SeqID_29200
  Gene Ontology: Mol. function=protein serine/threonine kinase activity; Biological process=protein amino acid phosphorylation
  Homolog annotation: Hit_ID=B9RAQ8; Match level="QueryCoverage=97%, HitCoverage=12%, E-value=3e-15, Identity=43%"; Hit description =BRASSINOSTEROID INSENSITIVE 1-associated receptor kinase 1, putative
ATGKEPSDDYFKEVDEVGIVRWLRRVVQSGNHAEAIDAAIAGAGYDEQIVLVLRIAVFCTQDDPKERPSAKDVRCMLSQINN

SEQ ID NO: 95175 - protein, 307 aa, Setaria italica
  Transcript Sequence Number=SeqID_29201
  Gene Ontology: Mol. function=hydrolase activity, hydrolyzing O -glycosyl compounds; Cellular component=extracellular region; Biological process=carbohydrate metabolic process
  Homolog annotation: Hit_ID=Q8RVZ1; Match level="QueryCoverage=100%, HitCoverage=100%, E-value=1e-157, Identity=89%"; Hit description =Putative xylanase inhibitor protein
  Pfam annotation: Domain name=Glyco_hydro_18; Domain location=32-294; Score=115.9; E_value=1.4e-31; Accession=PF00704.20; Description =Glycosyl hydrolases family 18
MAFRRPLALHPLVIAFVLVSCLAGAATAKQTGQLTVFWGQNAGEGTLREACDTGLYSTVVISFYSVFGHGRYWGDLSGHPLAGVGADIKHCQSRNILVLLSIGGPGNGYSLPSSASAAAVADNLWNAHLGGRRNGVYRPFGDAAVDGIDFYIDQGAPDHYDELARRLDGYNRFYRGRKGVRLTATPRCGFPDRRLGAALRTGLFERIHVRFYGNDTCSLGKGGTYGVVGQWEKWTAAFPRTQVYLGLAPAESGVPEGAQGTVAVYLKYLYYDLLPKVQKANNYGGVMVWDRFADKKTRWSGVVKGWA

SEQ ID NO: 95176 - protein, 232 aa, Setaria italica
  misc_feature (7)..(7): Xaa can be any naturally occurring amino acid
  misc_feature (45)..(45): Xaa can be any naturally occurring amino acid
  misc_feature (160)..(160): Xaa can be any naturally occurring amino acid
  Transcript Sequence Number=SeqID_29202
  Gene Ontology: Mol. function=actin binding; Cellular component =integral to membrane; Biological process=actin cytoskeleton organization and biogenesis
  Homolog annotation: Hit_ID=Q10Q99; Match level="QueryCoverage=100%, HitCoverage=25%, E-value=1e-111, Identity=87%"; Hit description =Formin-like protein 8
  Pfam annotation: Domain name=FH2; Domain location=1-232; Score=72.4; E_value=1.6e-18; Accession=PF02181.15; Description=Formin Homology 2 Domain
RDYNGDXSKLGSAERFLKAVLDIPFAFKRVDAMLYRANFETEIKXLKGKSFETLEAACEDLRGSRLFLKLLEAVLRTGNRMNVGTNRGEAKAFKLDTLLKLADVKGTDGKTTLLHFVVQEIIRSEDAKSEKESAIVIHSSKDEQLRRQGLKLVSGLSSEXGNVKKAAMMDFDVLHGYVNKLETGLEKIKSVLQLEGQCTQGQKFFTTMQSFLKEAEKEIEQVRGEEKRALVR

SEQ ID NO: 95177 - protein, 208 aa, Setaria italica
  misc_feature (42)..(42): Xaa can be any naturally occurring amino acid
  misc_feature (106)..(106): Xaa can be any naturally occurring amino acid
  misc_feature (124)..(124): Xaa can be any naturally occurring amino acid
  Transcript Sequence Number=SeqID_29203
  Gene Ontology: Mol. function=nucleic acid binding; Cellular component= ribonucleoprotein complex; Biological process=mRNA processing
  Homolog annotation: Hit_ID=B9SUT3; Match level="QueryCoverage=73%, HitCoverage=31%, E-value=8e-29, Identity=46%"; Hit description=U1 small nuclear ribonucleoprotein 70 kD, putative
NNYSLILVPHFEQTTLFAVTGASRGYAFVEYETDREMRRAYXDYYRQQLMPGWIPRRLGGGLGGRKESGQLRFGGRERPFRAPLYDHKMPMSYIQYFCLHRHSSLXFMTMCCRVRTFLTYRFVXNRQPIPYESYDKLKKLGIPPPPEGRYMTRYQVPPPPRWKSSNTDMEDSPPRRRSKDRASDSAYRRQRSSTDDDETPRRRKSGRV

SEQ ID NO: 95178 - protein, 272 aa, Setaria italica
  Transcript Sequence Number=SeqID_29204
  Gene Ontology: Mol. function=nucleic acid binding; Cellular component= ribonucleoprotein complex; Biological process=mRNA processing
  Homolog annotation: Hit_ID=B9SUT3; Match level="QueryCoverage=51%, HitCoverage=34%, E-value=2e-52, Identity=71%"; Hit description=U1 small nuclear ribonucleoprotein 70 kD, putative
  Pfam annotation: Domain name=RRM_1; Domain location=1-52; Score=21.8; E_value=0.0019; Accession=PF00076.14; Description=RNA recognition motif. (a.k.a. RRM, RBD, o
SRYGKVKSMRLVRDIVTGASRGYAFVEYETDREMRRAYQDAHHSIIDGSEVIVDYYRQQLMPGWIPRRLGGGLGGRKESGQLRFGGRERPFRAPLQPIPYESYDKLKKLGIPPPPEGRYMTRYQVPPPPRWKSSNTDMEDSPPRRRSKDRASDSAYRRQRSSTDDDETPRRRKSGHNVREESQSRRSARSSVAREDSSYSSQRKPTGHDDGHRKRRRSREPGEVSPSDEDGSCKRERTSTESGRSPDRYMHHHRHHTEDAYESRHSEHRDRR

SEQ ID NO: 95179 - protein, 303 aa, Setaria italica
  Transcript Sequence Number=SeqID_29205
  Subcellular localization annotation: CTP_CleavageSite=49; ConfidenceScore=5.46e-01
MATAVLRRPLLAALLPAGAGATGPSQFRIRRRRPPHPVLAVSSDSPKPVASTSGGGGNPDEEPPVLPLLQELADCLVLPPKFLSQLPRDLRLDLNDAAFDLSNGPVLDECGQEVGDLLLNLAKSWELADTSTSNSLAKQLPSMEPYLTRSAKSAFGKRLVSTGRRFQSMGQYGQGEFKKIAETMIKNGKLLSTRPVVQSDVQAMKEKRKLKFGELEFELTAEKANIGAAAGAVFGFISWQLAQGVQGIPDSTKQYANDSALQLAKSLKVALLVLGYTSTGLSLFTALGLLLLAQQINSEDKSE

SEQ ID NO: 95180 - protein, 142 aa, Setaria italica
  Transcript Sequence Number=SeqID_29206
  Gene Ontology: Mol. function=metal ion binding
  Homolog annotation: Hit_ID=Q5VMF2; Match level="QueryCoverage=61%, HitCoverage=8%, E-value=9e-24, Identity=65%"; Hit description=PHD zinc finger protein-like
SETRSSLEKIISEQLPQQNHSPLAIPLVLLSSQIEHVLCQHCLESKQPQDPPTPSYPCKSNSSLTPSSKEALLKNISSSKKGGSAGKVTNKDNGLHKLVFNVLLDGTEVAYYVDGQVVLGQGLSLDFLQFTLYFLWFIICIA

SEQ ID NO: 95181 - protein, 91 aa, Setaria italica
  misc_feature (76)..(76): Xaa can be any naturally occurring amino acid
  Transcript Sequence Number=SeqID_29207
  Gene Ontology: Mol. function=metal ion binding
  Homolog annotation: Hit_ID=Q5VMF2; Match level="QueryCoverage=94%, HitCoverage=8%, E-value=7e-38, Identity=87%"; Hit description=PHD zinc finger protein-like
RCQRKVACLTKHPGNIRELLNTGLLEGMPVMYIIPHSKKAVLKGVITGCNIRCFCPSCNGSKAVSAYYFEQHAGSXTKKHPADYIYLGNGN

SEQ ID NO: 95182 - protein, 114 aa, Setaria italica
  Transcript Sequence Number=SeqID_29208
  Gene Ontology: Mol. function=metal ion binding
  Homolog annotation: Hit_ID=Q5VMF2; Match level="QueryCoverage=85%, HitCoverage=10%, E-value=2e-39, Identity=71%"; Hit description=PHD zinc finger protein-like
HVCYLLCALLTVGSTVVSAALLRVMGGDVAELPLVATSRDVQGLGYFQALFSCIERVLISLKIKHFVLPAAHEAEGIWMNKFGFSRIPPEEGTSYLYKAVPLPSSQETESSALE

SEQ ID NO: 95183 - protein, 174 aa, Setaria italica
  Transcript Sequence Number=SeqID_29209
  Gene Ontology: Mol. function=metal ion binding
  Homolog annotation: Hit_ID=Q5VMF2; Match level="QueryCoverage=56%, HitCoverage=10%, E-value=1e-19, Identity=55%"; Hit description=PHD zinc finger protein-like
FPIAAQEVIAQKMLDTPQPSHAEAEPEAAREDSVIATPNVPMENCVALDDAASTLLESAVADGNDHCDNSNSNGASLQLQAVDNASVPNALLVEDTATPVAAAGLKPARRFTRSLLKNKPDKEESTATEGHAIPDGSKDASFDLALLMEKPQRRFTRSLLKTKVESSLVESDDA

SEQ ID NO: 95184 - protein, 564 aa, Setaria italica
  Transcript Sequence Number=SeqID_29210
  Gene Ontology: Mol. function=metal ion binding
  Homolog annotation: Hit_ID=Q5VMF2; Match level="QueryCoverage=94%, HitCoverage=52%, E-value=0.0, Identity=73%"; Hit description=PHD zinc finger protein-like
  Pfam annotation: Domain name=PHD; Domain location=377-419; Score =38.5; E_value=2.7e-08; Accession=PF00628.21; Description=PHD-finger
  Pfam annotation: Domain name=PHD; Domain location=463-519; Score =12.5; E_value=0.0011; Accession=PF00628.21; Description=PHD-finger
  Pfam module annotation: Pfam domain module=PHD::PHD; Domain location =377-419::463-519
CRLVLVLVSPPSSNWLFVVLICLGNSLLQIYDGSKDASDLALMEKPQRRFTRSLLKTKVESSLVESDDALDSASDSPPSVKKMEMKMSKKVACLTKHPGNIRELLNTGLLEGMPVMYIIPHSKKAVLKGVITGCNIRCFCPSCNGSKAVSAYYFEQHAGSTKKHPADYIYLGNGNSLRDVLRASERSPLEALEKTIRSSIGPVAKGSRINCLNCNEDVLLSSQIEHVLCQHCLESKQPQDPPTPSYPCKSNSSLTPSSKEALLKNISSSKKGGSAGKVTNKDNGLHKLVFNVLLDGTEVAYYVDGQRKVDGYIKDQRIYCNHCNRVVSPSAFEAHAGEGSRRKPYDNIFTSNGVSLHELAMKISKDMEQSERETDDLCRECGHGGDIFPCKICPRSFHPACVGLPEAPSEWYCDNCRNLVQKEKALAENKNAKAAGRQAGVDSIEQILKRAIRIVPLSDDLGGCALCKKEDFNNAVFDDRTVILCDQCEKEYHVGCLQSQWQVELKELPEGEWFCCGSCSETRSSLEKIISDGAQLLAEPDIEIIRKKHETRDLCMDTSTDLKW

SEQ ID NO: 95185 - protein, 302 aa, Setaria italica
  Transcript Sequence Number=SeqID_29211
  Gene Ontology: Mol. function=metal ion binding
  Homolog annotation: Hit_ID=Q5VMF2; Match level="QueryCoverage=86%, HitCoverage=25%, E-value=1e-123, Identity=77%"; Hit description=PHD zinc finger protein-like
  Pfam annotation: Domain name=PHD; Domain location=24-73; Score=-1.1; E_value=0.035; Accession=PF00628.21; Description=PHD-finger
MWEYLTDMLLLNLLLYLTDMLLFLCCFSAVITYSLVILCDQCEKEYHVGCLQSQWQVELKELPEGEWFCCGSCSETRSSLEKIISDGAQLLAEPDIEIIRKKHETRDLCMDTSTDLKWQLLCGKRATEDGRILLSAAVPIFHQSFDPIIEVHTKRDLIPEMVHGRGPKEGMAGQDYSGMYCALLTVGSTVVSAALLRVMGGDVAELPLVATSRDVQGLGYFQALFSCIERVLISLKIKHFVLPAAHEAEGIWMNKFGFSRIPPEELEAHLNGVHLTIFQGTSYLYKAVPLPSSQETESSALE

SEQ ID NO: 95186 - protein, 77 aa, Setaria italica
  Transcript Sequence Number=SeqID_29212
NSSSQEQFLKLTTNMEDGQPQENKGDANEQSDDTPEGSQQDKSELPQGSQKQANGQEASKEDLDGTGQEENHQGEVS

SEQ ID NO: 95187 - protein, 51 aa, Setaria italica
  Transcript Sequence Number=SeqID_29213
QFFSLSFKKEKKRKHWCIMLHLFKKVNILIQFLSISELVVFNNFVYRRGLL

SEQ ID NO: 95188 - protein, 41 aa, Setaria italica
  Transcript Sequence Number=SeqID_29214
  Homolog annotation: Hit_ID=B6T729; Match level="QueryCoverage=100%, HitCoverage=6%, E-value=4e-14, Identity=90%"; Hit description=Alpha -mannosidase/ calcium ion binding protein
MSGGSGPLPYSMRDVGAGGAYNNAKFRHRSRLKMLVQSLAT

SEQ ID NO: 95189 - protein, 220 aa, Setaria italica
  Transcript Sequence Number=SeqID_29215
  Gene Ontology: Mol. function=cytokinin dehydrogenase activity; Cellular component=extracellular region; Biological process =cytokinin metabolic process
  Homolog annotation: Hit_ID=Q9T0N8; Match level="QueryCoverage=90%, HitCoverage=37%, E-value=2e-73, Identity=70%"; Hit description =Cytokinin dehydrogenase 1
  Pfam annotation: Domain name=Cytokin-bind; Domain location=6-203; Score=279.2; E_value=9.4e-81; Accession=PF09265.2; Description =Cytokinin dehydrogenase 1, FAD and cytok
VRNVLPTVVTSIRGNYDNATAAASVDQVLKSVLDGLRFEPGFSFERDVTYVEFLDRVHSEEVALNKVGLWRVPHPWLNMFVPGSRIADFDRGVFKGILQGADIVGPLIVYPVNKAKWYDGMSAATPAEDVFYVVSLLFSSVANDLARLQTQNQRIVKFCDSTGIQYKSYLARYTNRDDWIRHFGSDKWKWFVDMKNKYDPKKLLGHLQLMIHDHASPPTR

SEQ ID NO: 95190 - protein, 97 aa, Setaria italica
  Transcript Sequence Number=SeqID_29216
  Homolog annotation: Hit_ID=B6T6X8; Match level="QueryCoverage=100%, HitCoverage=81%, E-value=7e-49, Identity=96%"; Hit description =Mitochondrial ribosomal protein L43
  Pfam annotation: Domain name=L51_S25_CI-B8; Domain location=4-55; Score=66.0; E_value=1.5e-16; Accession=PF05047.8; Description =Mitochondrial ribosomal protein L51  S25  CI-B8 domain
SRGIRAFMEAHLPAFKEKNPHLEVVTELVRGQHPNLKGIYKNHNERVVCVRNLPPEDILLQATRLRNSLGRKVVKLRTRHVTKRPSVQGTWTTDLKM

SEQ ID NO: 95191 - protein, 73 aa, Setaria italica
  Transcript Sequence Number=SeqID_29217
NNNSDIGPRKRARVGDVAGAGLIMDLEGHHALLPPVPVPQAFAPAGDVQSSRVLCSAAASTSGRTPGDTAPAS

SEQ ID NO: 95192 - protein, 85 aa, Setaria italica
  Transcript Sequence Number=SeqID_29218
  Homolog annotation: Hit_ID=O04530; Match level="QueryCoverage=98%, HitCoverage=15%, E-value=5e-31, Identity=71%"; Hit description =F20P5.12 protein
YKAAGVFAPFTESIQVTEFTIRDAYMLKVFEDNQTRLPGWCNAAADRLPFCQILGEYKMDLPEYNTIEPYANMNENCPSAPPTYS

SEQ ID NO: 95193 - protein, 62 aa, Setaria italica
  Transcript Sequence Number=SeqID_29219
  Gene Ontology: Mol. function=receptor activity
  Homolog annotation: Hit_ID=Q7XIS2; Match level="QueryCoverage=98%, HitCoverage=11%, E-value=4e-09, Identity=49%"; Hit description =Receptor-like kinase-like
YYHLITVHPDCNWILYVTGLESMLMAYDMDYDEVHVIQNLRSRSEMSCIPYVPFYAKSLTEG

SEQ ID NO: 95194 - protein, 52 aa, Setaria italica
  Transcript Sequence Number=SeqID_29220
ALLLPLVLGVRIPAQLAAVSWFLACRSPWIQLDSTISCSELTKDLIGPVTWS

SEQ ID NO: 95195 - protein, 71 aa, Setaria italica
  Transcript Sequence Number=SeqID_29221
CMLYGLLDRENNCQFCGRRVKGYFFLKQLITNKAPYFACCKRCKEHKAMLITVIYILSDYLLSCSMSRGFW

SEQ ID NO: 95196 - protein, 134 aa, Setaria italica
  Transcript Sequence Number=SeqID_29222
TTQEVKVLSSWLLDKVLGRADLPQQDPENKGEAAGSELFMDMLKAVKDPMAKFIGHAENLKTSYNMIGVLSNMMEDLIEVFKALKEPIERFLGLADQPPQDSSSSKDGSPHQRPAATANEDLLEMVKTAKEPME

SEQ ID NO: 95197 - protein, 258 aa, Setaria italica
  Transcript Sequence Number=SeqID_29223
  Gene Ontology: Mol. function=hydrolase activity; Cellular component =cytoplasm
  Homolog annotation: Hit_ID=B6T2Y2; Match level="QueryCoverage=100%, HitCoverage=100%, E-value=1e-142, Identity=92%"; Hit description =Hydroxyacylglutathione hydrolase
  Pfam annotation: Domain name=Lactamase_B; Domain location=11-174; Score=98.5; E_value=2.3e-26; Accession=PF00753.19; Description =Metallo-beta-lactamase superfamily
MKIIPVPCLEDNYAYLIVDESTKKAAAVDPVEPEKVLKAASEVGAYVDCVLTTHHHWDHAGGNEKMRLQVPGIKVYGGSLDNVKGCTDQVENGTKLSLGNDIEILCLHTPCHTKGHISYYATSKEGEDPVVFTGDTLFIAGCGRFFEGTAEQMYQSLIVTLGSLPKSTQVYCGHEYTVKSLKFMLTLEPENEKMKQKLEWAEKQREANQPTVPSTIGDEFEINTFMRVDLPEIQAKFGAKSPVEALREVRKIKDNWKG

SEQ ID NO: 95198 - protein, 156 aa, Setaria italica
  Transcript Sequence Number=SeqID_29224
  Gene Ontology: Mol. function=hydrolase activity, acting on acid anhydrides, catalyzing transmembrane movement of substances; Cellular component=integral to membrane; Biological process=metal ion transport
  Homolog annotation: Hit_ID=Q9M3H5; Match level="QueryCoverage=98%, HitCoverage=18%, E-value=1e-59, Identity=71%"; Hit description =Putative cadmium/zinc-transporting ATPase HMA1, chloroplastic
  Pfam annotation: Domain name=E1-E2_ATPase; Domain location=29-156; Score=-44.1; E_value=0.011; Accession=PF00122.12; Description=E1-E2 ATPase
SDGRINIHVLMALAAFASIFMGNALEGGLLLAMFNLAHIAEEYFTSKSMFDVRELKENHPEFALLLETSGEESVQFSNLSYTRVPVHDLEVGSHILVRAGEAVPVDGEVYQGSSTVTIEHLTGETKPLERTVGDAIPGGARNLEGMMIVKVTKSWE

SEQ ID NO: 95199 - protein, 621 aa, Setaria italica
  misc_feature (64)..(64): Xaa can be any naturally occurring amino acid
  misc_feature (75)..(75): Xaa can be any naturally occurring amino acid
  misc_feature (186)..(186): Xaa can be any naturally occurring amino acid
  Transcript Sequence Number=SeqID_29225
  Gene Ontology: Mol. function=hydrolase activity, acting on acid anhydrides, catalyzing transmembrane movement of substances; Cellular component=integral to membrane; Biological process=metal ion transport
  Homolog annotation: Hit_ID=B9SG08; Match level="QueryCoverage=95%, HitCoverage=71%, E-value=0.0, Identity=62%"; Hit description=Heavy metal cation transport atpase, putative
  Pfam annotation: Domain name=E1-E2_ATPase; Domain location=1-239; Score=154.5; E_value=3.2e-43; Accession=PF00122.12; Description=E1 -E2 ATPase
  Pfam annotation: Domain name=Hydrolase; Domain location=243-500; Score=94.4; E_value=4e-25; Accession=PF00702.18; Description =haloacid dehalogenase-like hydrolase
  Pfam module annotation: Pfam domain module=E1-E2_ATPase::Hydrolase; Domain location=1-239::243-500
AMFNLAHIAEEYFTSKSIFDVRELKENHPEFALLLETSGEESVQFSNLSYTRVPVHDLEVGSHXLVRAGELLYSXAVPVDGEVYQGSSSVTIEHLTGETKPLERTVGDAIPGGARNLEGRMIVKVTKSWVDSTLNRIVQLTEEGQLNKPKLQRWLDEFGEYYSRVVVALSLAVALLGPLLFKWPFXGNSVCRGSIYRGLGLMELASPCALAVAPLAYATAISSLASKGILLKGGHVLDALSACQSIAFDKTGTLTTGKLTCKAIEPIHGHLGVTNGHSDPSCCTPNCESEALAVAAAMEKGTTHPIGRAVLDHSVGKELPAVAVESFECLPGRGVAATLSGVKARNSENELSEASIGSVDYISSLYRSNGESEQIKQAVKGSAYGPEFVQAALSVDKKVTLFHFEDEPRSGVCEVIHTLREKAKLRIMMLTGDHESSAQRVAKAVCIDEVHFSLKPEDKLDKVKAVSRERGGGLIMVGDGINDAPALAAATVGMVLAQRASATAVAVADVLLLQDNICGVPFCIAKARQTTSLVKQSVALALTCIVFAALPSVLGFLPLWLTVLLHEGGTLLVCLNSIRALNTPTWSLVDDIRQLFDGLRNYFSSKFNNSSSNYVANTVPL

SEQ ID NO: 95200 - protein, 300 aa, Setaria italica
  Transcript Sequence Number=SeqID_29226
  Homolog annotation: Hit_ID=Q67UH7; Match level="QueryCoverage=94%, HitCoverage=73%, E-value=3e-72, Identity=52%"; Hit description =Mitochondrial transcription termination factor-like
  Pfam annotation: Domain name=mTERF; Domain location=1-268; Score= -31.9; E_value=5.7e-06; Accession=PF02536.6; Description=mTERF
SSAIPRADVARLVAGDPRFLCARVERTLAPRVAELSDLGLSRSEIARFIPVAIYSFRRCSLSRTVNFWLPVFGSFDKLLGGLRNNAGIFSVDFENVAKPNLDFLQQCGVSACEIAGANVYSSRLLTMKPDCLREAAKRVEELGIKRNSPMFRHALCLVAFMSKQDVAKKIGVLKTLGFSQHHVSKIVRKAPLVLGASEDRIRRVVDFWMRDVGLELQYIAQRPALIMYSLERRLLPRHRLLNVLRAKRLRNLELNYYTAAMGEKTFVEKFVTPYKDIVPSLAEDYGSGHSSMSGLLVKEC

SEQ ID NO: 95201 - protein, 74 aa, Setaria italica
  Transcript Sequence Number=SeqID_29227
GRGADSTAGQREWRRLKLGHARPKRRKPLVSLYHTWMLRFSRITLVRCSNSSLQFPCQATPSRLENKTELVQTS

SEQ ID NO: 95202 - protein, 104 aa, Setaria italica
  Transcript Sequence Number=SeqID_29228
  Homolog annotation: Hit_ID=Q7XKC7; Match level="QueryCoverage=61%, HitCoverage=38%, E-value=3e-22, Identity=84%"; Hit description =OSJNBa0064G10.4 protein
AAASLARLAVPQLVSVAGAVLPRAWAVARFWLVPPYLFVTVHLIILVIWKLSDHKHFQQAQANQHNGPWPVAQHTPHPPAASVPAAEVARPRRQGQGGVRRRRR

SEQ ID NO: 95203 - protein, 126 aa, Setaria italica
  Transcript Sequence Number=SeqID_29229
  Gene Ontology: Cellular component=nucleolus
  Homolog annotation: Hit_ID=Q9M9V4; Match level="QueryCoverage=97%, HitCoverage=30%, E-value=1e-20, Identity=40%"; Hit description =F6A14.6 protein
HYLFASGNVDSMVLGAAVAELDGGEVVRLMRYLNKWIGKYLKFPDAQACPEAMGMLGLEQCDSVPSFGAVARALGVLLDNHFSHLVLNADVREELRAAEVTVRELAVEAESSGPILDLLRRLQQDK

SEQ ID NO: 95204 - protein, 128 aa, Setaria italica
  misc_feature (16)..(16): Xaa can be any naturally occurring amino acid
  Transcript Sequence Number=SeqID_29230
  Gene Ontology: Mol. function=protein binding; Cellular component =membrane coat; Biological process=intracellular protein transport
  Homolog annotation: Hit_ID=Q5QMU1; Match level="QueryCoverage=66%, HitCoverage=13%, E-value=2e-25, Identity=70%"; Hit description=AP-3 complex delta subunit-like protein
TTSRSNWALIKVLKLXARLAPLESRLAARIVDPVCQLLTRSAAMSLTFECIRTVLTALPAHDAAVRLAIGKAKEFLAAADDPNLRYLGLLALGMLGPAYATAVNDCRDVIAQSLGDADSNIRREALHL

SEQ ID NO: 95205 - protein, 78 aa, Setaria italica
  Transcript Sequence Number=SeqID_29231
  Gene Ontology: Mol. function=chitinase activity; Cellular component =cell wall; Biological process=cell wall catabolic process
  Homolog annotation: Hit_ID=Q9SPT9; Match level="QueryCoverage=91%, HitCoverage=26%, E-value=9e-26, Identity=71%"; Hit description =Chitinase
  Pfam annotation: Domain name=Glyco_hydro_19; Domain location=1-77; Score=-60.0; E_value=9.3e-05; Accession=PF00182.11; Description =Chitinase class I
AVGFDGLREPEVVAGDPEVAFKTALWFWMTPRAPKPSCHDVMVGRYRPSGDDLAKNRTAGFGLTTNIINGGSSADRAE

SEQ ID NO: 95206 - protein, 87 aa, Setaria italica
  Transcript Sequence Number=SeqID_29232
  Subcellular localization annotation: CTP_CleavageSite=23; ConfidenceScore=5.15e-01
SSTTTLTRPPAHPPPPRQECCPRAHSPRARLLPLPPRVLPRRYLALQRHSEDTHTPTAAGRRSREQGWGTRRRRRRAARPRRATSTC

SEQ ID NO: 95207 - protein, 42 aa, Setaria italica
  Transcript Sequence Number=SeqID_29233
PKGPGFPTSEICGSKCVCSLPAAYRKLLRPSSPVIAKASTMC

SEQ ID NO: 95208 - protein, 42 aa, Setaria italica
  Transcript Sequence Number=SeqID_29234
RYLVARACMRSDTGNFWMPAIRSTLIPHTCSSETHIGFRVYI

SEQ ID NO: 95209 - protein, 37 aa, Setaria italica
  Transcript Sequence Number=SeqID_29235
TSNSISLDIIYSCICSLDLIDSDQNILEADRRLLQIS

SEQ ID NO: 95210 - protein, 125 aa, Setaria italica
  Transcript Sequence Number=SeqID_29236
  Homolog annotation: Hit_ID=Q6H5G7; Match level="QueryCoverage=90%, HitCoverage=23%, E-value=3e-23, Identity=46%"; Hit description=Leaf senescence protein-like
FLWETGVWAPGHARRYNATECNAKESHDCIRNGRPDTRYLDWRWQPAGGCPLPAFDAGAFLSAVHGKHVAFIGDSMARNQAQSLICLLTASFRYRLLYRDVGQQKHNFWSYAFPSYNVKVSYYWA

SEQ ID NO: 95211 - protein, 134 aa, Setaria italica
  misc_feature (69)..(69): Xaa can be any naturally occurring amino acid
  misc_feature (89)..(89): Xaa can be any naturally occurring amino acid
  Transcript Sequence Number=SeqID_29237
SLHYDLSLYGTNPFASSFDVQETSSARNENNEAQFASSNQDSRQGEGGKKRKQSHIESALEGYVEYKKXQTSKTLETLEEKKRREEEFXIEKCVDQVDAMVKLTNEKSYALDLFEYETLGKTFITTRILMFDYC

SEQ ID NO: 95212 - protein, 332 aa, Setaria italica
  Transcript Sequence Number=SeqID_29238
  Gene Ontology: Mol. function=protoporphyrinogen oxidase activity; Cellular component=mitochondrion; Biological process=porphyrin biosynthetic process
  Homolog annotation: Hit_ID=Q9FYV8; Match level="QueryCoverage=100%, HitCoverage=63%, E-value=1e-176, Identity=88%"; Hit description =Protoporphyrinogen IX oxidase
EHLSESVGSFFERHFGREVVDYLIDPFVAGTSAGDPESLSIRHAFPALWNLERKYHSIIVGAILSKLTAKGDPVKTGSDLSGKRRNRRASFSFHGGMQSLINALHNEVGDDNVKLGTEVLSLACTFDGLPSTGGWSISVDSKDAGSKDLAKNQTFDAVIMTAPLSNVQRMKFRKGGAPFVLDFLPKVNYLPLSLMVTAFKKEDVKKPLEGFGVLIPYKEQQKHGLKTLGTLFSSMMFPDRAPDDQYLYTTFVGGSHNRDLAGAPTSILKQLVTSDLKKLLGVEGQPTFVKHIYWRNAFPLYGRDYGSVLDAIEKMEKNLPGFFYAASGSKAA

SEQ ID NO: 95213 - protein, 74 aa, Setaria italica
  Transcript Sequence Number=SeqID_29239
VYVLRRAARHARALLVRRRRSEEEEELDARVVALVRMLVGKGKAGMVPEVLAEFAAICDHLLPRPPPAQPRHAY

SEQ ID NO: 95214 - protein, 106 aa, Setaria italica
  misc_feature (44)..(44): Xaa can be any naturally occurring amino acid
  Transcript Sequence Number=SeqID_29240
  Gene Ontology: Mol. function=protein serine/threonine kinase activity; Cellular component=extracellular region; Biological process=xenobiotic metabolic process
  Homolog annotation: Hit_ID=Q2XX98; Match level="QueryCoverage=76%, HitCoverage=46%, E-value=6e-26, Identity=76%"; Hit description =Pathogenesis-related protein 5
  Pfam annotation: Domain name=Thaumatin; Domain location=31-106; Score= -7.1; E_value=1.3e-07; Accession=PF00314.9; Description=Thaumatin family
MAPRAASSSVLLLILAALAAGASAATFTITNRCGYTVWPAGIPXVGGGTQLNPGETWTVDVPAGTSGRFWGRTGCSFNGGSGHCDSADCAGALSCTVSGQTPATLA

SEQ ID NO: 95215 - protein, 111 aa, Setaria italica
  Transcript Sequence Number=SeqID_29241
IWSCSCSSYYIAPKVNIEYIIQLVELPTTLSTTSTIHDRAYNPSTHGTAAIYGRQWPGSSPAPLTFSKSKYKRESKTRAEQLPNINLMSCHLNSVSICFTLAGSIWGAGSP

SEQ ID NO: 95216 - protein, 54 aa, Setaria italica
  Transcript Sequence Number=SeqID_29242
  Gene Ontology: Mol. function=DNA-directed RNA polymerase activity; Biological process=transcription
  Homolog annotation: Hit_ID=Q5QM90; Match level="QueryCoverage=98%, HitCoverage=14%, E-value=2e-16, Identity=79%"; Hit description=RNA polymerase III subunit-like protein
QLIHAALNLRQLVNCMAELLLEGEKDETKLRNRRNVLILALARHDESLMLFHDF

SEQ ID NO: 95217 - protein, 344 aa, Setaria italica
  Transcript Sequence Number=SeqID_29243
  Gene Ontology: Mol. function=DNA-directed RNA polymerase activity; Biological process=transcription
  Homolog annotation: Hit_ID=Q5QM90; Match level="QueryCoverage=98%, HitCoverage=94%, E-value=1e-136, Identity=67%"; Hit description=RNA polymerase III subunit-like protein
  Pfam annotation: Domain name=RNA_pol_Rpc82; Domain location=5-261; Score=124.8; E_value=2.7e-34; Accession=PF05645.5; Description=RNA polymerase III subunit RPC82
TQNRNLFDPLLDEQPTSTRKRAPKTVEAVLSLEQKIIRTAALSDAERFSEIPYSMEGSSNASDDHHHAVAGGKRKHEALEVDEEESIIAENEVLWRANFEKFIFCLKKKFCAERKKTKLKLSTLAIWEAFLEANITDNDNKTVTSPIDGILERVGQKEGGSSMTLDQIISVLNDLECISTTRDPEQYAFDLNKLVETCRNDEVESLVKKKHGQAAYTIFRLLLKQGCAVETDEITDRTILDKQIVHETLYKLWKDEYIDSERVPSATSGTGNTQFFVWRVKNTYREHYTDQLYHAALNLRQLVNCMAELLLEGEKDETKLRNRRNVLILALARHDESLMLFHDF

SEQ ID NO: 95218 - protein, 80 aa, Setaria italica
  Transcript Sequence Number=SeqID_29244
  Gene Ontology: Mol. function=cinnamoyl-CoA reductase activity; Biological process=cellular metabolic process
  Homolog annotation: Hit_ID=B6T555; Match level="QueryCoverage=92%, HitCoverage=21%, E-value=8e-28, Identity=78%"; Hit description =Dihydroflavonol-4-reductase
MASSPRVCVTGGGGFVASWLVKLLLSRGYAVHATVRDPDDPKNAFLMRLDGADENLRLFRADVLDIDSLAAAFAGCEGVF

SEQ ID NO: 95219 - protein, 508 aa, Setaria italica
  Transcript Sequence Number=SeqID_29245
  Gene Ontology: Cellular component=plasma membrane
  Homolog annotation: Hit_ID=UPI0001A827B6; Match level="QueryCoverage =93%, HitCoverage=92%, E-value=0.0, Identity=68%"; Hit description =integral membrane single C2 domain protein
  Pfam annotation: Domain name=C2; Domain location=264-346; Score =100.7; E_value=4.9e-27; Accession=PF00168.22; Description=C2 domain
MGLISGMVMGMIVGVAIMAGWSRVMLRRSRKRIAKAADIKVLGSLGRDDLKKLCGDNFPEWISFPQFEQVKWLNKHLSKLWPFIAEAATAVVKESVEPLLDDYRPPGIKSLKFSKFSLGTVSPKIEGIRIQNLQPGQIIMDIDFRWGGNPSIILAVDAAVASLPIQLKDLQVYTVIRVVFQLSEDIPCISAVVVALLADPEPKIQYTLKAIGGSLTAVPGLSDMIDDTVNSIVSDMLQWPHRLVVPLGVNVDTSDLELKPQGRLSVTVVKATSLKNKELIGKSDPYVRLYVRPMFKVKTQTRDDDLNPVWNETFELIVEDKETQSVIFEVYDEDKLQQDKRLGVAKLAVNDLEPEVAREISLKLLHSVDPLKNRDTKDRGTLYVKVMYHSFTKEEQLEALEAEKQAIEERKRLKEAGIIGSTMDAVGGAASLVGSGVGLVGTGIVGGVSLVGSGLGAGAGLVGSGIGAVGSGLGKAGKFMGRTVAGPFSMSRKNASSSTAPQPEQPSA

SEQ ID NO: 95220 - protein, 104 aa, Setaria italica
  Transcript Sequence Number=SeqID_29246
  Gene Ontology: Mol. function=transferase activity, transferring glycosyl groups; Biological process=metabolic process
  Homolog annotation: Hit_ID=A1IWC6; Match level="QueryCoverage=99%, HitCoverage=21%, E-value=2e-36, Identity=68%"; Hit description =Putative glucosyl transferase
STVLSFPGAPPFKVSELPQELADDGEGCQATLRVAARMVDARGILVNSFESLEPRAVRALRDGLCVPDRPTPPVYCVGPLVSPGGGDKEHQCLRWLDAQPDRSV

SEQ ID NO: 95221 - protein, 89 aa, Setaria italica
  Transcript Sequence Number=SeqID_29247
TLSIQFLPYPLPRCHPPTWGEGATGGGSRGVEFRRKLHFLSSELHLDAFPLLAANPTLRSAPLLLLHDSLRLFASHGLSARYAARVFST

SEQ ID NO: 95222 - protein, 134 aa, Setaria italica
  misc_feature (82)..(82): Xaa can be any naturally occurring amino acid
  Transcript Sequence Number=SeqID_29248
  Gene Ontology: Mol. function=protein serine/threonine kinase activity
  Homolog annotation: Hit_ID=B9S1Z3; Match level="QueryCoverage=95%, HitCoverage=10%, E-value=6e-20, Identity=46%"; Hit description=ATP binding protein, putative
SDVDAVEYGGDGTIVSDMFSLLSLCGSILNKESKQNNNQKCKLSNPHALVVHCCLALATIAACLKSEGESSASVILTSSQKXQRSRLSVLAHLSSVDDTVKSCLQPHCASAMLALSSLVSLENGGHTRSSLCET

SEQ ID NO: 95223 - protein, 69 aa, Setaria italica
  misc_feature (11)..(11): Xaa can be any naturally occurring amino acid
  Transcript Sequence Number=SeqID_29249
  Gene Ontology: Mol. function=transferase activity, transferring glycosyl groups; Cellular component=integral to membrane
  Homolog annotation: Hit_ID=Q339N5; Match level="QueryCoverage=89%, HitCoverage=8%, E-value=1e-15, Identity=67%"; Hit description =Cellulose synthase-like protein H1
QWVPFCRRHGXGVRAPFAYFSSGPPEDRMADKEFFREWTFMKNEYEKLVGRIENAEENSLLQSDNELAD

SEQ ID NO: 95224 - protein, 97 aa, Setaria italica
  Transcript Sequence Number=SeqID_29250
  Gene Ontology: Mol. function=DNA binding; Cellular component=nucleus
  Homolog annotation: Hit_ID=B6TZD4; Match level="QueryCoverage=64%, HitCoverage=60%, E-value=1e-20, Identity=69%"; Hit description =SANT/MYB protein
  Pfam annotation: Domain name=Myb_DNA-binding; Domain location=2-52; Score=33.1; E_value=1.1e-06; Accession=PF00249.23; Description=Myb -like DNA-binding domain
MSSSWTEYQNKLFEDALAIYDEDTPDRWQNIARAVGCGKSAEEVKRHYIKLEKDLQHMESTKGRQGSNHSSSGGSSSNGNSWGKNNDDKRMRYLKPQ

SEQ ID NO: 95225 - protein, 276 aa, Setaria italica
  Transcript Sequence Number=SeqID_29251
  Gene Ontology: Mol. function=DNA binding; Cellular component=nucleus; Biological process=regulation of transcription
  Homolog annotation: Hit_ID=Q9S9Z2; Match level="QueryCoverage=55%, HitCoverage=41%, E-value=4e-53, Identity=68%"; Hit description =F21H2.9 protein
  Pfam annotation: Domain name=Myb_DNA-binding; Domain location=18-63; Score=52.7; E_value=1.4e-12; Accession=PF00249.23; Description=Myb -like DNA-binding domain
GKSCRLRWTNYLRPDIKRGKFTQEEEQTILRLHSVLGNKWSAIAKHLPGRTDNEIKNFWNTHLKKKLIQMGFDPMTHRPRTDFFAALPQLIALANLRQLVEQRPWDDHAARLQVEAVQAAKLQCLQNLIQSAASIATNPSSSSINTIPDLEQIGLLSPPQMSSLSSLPSPSFLESISGQDIVAGQLPDIQIPNSFSEQPTSNDANQNSDFTPKSSVEGENETPKTLLLSENSLPPLTDFPISNFGDACSASSCDGSSIQFPSWPELFDEQFLSEFV

SEQ ID NO: 95226 - protein, 56 aa, Setaria italica
  Transcript Sequence Number=SeqID_29252
YRQGRPQRTTSTPLLRLKPSLQGCETLPDSLSYSHHRSVIDSLCTKHGHVDAGQSA

SEQ ID NO: 95227 - protein, 72 aa, Setaria italica
  Transcript Sequence Number=SeqID_29253
  Gene Ontology: Mol. function=DNA-directed RNA polymerase activity; Cellular component=nucleus; Biological process=regulation of transcription
  Homolog annotation: Hit_ID=Q53LH8; Match level="QueryCoverage=100%, HitCoverage=97%, E-value=2e-32, Identity=94%"; Hit description=DNA -directed RNA polymerase II 8.2 kDa polypeptide, putative, expressed
  Pfam annotation: Domain name=RNA_pol_N; Domain location=1-60; Score =132.9; E_value=1e-36; Accession=PF01194.9; Description=RNA polymerases N  8 kDa subunit
MIIPVRCFTCGKVIGNKWDQYLDLLQADYTEGDALDALELVRYCCRRMLMTHVDLIEKLLNYNTLEKTDTTT

SEQ ID NO: 95228 - protein, 285 aa, Setaria italica
  Transcript Sequence Number=SeqID_29254
  Gene Ontology: Mol. function=threonine-type endopeptidase activity; Cellular component=proteasome core complex; Biological process =ubiquitin-dependent protein catabolic process
  Homolog annotation: Hit_ID=A7P6B1; Match level="QueryCoverage=83%, HitCoverage=73%, E-value=1e-134, Identity=96%"; Hit description =Proteasome subunit alpha type
  Pfam annotation: Domain name=Proteasome; Domain location=79-266; Score=270.7; E_value=3.5e-78; Accession=PF00227.18; Description =Proteasome A-type and B-type
  Pfam annotation: Domain name=Proteasome_A_N; Domain location=56-78; Score=42.1; E_value=2.2e-09; Accession=PF10584.1; Description =Proteasome subunit A N-terminal signa
  Pfam module annotation: Pfam domain module=Proteasome::Proteasome_A _N; Domain location=79-266::56-78
KEAQEAIKSEREGRERGERRRGRRRRGVPVRSSTRRRCRRRRLRLHDRMFLTRTEYDRGVNTFSPEGRLFQVEYAIEAIKLGSTAIGLKTKDGVVLAVEKRVTSPLLEPSSVEKIMEIDEHIGCAMSGLIADARTLVEHARVETQNHRFSYGEPMTVESSTQAICDLALRFGEGDEESMSRPFGVSLLIAGHDENGPSLYYTDPSGTFWQCNAKAIGSGSEGADSSLQEQYNKDLTLQEAETIALSILKQVMEEKVTPNNVDIAKVAPKYHLYTPAEVEAVIARL

SEQ ID NO: 95229 - protein, 160 aa, Setaria italica
  misc_feature (10)..(10): Xaa can be any naturally occurring amino acid
  Transcript Sequence Number=SeqID_29255
  Homolog annotation: Hit_ID=Q43351; Match level="QueryCoverage=92%, HitCoverage=53%, E-value=2e-49, Identity=65%"; Hit description=H1 -1flk (Fragment)
TGRKPYRIEXVGVVCDAYLAVVRGIRRAVITGRAVRVKSQLQSHKRFATAFRSYCSLVDNARLYSTNTLGSAKLIGWKDGGSNLLVDPEEIGCLERVSSLNEEADCVHELYADGQPTGGSSSVWQDLVMSPSRAPTQRELKAAIEKGEARFQTRIAVAAG

SEQ ID NO: 95230 - protein, 80 aa, Setaria italica
  Transcript Sequence Number=SeqID_29256
  Subcellular localization annotation: CTP_CleavageSite=47; ConfidenceScore=5.51e-01
KQHALAFILILSFVFVSLSIFDSLTLQNVCSTALCLLKPSNSIALAKASSSASMAALVLMVLCYQLVEIGMFCSYSNACA

SEQ ID NO: 95231 - protein, 63 aa, Setaria italica
  Transcript Sequence Number=SeqID_29257
ICVMLVPRLELVVCPAMNDHELMLLREGFSITYSVRVLAQRCYCFGPLGTVHMCRLHTWKGSL

SEQ ID NO: 95232 - protein, 57 aa, Setaria italica
  misc_feature (33)..(33): Xaa can be any naturally occurring amino acid
  Transcript Sequence Number=SeqID_29258
  Subcellular localization annotation: CTP_CleavageSite=45; ConfidenceScore=5.46e-01
MATRPASRQRKAGSASAAAAAKGSHQQQQQPQXGSPTSTTTTTTSSSRLTPELSLDG

SEQ ID NO: 95233 - protein, 116 aa, Setaria italica
  Transcript Sequence Number=SeqID_29259
  Gene Ontology: Mol. function=electron carrier activity; Cellular component=chloroplast envelope
  Homolog annotation: Hit_ID=B6TV86; Match level="QueryCoverage=87%, HitCoverage=35%, E-value=2e-44, Identity=84%"; Hit description=Fruit protein PKIWI502
  Subcellular localization annotation: CTP_CleavageSite=42; ConfidenceScore=5.30e-01
ASPPPSPGSSSAAAFDFLVKRLPGTPSARLCDLRPGDLVHVGASVVGRGFEVNRIADARDVLVFATGSGISPIRSLIESDFVQDHKTGVSLFYGVRNLQRMAYQERFDDWEAKGFK

SEQ ID NO: 95234 - protein, 86 aa, Setaria italica
  Transcript Sequence Number=SeqID_29260
AAVARAFEMLSAEVEAGGGTPAVPASGVATATPSPMVAWILGRSPAGVRPLRVTDSPFPAVPEDGCCNERVDADADDFIRKFYEQL

SEQ ID NO: 95235 - protein, 308 aa, Setaria italica
  misc_feature (1)..(1): Xaa can be any naturally occurring amino acid
  Transcript Sequence Number=SeqID_29261
XLKIGKEHQESKKYLAFSEKIGKSYSLFWFLRSVQEIVGSSHKIFDECTDEVNSMMFSLLDKTSELFSTLASVNLSFCLLDYKKQIQSSLSGSPIGIEASEHAEQTFDILENSALECVKSMAELLQKTTRGIPVTVKDSKCVIKLENCRDAVCWKRLFCTMSCICGFLWGLNPALESTSKDHLVATSEDKKMLLQYCSRFASYIAKFETFVDICLHLLFVDNKGSGSTDSISVCFPQELDCENGFLNIDAVMDEWTKCKSRGLDLSKLRCMENVLLENLLKGECPLIALTLREVYSISAAIVKLHANL

SEQ ID NO: 95236 - protein, 31 aa, Setaria italica
  Transcript Sequence Number=SeqID_29262
MQAGALVQVYTDGTVLVTHGGVEMGQGFCIT

SEQ ID NO: 95237 - protein, 181 aa, Setaria italica
  misc_feature (46)..(46): Xaa can be any naturally occurring amino acid
  misc_feature (116)..(116): Xaa can be any naturally occurring amino acid
  misc_feature (139)..(139): Xaa can be any naturally occurring amino acid
  Transcript Sequence Number=SeqID_29263
  Gene Ontology: Mol. function=2 iron, 2 sulfur cluster binding; Cellular component=peroxisome; Biological process=oxidation reduction
  Homolog annotation: Hit_ID=B9RIB6; Match level="QueryCoverage=75%, HitCoverage=10%, E-value=1e-58, Identity=72%"; Hit description =Xanthine dehydrogenase, putative
KLRLIYLNLSYFRFVRSLVSKSCYMERVDLSAHGFYATPDIDFDWXSVKGTPYHYFTYGAAFAEVEIDTLTGDFHTRTVDIVMDLGFSINPAIDIGQIEGAFIQGLGWVAMEELKXGDNNHKWIRPGHLFTCGPGAYKXPSVNDIPLNFKVSLLKVNILLILQIIACWRFSILRCFFYFRA

SEQ ID NO: 95238 - protein, 490 aa, Setaria italica
  Transcript Sequence Number=SeqID_29264
  Gene Ontology: Mol. function=2 iron, 2 sulfur cluster binding; Cellular component=peroxisome; Biological process=oxidation reduction
  Homolog annotation: Hit_ID=B9RIB6; Match level="QueryCoverage=99%, HitCoverage=35%, E-value=0.0, Identity=75%"; Hit description =Xanthine dehydrogenase, putative
  Pfam annotation: Domain name=Ald_Xan_dh_C; Domain location=1-91; Score=108.7; E_value=2e-29; Accession=PF01315.14; Description =Aldehyde oxidase and xanthine dehydrogenase, ab hammerhead domain
  Pfam annotation: Domain name=Ald_Xan_dh_C2; Domain location=99-490; Score=352.7; E_value=7.2e-103; Accession=PF02738.10; Description =Aldehyde oxidase and xanthine dehydrogenase, molybdopterin binding domain
  Pfam module annotation: Pfam domain module=Ald_Xan_dh_C::Ald_Xan_dh _C2; Domain location=1-91::99-490
HAALVLSRKAHARILSIDDSIAKSSPGFVGLFLSKDIPGTNHTGPIIHDEEVFASDVVTCVGQIIGIVVADTHDNAKNAANKVHIEYSELPAILSIEDAVKSGSFHPNTKLCLGKGDVEQCFMSGACDRIISGEVQVGGQEHFYMEPQGTLVWPVDSGNEIHMVSSTQAPQKHQKYVANVLGLPLSKVVCKTKRIGGGFGGKETRSATFAAAVSVPSYRLRRPVKLILDRDVDMISSGQRHSFLGRYKVGFTNDGKVLALDLELYNNGGNSLDLSRAVLERAMFHSENVYDIPNIRISGQVCLTNFPSNTAFRGFGGPQGMLITENWIHHIASELQRSPEDIKELNFHDDGTVLHYGQLLQNCRIRSVWDELKASCNFVEARKAVRSFNSNNRWRKRGIAMVPTKFGISFTSKFMNQAGALVQVYTDGTVLVTHGGVEMGQGLHTKVAQVAASSFNIPLSSVFISETSTDKVPNASPTAASASSDLYYSH

SEQ ID NO: 95239 - protein, 333 aa, Setaria italica
  Transcript Sequence Number=SeqID_29265
  Gene Ontology: Mol. function=2 iron, 2 sulfur cluster binding; Cellular component=peroxisome; Biological process=oxidation reduction
  Homolog annotation: Hit_ID=B9HNV5; Match level="QueryCoverage=100%, HitCoverage=24%, E-value=1e-160, Identity=79%"; Hit description =Xanthine dehydrogenase
  Pfam annotation: Domain name=Ald_Xan_dh_C2; Domain location=1-244; Score=-88.1; E_value=8.8e-10; Accession=PF02738.10; Description =Aldehyde oxidase and xanthine dehydrogenase, molybdopterin binding domain
  Subcellular localization annotation: CTP_CleavageSite=78; ConfidenceScore=5.06e-01
MVPTKFGISFTSKFMNQAGALVQVYTDGTVLVTHGGVEMGQGLHTKVAQVAASSFNIPLSSVFISETSTDKVPNASPTAASASSDLYGAAVLDACQQIKARMEPIASRGTHNSFAELAQTCYMERVDLSAHGFYATPDIGFDWTNGKGTPFLYFTYGAAFAEVEIDTLTGDFHTRTADIVMDLGFSINPAIDIGQIEGAFIQGLGWVAMEELKWGDNNHKWIRPGHLFTCGPGAYKIPSVNDIPLNFKVSLLKGAPNPKVIHSSKAVGEPPFFLGSAVLFAIKDAIFAARADEGHSEWFPLDNPATPERIRMACVDSITKKFADADYRPKLSV

SEQ ID NO: 95240 - protein, 136 aa, Setaria italica
  Transcript Sequence Number=SeqID_29266
  Homolog annotation: Hit_ID=B6SUT2; Match level="QueryCoverage=46%, HitCoverage=24%, E-value=4e-23, Identity=89%"; Hit description=MTD1
  Subcellular localization annotation: CTP_CleavageSite=53; ConfidenceScore=5.01e-01
PVLGRTHLSNPPEICSIAPSTHWHRPGRRISRRRSHVDSGGRGAAGLRVPRIREEERRRAGGRVGGREEEEVESKLKEGDALGCLDALEDSLPIKKGLSSFYAGKSKSFTSLAEATSTVAEAKELAKPENPFNKRR

SEQ ID NO: 95241 - protein, 121 aa, Setaria italica
  Transcript Sequence Number=SeqID_29267
  Homolog annotation: Hit_ID=B6SUT2; Match level="QueryCoverage=81%, HitCoverage=39%, E-value=6e-25, Identity=62%"; Hit description=MTD1
  Subcellular localization annotation: CTP_CleavageSite=33; ConfidenceScore=5.08e-01
LDFNFGVIRKGLSSFYAGKSKSFTSLAEATSTVAEAKELAKPENPFNKRRRILANWSRRASCSSLATATYLPPLLAPDHAVAEGDEGEEDDSDDDEEECNQLPHRGLSNYYRGLVRTGTKF

SEQ ID NO: 95242 - protein, 255 aa, Setaria italica
  Transcript Sequence Number=SeqID_29268
  Homolog annotation: Hit_ID=B6SUT2; Match level="QueryCoverage=97%, HitCoverage=98%, E-value=1e-51, Identity=52%"; Hit description=MTD1
MSTAVAEVRPAYGFPGSGKRSAGEQAAVLAAGKRRSDGFFIEEDEAEEEVLTETSSLGAPSPSGSSIGENSSSEAGGEDGEEEEVESKLKEGDALGCLDALEDSLPIKKGLSSFYAGKSKSFTSLAEATSTVAEAKELAKPENPFNKRRRILANWSRRASCSSLATATYLPPLLAPDHAVAEGDEGEEDDSDDDEEECNQLPHRGKNIRGAPALPLPPPRLLGVGMQRRNGLGSFRSPRSFSLSDLQNSRIDGSD

SEQ ID NO: 95243 - protein, 62 aa, Setaria italica
  Transcript Sequence Number=SeqID_29269
  Gene Ontology: Mol. function=nucleotide binding; Cellular component =intracellular
  Homolog annotation: Hit_ID=B9SBL1; Match level="QueryCoverage=70%, HitCoverage=23%, E-value=1e-11, Identity=77%"; Hit description =Protein FAM96B, putative
MQSFTFGLILQVDIKVAPGSLANEESVNKQLNDKERVAAALENPNLRQLVDECLCSNDPYSH

SEQ ID NO: 95244 - protein, 44 aa, Setaria italica
  Transcript Sequence Number=SeqID_29270
HVIVYEMAVNKQLNDKERVAAALENPNLRQLVDECLCSNDPYSH

SEQ ID NO: 95245 - protein, 105 aa, Setaria italica
  misc_feature (15)..(15): Xaa can be any naturally occurring amino acid
  Transcript Sequence Number=SeqID_29271
PASSYMGDIDLPPSXDDEEDEAELAAAAAKPKPSRAATVDLSSGVAPTQKDAKKKDKREAMAAAAAEAARQEALRDDRDAFSVVIGARVPGSATADDGAVDDNVK

SEQ ID NO: 95246 - protein, 105 aa, Setaria italica
  Transcript Sequence Number=SeqID_29272
  Gene Ontology: Mol. function=catalytic activity; Cellular component =integral to membrane; Biological process=metabolic process
  Homolog annotation: Hit_ID=B6U172; Match level="QueryCoverage=100%, HitCoverage=17%, E-value=2e-24, Identity=53%"; Hit description=Gl1 protein
RRVIVRDGVDYEQIDKEWHWDNFLILQLWLAAMALYAFPSLRHLPLWDARGAAVALLLHVAATEPLFYLLHRALHREHLFSDYHSLHHSIRVLQPYTAGLATPLE

SEQ ID NO: 95247 - protein, 321 aa, Setaria italica
  Transcript Sequence Number=SeqID_29273
  Gene Ontology: Mol. function=zinc ion binding; Cellular component =intracellular
  Homolog annotation: Hit_ID=Q2Z1Y7; Match level="QueryCoverage=57%, HitCoverage=52%, E-value=9e-39, Identity=42%"; Hit description=Pm27 protein
  Pfam annotation: Domain name=DUF1644; Domain location=29-188; Score =134.8; E_value=2.8e-37; Accession=PF07800.4; Description=Protein of unknown function (DUF1644)
MGSGNLLMKKVVKPSSFDLDIKFDQRWMEDVTCPICLDIPHNAVLLRCTSYEKGCRPFVCDTDQTRSNCLERFKVAHGIPVSVKVSSLAVAPLDSIHIISSNANNRPACPLCRGDVIGWFVIDEARLHLNQKKRCCEESSCSYAGNFHELQKHTQQKHPNSRPSEVDPARRVDWENLQQSSDIIDVLSTIHAQVPNGVVLGDYVIEYGDDEAGDEYEVYHRVRRNWWASCIFCKAFRRSSGGRRRARTRERRESGTRSSNRSSQESLTLEVPSRSVDIREIRFDEIDDEYIVTGAMPRVAGSRRMAGHYRDPRFRHRRSHM

SEQ ID NO: 95248 - protein, 115 aa, Setaria italica
  misc_feature (72)..(72): Xaa can be any naturally occurring amino acid
  Transcript Sequence Number=SeqID_29274
  Gene Ontology: Mol. function=pyridoxal phosphate binding; Biological process=oxidation reduction
  Homolog annotation: Hit_ID=Q0MRQ7; Match level="QueryCoverage=77%, HitCoverage=27%, E-value=3e-40, Identity=86%"; Hit description =Molybdenum cofactor sulfurase-like protein 1
FFLGSILVDGCHPYSEDLWKTIKINNLTFEGVKLCNRCKVPNINQDNGIHGAEPTETLLTFRSDEVLRPSHXNTRQVYFGQNLVCKESLSGKGKGKEYNTKVRTNTKFNSYLRRT

SEQ ID NO: 95249 - protein, 245 aa, Setaria italica
  Transcript Sequence Number=SeqID_29275
  Gene Ontology: Mol. function=nucleic acid binding; Cellular component= nucleus; Biological process=intracellular signaling cascade
  Homolog annotation: Hit_ID=B6T3W5; Match level="QueryCoverage=81%, HitCoverage=77%, E-value=1e-100, Identity=91%"; Hit description =Cellular nucleic acid-binding protein
  Pfam annotation: Domain name=DnaJ_CXXCXGXG; Domain location=57-131; Score=-35.6; E_value=0.037; Accession=PF00684.11; Description=DnaJ central domain (4 repeats)
  Pfam annotation: Domain name=zf-CCHC; Domain location=105-122; Score =30.9; E_value=3.8e-06; Accession=PF00098.15; Description=Zinc knuckle
  Pfam annotation: Domain name=zf-CCHC; Domain location=128-145; Score =25.3; E_value=3.5e-05; Accession=PF00098.15; Description=Zinc knuckle
  Pfam annotation: Domain name=zf-CCHC; Domain location=147-164; Score =32.0; E_value=2.4e-06; Accession=PF00098.15; Description=Zinc knuckle
  Pfam annotation: Domain name=zf-CCHC; Domain location=166-183; Score =20.8; E_value=0.00021; Accession=PF00098.15; Description=Zinc knuckle
  Pfam annotation: Domain name=zf-CCHC; Domain location=198-215; Score =28.1; E_value=1.1e-05; Accession=PF00098.15; Description=Zinc knuckle
  Pfam annotation: Domain name=zf-CCHC; Domain location=217-234; Score =22.3; E_value=0.00012; Accession=PF00098.15; Description=Zinc knuckle
  Pfam annotation: Domain name=zf-CCHC; Domain location=48-65; Score =23.9; E_value=6.2e-05; Accession=PF00098.15; Description=Zinc knuckle
  Pfam annotation: Domain name=zf-CCHC; Domain location=67-84; Score =25.6; E_value=3.1e-05; Accession=PF00098.15; Description=Zinc knuckle
  Pfam annotation: Domain name=zf-CCHC; Domain location=86-103; Score =30.7; E_value=4.1e-06; Accession=PF00098.15; Description=Zinc knuckle
  Pfam module annotation: Pfam domain module=DnaJ_CXXCXGXG::zf-CCHC::zf- CCHC::zf-CCHC::zf-CCHC::zf-CCHC::zf-CCHC::zf-CCHC::zf-CCHC::zf-CCHC; Domain location=57-131::105-122::128-145::147-164::166-183::198 -215::217-234::48-65::67-84::86-103
  Subcellular localization annotation: CTP_CleavageSite=17; ConfidenceScore=5.35e-01
SRSRSRSRSPRRRDRLRSERAPRRSRSRSRSRSRSPYRRRERRGNRDFMCKNCRRPGHYAKDCPSAATCNNCNLPGHFAAECTSATVCWNCKESGHIATECKNEALCHTCNKTGHLARDCPTSGSNVKLCNNCFKPGHIAVDCTNERACNNCRQPGHIARECKNDPVCNLCNVSGHVARSCPKTTLASEIQGGPFRDILCRICGQPGHISRNCMATIICDTCGGRGHMSYECPSARIFNRGLRRF

SEQ ID NO: 95250 - protein, 181 aa, Setaria italica
  misc_feature (138)..(138): Xaa can be any naturally occurring amino acid
  misc_feature (176)..(176): Xaa can be any naturally occurring amino acid
  Transcript Sequence Number=SeqID_29276
GEEAGPTGPHAKKPAEPEAAAGDGAAGGGFLLSASMPPARQLEFFLRSFERAVKMRLSPLELDSYSEGCMVQLDEGSAQDVDSFGEHVKGAFGASWKEELCEGQVVEGEIGVGSPALLVISSAALRSLELLRGLKTFXKECRPVKLFAKHLKVEEQVAMLNARVNIACGTPSRIKXLIDME

SEQ ID NO: 95251 - protein, 202 aa, Setaria italica
  misc_feature (126)..(126): Xaa can be any naturally occurring amino acid
  Transcript Sequence Number=SeqID_29277
  Gene Ontology: Mol. function=sequence-specific DNA binding; Cellular component=nucleus; Biological process=regulation of transcription, DNA-dependent
  Homolog annotation: Hit_ID=B6T4Y9; Match level="QueryCoverage=86%, HitCoverage=84%, E-value=2e-50, Identity=64%"; Hit description =WRKY67-superfamily of TFs having WRKY and zinc finger domains
  Pfam annotation: Domain name=FAR1; Domain location=95-169; Score= -24.4; E_value=0.022; Accession=PF03101.7; Description=FAR1 family
  Pfam annotation: Domain name=WRKY; Domain location=108-168; Score =123.2; E_value=8.6e-34; Accession=PF03106.7; Description=WRKY DNA -binding domain
  Pfam module annotation: Pfam domain module=FAR1::WRKY; Domain location=95-169::108-168
MAASLGLNPEALFSSFSSSYYSPFMSDYAPSFPAANNAVDDAAAFSAELDDLCRFEYSPAAPVFASAGGGAGGDDRNDKSMWCEGGDEKRPRSNGRIGFRTRSEVEILDDGFKWRKYGKKAVKNSXPNPRNYYRCSSEGCGVKKRVERDRDDPRYVITTYDGVHNHASPTAAAAIQYGGGGFYSPPSSGSPSAASYSGSYLF

SEQ ID NO: 95252 - protein, 82 aa, Setaria italica
  Transcript Sequence Number=SeqID_29278
  Gene Ontology: Mol. function=4 iron, 4 sulfur cluster binding; Biological process=tRNA processing
  Homolog annotation: Hit_ID=Q8H8N3; Match level="QueryCoverage=98%, HitCoverage=12%, E-value=9e-42, Identity=96%"; Hit description=tRNA wybutosine-synthesizing protein 1 homolog
HAHSCCVLLAKVDKFKINGKWHTWIDYDRFHELVTSGKPFKSQDYMALTPSWAVYGAEEGGFDPDQSRFKKERRHGTAALKG

SEQ ID NO: 95253 - protein, 99 aa, Setaria italica
  Transcript Sequence Number=SeqID_29279
MAPASGFGRVVGNARSFVGNALGGLRGWSNLASWTVAGGLAYYLWVKPARQLQKEQEERAALAAASDPYRYVEKRKPIPDPQDTGLIYGKKKEPTKSED

SEQ ID NO: 95254 - protein, 206 aa, Setaria italica
  Transcript Sequence Number=SeqID_29280
  Homolog annotation: Hit_ID=B6TE87; Match level="QueryCoverage=84%, HitCoverage=85%, E-value=2e-52, Identity=71%"; Hit description=VIP1 protein
  Pfam annotation: Domain name=M; Domain location=134-154; Score=8.2; E_ value=12; Accession=PF02370.8; Description=M protein repeat
  Pfam annotation: Domain name=M; Domain location=36-56; Score=10.4; E _value=6.1; Accession=PF02370.8; Description=M protein repeat
  Pfam module annotation: Pfam domain module=M::M; Domain location=134 -154::36-56
MENGEETFASPTAAAADFEFAGNGGDRTPKLHDAADEIEALSAAKRDLEEKLESVSHQNRFLSSESRRLEALVSQARDEAAAFEQAAATNESEAATLRAEVERLQGLLDAEKAGHEEEMRRGGGLGDQLQTAHQEKVALEKEIEALKASATASERGKGEEEMDSAAPSAGTPKDAGLVPAELLAAAVAAGAGITAFIATILIHRKR

SEQ ID NO: 95255 - protein, 225 aa, Setaria italica
  Transcript Sequence Number=SeqID_29281
  Gene Ontology: Mol. function=protein serine/threonine kinase activity; Cellular component=nucleus; Biological process=protein amino acid phosphorylation
  Homolog annotation: Hit_ID=UPI0001A7B020; Match level="QueryCoverage =99%, HitCoverage=42%, E-value=6e-79, Identity=62%"; Hit description =ATP binding / protein kinase/ protein serine/threonine kinase
VCDYLPYGTLLDVINSHLVVGRYMDEVLCMYYTIEMLKMLETLHSVGIIHGDFKPDNMLVCYLSGDITEETFRSETRDEQNQGLCLVDWGRGIDLNLFRAGTEFHGDCGTSGFRCVEMQEDRNWTYQVDTYGLCAIVHMMLHGAEMSVQKVPRAGGGYEYQPRLPFRRYWNVELWRKLFTMLLNAPSNGSDVTALRGLRASFREHMCSDRQLVGKLNQQLAKQRP

SEQ ID NO: 95256 - protein, 37 aa, Setaria italica
  Transcript Sequence Number=SeqID_29282
RLYRHTLYLDALQISMHTCNLELREHMVALLHGMHHS

SEQ ID NO: 95257 - protein, 62 aa, Setaria italica
  Transcript Sequence Number=SeqID_29283
TQELRALDLDGLFCTNCMVMKFICVLCFGASTWCKISVLGAGIIQQLRCFGCFSLIIILRSR

SEQ ID NO: 95258 - protein, 327 aa, Setaria italica
  misc_feature (132)..(132): Xaa can be any naturally occurring amino acid
  Transcript Sequence Number=SeqID_29284
  Gene Ontology: Mol. function=microtubule motor activity; Cellular component=microtubule associated complex; Biological process =microtubule-based movement
  Homolog annotation: Hit_ID=Q93XG2; Match level="QueryCoverage=99%, HitCoverage=42%, E-value=1e-147, Identity=86%"; Hit description =Kinesin heavy chain (Fragment)
SSDILIMEKDRKIRQMEVEIEELRKQRDNAQSELEELRKKKGDHQPGWNPFDSPQKARKCLTFSGSLEPSNKIKMRSSIRQSSTAPFVLKHEIRKLEQLQQQLEVEANRAIEVLHKEVQCHKHGNQDAAETXIAKLQAEIREMQAVRSENGDVEMITDEANGSDLKDEISRLHMQDNDIAKLEAKLENVQRSIDRLVMSLPNVAMPCNETTPKSNRSKKKKRMLLPLGVSNNINRANLLRAPCSPHSSSRPSESEVENRAPEGDTVSVEGSEKATPTKSEDGDISSRDETPLYRRSSSVNMKKMQRMFQNAAEENVRSIRAYVTCNL

SEQ ID NO: 95259 - protein, 132 aa, Setaria italica
  misc_feature (102)..(102): Xaa can be any naturally occurring amino acid
  Transcript Sequence Number=SeqID_29285
  Gene Ontology: Mol. function=structural constituent of ribosome; Cellular component=ribonucleoprotein complex; Biological process =translation
  Homolog annotation: Hit_ID=P0C491; Match level="QueryCoverage=84%, HitCoverage=68%, E-value=1e-45, Identity=86%"; Hit description=30S ribosomal protein S7, chloroplastic
  Pfam annotation: Domain name=Ribosomal_S7; Domain location=1-126; Score=63.3; E_value=8.9e-16; Accession=PF00177.13; Description =Ribosomal protein S7pS5e
IGLSNFLSFVEFFFHGSIENLIQQKTETNPLLVLRQAIRRVTPNIGVKTRRNKKGSTRKVPIEIGSKQGRALAIRWLLEASQKRPGRNIRTLTKLKLPKLSXDAAKGSGGAIRKKEATHRMAEANRALAHFR

SEQ ID NO: 95260 - protein, 98 aa, Setaria italica
  Transcript Sequence Number=SeqID_29286
  Gene Ontology: Mol. function=structural constituent of ribosome; Cellular component=ribonucleoprotein complex; Biological process =translation
  Homolog annotation: Hit_ID=P12149; Match level="QueryCoverage=87%, HitCoverage=69%, E-value=1e-41, Identity=98%"; Hit description=30S ribosomal protein S12, chloroplastic
  Pfam annotation: Domain name=Ribosomal_S12; Domain location=1-97; Score=152.7; E_value=1.1e-42; Accession=PF00164.17; Description =Ribosomal protein S12
RDSKDDLSVDFSTINPKKPNSALRKVARVRLTSGFEITAYIPGIGHNLQEHSVVLVRGGRVKDLPGVRYRIIRGTLDAVAVKNRQQGRSKYGVKKPKK

SEQ ID NO: 95261 - protein, 76 aa, Setaria italica
  misc_feature (12)..(12): Xaa can be any naturally occurring amino acid
  misc_feature (37)..(37): Xaa can be any naturally occurring amino acid
  misc_feature (42)..(42): Xaa can be any naturally occurring amino acid
  Transcript Sequence Number=SeqID_29287
  Gene Ontology: Cellular component=chloroplast
MEKEVLRIIAIXLGPVLKKSRYFELFVDTDKVRENLXRISIXPWTYKSSESNLFRKKIFCLMVACSSPLTKLSLLG

SEQ ID NO: 95262 - protein, 191 aa, Setaria italica
  misc_feature (40)..(40): Xaa can be any naturally occurring amino acid
  Transcript Sequence Number=SeqID_29288
  Gene Ontology: Mol. function=serine-type endopeptidase activity; Cellular component=chloroplast; Biological process=proteolysis
  Homolog annotation: Hit_ID=P0C314; Match level="QueryCoverage=100%, HitCoverage=88%, E-value=1e-107, Identity=98%"; Hit description=ATP -dependent Clp protease proteolytic subunit
  Pfam annotation: Domain name=CLP_protease; Domain location=2-172; Score=290.6; E_value=3.4e-84; Accession=PF00574.15; Description=Clp protease
VMYRERTLFLGQEIRCEITNHITGLMVYLSIEDGISDIFXFINSPGGWLISGMAIFDTMQTVTPDIYTICLGIAASMASFILLGGEPTKRIAFPHARIMLHQPASAYYRARTPEFLLEVEELHKVREMITRVYALRTGKPFWVVSEDMERDVFMSADEAKAYGLVDIVGDEMIDEHCDTDPVWFPEMFKDW

SEQ ID NO: 95263 - protein, 141 aa, Setaria italica
  misc_feature (130)..(130): Xaa can be any naturally occurring amino acid
  Transcript Sequence Number=SeqID_29289
  Gene Ontology: Mol. function=structural constituent of ribosome; Cellular component=ribonucleoprotein complex; Biological process =translation
  Homolog annotation: Hit_ID=P0C491; Match level="QueryCoverage=100%, HitCoverage=89%, E-value=3e-67, Identity=93%"; Hit description=30S ribosomal protein S7, chloroplastic
  Pfam annotation: Domain name=Ribosomal_S7; Domain location=1-141; Score=186.7; E_value=6.6e-53; Accession=PF00177.13; Description =Ribosomal protein S7pS5e
MSRRGTAEKRTAKSDPIFRNRLVNMVVNRIMKDGKKSLAYQILYRAVKKIQQKTETNPLLVLRQAIRRVTPNIGVKTRRNKKGSTRKVPIEIGSKQGRALAIRWLLEASQKRPGRNMAFKLSSELVDAAXKGGGGAIRKKE

SEQ ID NO: 95264 - protein, 132 aa, Setaria italica
  Transcript Sequence Number=SeqID_29290
GDDELILRKSPGFCTDEVPMMHPDEIMVPLGDQPPPPLPALTCAPTAAAAVSTPTTSYSTSGSSSCLTRDVESPFAFMDMGLPEFVFQTTGLEDDMVDDARWHDLLLPPSPAYEDPFDSYQFQRNGALFSSY

SEQ ID NO: 95265 - protein, 89 aa, Setaria italica
  Transcript Sequence Number=SeqID_29291
LLDLPPLHSFDISLVNSLLLPGGIQSDAAATIGTTTIASPSGGLVRGWQRAKPRRRHRYISECAASQHPRPPPIKPSPWLPLPTPARAS

SEQ ID NO: 95266 - protein, 157 aa, Setaria italica
  Transcript Sequence Number=SeqID_29292
  Gene Ontology: Mol. function=cation transmembrane transporter activity; Cellular component=membrane; Biological process=cation transport
  Homolog annotation: Hit_ID=A4ZUV2; Match level="QueryCoverage=100%, HitCoverage=39%, E-value=7e-70, Identity=77%"; Hit description=Metal tolerance protein
  Pfam annotation: Domain name=Cation_efflux; Domain location=1-157; Score=-109.5; E_value=0.004; Accession=PF01545.13; Description =Cation efflux family
IIIESTHSLVSDGDEFRLTKEQEKWVVDIMLSVTLVKLLLVIYCRTFTNEIVKACAQDHFFDVITNVIGLVAALLANYVQGWIDPVGAIILAIYTIRMWSITVLDNVHSLVGQSAPPAFLQKLTYLCWNHHKAVRHIDTVRAYTFGSHYFVEVDIVL

SEQ ID NO: 95267 - protein, 125 aa, Setaria italica
  Transcript Sequence Number=SeqID_29293
CNVPAVTTTVGHISFPSQEPNACFYSLNSLYYRPGKPGPAQCGGGGGGVSPAAPLNTSLFYCPPWPWPPIPFCTPRPWFPPIPFFTPPPPAFPFPLPPIPFLTPPSPPPPAFPFPLPPWPWTPPS

SEQ ID NO: 95268 - protein, 61 aa, Setaria italica
  Transcript Sequence Number=SeqID_29294
  Gene Ontology: Mol. function=transferase activity, transferring glycosyl groups
  Homolog annotation: Hit_ID=B6SRV6; Match level="QueryCoverage=68%, HitCoverage=5%, E-value=6e-16, Identity=90%"; Hit description =Stachyose synthase
RFLCLFRFKLWWMTQRMGTSGRDVPLETQFMLVEVPPASGDGVKRGLQSLSEGGAPPRFLI

SEQ ID NO: 95269 - protein, 341 aa, Setaria italica
  misc_feature (324)..(324): Xaa can be any naturally occurring amino acid
  Transcript Sequence Number=SeqID_29295
  Gene Ontology: Mol. function=transferase activity, transferring glycosyl groups; Cellular component=chloroplast
  Homolog annotation: Hit_ID=Q6ATP7; Match level="QueryCoverage=100%, HitCoverage=43%, E-value=1e-166, Identity=83%"; Hit description =Putative raffinose synthase or seed imbibition protein
  Pfam annotation: Domain name=Raffinose_syn; Domain location=1-341; Score=120.9; E_value=4.2e-33; Accession=PF05691.4; Description =Raffinose synthase or seed imbibition protein Sip1
WMTQRMGTSGRDVPLETQFMLLESRPGTGGGGGDDEESGETVYLVMLPLLEGQFRAALQGNERDELEITLESGDKAVQTAQGTYMVYVHAGTNPFDTITQAVKVVERHLQTFHHREKKKLPSFVDWFGWCTWDAFYTDVTAEGVKQGLQSLAEGGTPPRFLIIDDGWQQIGSENKEESNAVVQEGAQFASRLTGIKENAKFQKNKNDGTKNTSEEQSQTPGLKLLVEEAKREHGVKYVYVWHAMAGYWGGVKPAAEGMEHYESALAYPVQSPGVMGNQPDIVMDSLSVLGLGLVHPRKVLSFYDELHAYLASCGVDGVKGNVQXIIETLGAGHGGRVSLTR

SEQ ID NO: 95270 - protein, 768 aa, Setaria italica
  Transcript Sequence Number=SeqID_29296
  Gene Ontology: Mol. function=transferase activity, transferring glycosyl groups; Cellular component=chloroplast
  Homolog annotation: Hit_ID=B6SRV6; Match level="QueryCoverage=100%, HitCoverage=100%, E-value=0.0, Identity=82%"; Hit description =Stachyose synthase
  Pfam annotation: Domain name=Raffinose_syn; Domain location=7-752; Score=1615.7; E_value=0; Accession=PF05691.4; Description=Raffinose synthase or seed imbibition protein Sip1
MTVTPLITVSDGRLAVRGRTVLTGVPDNVSAAHAAGAGLVEGAFVGAHAGEAKSHHVFTLGTLRGCRFLCLFRFKLWWMTQRMGTSGRDVPLETQFMLVEVPPASGDGDDDAAGGDGSEPVYLVVLPLLEGQFRAALQGNDRDELQFCIESGDKAVRTDQGAHAVYLHAGDDPFDTVAAAVKAVEKHLNTFHHREKKKLPSFLDWFGWCTWDAFYTDVTADGVKRGLQSLSEGGAPPRFLIIDDGWQQIASEDKPDPGVTVQEGAQFASRLTGIKENTKFQAKSNDDSGDGEPAAASGGLKQLVREAKEANGVKQVYVWHAMAGYWGGVAPSPGTGMERYEPSLAYPVQSPGVTANQPDIVMDSLSVLGLGLVHPRRVRDFYGELHSYLASCGVDGVKVDVQNIIETVGAGHGGRVAITRAYHRALEASVSRSFPDNGCISCMCHNTDMLYSSRQTAVVRASDDFYPRDPASHTVHVASVAYNSVFLGEFMQPDWDMFHSLHPAAEYHGAARAIGGCPIYVSDKPGNHNFELLKKLVLPDGSVLRAQLPGRPTRDCLFADPARDGTSLLKIWNVNKCTGVVGVFNCQGAGWCRVTKKTRVHDAAPGTLTGTVRADDVDAIADLAGTGWGGEAVVYAYRSGELIRLPKGATLPVTLKVLEFELFHVSPVRAVAATGVSFAPIGLLDMFNSGGAVEECEAPAADEATAAAVRLRVRGCGRFGAYCSRRPARCTLDAAEVEFTYDDDTGLVTLDIPVAEQELYRWTLEILV

SEQ ID NO: 95271 - protein, 136 aa, Setaria italica
  Transcript Sequence Number=SeqID_29297
  Subcellular localization annotation: CTP_CleavageSite=57; ConfidenceScore=5.14e-01
SCSGLGPIGLQRLGIDVAATSQRLRTQRHSGRQATMFTQQRGPSLLGELLRPLHSARLDNYVTYSLQPVTSYRIHHWPPATPLGGRTKVQFLDEGGEGLHERVGELVGGVGGAQHRVHVVVLHVVVLVVRSSSYLT

SEQ ID NO: 95272 - protein, 357 aa, Setaria italica
  Transcript Sequence Number=SeqID_29298
  Gene Ontology: Mol. function=hydrolase activity, acting on ester bonds; Cellular component=apoplast; Biological process=lipid metabolic process
  Homolog annotation: Hit_ID=B6TNT3; Match level="QueryCoverage=89%, HitCoverage=88%, E-value=1e-172, Identity=91%"; Hit description =Anther-specific proline-rich protein APG
  Pfam annotation: Domain name=Lipase_GDSL; Domain location=33-348; Score=199.1; E_value=1.2e-56; Accession=PF00657.14; Description=GDSL- like LipaseAcylhydrolase
MEASSVPTAAAVVLLLLAVAAATVRGQALVPGVMIFGDSVVDAGNNNRLATLVRADFPPYGRDFPATHAPTGRFCNGKLAMDYTVESLGLSSYPPAYLSQEAQSNNKSLLNGANFASGAAGYLDATAALYGAISLSRQAEYFREYQSRVAASAGEQRAKSLTSGSIYVVSAGTSDYMQNYYVNPVLGAAYTSDQFADALMQPFTAFVEGLYSLGARRIGVTSLPPMGCLPGAVTLFGGGSTGCVERLNNDSLTFNRKLDSAADAVKRQRPDLKLIVFDIYQPLLDLVNNPTSAGFFESRRACCGTGTIETSVLCHQGAPGTCTNATGYVFWDGFHPTDAANRVLADALLLQGLQLIA

SEQ ID NO: 95273 - protein, 66 aa, Setaria italica
  Transcript Sequence Number=SeqID_29299
CKHTRLLTVNMGYTMGNSSFAKCPLALSKGLKILGKEHKAKNCLPSVNHRALSKDFCRVSISTQQQ

SEQ ID NO: 95274 - protein, 60 aa, Setaria italica
  Transcript Sequence Number=SeqID_29300
ACLRHDLPLQKAANGFVEFSSRSSHEMMDNHPALMHPIPSNFVLLFPFPSWSNQMLLDFL

SEQ ID NO: 95275 - protein, 98 aa, Setaria italica
  Transcript Sequence Number=SeqID_29301
  Gene Ontology: Mol. function=transcription regulator activity; Cellular component=nucleus; Biological process=regulation of transcription
  Homolog annotation: Hit_ID=Q2QMB8; Match level="QueryCoverage=100%, HitCoverage=21%, E-value=1e-32, Identity=74%"; Hit description=Helix- loop-helix DNA-binding domain containing protein, expressed
  Pfam annotation: Domain name=HLH; Domain location=17-66; Score=66.7; E_value=8.9e-17; Accession=PF00010.18; Description=Helix-loop-helix DNA-binding domain
VTCEPAQKLTTAKRRRAAEVHNLSERRRRDRINEKMKALQELIPHCNKTDKASMLDEAIEYLKSLQLQLQMMWMGGGMAAAAAAPVMFPAGVHQYMQR

SEQ ID NO: 95276 - protein, 76 aa, Setaria italica
  Transcript Sequence Number=SeqID_29302
  Gene Ontology: Mol. function=catalytic activity
  Homolog annotation: Hit_ID=B6SYF6; Match level="QueryCoverage=73%, HitCoverage=14%, E-value=2e-21, Identity=89%"; Hit description =Catalytic/ hydrolase
RDGGREEAEEVVVFGFVWSSAGFLISVIHGRYDIIAQLCHAKRLAERLLPAARMVELHGAHLVSHERPDEVKRELW

SEQ ID NO: 95277 - protein, 149 aa, Setaria italica
  misc_feature (73)..(73): Xaa can be any naturally occurring amino acid
  Transcript Sequence Number=SeqID_29303
  Gene Ontology: Mol. function=catalytic activity
  Homolog annotation: Hit_ID=B6SYF6; Match level="QueryCoverage=67%, HitCoverage=30%, E-value=2e-33, Identity=66%"; Hit description =Catalytic/ hydrolase
SRKGISSTGMQSNCGFEGQVNACWTHKMTTKELDTIRSAGFLISVIHGRLVWPTADILCRGYMPISVDLHHIXQVNNALMDLIKATKSAMKPEEWSAQPENVSETGALVSGRPITVTMRTDEGVIVMGFEHMRNIVKVMKPVRVAAIES

SEQ ID NO: 95278 - protein, 119 aa, Setaria italica
  Transcript Sequence Number=SeqID_29304
HEWAKDGAEGAHFHDYQKSDKDLQDKRVKKKVAKVLSALDCWSNVVYDRVMFPAAEVEKFFEEEKGLELEPEILPDISWGLSHSGSFTDDELDQYPSLDNNPVTFELRDEPEIPQLGVY

SEQ ID NO: 95279 - protein, 187 aa, Setaria italica
  misc_feature (168)..(168): Xaa can be any naturally occurring amino acid
  Transcript Sequence Number=SeqID_29305
  Gene Ontology: Mol. function=structural constituent of ribosome; Cellular component=ribonucleoprotein complex; Biological process =metabolic process
  Homolog annotation: Hit_ID=B6SXQ4; Match level="QueryCoverage=99%, HitCoverage=58%, E-value=1e-99, Identity=65%"; Hit description=CBS domain containing protein
  Pfam annotation: Domain name=CBS; Domain location=75-187; Score=74.6; E_value=3.5e-19; Accession=PF00571.20; Description=CBS domain
HLPVVENGEVIAMLDIAKCLYDAIARLEKAAEQGSAIAAAVEGVERQLGGNFSAPSALIETLRERMFKPSLSTIITENTKVAIVSPTDPVCVAAQKMREFRVNSVVVATGNTLQGIFTSKDVLMRVVAQNISPELTLVEKVMTANPDCATLDTTILDALHIMHDGKFXHIPVIDKDGQIAACLDVLL

SEQ ID NO: 95280 - protein, 62 aa, Setaria italica
  Transcript Sequence Number=SeqID_29306
WILQSCWSAGGYGKRGTAEPLQLTLLEHRNSSCRSLSKKHRFGLKVVPETWKLLVGSLLIIS

SEQ ID NO: 95281 - protein, 55 aa, Setaria italica
  Transcript Sequence Number=SeqID_29307
KYILFFINRKFLCFIHIHDNFLEVLVTMILIHQLRPVSCGGNWNFCNHLNFKLIP

SEQ ID NO: 95282 - protein, 553 aa, Setaria italica
  misc_feature (28)..(28): Xaa can be any naturally occurring amino acid
  Transcript Sequence Number=SeqID_29308
  Gene Ontology: Mol. function=GTP binding; Cellular component =intracellular; Biological process=conjugation with cellular fusion
  Homolog annotation: Hit_ID=B6U832; Match level="QueryCoverage=100%, HitCoverage=92%, E-value=0.0, Identity=79%"; Hit description=GTP binding protein
  Pfam annotation: Domain name=MMR_HSR1; Domain location=269-372; Score= 74.5; E_value=4e-19; Accession=PF01926.15; Description=GTPase of unknown function
PLESVIDVSDIDAVLQRAAEADQLAEAXSVSSDSDLVIDLDATGETDEERRRLRKEQEALHASSLSVPRRPPWHNQMTVEELDANERRAFLVWRRNLARLEENDKLVLTPFEKNIDIWRQLWRVLERSDLLVMVVDARDPLFYRCPDLEAYAKEIDEHKRTMLLVNKADLLPLNIRKRWAEYFKAHDILYVFWSAKAATATLEGKKLSGYSEEESASLDLDTKVYGRDELLMRLQAEAESIVAQRKTSTAEVDHDVSSSDSVSSVAKHVVVGFVGYPNVGKSSTINALVGEKRTGVTHTPGKTKHFQTLIISEELTLCDCPGLVFPSFSSSRHEMVACGVLPIDRMTKHREAIQVVADRVPRNILEQIYKITLPKPKPYESQSRPPTAAELLRAYCSSRGHVSHAGLPDETRAARQILKDYIDGKIPHFELPPGVTDIETECEVIAISEGPTTSAANESDADDLDEEDEDTADPAEPDMRDVLDDLESFDLANEGSKTATKKKETSHKHHKKPQRKKDRSWRVGNDGGDGTAVVRVFQKPAVNLPAVNASGRV

SEQ ID NO: 95283 - protein, 62 aa, Setaria italica
  Transcript Sequence Number=SeqID_29309
IQVVKNASDAQMLQLAHSYVSNECIRTSRDQSRNFMKDRLYHIRYPVISSPFAKQICEGRKE

SEQ ID NO: 95284 - protein, 73 aa, Setaria italica
  Transcript Sequence Number=SeqID_29310
  Subcellular localization annotation: CTP_CleavageSite=48; ConfidenceScore=5.12e-01
PPHHLHLGGRCGVVVMATRPGGLALHRRRRPFPRRRLPRRRLHDRDVAAGRAKTQLRVDHLHGRLIQQENGCS

SEQ ID NO: 95285 - protein, 109 aa, Setaria italica
  Transcript Sequence Number=SeqID_29311
  Subcellular localization annotation: CTP_CleavageSite=79; ConfidenceScore=5.48e-01
AADQGVVAMAAFAPRILRRGPVRSAAPLASIRFVSSPLPGSAAGFVVSLIPAPNWLLVDQWFMGSNVRLGSLTFRRLVRASVRRFWTGGTRLELVAAVLPAREMREHGG

SEQ ID NO: 95286 - protein, 76 aa, Setaria italica
  Transcript Sequence Number=SeqID_29312
  Gene Ontology: Mol. function=electron carrier activity; Biological process=oxidation reduction
  Homolog annotation: Hit_ID=Q6ATT7; Match level="QueryCoverage=88%, HitCoverage=13%, E-value=2e-17, Identity=58%"; Hit description =Cytochrome P450, putative
DEFRPERFDGSSIDFKGTHFEYTPFGAGRRICPGITLGLANTELLLASLLYHFDWELPDGVKMEELDMAGGRLVIT

SEQ ID NO: 95287 - protein, 115 aa, Setaria italica
  Transcript Sequence Number=SeqID_29313
  Gene Ontology: Mol. function=structural constituent of cell wall
  Homolog annotation: Hit_ID=B6TBY5; Match level="QueryCoverage=93%, HitCoverage=49%, E-value=3e-37, Identity=70%"; Hit description =Proline-rich protein
  Pfam annotation: Domain name=DUF1210; Domain location=32-115; Score =60.5; E_value=6.3e-15; Accession=PF06735.3; Description=Protein of unknown function (DUF1210)
MGSTPQRLLGVCAVLMAIAVANAASGEVASVVIGLAKCADCTRKNMKAEAAFKGLKVAIKCKDGNGEYTSKAVGELQSSGAFSVPVSVDLHGADCLAQLHSAAGTPCPGQEPSRI

SEQ ID NO: 95288 - protein, 262 aa, Setaria italica
  misc_feature (142)..(142): Xaa can be any naturally occurring amino acid
  misc_feature (164)..(164): Xaa can be any naturally occurring amino acid
  Transcript Sequence Number=SeqID_29314
  Gene Ontology: Mol. function=structural constituent of cell wall
  Homolog annotation: Hit_ID=B6TBY5; Match level="QueryCoverage=58%, HitCoverage=67%, E-value=6e-43, Identity=59%"; Hit description =Proline-rich protein
  Pfam annotation: Domain name=DUF1210; Domain location=32-242; Score =219.7; E_value=7.5e-63; Accession=PF06735.3; Description=Protein of unknown function (DUF1210)
MGSTPQRLLGVCAVLMAIAVANAASGEVASVVIGLAKCADCTRKNMKAEAAFKGLKVAIKCKDGNGEYTSKAVGELQSSGAFSVPVSVDLHGADCLAQLHSAAGTPCPGQEPSRITPLANGSFVAIPAGNLCLSCLSLTGAXVGFCGPIDPIIRRFFDHFHKKXVPPNPQPGPKPSTNSSSPAPSAGSPTPGIHNLFEHFHKKTVPPQPKLVPKPQPAGGAPSSNTTPSVSPTPILTYPSGPKLFVIPFYLFLFPFVSSLFL

SEQ ID NO: 95289 - protein, 242 aa, Setaria italica
  Transcript Sequence Number=SeqID_29315
  Gene Ontology: Mol. function=structural constituent of cell wall
  Homolog annotation: Hit_ID=B6TBY5; Match level="QueryCoverage=63%, HitCoverage=67%, E-value=1e-46, Identity=61%"; Hit description =Proline-rich protein
  Pfam annotation: Domain name=DUF1210; Domain location=32-239; Score =254.4; E_value=2.7e-73; Accession=PF06735.3; Description=Protein of unknown function (DUF1210)
  Pfam annotation: Domain name=Pollen_Ole_e_I; Domain location=32-142; Score=-39.3; E_value=0.087; Accession=PF01190.9; Description=Pollen proteins Ole e I family
  Pfam module annotation: Pfam domain module=DUF1210::Pollen_Ole_e_I; Domain location=32-239::32-142
MGSTPQRLLGVCAVLMAIAVANAASGEVASVVIGLAKCADCTRKNMKAEAAFKGLKVAIKCKDGNGEYTSKAVGELQSSGAFSVPVSVDLHGADCLAQLHSAAGTPCPGQEPSRITPLANGSFVAIPAGNMQVQQPSAVCASVTICGPIDPIIRRFFDHFHKKPVPPKPQPGPKPSTNSSSPAPSAGSPTPGIHNLFEHFHKKTVPPQPKLVPKPQPAGGAPSSNTTPSVSPTPIYHPPAKH

SEQ ID NO: 95290 - protein, 106 aa, Setaria italica
  Transcript Sequence Number=SeqID_29316
  Homolog annotation: Hit_ID=B9SK12; Match level="QueryCoverage=89%, HitCoverage=16%, E-value=2e-12, Identity=43%"; Hit description=Yth domain-containing protein, putative
WVPFVVTNSWTNLQVKLEQGVQMLAIFKNHGAETTILEDFDFYEQREKAMLDDRQQWKVQCAEAKAQKLVKTSAAVGIVTQISDTIAQAVQLEETKDREIRLVIVW

SEQ ID NO: 95291 - protein, 57 aa, Setaria italica
  Transcript Sequence Number=SeqID_29317
KHVYQLNTTTAGFYSFTFFEKMFGLSVDNTFMVEQAWQAPDYYKPGDMFCWSYAGFG

SEQ ID NO: 95292 - protein, 103 aa, Setaria italica
  Transcript Sequence Number=SeqID_29318
  Homolog annotation: Hit_ID=B6U240; Match level="QueryCoverage=100%, HitCoverage=22%, E-value=5e-31, Identity=71%"; Hit description=Cell division cycle protein 20
  Subcellular localization annotation: CTP_CleavageSite=25; ConfidenceScore=5.06e-01
MDAGSNSISSQKCGSRRAAPPRPALQEAGSRPYMPPLSTGPPNPSAKCYGDGFIPERSAMDMDFAHYLLTEPRKGKENPAAAVSPAKEAYRKLLAEKLLNNRT

SEQ ID NO: 95293 - protein, 126 aa, Setaria italica
  Transcript Sequence Number=SeqID_29319
  Homolog annotation: Hit_ID=B6TPD8; Match level="QueryCoverage=84%, HitCoverage=24%, E-value=7e-33, Identity=72%"; Hit description =Calmodulin binding protein
  Subcellular localization annotation: CTP_CleavageSite=44; ConfidenceScore=5.43e-01
SNSEGGGSSTNRSSGSVSAKSRLKVLTREGSDEASSRPSGLGVRSTSNPKERTPTGNPKERIGDLDCQGHKRLSLPGSGVEAGKRLTKKATANRSLKPTKEHRMLQSRHHLASSIDPLPNRVELET

SEQ ID NO: 95294 - protein, 302 aa, Setaria italica
  misc_feature (208)..(208): Xaa can be any naturally occurring amino acid
  misc_feature (229)..(229): Xaa can be any naturally occurring amino acid
  Transcript Sequence Number=SeqID_29320
  Homolog annotation: Hit_ID=B6TPD8; Match level="QueryCoverage=96%, HitCoverage=65%, E-value=5e-92, Identity=61%"; Hit description =Calmodulin binding protein
  Pfam annotation: Domain name=IQ; Domain location=15-35; Score=16.8; E_ value=0.089; Accession=PF00612.19; Description=IQ calmodulin-binding motif
  Pfam annotation: Domain name=IQ; Domain location=37-57; Score=14.3; E_ value=0.53; Accession=PF00612.19; Description=IQ calmodulin-binding motif
  Pfam annotation: Domain name=IQ; Domain location=63-83; Score=6.9; E _value=5.3; Accession=PF00612.19; Description=IQ calmodulin-binding motif
  Pfam module annotation: Pfam domain module=IQ::IQ::IQ; Domain location=15-35::37-57::63-83
PHVPLPQTEDGLNEIWAATVIQTAFRAFLARRARRALKGLVRLQALVRGHIVRKQAATTLRCMQALVRVQARVRARRVRMALENQTDQQNSSPEQTNEAHVREIEDGWCDSMGSVEDIQAKLLKRQEAAAKRERAMAYALTHQWQASARQATTFEPDKNNWGWNWLERWMAVRPWESRFLGAYTADGSVMVNEFRQPDRNATKTPYRXPVKKSDSTLQSNTLNRKVFPXNSEGGGSSTNRSSGSVSAKSRLKVLTREGSDEASSRPSGLGVRSTSNPKERTPTGNPKERIGIWIVKVQLKRT

SEQ ID NO: 95295 - protein, 99 aa, Setaria italica
  Transcript Sequence Number=SeqID_29321
  Subcellular localization annotation: CTP_CleavageSite=28; ConfidenceScore=5.02e-01
PASASVVPCPRRASLAKAKRTAMILLPRQMLAPSHLPPAGLSAWSLFAYCIHLVISQLSLMLIRLHIFTLPEPTILSQVELPPLLHSSLTRFSMATRSP

SEQ ID NO: 95296 - protein, 631 aa, Setaria italica
  Transcript Sequence Number=SeqID_29322
  Gene Ontology: Mol. function=transferase activity, transferring glycosyl groups; Cellular component=integral to membrane; Biological process=cell wall organization and biogenesis
  Homolog annotation: Hit_ID=Q6AU53; Match level="QueryCoverage=92%, HitCoverage=98%, E-value=0.0, Identity=83%"; Hit description =Probable xyloglucan glycosyltransferase 9
  Pfam annotation: Domain name=Glycos_transf_2; Domain location=177 -352; Score=32.7; E_value=1.5e-06; Accession=PF00535.18; Description =Glycosyl transferase
  Subcellular localization annotation: CTP_CleavageSite=48; ConfidenceScore=5.17e-01
TQIRWVLLLKAHRAAGCLASLASAAVALGGAARRRVAAGRTDAEAGVVAATGESPVVRSRFYAFIKAFLVVSLLLLAVEVAAYINGWDLADSALALPVIGLESLYASWLRFRAAYVAPGIQFLTDACVVLFLIQSADRLIQCLGCFYIRLKRIKPKPKSPALPDAEDPDGGYYPMVLVQIPMCNEKEVYQQSIAAVCNLDWPKSNFLVQVLDDSDDPLTQTLIREEVAKWQQQGARIVYRHRVLRDGYKAGNLKSAMSCSYVKDYEFVAIFDADFQPNPDFLKRTVPHFKDNDELGLVQARWSFVNRDENLLTRLQYINLCFHFEVEQQVNGVFLNFFGFNGTAGVWRIKVLEDSGGWMERTTVEDMDIAVRAHLHGWKFIFLNDVECQCELPESYEAYRKQQHRWHSGPMQLFRLCLPDIIKCKIAFWKKANLIFLFFLLRKLILPFYSFTLFCIILPMTMFVPEAELPDWVVCYIPALMSLLNILPSPKSFPFIIPYLLFENTMSVTKFNAMISGLFQLGSAYEWVVTKKSGRSSEGDLISLAPKELKHQKTGSAPNLDTVAKEQLASKKDAKKKHNRIYKKELALSMLLLTAAARSLLSKQGIHFYFLLFQGISFLLVGLDLIGEQVE

SEQ ID NO: 95297 - protein, 128 aa, Setaria italica
  Transcript Sequence Number=SeqID_29323
  Gene Ontology: Mol. function=peptidase activity
  Homolog annotation: Hit_ID=B6SS76; Match level="QueryCoverage=100%, HitCoverage=20%, E-value=4e-48, Identity=71%"; Hit description =Microtubule-associated protein TORTIFOLIA1
KFMGKSENGMNSLETRVHGLEMALDEISRDLAFSSGRVSNREPDVKTCCILSPKFWRRHGGSRSSSRFSASDPANSSEEGRTSYKWERQKYGLQGGFVINPLAEPNISSVGKTMLTQEGRRKDTTLQK

SEQ ID NO: 95298 - protein, 466 aa, Setaria italica
  Transcript Sequence Number=SeqID_29324
  Gene Ontology: Mol. function=peptidase activity; Cellular component =microtubule
  Homolog annotation: Hit_ID=B6SS76; Match level="QueryCoverage=93%, HitCoverage=71%, E-value=0.0, Identity=75%"; Hit description =Microtubule-associated protein TORTIFOLIA1
  Pfam annotation: Domain name=HEAT; Domain location=58-94; Score=16.6; E_value=0.1; Accession=PF02985.14; Description=HEAT repeat
SCLSTWVSAVEASALTADLVSYLQKLQPRLLKLLRSNAFKAKPALITLIGASAAMGGDAEVTTSIPCLRDAIGSDDWAARKAAAEALAALALEHTDLLTSYKSSCVTFFEARKFDKVKIVRESMNRMIEAWKEIPDAEEDECSSAAPPASQSQRRSSLTGSVSDGRYPAASLGSNSVPSATRRSRLPVSRSCPPDVSPSIIKTNNPSSIRNKKLSPPSYHKVRQAKNCDYKVEISVAPDATPIKMVTEEKLLKGGNVRDRLEARRTLFQGSEDRSAKLAGLKAGSRVVPYEGGGNLEEISEVEGGSEKFAVHKDESLSEIRTQLLQIENQQSSLLDLLQKFMGKSENGMNSLETRVHGLEMALDEISRDLAFSSGRVSNREPDVKTCCILSPKFWRRHGGSRSSSRFSASDPANSSEEGRTSYKWERQKYGLQGGFVINPLAEPNISSVGKTILPPAFLSKHCLQK

SEQ ID NO: 95299 - protein, 107 aa, Setaria italica
  Transcript Sequence Number=SeqID_29325
TIYTHRGDRDYTLVMFISYPFRTSSSCKKKPILRCGFIISIPSALFCLIFLGRQHNSARTYRLCDVHRIDFDRRWHATDFNSCDGNYFSPVFIPIVQRSQLPLTCMQ

SEQ ID NO: 95300 - protein, 65 aa, Setaria italica
  Transcript Sequence Number=SeqID_29326
HRLESSQQFHQLYQMSMSCPSQHMNSLHANLKRNGPEQGDKKDPEQEDKKATGLCYSDWDVSFSF

SEQ ID NO: 95301 - protein, 124 aa, Setaria italica
  misc_feature (20)..(20): Xaa can be any naturally occurring amino acid
  Transcript Sequence Number=SeqID_29327
  Gene Ontology: Mol. function=sequence-specific DNA binding; Cellular component=microtubule associated complex
SPVEPCDEQKVVDVVSSDVXRSVPCSVKELALVDIQEKDPFCPLVQGHSSSDLHAENSYADLGMTCSSDIADEIAEKTPVCAIQSSPKLSDRLKEISNSLKLLSTRPVNITKPKTDMLCAQPYN

SEQ ID NO: 95302 - protein, 189 aa, Setaria italica
  Transcript Sequence Number=SeqID_29328
AAGRWTGGSLHRRAGHAPVRRERDVPRAPTQRHPVRGVREQRLLRAPNDGDVRLISFPIGPKANQDLDLRPDRGRLPYQWVVGPCRAALYKQGGGTRLGSRGSPQPAAPTNTPTDLGCAAAAGSATATSPVTGLHCASLPCAELHQPNPRWPAAPLLPPLGVKVPQFPLSHTRHGLGTPSLSCLSLEPD

SEQ ID NO: 95303 - protein, 63 aa, Setaria italica
  Transcript Sequence Number=SeqID_29329
  Gene Ontology: Mol. function=nucleoside-triphosphatase activity; Cellular component=endoplasmic reticulum; Biological process=cell division
  Homolog annotation: Hit_ID=P54774; Match level="QueryCoverage=100%, HitCoverage=7%, E-value=2e-21, Identity=79%"; Hit description=Cell division cycle protein 48 homolog
DIEMERRRKDDPEAMEEDEVDEIAEIRAVHFEESMKYARRSVSDADIRKYQAFAQTLQQSRGF

SEQ ID NO: 95304 - protein, 74 aa, Setaria italica
  Transcript Sequence Number=SeqID_29330
  Gene Ontology: Mol. function=ATP binding; Biological process=cell division
  Homolog annotation: Hit_ID=Q9SCN8; Match level="QueryCoverage=97%, HitCoverage=8%, E-value=2e-31, Identity=90%"; Hit description=Cell division control protein 48 homolog D
LIYIPLPDEQSRLQIFKACLRKSPVAKDVDLNALAKYTQGFSGADITEICQRACKYAIRENIEKDIEMERRRKD

SEQ ID NO: 95305 - protein, 89 aa, Setaria italica
  misc_feature (52)..(52): Xaa can be any naturally occurring amino acid
  Transcript Sequence Number=SeqID_29331
  Gene Ontology: Mol. function=ATP binding; Biological process=cell division
  Homolog annotation: Hit_ID=Q9SCN8; Match level="QueryCoverage=98%, HitCoverage=10%, E-value=5e-38, Identity=88%"; Hit description=Cell division control protein 48 homolog D
IDPALLRPGRLDQLIYIPLPDEQSRLQIFKACLRKSPVAKDVDLNALAKYTXQGFSGADITEICQRACKYAIRENIEKDIEMERRRKDD

SEQ ID NO: 95306 - protein, 93 aa, Setaria italica
  Transcript Sequence Number=SeqID_29332
  Gene Ontology: Mol. function=ATP binding; Cellular component =microsome; Biological process=cell division
  Homolog annotation: Hit_ID=Q9SCN8; Match level="QueryCoverage=100%, HitCoverage=45%, E-value=5e-46, Identity=70%"; Hit description=Cell division control protein 48 homolog D
  Pfam annotation: Domain name=AAA; Domain location=1-93; Score=12.4; E_ value=2e-06; Accession=PF00004.21; Description=ATPase family associated with various cellular activities (AAA)
LLTEMDGMNAKKTVFIIGATNRPDIIDPALLRPGRLDQLIYIPLPDEQSRLQIFKACLRKSPVAKDVDLNALAKYTQGFSGADITEICQRACK

SEQ ID NO: 95307 - protein, 33 aa, Setaria italica
  Transcript Sequence Number=SeqID_29333
QNTLLKSKYILSRALHTMSLAYHISIYISYVTA

SEQ ID NO: 95308 - protein, 123 aa, Setaria italica
  Transcript Sequence Number=SeqID_29334
  Gene Ontology: Mol. function=nucleoside-triphosphatase activity; Cellular component=microsome; Biological process=cell division
  Homolog annotation: Hit_ID=Q9SCN8; Match level="QueryCoverage=100%, HitCoverage=48%, E-value=4e-52, Identity=62%"; Hit description=Cell division control protein 48 homolog D
  Pfam annotation: Domain name=AAA; Domain location=1-123; Score=101.0; E_value=4e-27; Accession=PF00004.21; Description=ATPase family associated with various cellular activities (AAA)
KARQSAPCVLFFDELDSIATQRGSSVGDAGGAADRVLNQLLTEMDGMNAKKTVFIIGATNRPDIIDPALLRPGRLDQLIYIPLPDEQSRLQIFKACLRKSPVAKDVDLNALAKYTQGFSGAVL

SEQ ID NO: 95309 - protein, 127 aa, Setaria italica
  misc_feature (111)..(111): Xaa can be any naturally occurring amino acid
  Transcript Sequence Number=SeqID_29335
  Gene Ontology: Mol. function=nucleoside-triphosphatase activity; Cellular component=microsome; Biological process=cell division
  Homolog annotation: Hit_ID=P54774; Match level="QueryCoverage=78%, HitCoverage=12%, E-value=5e-44, Identity=85%"; Hit description=Cell division cycle protein 48 homolog
TLAKYTQGFSGADITEICQRACKYAIRENIEKDIEMERRRKDDPEAMEEDEVDEIAEIRAVHFEESMKYARRSVSDADIRKYQAFAQTLQQSRGFGSEFRFPDQPTAAAAXPFAAPAAAADDDDLYS

SEQ ID NO: 95310 - protein, 632 aa, Setaria italica
  Transcript Sequence Number=SeqID_29336
  Gene Ontology: Mol. function=nucleoside-triphosphatase activity; Cellular component=endoplasmic reticulum; Biological process=cell division
  Homolog annotation: Hit_ID=P54774; Match level="QueryCoverage=100%, HitCoverage=87%, E-value=0.0, Identity=77%"; Hit description=Cell division cycle protein 48 homolog
  Pfam annotation: Domain name=AAA; Domain location=245-429; Score =325.4; E_value=1.1e-94; Accession=PF00004.21; Description=ATPase family associated with various cellular activities (AAA)
  Pfam annotation: Domain name=AAA; Domain location=518-632; Score =114.0; E_value=4.8e-31; Accession=PF00004.21; Description=ATPase family associated with various cellular activities (AAA)
  Pfam annotation: Domain name=AAA_2; Domain location=242-370; Score= -27.8; E_value=0.0016; Accession=PF07724.6; Description=ATPase family associated with various
  Pfam annotation: Domain name=AAA_3; Domain location=245-367; Score= -21.2; E_value=0.078; Accession=PF07726.3; Description=ATPase family associated with various
  Pfam annotation: Domain name=AAA_5; Domain location=245-377; Score =10.7; E_value=0.00012; Accession=PF07728.6; Description=ATPase family associated with various
  Pfam annotation: Domain name=CDC48_2; Domain location=131-197; Score =37.6; E_value=4.8e-08; Accession=PF02933.9; Description=Cell division protein 48 (CDC48), dom
  Pfam annotation: Domain name=CDC48_N; Domain location=28-114; Score =138.2; E_value=2.5e-38; Accession=PF02359.10; Description=Cell division protein 48 (CDC48), N-terminal
  Pfam annotation: Domain name=ResIII; Domain location=226-357; Score= -29.0; E_value=0.014; Accession=PF04851.7; Description=Type III restriction enzyme, res subunit
  Pfam annotation: Domain name=Sigma54_activat; Domain location=211 -373; Score=-181.2; E_value=0.034; Accession=PF00158.18; Description =Sigma-54 interaction domain
  Pfam module annotation: Pfam domain module=AAA::AAA::AAA_2::AAA _3::AAA_5::CDC48_2::CDC48_N::ResIII::Sigma54_activat; Domain location= 245-429::518-632::242-370::245-367::245-377::131-197::28-114::226 -357::211-373
MASQGEPSSSDPKGKKDFSTAILERKKSPNRLVVDEATNDDNSVVALHPDTMERLQLFRGDTVLLKGKKRKDTICIVLADDTCEEPKIRMNKVVRKNLRVRLGDVISVHQCPDVKYGKRVHILPIDDTVEGITGNLFDAFLKPYFLEAYRPVRKSDLFLVRGGMRSVEFKVIETDPTEYCIVAPDTELFCEGEPIKREDEERLDEVGYDDVGGVRKQMAQIRELVELPLRHPQLFKSIGVKPPKGILLFGPPGSGKTLIARAVANETGAFFFLINGPEIMSKLAGESESNLRKAFEEAEKNAPSIIFIDEIDSIAPKREKTHGEVERRIVSQLLTLMDGLKSRAHVIVMGATNRPNSIDAALRRFGRFDREIDIGVPDEVGRLEVLRIHTKNMKLSEDVDLEHIAKDTHGYVGADLAALCTEAALQCIREKMDIIDLDDETIDAEILNSMSVSNDHFKTALGTSNPSALRETVVEVPNVSWDDIGGLENVKRELQETVQYPVEHPEKFEKFGMSPSKGVLFYGPPGCGKTLLAKAIANECQANFISVKGPELLTMWFGESEANVREIFDKARQSAPCVLFFDELDSIATQRGSSVGDAGGAADRVLNQLLTEMDGMNAKKTVFIIGATNRPD

SEQ ID NO: 95311 - protein, 74 aa, Setaria italica
  Transcript Sequence Number=SeqID_29337
  Subcellular localization annotation: CTP_CleavageSite=50; ConfidenceScore=5.25e-01
DGGASMLSAAATVNGGAGAASANGGSIGLSMIKNWLRSQPAPPLPQPRVVAAAEGAQAAQGLSLSMNMAGAQGA

SEQ ID NO: 95312 - protein, 85 aa, Setaria italica
  Transcript Sequence Number=SeqID_29338
  Subcellular localization annotation: CTP_CleavageSite=56; ConfidenceScore=5.35e-01
EPGNRETSFSASGSHRSSNSGDSTADRTNFSPRDNSNGGLYVGRQDSASSHASYVSAGRGDDGFRSNNSSFSSRASGPTMLQGKG

SEQ ID NO: 95313 - protein, 133 aa, Setaria italica
  Transcript Sequence Number=SeqID_29339
MSSGVSNDIKRDIPLSITYGSAAKSEPFHGPNVEHQFPQSFTNGNFSPQSFASNHSSLGDNRIKEEPAVKFGGFQRCTANGNGMSSSTIPTDDVFVCGGSRSHRIFPPPMPPRTSVNDAKDDDDIRKKAFRFR

SEQ ID NO: 95314 - protein, 88 aa, Setaria italica
  Transcript Sequence Number=SeqID_29340
  Gene Ontology: Mol. function=metal ion binding; Cellular component =mitochondrial intermembrane space protein transporter complex; Biological process=protein import into mitochondrial inner membrane
  Homolog annotation: Hit_ID=B4FYN0; Match level="QueryCoverage=81%, HitCoverage=82%, E-value=6e-24, Identity=77%"; Hit description =Mitochondrial import inner membrane translocase subunit Tim13
  Pfam annotation: Domain name=zf-Tim10_DDP; Domain location=22-86; Score=120.1; E_value=7e-33; Accession=PF02953.7; Description =Tim10DDP family zinc finger
MDSFSSPSLSSSGSSPNPEAVMEQIKAQLAQAYAQEFLETVGNKCFEKCVTKPGSSLSGSESSCISRCVDRYIEATGIVSRALFSSQR

SEQ ID NO: 95315 - protein, 88 aa, Setaria italica
  Transcript Sequence Number=SeqID_29341
  Gene Ontology: Mol. function=RNA binding; Cellular component=voltage -gated potassium channel complex
  Homolog annotation: Hit_ID=Q2HS37; Match level="QueryCoverage=76%, HitCoverage=6%, E-value=4e-28, Identity=86%"; Hit description =Nucleic acid binding NABP
  Pfam annotation: Domain name=PUF; Domain location=11-48; Score=27.4; E_value=5.7e-05; Accession=PF00806.11; Description=Pumilio-family RNA binding repeat
MVCCCRVEFHAFSQHLSCDQAMMKDQFGNYVVQKVLEICDDQNRELILSRIKVHLNALKRYTYGKHIVARVEKLIAAGERRVGVPSSC

SEQ ID NO: 95316 - protein, 246 aa, Setaria italica
  Transcript Sequence Number=SeqID_29342
  Gene Ontology: Mol. function=RNA binding
  Homolog annotation: Hit_ID=B9SDY1; Match level="QueryCoverage=94%, HitCoverage=24%, E-value=3e-71, Identity=57%"; Hit description =Pumilio, putative
  Pfam annotation: Domain name=NABP; Domain location=1-129; Score= -85.6; E_value=0.00031; Accession=PF07990.4; Description=Nucleic acid binding protein NABP
  Pfam annotation: Domain name=PUF; Domain location=130-164; Score =39.2; E_value=1.7e-08; Accession=PF00806.11; Description=Pumilio -family RNA binding repeat
  Pfam annotation: Domain name=PUF; Domain location=166-200; Score =42.3; E_value=1.9e-09; Accession=PF00806.11; Description=Pumilio -family RNA binding repeat
  Pfam annotation: Domain name=PUF; Domain location=202-237; Score =36.8; E_value=8.6e-08; Accession=PF00806.11; Description=Pumilio -family RNA binding repeat
  Pfam module annotation: Pfam domain module=NABP::PUF::PUF::PUF; Domain location=1-129::130-164::166-200::202-237
RGFTSTGHLDSPGYQKAYLGSLFAQQKLQYGMPYLAKSGALNPNIYGNDPAFGMGRTYITSPPSSPYISSPQGHVRQGERLTRIPSVVRNTAGGSMGSWNSENGLMDNGYGSSLLEEFKTNKTRSFELLDIVGHVVEFSSDQYGSRFIQQKLETASIEEKNLIFPEILPQARTLMTDVFGNYVIQKFFEYGTETQTKQLASLLKGYVLQLSLQMYGCRVIQKALEVVEVEQQTQMALELDGSIMRC

SEQ ID NO: 95317 - protein, 95 aa, Setaria italica
  Transcript Sequence Number=SeqID_29343
  Gene Ontology: Mol. function=protein serine/threonine kinase activity; Biological process=protein amino acid phosphorylation
  Homolog annotation: Hit_ID=Q53JZ0; Match level="QueryCoverage=83%, HitCoverage=10%, E-value=2e-14, Identity=50%"; Hit description =Protein kinase domain containing protein
GGFSYRNGGDILKSMGINIFTEGQLKKITNGYKKSIGEGAFGKVYIGMTDDSQQVAVKCSTAKGDVLPQEEFVNEITFQFRISHDKPCPSFGWGA

SEQ ID NO: 95318 - protein, 89 aa, Setaria italica
  Transcript Sequence Number=SeqID_29344
  Gene Ontology: Mol. function=transporter activity; Cellular component= integral to membrane; Biological process=auxin mediated signaling pathway
  Homolog annotation: Hit_ID=Q67UL3; Match level="QueryCoverage=100%, HitCoverage=14%, E-value=2e-20, Identity=64%"; Hit description =Probable auxin efflux carrier component 1c
AAVKEVRMAVASPRKVAADGRKERGEDFAERDDFSFGNRGGAERDAEAGDEKAAVAGQGNAGVGAPAAMPPTSVMTRLILIMVWRKLIR

SEQ ID NO: 95319 - protein, 137 aa, Setaria italica
  Transcript Sequence Number=SeqID_29345
  Gene Ontology: Mol. function=electron carrier activity; Cellular component=extracellular region; Biological process=response to oxidative stress
  Homolog annotation: Hit_ID=Q43004; Match level="QueryCoverage=100%, HitCoverage=41%, E-value=4e-47, Identity=70%"; Hit description =Peroxidase
  Pfam annotation: Domain name=peroxidase; Domain location=1-101; Score= -96.7; E_value=0.019; Accession=PF00141.15; Description=Peroxidase
  Subcellular localization annotation: CTP_CleavageSite=34; ConfidenceScore=5.09e-01
GGHTIGRGRCTLFSNRLSNFSATSSVDPTLDSSLASSLQALCRGGDGNQTAALDAGSADAFDNHYFQNLLSQKGLLSSDQGLFSGAGANATKALVQLYGANSERFLCDFGRSMVKMGNILPLTGSAGQIRKNCRAVN

SEQ ID NO: 95320 - protein, 55 aa, Setaria italica
  Transcript Sequence Number=SeqID_29346
LLHNLKKINSLDQPLHSTCCTVCSNRTSLDMPGLKTLASANILLEMACGIIESKP

SEQ ID NO: 95321 - protein, 272 aa, Setaria italica
  misc_feature (13)..(13): Xaa can be any naturally occurring amino acid
  Transcript Sequence Number=SeqID_29347
  Gene Ontology: Mol. function=nucleotide binding; Biological process =defense response
  Homolog annotation: Hit_ID=Q8LJZ8; Match level="QueryCoverage=86%, HitCoverage=25%, E-value=9e-45, Identity=50%"; Hit description =Putative Mla1
VELKHLMCLRIDXLARAPCGIGSFTSLEELSTLCIQDSTDLTEGLGNQTELRVLGIDCHTGWNFKRFEKSLVECLHKLQKLHTLSISVVGECKLDAWVAPPHLRRLEITGCCSSTLSAWLNPLRLQELSFLSIEVRKLRQKDLEILGSLRALVYLDVEVGNQNHGILRRLVFHDGYSFPCLVHCVLRGYIGPVAFQQGAMVKLARLHLAIPVLETREIAGGFEFGLGNLPVLQDVTFLLRRGGAGEGEVEEAERALRRAIEMHPNHPTLEIL

SEQ ID NO: 95322 - protein, 125 aa, Setaria italica
  Transcript Sequence Number=SeqID_29348
  Gene Ontology: Mol. function=metal ion binding
  Homolog annotation: Hit_ID=B9RY52; Match level="QueryCoverage=86%, HitCoverage=17%, E-value=4e-12, Identity=30%"; Hit description=DNA binding protein, putative
CIKQEQSHTNMQDTWDDEEIKRATDIALKVLRAVGRTRWVAMRTLKAAISHPIGSPQLVDYCLKTLAARTVDGLTVAVRCNDETNTLEYRLTDETVLLPNVSMPTRDHLRRDIKFFALYVSSFLP

SEQ ID NO: 95323 - protein, 140 aa, Setaria italica
  Transcript Sequence Number=SeqID_29349
  Homolog annotation: Hit_ID=Q657D6; Match level="QueryCoverage=89%, HitCoverage=32%, E-value=2e-28, Identity=53%"; Hit description =Nematode responsive protein-like
MTRGGAAGGGGREEQGKVMGPLFPRLHVSDAGKGGGPRAPPRNKMALYEQFTVPSNRFSSSAASTRAAGGSLVTSTSASQVYSYDRPLFQPFDVPSNGPAHSSEKFKGNSINGQSNSTRRESGRMPTQTKNNDVYASKSI

SEQ ID NO: 95324 - protein, 95 aa, Setaria italica
  misc_feature (6)..(6): Xaa can be any naturally occurring amino acid
  Transcript Sequence Number=SeqID_29350
  Gene Ontology: Mol. function=hydrolase activity, acting on acid anhydrides, catalyzing transmembrane movement of substances; Cellular component=integral to membrane; Biological process=metal ion transport
  Homolog annotation: Hit_ID=A9NIX0; Match level="QueryCoverage=100%, HitCoverage=9%, E-value=2e-37, Identity=77%"; Hit description =Putative ATPase-like zinc transporter
LALVLXVSACPCALVLSTPVATFCALLRAARMGVLIKGGDILETLGGIRVAAFDKTGTITKGEFSIDGFHVVGDKVELSQLLYWVSSIESKSSHP

SEQ ID NO: 95325 - protein, 148 aa, Setaria italica
  misc_feature (39)..(39): Xaa can be any naturally occurring amino acid
  Transcript Sequence Number=SeqID_29351
  Gene Ontology: Mol. function=RNA binding; Cellular component =mitochondrion
  Homolog annotation: Hit_ID=Q8LNU1; Match level="QueryCoverage=98%, HitCoverage=69%, E-value=8e-50, Identity=34%"; Hit description =Putative chloroplast RNA processing protein
  Pfam annotation: Domain name=PPR; Domain location=17-51; Score=25.1; E_value=0.0003; Accession=PF01535.12; Description=PPR repeat
  Pfam annotation: Domain name=PPR; Domain location=52-86; Score=28.7; E_value=2.3e-05; Accession=PF01535.12; Description=PPR repeat
  Pfam annotation: Domain name=PPR; Domain location=87-121; Score=55.1; E_value=2.6e-13; Accession=PF01535.12; Description=PPR repeat
  Pfam module annotation: Pfam domain module=PPR::PPR::PPR; Domain location=17-51::52-86::87-121
MLKFNQMINEGVTPNIIVFTSLVYGLCTVDKWRKVEELXLKMLNQGIHPNAWFFNTIMCNLCREGRVMETQSLIDLMVRLGVRPDVISYNTLIDGYCLVGRMEEAMKLLDVMVSAGLKPDVVAYNTLLHGYCKAGRIDDAVRLLQSKC

SEQ ID NO: 95326 - protein, 76 aa, Setaria italica
  Transcript Sequence Number=SeqID_29352
  Homolog annotation: Hit_ID=B9SBF1; Match level="QueryCoverage=98%, HitCoverage=3%, E-value=1e-12, Identity=47%"; Hit description =Nucleotide binding protein, putative
ELVHPQPVCMIQWRPCSLCFSDRSEVRREILMTCCLDGTVRLWSEDELVKSKKQRGLQISFSVIAVIEVNNTLNGV

SEQ ID NO: 95327 - protein, 236 aa, Setaria italica
  Transcript Sequence Number=SeqID_29353
  Gene Ontology: Mol. function=protein serine/threonine kinase activity; Biological process=protein amino acid phosphorylation
  Homolog annotation: Hit_ID=Q00RH9; Match level="QueryCoverage=92%, HitCoverage=18%, E-value=6e-93, Identity=76%"; Hit description =OSIGBa0125M19.7 protein
  Pfam annotation: Domain name=Lectin_legB; Domain location=29-236; Score=277.8; E_value=2.4e-80; Accession=PF00139.11; Description =Legume lectin domain
MGRLRLLVLPLSLLLLLAAACSDHATVLAAEEFTYNGFGGANLALDGMSVVAPNGLLVLSNGTSQMAGHAFHPAPVRLRDGPGGAVRSFSAAFVFAIVSNFTVLSDNGMAFVVAPSTRLSTFNAGQYLGVLNVTDNGKDDNRVLFVELDTMLNPEFQDMNSNHVGVNVNSMRSLQNNSAGYYDDATGVFNNLSLISRQPMQFWVDYDGATTRLDVTMAPMGVPRPRKPLISAPVNL

SEQ ID NO: 95328 - protein, 707 aa, Setaria italica
  misc_feature (6)..(6): Xaa can be any naturally occurring amino acid
  misc_feature (193)..(193): Xaa can be any naturally occurring amino acid
  misc_feature (363)..(363): Xaa can be any naturally occurring amino acid
  misc_feature (468)..(468): Xaa can be any naturally occurring amino acid
  misc_feature (574)..(574): Xaa can be any naturally occurring amino acid
  Transcript Sequence Number=SeqID_29354
  Gene Ontology: Mol. function=acid-amino acid ligase activity; Cellular component=intracellular; Biological process=ubiquitin -dependent protein catabolic process
  Homolog annotation: Hit_ID=B9SGR6; Match level="QueryCoverage=100%, HitCoverage=47%, E-value=1e-139, Identity=40%"; Hit description =Ubiquitin protein ligase E3a, putative
  Pfam annotation: Domain name=Arm; Domain location=27-65; Score=21.1; E_value=0.0045; Accession=PF00514.15; Description=Armadillobeta -catenin-like repeat
  Pfam annotation: Domain name=Arm; Domain location=70-115; Score=0.1; E_value=12; Accession=PF00514.15; Description=Armadillobeta-catenin -like repeat
  Pfam annotation: Domain name=HEAT; Domain location=199-235; Score =3.0; E_value=21; Accession=PF02985.14; Description=HEAT repeat
  Pfam annotation: Domain name=HEAT; Domain location=31-67; Score=16.2; E_value=0.13; Accession=PF02985.14; Description=HEAT repeat
  Pfam module annotation: Pfam domain module=Arm::Arm::HEAT::HEAT; Domain location=27-65::70-115::199-235::31-67
LTYIDXFTASIQRVAVSAVANACKKVPADCSHFVVDSVPTLCNLLQSEDKMVVEKVAACLISIVDSFSSSVDLLDQLCHQGIIEKVLPLIHTGGLTALSPSTCSNLIGLLAKLACSSLVAVKSLFELNVGSTIKGILVTSDLSHGMPYLPLEKQNNQVYEALKLANQLIPSAARDVEDTQIILAKEKIITDEXPRFLCQFSRDILPVLIKAVNSGANSYICYGCASIVNNICYFSKPETLQELLKETNISSFLAGLLSRKDHHVLTSSLKIIEILMQKLPDAYLGSFIKEGVVYAVEALLTQEDCSKSTRLLDDMQQSGTQPVIRNKSKCFCYAFDAHRSEAAETRACRIGNDSLFTFARHVXKSTYFTKEVVSSEIGVTEILQKLKTCCAVLNETADKSSEQDNLQNEEYLSTILSEVMMELHGGETMTTFEFLESGLVKSLSNYLSNGKYLQAEENMSCSSDHFLXAVVKRFQSFARMSFSRMGQNWSDMLLTLLVRKLQNALTSLDNFPVIMSHNFKPRSNISDIPTRHSTIIPCIRVRFKKDEDETNLSSYDSIVNVEILSSLHTIEEFXLWPKVSTDMNSQKVESPPSGTALESKYASDDSQERDSTPQSSPPSEGLMTCGNQNPAVEPCPKEGTSSSGQADKSTTIVSDHALQPKLVFSLKGKELDRSVTLYQSVLQDQINAGSDIILDMQFWRNVHDIIF

SEQ ID NO: 95329 - protein, 66 aa, Setaria italica
  Transcript Sequence Number=SeqID_29355
  Gene Ontology: Mol. function=hydrolase activity
  Homolog annotation: Hit_ID=Q8W3F5; Match level="QueryCoverage=96%, HitCoverage=22%, E-value=2e-20, Identity=73%"; Hit description =Putative epoxide hydrolase
MGEKDYVYKLPGFASVLKDGIMGMFAPDLKIVYIPEGSHFVQEQFPDKVNELLVGFLEDHPVPVAA

SEQ ID NO: 95330 - protein, 189 aa, Setaria italica
  Transcript Sequence Number=SeqID_29356
  Gene Ontology: Mol. function=hydrolase activity; Cellular component =peroxisome
  Homolog annotation: Hit_ID=Q8W3F2; Match level="QueryCoverage=93%, HitCoverage=56%, E-value=1e-61, Identity=64%"; Hit description =Putative epoxide hydrolase
MDMEQQIEHSHLPIRGLNLHVAQAGKGDKGAVVFLHGFPEIWYSWRHQMLAVAAAGYRAVAPDWRGYGLSDQPPEEEEVSYDDLLGDLLGILDALSIPKAFLVGKDFGAVPAYDFALRHPDRICGVMCLGIPFTPFASSFAAMPEGFYMSRWLEPGRAEADFGRYDVKRVVRTIYVLFYPEPQPDGRRT

SEQ ID NO: 95331 - protein, 175 aa, Setaria italica
  Transcript Sequence Number=SeqID_29357
  Gene Ontology: Mol. function=hydrolase activity
  Homolog annotation: Hit_ID=B6TD17; Match level="QueryCoverage=93%, HitCoverage=78%, E-value=3e-80, Identity=85%"; Hit description =Epoxide hydrolase 2
LESIRLFCLCQEPGRAEADFGRYAVRRVVRTIYVLFSGAEIPTAKEGQEIMDLADLSTPLPKWFTEEDLDAYAKLYEKSGFRYPLQMPYRAIHKIPNRLDAKFQVPVFMVMGEKDYCFKFPGFETALRGGIMETFAPDLKITYIPEGNHFVQEQLPEQVNELLLGFFKDHPVVAA

SEQ ID NO: 95332 - protein, 316 aa, Setaria italica
  Transcript Sequence Number=SeqID_29358
  Gene Ontology: Mol. function=hydrolase activity; Cellular component =peroxisome
  Homolog annotation: Hit_ID=Q8W3F2; Match level="QueryCoverage=98%, HitCoverage=99%, E-value=1e-122, Identity=68%"; Hit description =Putative epoxide hydrolase
  Pfam annotation: Domain name=Abhydrolase_1; Domain location=55-305; Score=60.3; E_value=7.2e-15; Accession=PF00561.12; Description =alphabeta hydrolase fold
MAQEIEHSHLPIRGLNLHVAQVGKGELGTVVFLHGFPEIWYSWRHQMLAVAAAGYRAIAPDCRGYGLSDQPPENEEASWDDLVADVLAILDAFSIPKAFLVGKDFGAMPAYEFALRHPDRTRGVACLGIPFTPVASSFDAMPEGFYIPRWLEPGRAEADFGRYDVKRVVRTIYVLFSSSEIPIAKEDQEITDLADLSTPLPEWFSEKDLAVYASLYEKSGFRYPLKMPYRSLHKRHTIEDPKFQVPVFVVMGEKDYVYKLPGFASVLKDGIMGMFAPDLKIVYIPEGSHFVQEQFPDKVNELLVGFLEDHPVPVAA

SEQ ID NO: 95333 - protein, 62 aa, Setaria italica
  Transcript Sequence Number=SeqID_29359
MEAAAAAEYGYYGGGGAGPRERKGAAGCGDHFVVDDLLVLPYDDDEEGDGEAAAAGDGGAPP

SEQ ID NO: 95334 - protein, 76 aa, Setaria italica
  Transcript Sequence Number=SeqID_29360
  Subcellular localization annotation: CTP_CleavageSite=43; ConfidenceScore=5.01e-01
GSGHFAHSVGNGSLDEASAEKIWFSSFSTWSTTNGPQPMWRCRDRTPGTRRRGADPAAPHRNLVNHRNDVVAGIDL

SEQ ID NO: 95335 - protein, 157 aa, Setaria italica
  Transcript Sequence Number=SeqID_29361
  Gene Ontology: Mol. function=transporter activity; Cellular component= membrane; Biological process=oligopeptide transport
  Homolog annotation: Hit_ID=Q8GYF8; Match level="QueryCoverage=88%, HitCoverage=24%, E-value=9e-29, Identity=47%"; Hit description =Putative transporter protein
MEANGTQEPPPRRSLGVDHESLQQPQSDPKRKGGWITFPFLGVAMMGLGVATSGALNNLVVYLIKEYNVPSVDAAQISNIVAGCLSLAPVAGAIVADAFFGCYPVVAVSMAFSTLSLVVFTLTASLRGLRPAPCQPGDGAGPCQPASAGQMAALYAG

SEQ ID NO: 95336 - protein, 66 aa, Setaria italica
  Transcript Sequence Number=SeqID_29362
CVGRWCRLGRSGISWSTVGYAAVRVAGEEEQAEGNEDNELCSHWRSSDRNKAGNGGLGLLLGSLVL

SEQ ID NO: 95337 - protein, 157 aa, Setaria italica
  Transcript Sequence Number=SeqID_29363
  Homolog annotation: Hit_ID=Q4AC18; Match level="QueryCoverage=97%, HitCoverage=32%, E-value=2e-13, Identity=32%"; Hit description =117M18_7
SYLVYENGGEDGKKVVARLIGIWDERKVFGTRIESLKDDILGDNPPVLDNNGNSSNPTSNPSSNSKAARKDSGIIVKKLTVGGMPEKIVTAYQSVLDQHFDEDTALNKCKSTVGVLERINKDIDDASTNGNQPASTLISNLQEQQMTLKQCIEQLEK

SEQ ID NO: 95338 - protein, 238 aa, Setaria italica
  misc_feature (67)..(67): Xaa can be any naturally occurring amino acid
  misc_feature (99)..(99): Xaa can be any naturally occurring amino acid
  Transcript Sequence Number=SeqID_29364
  Subcellular localization annotation: CTP_CleavageSite=45; ConfidenceScore=5.14e-01
LSKQVARAEAERAIQLRQQLGSALATSGTQSSSSPLMITPPEQTAAMMQGSGVRSTPPRPQPLNPAXTSLPPTVSAVGDESKRTAAAMADKLASLSAPXVSSLISSLAAEQAASINGGSPSGEFSGGPPGFQIEKRPRIEKTTQASDMGAPPFFGQAPQVQQQVGGVPTSLGGTQPQTPGPFPPPPPPLPSILPPLLQQFAQNTGGMVGVGGPFGMMAGSIPPPPPLSLPAGFPGLSG

SEQ ID NO: 95339 - protein, 454 aa, Setaria italica
  misc_feature (67)..(67): Xaa can be any naturally occurring amino acid
  misc_feature (289)..(289): Xaa can be any naturally occurring amino acid
  misc_feature (314)..(314): Xaa can be any naturally occurring amino acid
  Transcript Sequence Number=SeqID_29365
  Homolog annotation: Hit_ID=Q4AC18; Match level="QueryCoverage=40%, HitCoverage=39%, E-value=2e-21, Identity=37%"; Hit description =117M18_7
VYLVIFWELQIGIWDERKVFGTRIESLKDDILGDNPPVLDNNGNSSNPTSNPSSNSKAARKDSGIIXKKLTVGGMPEKIVTAYQSVLDQHFDEDTALNKCKSTVGVLERINKDIDDASTNGNQPASTLISNLQEQQMTLKQCIEQLESVDAARISLINQLKEALSEQESKSVVLRGQLQVARAEAERAIQLRQQLGSALATSGTQSSSSPLMITPPEQTAAMMQGSGVRSTPPRPQPLNPATSLPPTVSAVGDESKRTAAAMADKLASLSAPAFHSLISSLAAEQAASXNGGSPSGEFSGGPPGFQIEKRHSSXSGQAPQMQQQIGAVPTSLGGTQPPTPGPFPPPPPPLPSILPPLLQQFAQNTGGMVGVGGPFGMMAGSIPPPPPLSLPAGFPGLSGPPPPPPPPPAQNQPQQQQSPQPPQQSPTSAGFFQTSSMGFFPPVQVQQSPSAQRQ

SEQ ID NO: 95340 - protein, 162 aa, Setaria italica
  Transcript Sequence Number=SeqID_29366
  Gene Ontology: Mol. function=nucleoside-triphosphatase activity; Cellular component=DNA replication factor C complex; Biological process=DNA replication
  Homolog annotation: Hit_ID=Q9FXT5; Match level="QueryCoverage=98%, HitCoverage=43%, E-value=2e-83, Identity=93%"; Hit description =Replication factor C 36kDa subunit
  Pfam annotation: Domain name=AAA; Domain location=16-160; Score=12.0; E_value=2.1e-06; Accession=PF00004.21; Description=ATPase family associated with various cellular activities (AAA)
  Pfam annotation: Domain name=AAA_3; Domain location=16-137; Score= -19.4; E_value=0.049; Accession=PF07726.3; Description=ATPase family associated with various
  Pfam annotation: Domain name=AAA_5; Domain location=16-140; Score= -7.9; E_value=0.0043; Accession=PF07728.6; Description=ATPase family associated with various
  Pfam annotation: Domain name=Miro; Domain location=16-122; Score= -4.1; E_value=0.026; Accession=PF08477.5; Description=Miro-like protein
  Pfam module annotation: Pfam domain module=AAA::AAA_3::AAA_5::Miro; Domain location=16-160::16-137::16-140::16-122
IVDTIDRLTNENRLPHLLLYGPPGTGKTSTILAVARKLYGSQYSNMILELNASDERGIDVVRLQIQDFAGARSLSFGARPSVKLVLLDEADAMTKDAQFALRRVIEKYTRSTRFALICNHVNKIIPALQSRCTRFRFAPLDGSHVRERLQHIIKSEGLSVGL

SEQ ID NO: 95341 - protein, 180 aa, Setaria italica
  Transcript Sequence Number=SeqID_29367
  Gene Ontology: Mol. function=nucleoside-triphosphatase activity; Cellular component=DNA replication factor C complex; Biological process=DNA replication
  Homolog annotation: Hit_ID=Q9FXT5; Match level="QueryCoverage=96%, HitCoverage=48%, E-value=4e-90, Identity=89%"; Hit description =Replication factor C 36kDa subunit
  Pfam annotation: Domain name=Rep_fac_C; Domain location=80-169; Score= 108.0; E_value=3.1e-29; Accession=PF08542.3; Description=Replication factor C
LNSTSNPRCTRFRFAPLDGSHVRERLQHIIKSEGLSVDEGGLTALVRLSNGDMRKALNILQSTHMASQQITEEAVYLCTGNPMPKDIEEIAFWLLNEPFSTSFKHISDMKMRKGLALVDIIREVTMFVFKIQMPSDVRVKLINDLADIEYRLSFACNDKLQLGALISTFTSARTAMVAAS

SEQ ID NO: 95342 - protein, 92 aa, Setaria italica
  Transcript Sequence Number=SeqID_29368
AALLEYSGVVPSVPAPQAPHHPSAAPSSPSSASEVDGLLSAAAAGDGEVSIRIQGGPGDSEAAGGAAAGTSSEDSIEATAGSEVDQASAAGR

SEQ ID NO: 95343 - protein, 226 aa, Setaria italica
  Transcript Sequence Number=SeqID_29369
MLMDPPVMQVDCQLQNDVEKTSSYDRKLTTSHGDYGWTGSDVHPTNDAIICNPVEVVEVNNASQMGIDDVSDSSSKRSPINLGDLPQGTEQIKKNGDVSYSNDVKLQLNVSTENNNGLQSDDGNFNKQSFCKEDRHHPQEIIHHPPTTISLPSSCKLNGDAMPSQEEKIAEDHVKVDGNVDALSKEVGADLIGCHAGQKELQCPLQDLSEIACSIDLARNKSSPQE

SEQ ID NO: 95344 - protein, 83 aa, Setaria italica
  Transcript Sequence Number=SeqID_29370
  Gene Ontology: Mol. function=nucleic acid binding; Biological process= DNA integration
  Homolog annotation: Hit_ID=Q851T7; Match level="QueryCoverage=92%, HitCoverage=13%, E-value=4e-11, Identity=44%"; Hit description =Putative polyprotein
LDNNCSVEFDPLGCSVKDLPSRREIIRCDSSGPLYPLRLPTSSSLATATPSLWHQRLGHPGHEVLSTLACLSAIPCNKGAGDS

SEQ ID NO: 95345 - protein, 141 aa, Setaria italica
  Transcript Sequence Number=SeqID_29371
  Gene Ontology: Mol. function=protein serine/threonine kinase activity; Biological process=protein amino acid phosphorylation
  Homolog annotation: Hit_ID=Q67TV6; Match level="QueryCoverage=97%, HitCoverage=16%, E-value=3e-48, Identity=63%"; Hit description =Putative serine/threonine-specific protein kinase
  Pfam annotation: Domain name=Pkinase_Tyr; Domain location=20-141; Score=-89.3; E_value=8.7e-08; Accession=PF07714.9; Description =Protein tyrosine kinase
RSNIFENRKFTYRELKLITANFREEIGRGGFGAVFLGYLENQSPVAVKIRSKTSSQGDKEFLAEAQHLTRVHHKNLVSLIGYCKDRKHMALVYEYMQGGNLEERLRGEASAATLLTWHQRLKIALDSAQGLEYLHKSCQPP

SEQ ID NO: 95346 - protein, 168 aa, Setaria italica
  misc_feature (155)..(155): Xaa can be any naturally occurring amino acid
  Transcript Sequence Number=SeqID_29372
  Gene Ontology: Mol. function=methyltransferase activity; Biological process=metabolic process
  Homolog annotation: Hit_ID=B6U1V3; Match level="QueryCoverage=91%, HitCoverage=59%, E-value=4e-40, Identity=50%"; Hit description =Methylase
ETEINIEMMRKKYFNIPQLQYLRMDVRDMSMFPDESFDCAIDKGTLDSLMCGVDAPLSAAQMVSEVDRFFSLLRPGGVIILITYGDPSVRVPHLNQPACNWKIVLYILPRPGFTGKIRRQVLDPVPLTERGRLPDGFVPEDPDSHYVYVCEKMQXLTGAGSPTVNHIE

SEQ ID NO: 95347 - protein, 261 aa, Setaria italica
  Transcript Sequence Number=SeqID_29373
  Gene Ontology: Mol. function=methyltransferase activity; Biological process=metabolic process
  Homolog annotation: Hit_ID=B6U1V3; Match level="QueryCoverage=85%, HitCoverage=90%, E-value=2e-68, Identity=53%"; Hit description =Methylase
  Pfam annotation: Domain name=Methyltransf_11; Domain location=66-169; Score=50.9; E_value=4.8e-12; Accession=PF08241.4; Description =Methyltransferase domain
  Pfam annotation: Domain name=Methyltransf_12; Domain location=66-167; Score=23.8; E_value=0.00069; Accession=PF08242.4; Description =Methyltransferase domain
  Pfam annotation: Domain name=TPMT; Domain location=25-219; Score= -69.1; E_value=0.0068; Accession=PF05724.3; Description=Thiopurine S -methyltransferase (TPMT)
  Pfam module annotation: Pfam domain module=Methyltransf _11::Methyltransf_12::TPMT; Domain location=66-169::66-167::25-219
MSSPPPPPDDGEGSDGNTGRSLSYGEAEYWDARYVEEGGAPYDWYQRYDALRPFVRRFAPPASRLLMIGCGSALMSEDMVSDGYLEIVNIDISSVVIEMMRKKYFNIPQLQYLRMDVRDMSMFPDESFDCAIDKGTLDSLMCGVDAPLSAAQMVSEVDRLLRPGGVFILITYGDPSVRVPHLNQPACNWKIVLYILPRPGFTGKIRRQVLDPVPLTERGRLPDGFVPEDPDSHYVYVCEKMQGLTGAGSPTVNHIESQGEE

SEQ ID NO: 95348 - protein, 340 aa, Setaria italica
  misc_feature (81)..(81): Xaa can be any naturally occurring amino acid
  Transcript Sequence Number=SeqID_29374
  Gene Ontology: Mol. function=protein binding; Cellular component =nucleus; Biological process=regulation of transcription, DNA -dependent
  Homolog annotation: Hit_ID=Q9SYM8; Match level="QueryCoverage=93%, HitCoverage=47%, E-value=3e-60, Identity=40%"; Hit description =T30F21.13 protein
MAAPESECGGGDAGYLDLRDVRVEVDPGTARGGGGGGFAVCFWLYLSSSARPSSVILHQVTTGDGNKLPFLALGEGNRLLXFPLMTLHREAPAPASSYPWTDTTSLSSTNECPLEKWFHIGCEVTENVMRLHINGNLIAEAHLCSLSDEQHHQDHANKISLFGNDSKLEGYIYNIEVSSVLGTIKEQHAKNPPFKLSIDYSSSDGIEEGDDGIWNIVGGKASCRRNFILEVVLINALGEPVKDKEVVASLVYADNGTAVEKSRDDSEPPLLITSEGLEYPAISRPLPIIRGCAIFKLKISQLSSKCDNKLFRIQFSTLHMRRYPFLVAYSKTIRCISRTR

SEQ ID NO: 95349 - protein, 165 aa, Setaria italica
  Transcript Sequence Number=SeqID_29375
  Gene Ontology: Mol. function=metal ion binding; Cellular component =cytoplasm; Biological process=ubiquitin-dependent protein catabolic process
  Homolog annotation: Hit_ID=B6TQ30; Match level="QueryCoverage=61%, HitCoverage=33%, E-value=4e-21, Identity=50%"; Hit description=Zinc finger, C3HC4 type family protein
  Pfam annotation: Domain name=PHD; Domain location=99-143; Score=1.9; E_value=0.016; Accession=PF00628.21; Description=PHD-finger
  Pfam annotation: Domain name=zf-C3HC4; Domain location=100-140; Score= 39.3; E_value=1.5e-08; Accession=PF00097.17; Description=Zinc finger, C3HC4 type (RING finger)
  Pfam annotation: Domain name=zf-RING-like; Domain location=100-140; Score=6.6; E_value=0.028; Accession=PF08746.3; Description=RING-like domain
  Pfam module annotation: Pfam domain module=PHD::zf-C3HC4::zf-RING -like; Domain location=99-143::100-140::100-140
EQPNEEVTSDDDMGQEGGLMLSGFDLEPPRVFAQVVRPSWMVLGAGAEDTDPGDADMNLLEVLAAAAHVGEAVRQLPASRAAVEGLQEVVLSEEEASHGCAVCKDVIAAGLSVLKLPCKHYFHAECIRPWLAIRNTCPVCRFELPTGDAEYDRRQSQVPVTCLFR

SEQ ID NO: 95350 - protein, 88 aa, Setaria italica
  Transcript Sequence Number=SeqID_29376
  Gene Ontology: Mol. function=transferase activity, transferring glycosyl groups; Cellular component=integral to membrane; Biological process=cellulose biosynthetic process
  Homolog annotation: Hit_ID=Q0DXZ1; Match level="QueryCoverage=96%, HitCoverage=11%, E-value=2e-39, Identity=91%"; Hit description =Cellulose synthase-like protein E2
ARKGFLGMAPTSLGQILVQHKRWTEGFLQISLSKYSPFLLGHRKIKLGLQMGYSVCGFWALNSFPTLYYVTIPSLCFLNGMSLFPEVR

SEQ ID NO: 95351 - protein, 124 aa, Setaria italica
  misc_feature (81)..(81): Xaa can be any naturally occurring amino acid
  Transcript Sequence Number=SeqID_29377
  Gene Ontology: Mol. function=poly(A)-specific ribonuclease activity; Cellular component=cytoplasm; Biological process=regulation of transcription, DNA-dependent
  Homolog annotation: Hit_ID=B6T791; Match level="QueryCoverage=99%, HitCoverage=30%, E-value=2e-58, Identity=91%"; Hit description =Hydrolase
EQLISNKFNSKPSVIIAGDFNSTPGDKVYNYLVSANLESTDEAPIKLRSLYAVNGGEPEFTNYTPGFTGTLDYIFLSDGSXSIKPTSLLCLPRGDSTDVQGGLPNFQHPSDHLPIGADFLVVNS

SEQ ID NO: 95352 - protein, 255 aa, Setaria italica
  Transcript Sequence Number=SeqID_29378
  Gene Ontology: Mol. function=endonuclease activity; Cellular component=cytoplasm; Biological process=regulation of transcription, DNA-dependent
  Homolog annotation: Hit_ID=B6T791; Match level="QueryCoverage=96%, HitCoverage=61%, E-value=1e-119, Identity=87%"; Hit description =Hydrolase
  Pfam annotation: Domain name=Exo_endo_phos; Domain location=2-254; Score=15.1; E_value=0.00027; Accession=PF03372.15; Description =EndonucleaseExonucleasephosphatase family
PSACLKWKSRSKAVLTELKSFDADLMCIQELDEYDTFYKKNMEASGYSSIYIQRSGDKRDGCGIFYKPKSAELVQKEAIHYNDLVEKYVHSDHVNSALPNNSSPEEDTNAKQDNSKRGDPNDPRVRLKRDCVGLLAAFKLSDPYDHILIVANTHIYWDPEWIDVKLAQAKYLLSRVSQFEQLISNKFNSKPSVIIAGDFNSTPGDKVYNYLVSANLESTDEAPIKLRSLYAVNWRGSPSSFYLNFTYFPLVFYFG

SEQ ID NO: 95353 - protein, 109 aa, Setaria italica
  misc_feature (65)..(65): Xaa can be any naturally occurring amino acid
  Transcript Sequence Number=SeqID_29379
EEGGSGRKRKQSHIGSALEGYVEYKKSQTNKTLQAFEERKRSEKEFSVEKCVDQVVSMVELTDKXKLYALNVFESDTHRKIFITTKNFNVRLMWLKRKIRSLIDHTSVS

SEQ ID NO: 95354 - protein, 51 aa, Setaria italica
  misc_feature (24)..(24): Xaa can be any naturally occurring amino acid
  Transcript Sequence Number=SeqID_29380
  Gene Ontology: Mol. function=metal ion binding; Cellular component =nucleus; Biological process=chromatin modification
  Homolog annotation: Hit_ID=B9IDM7; Match level="QueryCoverage=100%, HitCoverage=15%, E-value=3e-16, Identity=70%"; Hit description=SET domain protein (Fragment)
GKKKQNVKCVRYDIDAESHVLLVXCRDIACGEKLYYDYNGYEHAYPTHHFL

SEQ ID NO: 95355 - protein, 55 aa, Setaria italica
  Transcript Sequence Number=SeqID_29381
LLINSITQYSILSNLESSLYSLQIIVAAGYIPLSSSADSNNQTHCCKGKIDHIVF

SEQ ID NO: 95356 - protein, 134 aa, Setaria italica
  misc_feature (53)..(53): Xaa can be any naturally occurring amino acid
  Transcript Sequence Number=SeqID_29382
  Homolog annotation: Hit_ID=B6TYM7; Match level="QueryCoverage=99%, HitCoverage=25%, E-value=1e-48, Identity=75%"; Hit description =Folate/biopterin transporter family protein
LSALLQLIAWGTLAIIPVTGDTFPTQMACILIGNLGASVTEVVSDAVVTEFSXTQKAGVLQSYAFIALAAGSLLGNLSGGYVLLKTQEPKIMFTAFSVLLGFQLALSLSTKETLPSTPRNTRSRRVRSSLAVNL

SEQ ID NO: 95357 - protein, 72 aa, Setaria italica
  Transcript Sequence Number=SeqID_29383
  Gene Ontology: Mol. function=transition metal ion binding
  Homolog annotation: Hit_ID=B6T667; Match level="QueryCoverage=70%, HitCoverage=43%, E-value=1e-16, Identity=80%"; Hit description =Cytochrome b5
MELIIIISLVILLALGALFVIPRSQNKGKSKGPDSGAGVTSKSYTKEEISKHNTRKDCWIIIKDKVYDVTPY

SEQ ID NO: 95358 - protein, 84 aa, Setaria italica
  Transcript Sequence Number=SeqID_29384
ICSDTCRHPSPEQKHRGLCLPHSRTLQCLPPRSLSSSEHCLLDARRGREGLDEDLAKGCAARRRRVVVGRKERPRDRKGTGGQR

SEQ ID NO: 95359 - protein, 180 aa, Setaria italica
  misc_feature (95)..(95): Xaa can be any naturally occurring amino acid
  Transcript Sequence Number=SeqID_29385
  Gene Ontology: Mol. function=protein transporter activity; Cellular component=nuclear pore
  Homolog annotation: Hit_ID=B9T1E9; Match level="QueryCoverage=72%, HitCoverage=11%, E-value=1e-22, Identity=46%"; Hit description =Importin beta-3, putative
DRSAAEAAFHRLRASHPEPLALRLASSLASPATAADLRAMAGVLLRKVLSPTPSSDASANNASPPAPLWPQLSLAGQSALKAHLLSALQSDSPPXPIAKKVCDAISELAASLLPENAWAELLPFLFRAASGPEAPNLQESALLIFARLADYIAESLLDHLMTIHNLLAVRLLWFVLTPLL

SEQ ID NO: 95360 - protein, 132 aa, Setaria italica
  Transcript Sequence Number=SeqID_29386
  Subcellular localization annotation: CTP_CleavageSite=28; ConfidenceScore=5.04e-01
TDNEASSRLRSVTACSVHLQQPSGNAPPCAARGLHLVGPKRHGGGARIFSAGTFAVRTPELCGQKGLFFPPIPFVPEPPNVGGVPIPPNPVTPAPPSLVPPLLPTPSPPSVLPPLVPQPPPSSIVPPLLPLV

SEQ ID NO: 95361 - protein, 237 aa, Setaria italica
  Transcript Sequence Number=SeqID_29387
  Pfam annotation: Domain name=DUF1210; Domain location=44-231; Score= -49.8; E_value=0.00062; Accession=PF06735.3; Description=Protein of unknown function (DUF1210)
MSTSTTMMTSWLLLALVLLSCFHCYPAAHHGRKHARPPLTAAVVIGSVVHSGSEPTKAISGTLVAVRCHDGYGRTVFQKEAVTDRRGTFHVQLPHEASSRLRSVTACSVHLQQPSGNAPPCAARGLHLVGPKRHGGGARIFSAGTFAVRTPELCGQKGLFFPPIPFVPEPPNVGGVPIPPNPVTPAPPSLVPPLLPTPSPPSVLPPLVPQPPPSSIVPPLLPLVHPPPPPPLTSALP

SEQ ID NO: 95362 - protein, 120 aa, Setaria italica
  Transcript Sequence Number=SeqID_29388
  Homolog annotation: Hit_ID=P93812; Match level="QueryCoverage=97%, HitCoverage=11%, E-value=1e-20, Identity=41%"; Hit description =F19P19.6 protein
PTRAFCCQDYQIIEDDFRALRGLYLTYSEGLPEDLVAKASSEVKSILPLLRTDTETLIERFKKTISESHEFTTKSRFPMPPVPAHWSPDNANTILRVLCYRNDEAATKFLKKTYDLPKTL

SEQ ID NO: 95363 - protein, 247 aa, Setaria italica
  Transcript Sequence Number=SeqID_29389
  Gene Ontology: Mol. function=transporter activity; Cellular component= integral to membrane; Biological process=auxin mediated signaling pathway
  Homolog annotation: Hit_ID=B6U8W0; Match level="QueryCoverage=99%, HitCoverage=43%, E-value=1e-125, Identity=92%"; Hit description =Auxin efflux carrier component 1c
  Pfam annotation: Domain name=Mem_trans; Domain location=2-247; Score =116.8; E_value=7.3e-32; Accession=PF03547.10; Description=Membrane transport protein
KRKDLHMFVWSSSASPVSERAAVHVFGGGAEHGDVLAKGTQAYDEYGRDDFSRTKNGNGADKGGPTLSKLGSNSTAQLYPKDDGEGRPAAMPPASVMTRLILIMVWRKLIRNPNTYSSLIGVIWSLVSFRWGIEMPAIIARSISILSDAGLGMAMFSLGLFMALQPRIIACGNKLAAYAMAVRFLVGPAVMAAASIAVGLRGVLLHIAIVQAALPQGIVPFVFAKEYNVHPDILSTAVIFGMLIALT

SEQ ID NO: 95364 - protein, 203 aa, Setaria italica
  misc_feature (10)..(10): Xaa can be any naturally occurring amino acid
  misc_feature (24)..(24): Xaa can be any naturally occurring amino acid
  misc_feature (194)..(194): Xaa can be any naturally occurring amino acid
  Transcript Sequence Number=SeqID_29390
  Gene Ontology: Mol. function=metal ion binding; Cellular component =integral to membrane; Biological process=ubiquitin-dependent protein catabolic process
  Homolog annotation: Hit_ID=B9S872; Match level="QueryCoverage=84%, HitCoverage=77%, E-value=4e-30, Identity=42%"; Hit description=RING -H2 finger protein ATL1L, putative
  Pfam annotation: Domain name=zf-C3HC4; Domain location=147-188; Score= 30.1; E_value=8.7e-06; Accession=PF00097.17; Description=Zinc finger, C3HC4 type (RING finger)
GKKNKPTQLXELQICTCRILKKAXLCPRRTWEYPRRTLLHTPFSGHPSGSSQPLDGAAPTDGGAPGSNFDANVVMILAVLLCALICALGLNSIVRCALRCSSRTEFDPVPNPVTRLAQSGLKRKALRAMPILVYSAGLKLNAANPMCAICLSDFEAGEHVRVLSKCNHGFHVRCIDRWLLARSTCPTCRQSCWXAPQKASGCS

SEQ ID NO: 95365 - protein, 368 aa, Setaria italica
  misc_feature (122)..(122): Xaa can be any naturally occurring amino acid
  misc_feature (156)..(156): Xaa can be any naturally occurring amino acid
  misc_feature (186)..(186): Xaa can be any naturally occurring amino acid
  misc_feature (309)..(309): Xaa can be any naturally occurring amino acid
  misc_feature (323)..(323): Xaa can be any naturally occurring amino acid
  misc_feature (341)..(341): Xaa can be any naturally occurring amino acid
  Transcript Sequence Number=SeqID_29391
  Gene Ontology: Mol. function=aspartic-type endopeptidase activity; Biological process=DNA integration
  Homolog annotation: Hit_ID=Q2QW16; Match level="QueryCoverage=99%, HitCoverage=20%, E-value=6e-96, Identity=49%"; Hit description =Retrotransposon protein, putative, unclassified
  Pfam annotation: Domain name=zf-CCHC; Domain location=169-186; Score =38.2; E_value=3.2e-08; Accession=PF00098.15; Description=Zinc knuckle
DLACKSTLQKLRQEWDRLAFKPSEDIDDFALHPSSLMQRLERYGNDEINEEKAVAKFMRIVLKKYSQLVISIKLLLDISMLSIEELTGRFKVFYDPDETSSGGEIIFGGQLHLTEERWLARXKERKEGESSTGGHERGKQRQAEGGTDGGAQGGAXMVPPARSRPLKTNTCYNCGKTGHWARECRXPRRGQAHVAQAVEEEEEPTLFLAHGTIELLPTAPAATALLRLDEPCAHVSLDDSSSDDKIDRWFLDSGASHHMTGPREYFSNLDVNVHGSVKFSDSSIMEIKGVGSIVLVAKTGEHRLLTGVXYIPTLRNSIISLGXLDENGLHVEIDNGVLRIXDRRHRLLAKVDRGKNNLYVLYAEVAQL

SEQ ID NO: 95366 - protein, 73 aa, Setaria italica
  Transcript Sequence Number=SeqID_29392
RACERGLGCMDRQKPMISSGTVTNLARFSFLPVAVVAAGLLLPSLLREIDDVIAGTGTTSGVPGAERWRRWSL

SEQ ID NO: 95367 - protein, 110 aa, Setaria italica
  Transcript Sequence Number=SeqID_29393
  Gene Ontology: Mol. function=triacylglycerol lipase activity; Biological process=lipid metabolic process
  Homolog annotation: Hit_ID=B4FPY6; Match level="QueryCoverage=94%, HitCoverage=16%, E-value=1e-40, Identity=79%"; Hit description=EDS1 -like protein
  Pfam annotation: Domain name=Lipase_3; Domain location=3-110; Score= -18.0; E_value=0.016; Accession=PF01764.17; Description=Lipase (class 3)
  Subcellular localization annotation: CTP_CleavageSite=59; ConfidenceScore=5.27e-01
APSSAGGARQPFGDAEVDPALFPSLRAVGSGVPARANAAFLAAFRGLLDGSTLQSEVSRAVAEEKRIVFTGHSSGGSIATLAAIWFLEKCTRQGSVNQAHPFCVTFGAPL

SEQ ID NO: 95368 - protein, 115 aa, Setaria italica
  Transcript Sequence Number=SeqID_29394
  Homolog annotation: Hit_ID=B2BA79; Match level="QueryCoverage=64%, HitCoverage=66%, E-value=2e-16, Identity=62%"; Hit description =Tapetum-specific protein LLA-115
MARSSSALLLALLVSAACLAQLGSATRPVPGQQAVAASAAAEDVKRPDTVQEGTVLIPGIGRYELGSHYIPDIGGLDHSIPAAANGQYLPGADDTWVPNPGFEIPNPFRPGAATP

SEQ ID NO: 95369 - protein, 63 aa, Setaria italica
  Transcript Sequence Number=SeqID_29395
  Subcellular localization annotation: CTP_CleavageSite=14; ConfidenceScore=5.49e-01
ATPSSFSSPAPSNRASSHRSAPGHHTTQFSPHLVVNLLLLLHFLLLSCRGVVIPSDFRLLPLT

SEQ ID NO: 95370 - protein, 139 aa, Setaria italica
  misc_feature (34)..(34): Xaa can be any naturally occurring amino acid
  Transcript Sequence Number=SeqID_29396
  Subcellular localization annotation: CTP_CleavageSite=67; ConfidenceScore=5.19e-01
VKAEADANDKRSWMSSAQLWSCGGGHDGSSSSTXTNNGAAAAAKPAHKVSDAFMPLSGLPTLARSPDDAAEKPTAVPVPELTLSSPAIDAACPAAPSATSSAVTDGGGAAQRQHQQQQRKARRCWSPELHRRFVAALQR

SEQ ID NO: 95371 - protein, 149 aa, Setaria italica
  Transcript Sequence Number=SeqID_29397
  Gene Ontology: Mol. function=protein serine/threonine kinase activity; Biological process=protein amino acid phosphorylation
  Homolog annotation: Hit_ID=Q2R915; Match level="QueryCoverage=84%, HitCoverage=11%, E-value=1e-48, Identity=72%"; Hit description =Leucine Rich Repeat family protein, expressed
  Pfam annotation: Domain name=Pkinase_Tyr; Domain location=36-149; Score=-135.7; E_value=0.0001; Accession=PF07714.9; Description =Protein tyrosine kinase
KLKNKGEVEDSGIDPSNVMYLGHLSYHDLILATSNFSDDNLLGTGSFGKVYKGQLSTGFTVAVKVLDMQHEQAIRSFDAECSTLRMARHRNLIKILNVCSNVEFRALVLQYMPSGSLEMLLHSESIEHLGFLKRLDIMLDVSMAMEYLH

SEQ ID NO: 95372 - protein, 248 aa, Setaria italica
  Transcript Sequence Number=SeqID_29398
  Gene Ontology: Mol. function=protein serine/threonine kinase activity; Biological process=protein amino acid phosphorylation
  Homolog annotation: Hit_ID=Q8RV02; Match level="QueryCoverage=100%, HitCoverage=23%, E-value=3e-94, Identity=67%"; Hit description =Leucine Rich Repeat family protein, expressed
  Pfam annotation: Domain name=Pkinase; Domain location=59-248; Score =38.3; E_value=9e-11; Accession=PF00069.17; Description=Protein kinase domain
  Pfam annotation: Domain name=Pkinase_Tyr; Domain location=59-248; Score=-23.4; E_value=3.6e-12; Accession=PF07714.9; Description =Protein tyrosine kinase
  Pfam module annotation: Pfam domain module=Pkinase::Pkinase_Tyr; Domain location=59-248::59-248
LKFLLPAVTVAFGSIVLCICLTVRTLKKGQVQTLNIDQGDIMSLRLVSYHDLVHATDNFSSNNLLGTGSFGKVFKGQLSTGLVVAIKVLDMRLEQAIRSFDAECRVLRMARHRNLIRILSTCSNLDFRALVLQYMPNGSLEKLLHSEGRRHLGFLKMLEIMLDVSTAMEYLHHEHHEVVLHCDLKPSNVLFDSDMTAHVADFGIAKLLLGQDSSMITASMPGTLGYMAPEYGSFGKASRKSDVFSFGI

SEQ ID NO: 95373 - protein, 153 aa, Setaria italica
  misc_feature (136)..(136): Xaa can be any naturally occurring amino acid
  Transcript Sequence Number=SeqID_29399
  Gene Ontology: Mol. function=protein serine/threonine kinase activity; Biological process=protein amino acid phosphorylation
  Homolog annotation: Hit_ID=Q53K01; Match level="QueryCoverage=90%, HitCoverage=13%, E-value=3e-49, Identity=71%"; Hit description =Leucine Rich Repeat, putative
  Pfam annotation: Domain name=Pkinase; Domain location=5-153; Score= -93.0; E_value=0.0059; Accession=PF00069.17; Description=Protein kinase domain
  Pfam annotation: Domain name=Pkinase_Tyr; Domain location=3-149; Score=-126.7; E_value=2.6e-05; Accession=PF07714.9; Description =Protein tyrosine kinase
  Pfam module annotation: Pfam domain module=Pkinase::Pkinase_Tyr; Domain location=5-153::3-149
SPAWGKGLKVYLSKVLDMQQEQAIRSFDAECSTLRMARHRNLIKILNVCSNVEFKALVLQYMPRGSLEMLLQSDSIEHLGFLKRLDIMLDVSMAMEYLHHEHHEVVLHCDLKPSNVLFDEDMTAHVADFGIAKLLXGSDDCSMITASMLGTTW

SEQ ID NO: 95374 - protein, 81 aa, Setaria italica
  Transcript Sequence Number=SeqID_29400
  Homolog annotation: Hit_ID=Q8H6R4; Match level="QueryCoverage=80%, HitCoverage=32%, E-value=8e-17, Identity=55%"; Hit description=Jp18
MDWYAWLCRAGLHPDVALDYALLFARNELVADDVRHLDHEFLATMGVAVAKHRLEILKLARKESSNYSSASRAAPTHTPTH

SEQ ID NO: 95375 - protein, 114 aa, Setaria italica
  Transcript Sequence Number=SeqID_29401
  Gene Ontology: Mol. function=metal ion binding; Cellular component =integral to membrane; Biological process=ubiquitin-dependent protein catabolic process
  Homolog annotation: Hit_ID=Q2HTN3; Match level="QueryCoverage=58%, HitCoverage=18%, E-value=5e-23, Identity=70%"; Hit description=Zinc finger, RING-type
  Pfam annotation: Domain name=PHD; Domain location=22-67; Score=1.6; E_ value=0.017; Accession=PF00628.21; Description=PHD-finger
  Pfam annotation: Domain name=zf-C3HC4; Domain location=23-64; Score =33.7; E_value=7.3e-07; Accession=PF00097.17; Description=Zinc finger, C3HC4 type (RING finger)
  Pfam module annotation: Pfam domain module=PHD::zf-C3HC4; Domain location=22-67::23-64
ATFPIVSYREVVAHKIGKGVLECAVCLTAFEDDDDLRLLPHCSHAFHPECIDPWLQSRVTCPLCRANLEKPAPAVAVAMAVAVAPPSPQEQRQPSPPQEAVSIPVVDEDSEEED

SEQ ID NO: 95376 - protein, 138 aa, Setaria italica
  misc_feature (80)..(80): Xaa can be any naturally occurring amino acid
  Transcript Sequence Number=SeqID_29402
  Homolog annotation: Hit_ID=A0MJU1; Match level="QueryCoverage=45%, HitCoverage=43%, E-value=5e-09, Identity=46%"; Hit description =Stigma-specific Stig1 family protein (Fragment)
  Pfam annotation: Domain name=Somatomedin_B; Domain location=87-128; Score=3.7; E_value=0.071; Accession=PF01033.9; Description =Somatomedin B domain
  Pfam annotation: Domain name=Stig1; Domain location=21-137; Score =30.8; E_value=3.6e-08; Accession=PF04885.5; Description=Stigma -specific protein, Stig1
  Pfam module annotation: Pfam domain module=Somatomedin_B::Stig1; Domain location=87-128::21-137
  Subcellular localization annotation: CTP_CleavageSite=57; ConfidenceScore=5.49e-01
AHRDPISIAAASPPAAHRPPPAMRKATIFLMALALALAAAAPLQVAAPPPLRRSRFLANANFPPPLSFYDCSKKPPSICXLQPGSPGATCCKGACVDTESSFQHCGNCNKACKYTQTCCEGKCVNTFTDHKNCGGCGV

SEQ ID NO: 95377 - protein, 98 aa, Setaria italica
  Transcript Sequence Number=SeqID_29403
LVKDTYPNRCTNQLRAHRVLAGRNPPHQHLTEQVVEERYYSPTHRSTQLLPQSLGMVQKGRGRKGTIPSVEALVEVDGCRPLPSPALLYHSQTLQHTD

SEQ ID NO: 95378 - protein, 188 aa, Setaria italica
  Transcript Sequence Number=SeqID_29404
  Gene Ontology: Mol. function=GTP binding; Cellular component=viral envelope; Biological process=protein transport
  Homolog annotation: Hit_ID=B9SQL1; Match level="QueryCoverage=66%, HitCoverage=11%, E-value=3e-38, Identity=62%"; Hit description =Protein translocase, putative
  Subcellular localization annotation: CTP_CleavageSite=74; ConfidenceScore=5.90e-01
DGLSSSDDENTATSAPPAQSTSSSSTPAQSNSAVSGRSNGPSLPSRPAGLGSSSSLLQPPARPVQQVRFNGSASLATESAEDDGDGNDEIHEKLQMIRVKFLRLAHRFGQTPHNMVVSQVLYRLGLAEQLRRTTANGSFSFDRAREMAERLEAAGNEPLDFSCTILVLGKTGVGKSATINSIFDDTRL

SEQ ID NO: 95379 - protein, 45 aa, Setaria italica
  Transcript Sequence Number=SeqID_29405
WTNSCLQGSKGREGSGNCDVLLIMCNLFCFLSVFFLLVLPPLLEY

SEQ ID NO: 95380 - protein, 83 aa, Setaria italica
  Transcript Sequence Number=SeqID_29406
  Gene Ontology: Mol. function=receptor activity; Cellular component =plasma membrane
  Homolog annotation: Hit_ID=Q9SA91; Match level="QueryCoverage=97%, HitCoverage=18%, E-value=2e-23, Identity=64%"; Hit description =T5I8.21 protein
ANTIVKGMSLMQSLSKESLKYLKDTVLLSEGVQRLVSSDMDDLMRIAAADKRQELRVFSREVIRFGNRCKDPQWHNLDRYFSN

SEQ ID NO: 95381 - protein, 625 aa, Setaria italica
  misc_feature (25)..(25): Xaa can be any naturally occurring amino acid
  Transcript Sequence Number=SeqID_29407
  Gene Ontology: Mol. function=receptor activity; Cellular component =plasma membrane
  Homolog annotation: Hit_ID=Q9XID5; Match level="QueryCoverage=96%, HitCoverage=89%, E-value=1e-129, Identity=45%"; Hit description =F23M19.3
  Pfam annotation: Domain name=DUF668; Domain location=340-425; Score =164.2; E_value=3.8e-46; Accession=PF05003.4; Description=Protein of unknown function (DUF668)
TAPVEEAAEPELVSDQWSRLSEKGXSPPPSTGNKARHSSKEPPHLMRAESGKSKAGKPRRSTSSKAGPSKVSDIGLALGRKSTSGLGKAVEVLDNLSSSMSSLSPGGGFVSAPTTKGNKISILAFEVANTIVKGMSLMQSLSKESLKYLKDTVLLSEGVQRLVSSDMDDLMRIAAADKRQELRVFSREVIRFGNRCKDPQWHNLDRYFSKLESEITPQPELKEMAKADMQRLMTLVRYTGDLYHELHALDRFEQDYRRKLEEEKRSVTFERGDTVQIIRQELKSQRKHVHSLKKKSLWSKILDDVMEKLVDIVHFLHVEIQDTFGHCDGESNESQESRQTLGSAGLSLHYANIISQIDNIVSRSSVPPQSTRDALYQALPPNVKSALRTRLLTSSESEEVPITQIRCSMEKTLQWIVPIANSTARAHHGFGWVGEWANTGNDLSRKQPGQPDVLKIETLFHADKAKTDACILDLVVWLHHLISYSRPNKGGRSPSRSPVRSPAQSSHAAPRSPVSAAASRGAAGLTREDREMLLDVYTRRRNPGKSKSQELSTAARGGGRSALSRNDRLSKSSSSHCPSREQGGRVFPLTPSRSPAVSPVVHFDIDRIKALDVDAMDKTDVQKQP

SEQ ID NO: 95382 - protein, 256 aa, Setaria italica
  misc_feature (230)..(230): Xaa can be any naturally occurring amino acid
  Transcript Sequence Number=SeqID_29408
  Gene Ontology: Mol. function=DNA binding; Cellular component=nucleus; Biological process=regulation of transcription, DNA-dependent
  Homolog annotation: Hit_ID=B9S0I6; Match level="QueryCoverage=95%, HitCoverage=35%, E-value=8e-39, Identity=36%"; Hit description=DNA binding protein, putative
EQLNKLGRYLIGIQPIPSDSKKFSARPPNHSGKIKLQLFPIDENIQKIMQQEKHNPYLELILAPRKKISSVVQHLNTKWGNSQCAKGELMLFPNGTRVDIIASSAKWTLKDSCTAADVHVAVGSPSTFRLRYGWFGPNLKQQSSGPSLASVQSADKTIGVKAPDLVFTEEKHMTGLSEFPSNFVTPSIVDNTNAVQQVDNQSKVAPLSWLDSISNISFGALLSEATPSQXSKQLPSQNNPSIQIPATCDSFDAAIA

SEQ ID NO: 95383 - protein, 104 aa, Setaria italica
  Transcript Sequence Number=SeqID_29409
FYYKMIYIHCVSALAFSLRIPNSLFFYNVWTDFCLGTILISFRFCPCMKKRPWAYKKKMHMHRCFSISIKFLLVTLRSPNLRIILKQVFSFHKFELLGFLILFK

SEQ ID NO: 95384 - protein, 168 aa, Setaria italica
  Transcript Sequence Number=SeqID_29410
  Gene Ontology: Mol. function=transporter activity; Cellular component= integral to membrane; Biological process=transport
  Homolog annotation: Hit_ID=Q6EPQ3; Match level="QueryCoverage=85%, HitCoverage=20%, E-value=8e-71, Identity=86%"; Hit description=SPX (SYG1/Pho81/XPR1) domain-containing protein-like
  Pfam annotation: Domain name=SPX; Domain location=1-76; Score=-43.3; E_value=0.0057; Accession=PF03105.11; Description=SPX domain
LASRIENLGEQRAALMEQSDVSQICQLREAYREVGYDLVKLLRFLDMNATGIRKILKKFDKRFGYKFTDYYVSTRANHPYSQLQQIFKQVGVVAVVGALSRNLAYLQDHRGSFSSIYDHPSITFKDPVIEQINHSVQKLTHSTNFLQFFRVFFIVVIVLSIFTTILLM

SEQ ID NO: 95385 - protein, 82 aa, Setaria italica
  Transcript Sequence Number=SeqID_29411
  Homolog annotation: Hit_ID=Q9SRT1; Match level="QueryCoverage=96%, HitCoverage=26%, E-value=3e-14, Identity=48%"; Hit description =F21O3.6 protein
  Pfam annotation: Domain name=DUF506; Domain location=1-82; Score= -28.1; E_value=7.5e-07; Accession=PF04720.4; Description=Protein of unknown function (DUF506)
AGHDAAVCVSRWDKSPSHPAGEHAYVDVLLPAASDRGARERVLVDVDFRSAFEVARPTKAYRSLLQRLPAVFVGKDDRLRLL

SEQ ID NO: 95386 - protein, 83 aa, Setaria italica
  Transcript Sequence Number=SeqID_29412
  Subcellular localization annotation: CTP_CleavageSite=50; ConfidenceScore=5.01e-01
QEIFHFSVHWLVHGEDPPPLLQTCSHGDQRRGLMQPHGSKTPPFTSSWVVATMNVVLALRISRPSVSVHPLDACLDGSQGNKS

SEQ ID NO: 95387 - protein, 167 aa, Setaria italica
  Transcript Sequence Number=SeqID_29413
ASASSTVLLASRKDVPTQFGIPIPAVCEWLKQHWNGSLEDVSKPMMTPARLTTSGERSGRSSFGHIRYIKTTEREGGDVLSSSQIPPRPTWQHGACSSASAKISHGEKDSTVSHSFHGQHELISKMCKPKNEQAASLMDISLPPGHSRSIRLPLPLKQMMPDENKMR

SEQ ID NO: 95388 - protein, 131 aa, Setaria italica
  Transcript Sequence Number=SeqID_29414
  Gene Ontology: Mol. function=binding; Cellular component=chloroplast
  Homolog annotation: Hit_ID=Q1SN04; Match level="QueryCoverage=100%, HitCoverage=17%, E-value=2e-24, Identity=37%"; Hit description =Tetratricopeptide-like helical
YMSLLEEGKHFFNMMTCSYGILPNKMHYACMVDLFSRRGMLEQAEELVKSMPFEPDSAIWTSLLSSCRLNGNGRLAEHAASQLISINPTTKMPYLHLISVNRSTERWSVMDNLRSQIGNAATDKEVGYSWI

SEQ ID NO: 95389 - protein, 69 aa, Setaria italica
  Transcript Sequence Number=SeqID_29415
GNVFHLMPFPCIVLEFELREMGYVSSSVPASFTTQSCEDYFVPSEHRKNVRPYRVAREIESLILQINLC

SEQ ID NO: 95390 - protein, 170 aa, Setaria italica
  Transcript Sequence Number=SeqID_29416
  Gene Ontology: Cellular component=cytoplasm
  Homolog annotation: Hit_ID=B9SGN9; Match level="QueryCoverage=98%, HitCoverage=99%, E-value=2e-48, Identity=57%"; Hit description=Optic atrophy 3 protein, putative
  Pfam annotation: Domain name=OPA3; Domain location=4-136; Score =242.1; E_value=1.4e-69; Accession=PF07047.4; Description=Optic atrophy 3 protein (OPA3)
MALPVAKLGTLALRTLSKPIASRLKNQAAVHPKFRNFIVAIAQINHRITTKIQRRIYGHATDVEIRPLDEQKAVQAATDLIGEAFIFSVAVAALIFEVQRSARSEARKEEARKQEGKELKQREDSLAKELEDLKLKLNEIERLAKGRGLTGILNLKGVHGAEGGKAATPA

SEQ ID NO: 95391 - protein, 91 aa, Setaria italica
  Transcript Sequence Number=SeqID_29417
  Gene Ontology: Mol. function=protein dimerization activity
  Homolog annotation: Hit_ID=B6T4X7; Match level="QueryCoverage=100%, HitCoverage=25%, E-value=3e-37, Identity=80%"; Hit description=O -methyltransferase ZRP4
DCVKILKNCKKAIPSKERGGKVIILDIMVGAGSSSDQKHVETQVLFDLFIMFVNGAERDEQEWKNIIFEAGFSDYKIIPVLGVRSIIEAYP

SEQ ID NO: 95392 - protein, 688 aa, Setaria italica
  misc_feature (276)..(276): Xaa can be any naturally occurring amino acid
  misc_feature (677)..(677): Xaa can be any naturally occurring amino acid
  Transcript Sequence Number=SeqID_29418
  Gene Ontology: Mol. function=transferase activity; Cellular component= nuclear pore; Biological process=transport
  Homolog annotation: Hit_ID=Q2HVW5; Match level="QueryCoverage=96%, HitCoverage=77%, E-value=0.0, Identity=68%"; Hit description =Nucleoporin interacting component; Protein prenyltransferase
  Pfam annotation: Domain name=Nic96; Domain location=241-688; Score =197.7; E_value=3.2e-56; Accession=PF04097.6; Description=Nup93Nic96
MAGVGGSGVGGGGDTEMGGWTGLLHSSTKLLEQAAPTPHFPPLQRNLDQLEALSTKLKAKTIRAEAPSQSLSATRLLAREGINAEQLARDLKSFELKTTFEDVFPSEATSVEEYLQQLHEVAIVSSIQEAQKDNFWSFNKLTIELQVLEDDWQKEKRDFLQSLSRLSTLPKRNTNISTSGLARPALMPPSTSSPHASSGLPSAGVMPIPNKTIIENKSSVYAGVVRDLNEARGRSLPFNPATAFRAAYESLSVDAVGTKSVTMQKMWHLIQALVGXGSTHRNVSRKMSLVIGARHHLEWGHEKYILETINSHPALAALGGSVGNLQKIRAFMRVRLRDQGVLDFDATDLRRQPPVDTTWQQIYFCLRTGYYDEARQVAQSSRAAHNFAPLLADWISTNGAVSQDTALAASEECDKMLRMGDRPGRPGYDRKKLLLYAIICGCRRQIDRLLKDLPTLFNTIEDFLWFKLSALREHNNASSSSVLNEGLVPYTLDDLQSYLNKFEPSYYTKSGKDPLIYPYVLFLSIQLLPAILYLSKEIGEDGYHVDAVHISIALADHGVLPDGVGSGQKIGVMDACAEAASIIRQYGSIYLRSGNIDLALEYYAQAAAAMGGGEVSWIGQGNADQQRQRSLMLKQLLTEILLRDGGIQLLLGPSGMGEEGELKKYMMDWRSRQQFLXEAAHRCQEAGL

SEQ ID NO: 95393 - protein, 118 aa, Setaria italica
  Transcript Sequence Number=SeqID_29419
  Gene Ontology: Mol. function=hydrolase activity, hydrolyzing O -glycosyl compounds; Cellular component=extracellular region; Biological process=carbohydrate metabolic process
  Homolog annotation: Hit_ID=Q2QZ61; Match level="QueryCoverage=94%, HitCoverage=39%, E-value=2e-33, Identity=62%"; Hit description =Xylanase inhibitor protein 2, putative, expressed
GYRGVTLTATVRCAYPDPDLTAALATGLFSRIHVRLYGGDLKCEWGQFDSWNKWAAAYPGSRVFVGVVASPEADKDAYLFQKDLYYGILQFAQKVPNYGGLMIWDRYYDKMNHYISSS

SEQ ID NO: 95394 - protein, 113 aa, Setaria italica
  Transcript Sequence Number=SeqID_29420
  Gene Ontology: Mol. function=binding; Biological process=methylation
  Homolog annotation: Hit_ID=Q2HS71; Match level="QueryCoverage=99%, HitCoverage=11%, E-value=5e-39, Identity=62%"; Hit description=SAM (And some other nucleotide) binding motif; Methyltransferase small; Tetratricopeptide-like helical
  Pfam annotation: Domain name=PPR; Domain location=34-68; Score=41.0; E_value=4.7e-09; Accession=PF01535.12; Description=PPR repeat
  Pfam annotation: Domain name=PPR; Domain location=69-103; Score=15.3; E_value=0.14; Accession=PF01535.12; Description=PPR repeat
  Pfam module annotation: Pfam domain module=PPR::PPR; Domain location =34-68::69-103
SVALGTSLIGMYAKCGNIKKAICIFKEVPEKNALAWTAMVRGLANHGHADEAIEHFRRMIELGLQPDEITFIGVLSACCHAGLVEEGREFFSLMDSKYHLKRKMKHYSCMVDL

SEQ ID NO: 95395 - protein, 129 aa, Setaria italica
  Transcript Sequence Number=SeqID_29421
RLFSDKTADYEDCIACTNTQGDQALDVFSKFSSFFFERFTRESWKARCRWWMHHHFSQNAYASETLTGDCKLLAAKAACAAHLFGPEFPYVKAAGSYIAKQESLDEVSLLVRNKQNSVRLLQTLEKLTS

SEQ ID NO: 95396 - protein, 127 aa, Setaria italica
  Transcript Sequence Number=SeqID_29422
  Gene Ontology: Mol. function=calmodulin binding; Cellular component =integral to membrane; Biological process=cell death
  Homolog annotation: Hit_ID=Q8H886; Match level="QueryCoverage=100%, HitCoverage=22%, E-value=3e-35, Identity=60%"; Hit description =Putative OsMlo-h1
  Pfam annotation: Domain name=Mlo; Domain location=6-127; Score= -279.8; E_value=7.4e-06; Accession=PF03094.7; Description=Mlo family
MAGAPGDRELPETPTWAVALVCAVIVLLSVAMEHGLHKLGHWFHTRQKKAMREALEKIKAELMLMGFISLLLAVGQTPISKICIPTKAGSVMLPCKPKDDGESGGDRRRRLLWYPGEEVNHRRFLAG

SEQ ID NO: 95397 - protein, 43 aa, Setaria italica
  Transcript Sequence Number=SeqID_29423
LKAQEIVANKELHERYIDEFVQQLRSHTADANSTAAVPPQAEA

SEQ ID NO: 95398 - protein, 93 aa, Setaria italica
  Transcript Sequence Number=SeqID_29424
  Subcellular localization annotation: CTP_CleavageSite=66; ConfidenceScore=5.79e-01
MAAAAARSLLRSSASLLRAAPARSSTSSAATRPPLRRALAAPPRLLRSPVESSFCVESLLPLHSATAGARMTSMLAIPGRGLGWLTQAETDGV

SEQ ID NO: 95399 - protein, 110 aa, Setaria italica
  Transcript Sequence Number=SeqID_29425
SAAMVEHPLGVGPLQVPPLPLHRRDALPHGPGATSQIGSAATAQGPNAYQQPQLKKRSEANRHASGGEDARLLAPLRGSARVGAELGSDWATTWAARATGRAKEEREERD

SEQ ID NO: 95400 - protein, 140 aa, Setaria italica
  misc_feature (94)..(94): Xaa can be any naturally occurring amino acid
  Transcript Sequence Number=SeqID_29426
  Gene Ontology: Mol. function=3-deoxy-7-phosphoheptulonate synthase activity; Cellular component=chloroplast; Biological process =aromatic amino acid family biosynthetic process
  Homolog annotation: Hit_ID=Q9AY42; Match level="QueryCoverage=96%, HitCoverage=25%, E-value=2e-62, Identity=82%"; Hit description =Putative 3-deoxy-D-arabino-heptulosonate 7-phosphate synthase
  Pfam annotation: Domain name=DAHP_synth_2; Domain location=1-140; Score=-167.0; E_value=1.1e-08; Accession=PF01474.8; Description =Class-II DAHP synthetase family
QCVFQVGRLGGQFAKPRSNPTETRDGVTLPLYTYRGDIINGDTFDEKSRVPDPERLIKAYNQSASTLNLLRGFTHGGFADLQRVTQWNLDFLRXATQGDRYLELSQRVQDAVGFMAAAGLTTRHPIMTTAELWTSHECLH

SEQ ID NO: 95401 - protein, 85 aa, Setaria italica
  Transcript Sequence Number=SeqID_29427
  Subcellular localization annotation: CTP_CleavageSite=47; ConfidenceScore=5.29e-01
MFAFPENAPTTPGGSEANSAGNMFAFLAAPERPNTPTGPTPGWGFVFAASPEGPLTPTSRGSSTSGLTFLASPKQPLTPTGPIAG

SEQ ID NO: 95402 - protein, 178 aa, Setaria italica
  Transcript Sequence Number=SeqID_29428
  Gene Ontology: Mol. function=nucleoside-triphosphatase activity; Cellular component=cell soma; Biological process=regulation of transcription, DNA-dependent
  Homolog annotation: Hit_ID=Q6YVI6; Match level="QueryCoverage=100%, HitCoverage=22%, E-value=2e-80, Identity=85%"; Hit description =Putative DNA helicase
  Pfam annotation: Domain name=DEAD; Domain location=19-165; Score= -40.6; E_value=0.035; Accession=PF00270.21; Description=DEADDEAH box helicase
  Pfam annotation: Domain name=ResIII; Domain location=12-114; Score= -31.1; E_value=0.021; Accession=PF04851.7; Description=Type III restriction enzyme, res subunit
  Pfam module annotation: Pfam domain module=DEAD::ResIII; Domain location=19-165::12-114
DWDESGGPDLSLSERYAYDASQLRALKLGLNKKRPVLIIQGPPGTGKTVLLTELIVRAVKQGERVLVTAPSNAAVDNMVESLSSTGLNIVRVGNPVRLSPSVASKSLGEIVNSRLRQFRKELERKRTDLRKDLRQCIEDDSLAAGIRQLLKQLGRDLENKEKETIREVLSGAQIVLST

SEQ ID NO: 95403 - protein, 159 aa, Setaria italica
  misc_feature (144)..(144): Xaa can be any naturally occurring amino acid
  Transcript Sequence Number=SeqID_29429
  Gene Ontology: Mol. function=actin binding; Cellular component =cytoskeleton; Biological process=cytoskeleton organization and biogenesis
  Homolog annotation: Hit_ID=O81643; Match level="QueryCoverage=94%, HitCoverage=16%, E-value=4e-50, Identity=57%"; Hit description =Villin-1
  Pfam annotation: Domain name=Gelsolin; Domain location=36-116; Score =37.0; E_value=7.5e-08; Accession=PF00626.14; Description=Gelsolin repeat
  Subcellular localization annotation: CTP_CleavageSite=19; ConfidenceScore=5.05e-01
YFKPCIIPVHSQSPPHMVGSGHKSSRTTMFRCEGEHVARVKEVPFSRSSLDHKGVFIVDTASKIFIFCGCNSSVQTRGKALDVVKHLKENRHSGRCEIAAIEDGKLVGDSDAGEFWNLFGGYAPIPRDLSEAVSEESMNMPSKXLFWINKRILVPMEAH

SEQ ID NO: 95404 - protein, 63 aa, Setaria italica
  Transcript Sequence Number=SeqID_29430
HHHHHHIDGKVMATRSKPAKKHGKTSSAIFRLQPEYHLMLTSTLLQTRTDRKFPNRHVPSSNV

SEQ ID NO: 95405 - protein, 76 aa, Setaria italica
  Transcript Sequence Number=SeqID_29431
  Subcellular localization annotation: CTP_CleavageSite=14; ConfidenceScore=5.30e-01
MASAARALGALLHRASSLSSSASALRRASLLHGTGIEPIGNAGLFRRHAARRRISTFQPLCMGRRSCKIAGRKVMY

SEQ ID NO: 95406 - protein, 80 aa, Setaria italica
  Transcript Sequence Number=SeqID_29432
  Gene Ontology: Mol. function=phosphoprotein phosphatase activity; Cellular component=intracellular
  Homolog annotation: Hit_ID=Q2R3H8; Match level="QueryCoverage=100%, HitCoverage=6%, E-value=1e-22, Identity=72%"; Hit description=NLI interacting factor-like phosphatase family protein, expressed
QRDELDSRVRQLVFEDKDNVNDPSTSGSAPSGQVSSGRLPYESGAANSFSGSSLPRLEIPAKRISPLLDLHADYDENSLP

SEQ ID NO: 95407 - protein, 198 aa, Setaria italica
  Transcript Sequence Number=SeqID_29433
  Gene Ontology: Mol. function=protein serine/threonine kinase activity; Cellular component=myosin complex; Biological process =protein amino acid phosphorylation
  Homolog annotation: Hit_ID=Q7XYY6; Match level="QueryCoverage=99%, HitCoverage=19%, E-value=1e-109, Identity=94%"; Hit description=EDR1
  Pfam annotation: Domain name=Pkinase; Domain location=2-169; Score =14.7; E_value=2.3e-09; Accession=PF00069.17; Description=Protein kinase domain
  Pfam annotation: Domain name=Pkinase_Tyr; Domain location=1-169; Score=4.4; E_value=5.1e-14; Accession=PF07714.9; Description=Protein tyrosine kinase
  Pfam module annotation: Pfam domain module=Pkinase::Pkinase_Tyr; Domain location=2-169::1-169
RILHRPNCLIDEKRRIKMALDVAKGMNCLHTSVPTIVHRDLKSPNLLVDNNWNVKVCDFGLSRLKHSTFLSSKSTAGTPEWMAPEVLRNEQSNEKCDVYSFGVILWELATLRMPWSGMNPMQVVGAVGFQDRRLDIPKEVDPLVARIIYECWQKDPNLRPSFSQLTSALKTVQRLVTPSHQETQSPPVHQEISVNSTP

SEQ ID NO: 95408 - protein, 580 aa, Setaria italica
  misc_feature (27)..(27): Xaa can be any naturally occurring amino acid
  Transcript Sequence Number=SeqID_29434
  Gene Ontology: Mol. function=protein serine/threonine kinase activity; Cellular component=myosin complex; Biological process =protein amino acid phosphorylation
  Homolog annotation: Hit_ID=Q7XYY6; Match level="QueryCoverage=99%, HitCoverage=57%, E-value=0.0, Identity=69%"; Hit description=EDR1
  Pfam annotation: Domain name=Pkinase; Domain location=426-579; Score =14.7; E_value=2.3e-09; Accession=PF00069.17; Description=Protein kinase domain
  Pfam annotation: Domain name=Pkinase_Tyr; Domain location=426-579; Score=5.3; E_value=4.5e-14; Accession=PF07714.9; Description=Protein tyrosine kinase
  Pfam module annotation: Pfam domain module=Pkinase::Pkinase_Tyr; Domain location=426-579::426-579
VKGSNYTGGDDDDAINIIKMDNEREFXVDLMAAPGALIPADILSWKGNSLNSNRKLSLNRTAGPSSSIDANLDPSALPPEPKGGQLPLFSSDDWILDSKSGYETAAVAASSQTSSSGTSSVPAGSVFDSSWTLVSHEQSDGPSTSAGTSSQEKVVLQGEHPRNLNRLPDLQENPESRNLFADLNPFGGIESKKTSVAFKGPDNRNNELQKRRENVAPSGGRPQQRLVMKNWSPYNDVSNNKQYNYVEDSFARRNVGNNAASPSSSQMPRPATRNSNLNAGLRNDTSYVAQPHNYDNIMIGTSAMKITSTAETGKVPERVLHGGLDKVPTNSRLEDQHGLVQLPQERLPWDNPAEGRVPMNRVQNQAKQHMENLDSKQDHKKLLPDPKKSPLDRFMDTSTPSRNMDVRSQRLDFDDVSECEIPWEDLVIGERIGLGSYGEVYRADWNGTEVAVKKFLDQDFYGDALDEFRSEVRIMRRLRHPNIVLFMGAVTRPPNLSIVSEYLPRGSLYKILHRPNCLIDEKRRIKMALDVAKGMNCLHTSVPTIVHRDLKSPNLLVDNNWNVKVCDFGLSRLHSNKHLR

SEQ ID NO: 95409 - protein, 89 aa, Setaria italica
  Transcript Sequence Number=SeqID_29435
  Gene Ontology: Cellular component=mitochondrion
  Homolog annotation: Hit_ID=B6SP54; Match level="QueryCoverage=100%, HitCoverage=17%, E-value=6e-32, Identity=77%"; Hit description =Nodulin-like protein
  Subcellular localization annotation: CTP_CleavageSite=38; ConfidenceScore=5.37e-01
LMAPMSGAFFLLLHPKNMSLYASTAVVGTCTGAITSVAASATNELFGTKNFGVNHNVVVANIPLGSLCFGYLAAYLYQRGAHGGNRCMG

SEQ ID NO: 95410 - protein, 153 aa, Setaria italica
  misc_feature (6)..(6): Xaa can be any naturally occurring amino acid
  misc_feature (21)..(21): Xaa can be any naturally occurring amino acid
  misc_feature (27)..(27): Xaa can be any naturally occurring amino acid
  misc_feature (50)..(50): Xaa can be any naturally occurring amino acid
  Transcript Sequence Number=SeqID_29436
  Gene Ontology: Mol. function=transferase activity, transferring glycosyl groups; Cellular component=integral to membrane
  Homolog annotation: Hit_ID=B9NC17; Match level="QueryCoverage=59%, HitCoverage=16%, E-value=5e-20, Identity=52%"; Hit description =Glycosyltransferase
HLDRAXRHLRLLSSLHRNLTXTLRALXLAADAATVSDPFSDPAAAANASXLRQLDLQAKDLIRAARAAIADSKPLFDPQLKIQRLKDAIFAQNELLARAKKRGAFASLIAAKSIPKPLHCLAVRLTAERIARPEQYAEPVPPPPALEDPALFH

SEQ ID NO: 95411 - protein, 84 aa, Setaria italica
  Transcript Sequence Number=SeqID_29437
  Gene Ontology: Mol. function=metal ion binding
LGGSGQRQRHGHSQVPDRSPSPMEPSRRLLLSDYDGAIESPMPSPPPSSATPFRPGVAVVVGILTSVFSITFLLLLYAKHCKRS

SEQ ID NO: 95412 - protein, 81 aa, Setaria italica
  Transcript Sequence Number=SeqID_29438
  Subcellular localization annotation: CTP_CleavageSite=40; ConfidenceScore=5.26e-01
LPSCLPSSFPSSFVQTQYGQRGDQLKVLTGWSLFHGFLFTCAYINPASTFWISSMSLEFNHKLRTRLTEIPELRKPGTRPP

SEQ ID NO: 95413 - protein, 99 aa, Setaria italica
  Transcript Sequence Number=SeqID_29439
  Gene Ontology: Mol. function=electron carrier activity; Cellular component=cytoplasmic vesicle membrane; Biological process=oxidation reduction
  Homolog annotation: Hit_ID=Q7XU38; Match level="QueryCoverage=100%, HitCoverage=19%, E-value=1e-46, Identity=90%"; Hit description =Cytochrome P450 87A3
MFVLLFASFETTALALTLGVKLLTENPKVVDALREEHDAIARNRKDPDAPVTWAEYRSMTFTNQVIMEMVRLANIVPGIFRKALQDVEIKGYTIPAGWG

SEQ ID NO: 95414 - protein, 29 aa, Setaria italica
  Transcript Sequence Number=SeqID_29440
NLGCYCLTTGFWPSYKTFDINLPAEMVKC

SEQ ID NO: 95415 - protein, 128 aa, Setaria italica
  Transcript Sequence Number=SeqID_29441
  Subcellular localization annotation: CTP_CleavageSite=45; ConfidenceScore=5.01e-01
LVVVGKSKQASRLAQYHGVAAPAVSWCLNNFCHLFSNSWCGFCQRAELVVRELHRSFKSFSSYSDSVFANVQDVHTEEKNKKYAMKGFPVIYMIDCTSNECHHLLKSAGMVILIFNHIFPSLEVCSLL

SEQ ID NO: 95416 - protein, 97 aa, Setaria italica
  Transcript Sequence Number=SeqID_29442
  Gene Ontology: Mol. function=ubiquitin protein ligase binding; Cellular component=cullin-RING ubiquitin ligase complex; Biological process=ubiquitin-dependent protein catabolic process
  Homolog annotation: Hit_ID=Q93VH7; Match level="QueryCoverage=72%, HitCoverage=9%, E-value=2e-34, Identity=100%"; Hit description=CUL1
  Pfam annotation: Domain name=Cullin_Nedd8; Domain location=24-91; Score=142.1; E_value=1.7e-39; Accession=PF10557.1; Description =Cullin protein neddylation domain
TGGRGIFILRILSVNEKKKVVEDVDKDRRYAIDASIVRIMKSRKVLGHQQLVMECVEQLGRMFKPDFKAIKKRIEDLITRDYLERDKDNPNVYRYLA

SEQ ID NO: 95417 - protein, 206 aa, Setaria italica
  misc_feature (95)..(95): Xaa can be any naturally occurring amino acid
  misc_feature (118)..(118): Xaa can be any naturally occurring amino acid
  misc_feature (124)..(124): Xaa can be any naturally occurring amino acid
  Transcript Sequence Number=SeqID_29443
  Gene Ontology: Mol. function=ubiquitin protein ligase binding; Cellular component=cullin-RING ubiquitin ligase complex; Biological process=ubiquitin-dependent protein catabolic process
  Homolog annotation: Hit_ID=Q93VH7; Match level="QueryCoverage=90%, HitCoverage=25%, E-value=7e-77, Identity=79%"; Hit description=CUL1
  Pfam annotation: Domain name=Cullin; Domain location=1-108; Score= -52.2; E_value=1.6e-05; Accession=PF00888.14; Description=Cullin family
  Pfam annotation: Domain name=Cullin_Nedd8; Domain location=131-198; Score=143.5; E_value=6.6e-40; Accession=PF10557.1; Description =Cullin protein neddylation domain
  Pfam module annotation: Pfam domain module=Cullin::Cullin_Nedd8; Domain location=1-108::131-198
MLTGSQGINPGKLPVLCSLGTCNINAKFDLKPIELIVTTYQAALLLLFNGSDRLSYSEIVTQLNLSDDDVVRLLHSLSCAKYKILNKEPANRSIXPPNDVFEFNSKFTDRMRRIKIPXPPVDEXKKVVEDVDKDRRYAIDASIVRIMKSRKVMGHQQLVAECVEQLSRMFKPDFKAIKKRIEDLITRDYLERDKDNANNHQSSQVF

SEQ ID NO: 95418 - protein, 542 aa, Setaria italica
  misc_feature (319)..(319): Xaa can be any naturally occurring amino acid
  Transcript Sequence Number=SeqID_29444
  Homolog annotation: Hit_ID=B9S4J1; Match level="QueryCoverage=33%, HitCoverage=29%, E-value=3e-42, Identity=48%"; Hit description =Electron transporter, putative
  Pfam annotation: Domain name=DUF179; Domain location=394-538; Score= -29.6; E_value=5e-06; Accession=PF02622.7; Description=Uncharacterized ACR, COG1678
RNMHADQEESVSSNEQDDGSSVLGKEFRKNEDAIYEENAFNLHQGSEESDTRCPHHATCRSSRSPVRDNTDITEQVTTGISEDRFAGSFYFSDGSYRLLKTLTGGSRIPSLVIIDPVQQKHYVFPEEIKYSYASLQNYLDSFMNGSLPSYYHVTSSAKSSKELPRPPFVNHDFHEANSIPQLTTNSFCPLVFGSADCNSKSELSFSNTENLSLGWNKDVMVLFSNSWCGFCQRAELVVRELHRSFKSFSSYSDSVFANVQDVHTEEKNKKYAMKGFPVIYMIDCTSNECHHLLKSAGMEELYPTLLLFPAENKSAIAYXRGMSVAHLIEFLESHVSNSHHLLDYKGFMWKKRMATKQDAPQAIPFHISDKGSGDVGSDLPNHSNVVTGSILTATEKLGTAVPFDNAKVLIVSSDSHGGFHGLIINKRLSWGVFKNLDSSMDSIKHAPLFYGGPVVVQGYHLVSLSRVAWEGYMQVIPGVYYGNIIATSRVVTRIKSGEQSVDDLWFFLGYSGWGYNQLFDELSEGAWLVSGKPIEHLDWPES

SEQ ID NO: 95419 - protein, 730 aa, Setaria italica
  misc_feature (34)..(34): Xaa can be any naturally occurring amino acid
  Transcript Sequence Number=SeqID_29445
  Gene Ontology: Mol. function=ubiquitin protein ligase binding; Cellular component=cullin-RING ubiquitin ligase complex; Biological process=ubiquitin-dependent protein catabolic process
  Homolog annotation: Hit_ID=Q93VH7; Match level="QueryCoverage=95%, HitCoverage=93%, E-value=0.0, Identity=87%"; Hit description=CUL1
  Pfam annotation: Domain name=Cullin; Domain location=25-634; Score =862.9; E_value=1.8e-256; Accession=PF00888.14; Description=Cullin family
  Pfam annotation: Domain name=Cullin_Nedd8; Domain location=657-724; Score=143.5; E_value=6.6e-40; Accession=PF10557.1; Description =Cullin protein neddylation domain
  Pfam module annotation: Pfam domain module=Cullin::Cullin_Nedd8; Domain location=25-634::657-724
MGLHAEGHHQAEEHPRGQARAAVQLRGLHDALHXIYNMCTQKPPHDYSQQLYDKYRESFEEYITSMVLPSLREKHDEFMLRELVQRWSNHKVMVRWLSRFFHYLDRYFISRRSLTPLKEVGLTCFRELIYQEIKGQVKDAVIALIDKEREGEQIDRALLKNVLDIFVEIGLGQMDCYENDFEDFLLKDTTEYYSVKAQSWILEDSCPDYMIKAEECLKREKERVGHYLHISSEQKLLEKVQNELLAQYATPLLEKEHSGCSALLRDDKVEDLSRMYRLFSKITRGLEPISNMFKTHVTNEGTALVKQAEDSASNKKPEKKDTVGMQEQVFVWKIIELHDKYVAYVTDCFQGHTLFHKALKEAFEVFCNKGVSGSSSAELLATFCDNILKKGCSEKLSDEAIEDALEKVVRLLAYISDKDLFAEFYRKKLARRLLFDKSANDEHERSILTKLKQQCGGQFTSKMEGMVTDLTVARDHQTKFEEFVAGHPELNPGIDLAVTVLTTGFWPSYKTFDINLPAEMVKCVEVFKEFYQTRTKHRKLTWIYSLGTCNINAKFDLKPIELIVTTYQAALLLLFNGSDRLSYSEIVTQLNLSDDDVVRLLHSLSCAKYKILNKEPANRSISPNDVFEFNSKFTDRMRRIKIPLPPVDEKKKVVEDVDKDRRYAIDASIVRIMKSRKVMGHQQLVAECVEQLSRMFKPDFKAIKKRIEDLITRDYLERDKDNANMYKYLA

SEQ ID NO: 95420 - protein, 138 aa, Setaria italica
  Transcript Sequence Number=SeqID_29446
  Gene Ontology: Mol. function=electron carrier activity; Cellular component=integral to membrane; Biological process=oxidation reduction
  Homolog annotation: Hit_ID=Q2MJ02; Match level="QueryCoverage=73%, HitCoverage=20%, E-value=2e-31, Identity=59%"; Hit description =Cytochrome P450 monooxygenase CYP704G9
  Subcellular localization annotation: CTP_CleavageSite=39; ConfidenceScore=5.03e-01
MDSPPSQPALLALTLVLLLALYLARRRRAAGKNRKYPPVAGTVLHQLFNFGRLVEYQTELARRHRTFRMLTPTSNYIYTVEPGNIEYILKTNLANYGKGSALHELAEDLLGDGIFNVDGAKWRHQRKVASHEFLPTRV

SEQ ID NO: 95421 - protein, 141 aa, Setaria italica
  misc_feature (108)..(108): Xaa can be any naturally occurring amino acid
  Transcript Sequence Number=SeqID_29447
  Gene Ontology: Mol. function=protein serine/threonine kinase activity; Biological process=protein amino acid phosphorylation
  Homolog annotation: Hit_ID=B9SQH2; Match level="QueryCoverage=99%, HitCoverage=12%, E-value=2e-15, Identity=36%"; Hit description =Phytosulfokine receptor, putative
  Pfam annotation: Domain name=LRR_1; Domain location=115-138; Score =13.0; E_value=1; Accession=PF00560.25; Description=Leucine Rich Repeat
  Pfam annotation: Domain name=LRR_1; Domain location=15-36; Score=4.2; E_value=48; Accession=PF00560.25; Description=Leucine Rich Repeat
  Pfam annotation: Domain name=LRR_1; Domain location=42-66; Score=0.1; E_value=2.9e+02; Accession=PF00560.25; Description=Leucine Rich Repeat
  Pfam annotation: Domain name=LRR_1; Domain location=91-113; Score =9.0; E_value=5.7; Accession=PF00560.25; Description=Leucine Rich Repeat
  Pfam module annotation: Pfam domain module=LRR_1::LRR_1::LRR_1::LRR _1; Domain location=115-138::15-36::42-66::91-113
ALRGAIPAALLRLRSLEVLDVSANALAGGLGAAAGVEIELPAVRVFNVSGNAFNGSHPVLAGAANLTEYDVSGNSFVGPVDAVALCGESPALRVLRLSMNRLSGAFPXGFGQCRSLTELSLDGNGIGGTLPDDLFGAASLQ

SEQ ID NO: 95422 - protein, 142 aa, Setaria italica
  Transcript Sequence Number=SeqID_29448
  Gene Ontology: Mol. function=transferase activity, transferring glycosyl groups; Biological process=metabolic process
  Homolog annotation: Hit_ID=B6TSL5; Match level="QueryCoverage=100%, HitCoverage=30%, E-value=1e-59, Identity=78%"; Hit description =Indole-3-acetate beta-glucosyltransferase
EEHKLSCELRDKCKQHGLIVSWCPQLEVLEHKATGCFFTHCGWNSTLEAIVNGVPMVAIPHWADQPTISKYMESVWGLGVRVRKDEKGLLRRDEVERCIKEVMDGDRKDKYKANATMWKQKAKKAMQKGGSSDKNIAEFADK

SEQ ID NO: 95423 - protein, 87 aa, Setaria italica
  Transcript Sequence Number=SeqID_29449
LLSVTGQSSSGAAALFLARCATNHYLTKLTITLPVKGEQIFNAYLFSPPILPRGCSCDSDAQESAQYHHGGGCGRSADRQARCGLGE

SEQ ID NO: 95424 - protein, 916 aa, Setaria italica
  Transcript Sequence Number=SeqID_29450
  Gene Ontology: Mol. function=nucleotide binding; Biological process =defense response
  Homolog annotation: Hit_ID=Q9ATQ8; Match level="QueryCoverage=100%, HitCoverage=100%, E-value=0.0, Identity=54%"; Hit description=LRR19
  Pfam annotation: Domain name=LRR_1; Domain location=569-591; Score =8.4; E_value=7.7; Accession=PF00560.25; Description=Leucine Rich Repeat
  Pfam annotation: Domain name=LRR_1; Domain location=592-613; Score =11.5; E_value=1.9; Accession=PF00560.25; Description=Leucine Rich Repeat
  Pfam annotation: Domain name=LRR_1; Domain location=767-789; Score =2.7; E_value=93; Accession=PF00560.25; Description=Leucine Rich Repeat
  Pfam annotation: Domain name=NB-ARC; Domain location=175-455; Score =231.0; E_value=2.9e-66; Accession=PF00931.14; Description=NB-ARC domain
  Pfam module annotation: Pfam domain module=LRR_1::LRR_1::LRR_1::NB -ARC; Domain location=569-591::592-613::767-789::175-455
MAEAVVGVLIGKLGAALANEAATYGASLLFKEASSLKGLFREIRKAEGELESMKAYLRESEKLRDADETTGIFVNKIRELSFRIEDVVDEFMYKLEDNKHGGCAAKTKKRIKHVKVWRRLALQLRDINVELEDAAKRRDRYVIPGMERHAGNSDHHARSTNQALCFAREEDLVGIEGNAAKLKGWLVDDLDERNTKITTVWGMGGIGKTTLVAHVYKIVKLDFDAAAWVTVSKSYQVYDLLMKIAREFGIPIASNMETTRVVDVIRNHLEGKRYILVLDDVWEQDMWINNIRPVFPTNCSGRFVLTSRSSEVASVATSNCAINLEPLGANHSWKLFCNEAFWNSDDKRCPSELLDLAVKFLQKCEGLPIAIACIGRLLSIKPHSKWETVYKELESHSTNNAIKSVDTILRVSLEDLPSELKNCFLHCAMFPEDYEIKRRRLIRHWITSGFIRKKGNETLEQVAEGYLNDLVNRSLLQVVWKNEVGRLKSCRMLDVIRHLAIDKAEEECFGKVYEGNGTFSVHGTRRLSIQSINIVPQNQSDATHLRAVYAFESSIDVDLLGTILASSTLLSTLDLQGTQIKMLPNEVFNLFNLRFLGLRNTRIESLPEAVGRLQNLEVLDTMNTCLLSLPKNVAKLSKLRYLYASVEGALEDFCGTNMPRGIRNLTGLHALQSVKASKEILRDVAALTELRTFAVTDVTSEHSINLCSAISNMSHLAHLTVWALNENEVLPMEALRLPETLYRLELRGQLEKTQIPQIFSSWSNLNNLTILELWSSKLNEDSFSSLMTLRSLCKLILYRAYDGKIFRFPAQSFPCLQTLYIFGAPQLNHIEIEDGALGILVKLALSDCRELKHLPHGIEYITTLEELYLGDTAEELIEKLRQERESDEHNEEHMKIKHIRKVVVMLTEKNIWERIR

SEQ ID NO: 95425 - protein, 357 aa, Setaria italica
  misc_feature (7)..(7): Xaa can be any naturally occurring amino acid
  Transcript Sequence Number=SeqID_29451
  Gene Ontology: Mol. function=sugar:hydrogen symporter activity; Cellular component=integral to membrane; Biological process =carbohydrate transport
  Homolog annotation: Hit_ID=B9SPE0; Match level="QueryCoverage=99%, HitCoverage=71%, E-value=1e-134, Identity=66%"; Hit description =Sialin, putative
  Pfam annotation: Domain name=MFS_1; Domain location=1-315; Score =80.4; E_value=6.3e-21; Accession=PF07690.8; Description=Major Facilitator Superfamily
  Subcellular localization annotation: CTP_CleavageSite=30; ConfidenceScore=5.26e-01
GGALADXYGGKKVMAGAAALWSLATILTPWAASRSTTMLLAVRALFGLAEGVAFPTMSTFLPKWFPTQERATAVGISMGGFHLGNVISFLATPIIMSHIGLTGTFAFFASLGYLWLSVWMFNVESDPIDSRTISKSELQFILDGRSGSKVKGSKGPSLRELFSKFEFLAVTIANVVNNWGYFVLLSWMPVYFKTPLNVNLKQAAWFSAIPWAVMAMSGYVAGASADFLIKSGFSIGLVRKIMQSIGFMGPGVSLLCLRFAQTPSVAAVLMTIALSLSSFSQAGYFCNIQDIAPKYAGSLHGLTNGIGTVAAIVSTIGTGYFVQWLGSFQAFLTLTAALYFSATIFYNVYATGDLIFD

SEQ ID NO: 95426 - protein, 58 aa, Setaria italica
  Transcript Sequence Number=SeqID_29452
  Gene Ontology: Mol. function=glucosyltransferase activity; Cellular component=endoplasmic reticulum membrane; Biological process=GPI anchor biosynthetic process
  Homolog annotation: Hit_ID=B6T9G4; Match level="QueryCoverage=100%, HitCoverage=10%, E-value=3e-23, Identity=89%"; Hit description=Alpha- 1,2-mannosyltransferase ALG9
ASEEQYLKDIGACTLLVELDLRRPYPSRGNDLKTWEALAALPFLDRELSPALYRSFFV

SEQ ID NO: 95427 - protein, 103 aa, Setaria italica
  misc_feature (91)..(91): Xaa can be any naturally occurring amino acid
  Transcript Sequence Number=SeqID_29453
  Homolog annotation: Hit_ID=Q6H7S8; Match level="QueryCoverage=74%, HitCoverage=2%, E-value=7e-31, Identity=79%"; Hit description =Putative LvsC
SFSCRLHSGVIQCQVVLRNITLSFLGLPWSNTLFVNGEKLSDYWWSYFDKIWTLLCYLNDKGQNRLTPKGSNAAGPSIGQRARGLVESLNXPAAEMAAVVVTG

SEQ ID NO: 95428 - protein, 368 aa, Setaria italica
  misc_feature (86)..(86): Xaa can be any naturally occurring amino acid
  misc_feature (357)..(357): Xaa can be any naturally occurring amino acid
  Transcript Sequence Number=SeqID_29454
  Gene Ontology: Mol. function=binding
  Homolog annotation: Hit_ID=Q6H7S8; Match level="QueryCoverage=100%, HitCoverage=12%, E-value=1e-146, Identity=71%"; Hit description =Putative LvsC
WLETSAKLDVFRNYKSNSVAKDNGLETNELILVRNMYSLVLSYCIFSVKGGWHQLEDTTNFLLLKIEQLPNSCLLRDIFEDLSGCXEETSSEENVFNSQPCRDNILYLLNLSHELFVDQIGIKLLFPSLDMSAQLSSNDSLEDDINSAVVEIMNIENNDLVTSLPWSNTLFVNGEKLSDDWWSYFDKIWTLLCYLNDKGQNRLTPKGSNAAGPSIGQRARGLVESLNIPAAEMAAVVVTGGISSALGGKTNKIADKAMMLRGERFPRIVFHLIIMYLCKAGLENASKCVQQFISLLPNLISEDDQCKNRLHFLIWSLLRVRSQYGELDDGARFQVVSHLILETVIYGKSMLATSTLXRDDSTEANSNK

SEQ ID NO: 95429 - protein, 44 aa, Setaria italica
  Transcript Sequence Number=SeqID_29455
  Gene Ontology: Mol. function=nucleotide binding; Cellular component =plasma membrane; Biological process=small GTPase mediated signal transduction
  Homolog annotation: Hit_ID=A9SI73; Match level="QueryCoverage=95%, HitCoverage=19%, E-value=3e-17, Identity=100%"; Hit description =Rab8/RabE-family small GTPase
RGRGAMGILLVYDVTDESSFNNIRNWIRNIEQHASDNVNKILVG

SEQ ID NO: 95430 - protein, 214 aa, Setaria italica
  Transcript Sequence Number=SeqID_29456
  Gene Ontology: Mol. function=nucleotide binding; Cellular component =plasma membrane; Biological process=small GTPase mediated signal transduction
  Homolog annotation: Hit_ID=Q39433; Match level="QueryCoverage=93%, HitCoverage=93%, E-value=1e-86, Identity=79%"; Hit description=Ras -related protein RAB1BV
  Pfam annotation: Domain name=Arf; Domain location=1-177; Score=-62.1; E_value=9.4e-05; Accession=PF00025.13; Description=ADP-ribosylation factor family
  Pfam annotation: Domain name=GTP_EFTU; Domain location=13-179; Score=- 73.0; E_value=0.0011; Accession=PF00009.19; Description=Elongation factor Tu GTP binding domain
  Pfam annotation: Domain name=MMR_HSR1; Domain location=16-131; Score =2.1; E_value=0.00064; Accession=PF01926.15; Description=GTPase of unknown function
  Pfam annotation: Domain name=Miro; Domain location=17-131; Score =91.2; E_value=3.7e-24; Accession=PF08477.5; Description=Miro-like protein
  Pfam annotation: Domain name=Ras; Domain location=17-179; Score =372.3; E_value=8.4e-109; Accession=PF00071.14; Description=Ras family
  Pfam module annotation: Pfam domain module=Arf::GTP_EFTU::MMR _HSR1::Miro::Ras; Domain location=1-177::13-179::16-131::17-131::17 -179
MAAPPARARADYDYLIKLLLIGDSGVGKSCLLLRFSDGSFTTSFITTIGIDFKIRTVELDGKRIKLQIWDTAGQERFRTITTAYYRGAMGILLVYDVTDESSFNNIRNWIRNIEQHASDNVNKILVGNKADMDESKRAVPTSKGQALADEYGIKFFETSAKTNLNVEQVFFSIARDIKQRLSETDSKPEDRTIKIKPEGETETTDAQKSACCGS

SEQ ID NO: 95431 - protein, 92 aa, Setaria italica
  Transcript Sequence Number=SeqID_29457
  Homolog annotation: Hit_ID=B6TAN9; Match level="QueryCoverage=46%, HitCoverage=10%, E-value=7e-13, Identity=86%"; Hit description =Hydrolase, hydrolyzing O-glycosyl compounds
  Subcellular localization annotation: CTP_CleavageSite=82; ConfidenceScore=5.49e-01
MPPRRRDRRRPRDPSPPPSDARAPPSASGFRLTLLAPVVVLVLVVAALGFSGRLSRSPPHPQTLQTTAHSVYERGLVKRDVSAREILTVSTS

SEQ ID NO: 95432 - protein, 482 aa, Setaria italica
  misc_feature (238)..(238): Xaa can be any naturally occurring amino acid
  Transcript Sequence Number=SeqID_29458
  Gene Ontology: Mol. function=drug transporter activity; Cellular component=membrane; Biological process=multidrug transport
  Homolog annotation: Hit_ID=B2LUQ8; Match level="QueryCoverage=100%, HitCoverage=85%, E-value=1e-135, Identity=56%"; Hit description =Aluminum-activated citrate transporter
  Pfam annotation: Domain name=MatE; Domain location=282-440; Score =62.1; E_value=2.1e-15; Accession=PF01554.10; Description=MatE
  Pfam annotation: Domain name=MatE; Domain location=6-218; Score=61.0; E_value=4.6e-15; Accession=PF01554.10; Description=MatE
  Pfam module annotation: Pfam domain module=MatE::MatE; Domain location=282-440::6-218
MGIAVPGALALMADPVASLVDTAFIGHIGPVELGAVGVAIAVFNQVSRIAIFPLVSVTTSFVAEEDAMSNGRDKDKINQENEHAVSNSEMEELISSEEASATTSKSSFETDSCEVNIEQKRKNIPSVSTALLLGGVLGLLETLLFVLSAKPILGYMGVTPDSAMMKPALQYLILRSLGAPAVLLSLAMQGVFRGLKDTKTPLYATVAGDAINIVLDPIFMFVFQYGVRGAAIAHVVSXYGGTFCRYFIASILLWRLRLHIDLLPPSLKHLQFGRFLKNGFLLLARVIAATCCVTLSASMAARLGSTPMAAFQICLQTWLACSLLADGLAFAGQAILASAFARKDYPKATATASRVLQLALVLGLLLSILLGIGLRIGSGLFTRDQGVLHHIYIGIPFVCLTQPINALAFVFDGINYGASDFGYAAYSMVLVGIVSIICILTLASYSGFTGIWVALVIYMSLRMFAGFWRIGTAQGPWTFLRS

SEQ ID NO: 95433 - protein, 125 aa, Setaria italica
  Transcript Sequence Number=SeqID_29459
  Gene Ontology: Mol. function=acid-amino acid ligase activity; Cellular component=intracellular; Biological process=ubiquitin -dependent protein catabolic process
  Homolog annotation: Hit_ID=B9S9V5; Match level="QueryCoverage=90%, HitCoverage=3%, E-value=1e-33, Identity=61%"; Hit description=E3 ubiquitin protein ligase upl2, putative
  Pfam annotation: Domain name=DUF908; Domain location=1-125; Score= -92.1; E_value=0.037; Accession=PF06012.4; Description=Domain of Unknown Function (DUF908)
GWGGKEGGLGLIACSLPIVSDPVSTEVGSTLHFEFYRGADKSEKSQSVDKGNRLEVIHLPNVNTCKETDLEILDKLVKDYSVPQALRFPLLTRLRFARAFDTLTCRRQYICIRLYAFIVLVQAGH

SEQ ID NO: 95434 - protein, 80 aa, Setaria italica
  Transcript Sequence Number=SeqID_29460
NWHDDLVDMMVCLLMFSCLLVLFENTTPASHEISVISVCSLIGGSNHKMSLEKPLCVVLVRVRDRHFSVFRPTSEFSNCC

SEQ ID NO: 95435 - protein, 99 aa, Setaria italica
  Transcript Sequence Number=SeqID_29461
  Gene Ontology: Mol. function=transferase activity, transferring hexosyl groups; Biological process=metabolic process
  Homolog annotation: Hit_ID=Q5NKS3; Match level="QueryCoverage=67%, HitCoverage=22%, E-value=2e-12, Identity=58%"; Hit description =Putative flavonol glucosyltransferase
GKTVVLYPGLGVGHLSPMLELSKGLLRHGGGAVDVAVVLVESPFKDPSFADTVARARASHTSVAFHVLPSPPPASGPSSGDAEHPVVGLIRFLRATNAP

SEQ ID NO: 95436 - protein, 43 aa, Setaria italica
  Transcript Sequence Number=SeqID_29462
PSSNTFLQFWKIMCYESPLHVLIVKKDQQPTVDNVSSVPSHSV

SEQ ID NO: 95437 - protein, 104 aa, Setaria italica
  misc_feature (90)..(90): Xaa can be any naturally occurring amino acid
  Transcript Sequence Number=SeqID_29463
  Gene Ontology: Cellular component=chloroplast
IETLCEDKKFIDAAEFTLFSLQKHHELGVAVHSLVLDGLSMDGKASEAFRLFYELIENGSTSAVAAPRSVILLHHALEEAGKMKEADFVXKQMSRATARIRQRS

SEQ ID NO: 95438 - protein, 163 aa, Setaria italica
  misc_feature (13)..(13): Xaa can be any naturally occurring amino acid
  Transcript Sequence Number=SeqID_29464
  Gene Ontology: Cellular component=mitochondrion
  Homolog annotation: Hit_ID=B9SCV6; Match level="QueryCoverage=88%, HitCoverage=27%, E-value=1e-37, Identity=50%"; Hit description =Pentatricopeptide repeat-containing protein, putative
  Pfam annotation: Domain name=PPR; Domain location=11-45; Score=8.0; E_ value=1; Accession=PF01535.12; Description=PPR repeat
  Pfam annotation: Domain name=PPR; Domain location=46-80; Score=26.8; E_value=9.1e-05; Accession=PF01535.12; Description=PPR repeat
  Pfam annotation: Domain name=PPR; Domain location=81-115; Score=19.6; E_value=0.013; Accession=PF01535.12; Description=PPR repeat
  Pfam module annotation: Pfam domain module=PPR::PPR::PPR; Domain location=11-45::46-80::81-115
DSKRVGVPDCHTXDPYFKLVLVLGNIDAARKLYEKMRDLQCKPNVVTYNCLLRLFNQEKSMDMVLRMKKNMDVEGIEPNMHTYAILIEAFCGRGNWKRAHATLKEMIEEKSFKPSKKVRDTVLTLLRKAGQLKKHEELVELMADQGFISRPASDALWTTLSAC

SEQ ID NO: 95439 - protein, 152 aa, Setaria italica
  misc_feature (127)..(127): Xaa can be any naturally occurring amino acid
  Transcript Sequence Number=SeqID_29465
  Homolog annotation: Hit_ID=Q8LNH1; Match level="QueryCoverage=92%, HitCoverage=36%, E-value=2e-22, Identity=47%"; Hit description=CBS domain-containing protein, putative, expressed
PSDAVATADCCVLTREDIVRHLFGSISHFSPVAVLTVASLGLVRRDVHAVHVADDGLDAIPLLRRAVSDGTAVAVVADDNALVGEICPSVLASCDVESVSAAFAALSVGDVMTYIDCSLSHTPPEFXLRAVRAQLKDRGLDAIAELMDTAEA

SEQ ID NO: 95440 - protein, 93 aa, Setaria italica
  Transcript Sequence Number=SeqID_29466
SVRKKKEQAFSGGDHATQQKGNCPSKENVELKKEVSIAHQHKIELQKLSGESTSSGDGDQESGSSDKVPSRSTGHDASEHINLALSIEGHPDE

SEQ ID NO: 95441 - protein, 84 aa, Setaria italica
  Transcript Sequence Number=SeqID_29467
  Gene Ontology: Mol. function=nucleic acid binding
  Homolog annotation: Hit_ID=B9RNB0; Match level="QueryCoverage=84%, HitCoverage=14%, E-value=2e-12, Identity=58%"; Hit description =Nucleic acid binding protein, putative
MAREPSPEIDDELFNEVYGKAYNGPVAPATNSVMPKVNDEKRPLSRDKSDDEEEAPDPNAVPTDFTSREAKVWEAKAKATERNW

SEQ ID NO: 95442 - protein, 57 aa, Setaria italica
  Transcript Sequence Number=SeqID_29468
LATATKLRGERLAYKRDCSRRRIPHPGRFKDKLGEKRELLKMQDWAPVFISLVLFIL

SEQ ID NO: 95443 - protein, 69 aa, Setaria italica
  Transcript Sequence Number=SeqID_29469
MQDWAPVFISLVLFILLSPGLLFQIPGKCRIIEFGNFHTSALSILVHAILYFALIAIFLIAIGVRMYLL

SEQ ID NO: 95444 - protein, 69 aa, Setaria italica
  Transcript Sequence Number=SeqID_29470
  Gene Ontology: Mol. function=hydrolase activity, acting on ester bonds
  Homolog annotation: Hit_ID=Q7F2F1; Match level="QueryCoverage=98%, HitCoverage=11%, E-value=7e-16, Identity=55%"; Hit description =P0402A09.15 protein
MADWAPVFIGLVLFILLSPGLLFQIPGKGRIIEFGNFQTSGLSILIHAIIYFTLIAILLLAVGVHVYLG

SEQ ID NO: 95445 - protein, 70 aa, Setaria italica
  Transcript Sequence Number=SeqID_29471
MQDWAPVFISLVLFILLSPGLLFQIPGKCRIIEFGNFHTSALSILVHAILYFALIAIFLIAIGVRMYLGS

SEQ ID NO: 95446 - protein, 53 aa, Setaria italica
  Transcript Sequence Number=SeqID_29472
  Gene Ontology: Mol. function=nucleotide binding; Biological process =defense response
  Homolog annotation: Hit_ID=Q1HIU4; Match level="QueryCoverage=96%, HitCoverage=12%, E-value=2e-15, Identity=74%"; Hit description=WD-40 repeat protein-like (Fragment)
IALLALGSNAVHKLWKWQRSDRNPNGKSTASVAPQMWQPANGIPMTNDTNDGN

SEQ ID NO: 95447 - protein, 74 aa, Setaria italica
  Transcript Sequence Number=SeqID_29473
QKLYTRKAKTNSNLGRREYIFIKGWFKYFYRSMNWNIVPCHTSIDFLLVLEYMQWSPRDALPAPISSAIYSCDG

SEQ ID NO: 95448 - protein, 1138 aa, Setaria italica
  misc_feature (1109)..(1109): Xaa can be any naturally occurring amino acid
  Transcript Sequence Number=SeqID_29474
  Gene Ontology: Mol. function=nucleotide binding; Biological process =defense response
  Homolog annotation: Hit_ID=Q8H6S5; Match level="QueryCoverage=98%, HitCoverage=98%, E-value=0.0, Identity=67%"; Hit description=CTV.2
  Pfam annotation: Domain name=LisH; Domain location=6-32; Score=18.9; E_value=0.0098; Accession=PF08513.3; Description=LisH
  Pfam annotation: Domain name=WD40; Domain location=337-375; Score =7.4; E_value=5.3; Accession=PF00400.24; Description=WD domain, G -beta repeat
  Pfam annotation: Domain name=WD40; Domain location=443-483; Score =32.3; E_value=1.9e-06; Accession=PF00400.24; Description=WD domain, G-beta repeat
  Pfam annotation: Domain name=WD40; Domain location=487-527; Score =24.3; E_value=0.00049; Accession=PF00400.24; Description=WD domain, G-beta repeat
  Pfam annotation: Domain name=WD40; Domain location=577-616; Score =1.0; E_value=30; Accession=PF00400.24; Description=WD domain, G-beta repeat
  Pfam annotation: Domain name=WD40; Domain location=829-866; Score =3.6; E_value=15; Accession=PF00400.24; Description=WD domain, G-beta repeat
  Pfam annotation: Domain name=WD40; Domain location=870-909; Score =14.8; E_value=0.35; Accession=PF00400.24; Description=WD domain, G -beta repeat
  Pfam annotation: Domain name=WD40; Domain location=913-951; Score =36.1; E_value=1.4e-07; Accession=PF00400.24; Description=WD domain, G-beta repeat
  Pfam module annotation: Pfam domain module=LisH::WD40::WD40::WD40::WD4 0::WD40::WD40::WD40; Domain location=6-32::337-375::443-483::487 -527::577-616::829-866::870-909::913-951
MSSLSRELVFLILQFLDEEKFKETVHKLEQESGFYFNMKHFEDLVQGGEWDEVEKYLSGFTKVEDNRYSMKIFFEIRKQKYLEALDRHDRAKAVEILVKDLKVFASFNEELFKEITQLLTLENFRQNEQLSKYGDTKSARNIMLLELKKLIEANPLFRDKLNFPPFKASRLRTLINQSLNWQHQLCKNPRPNPDIKTLFTDHSCAAPTNGARAPPPANGPLVGSIPKSAGFPPMGAHAPFQPVVSPSPNAIAGWMTNANPSLPHAAVAQGPPGLVQAPNTAAFLKHPRTPTSAPGIDYQSADSEHLMKRMRVGQPDEVSFSGASHPANMYTQEDLPKQVVRTLNQGSNVMSLDFHPVQQTILLVGTNVGDIAVWEVGSRERIAHKTFKVWDIGSCTLPLQAALMKDAAISVNRCLWSPDGTILGVAFSKHIVQTYTFVPNGDLRQQAEIDAHIGGVNDIAFSHPNKTLSIITCGDDKLIKVWDAQTGQKQYTFEGHEAPVYSVCPHYKESIQFIFSTAIDGKIKAWLYDCLGSRVDYDAPGHWCTTMAYSADGTRLFSCGTSKEGDSHLVEWNETEGAIKRTYNGFRKRSLGVVQFDTTRNRFLAAGDEFLVKFWDMDNTNILTTTDCDGGLPASPRLRFNREGSLLAVTTSDNGIKILANTDGQRLLRMLESRAFEGSRGPPQQINAKPPIVALGPVSNVSSPIAVNAERPDRILPAVSTSGLAPMDASRTPDVKPRITDESEKMKTWKLADIVDNGHLRALHLSDTDTNPSKVVRLLYTNNGIALLALGSNAVHKLWKWQRSDRNPNGKSTASVAPQMWQPANGIPMTNDTNDGNPEEATACIALSKNDSYVMSASGGKVSLFNMMTFKVMTTFMAPPPAATFLAFHPQDNNIIAIGMEDSTIQIYNVRIDDVKSKLKGHQKKITGLAFSQSMNVLVSSGADAQLCVWSIDGWEKKKSRYIQPPANRSGTLVGDTRVQFHNDQTHLLVVHESQLAIYDGNLECLRSWSPRDALPAPISSAIYSCDGLLVYATFCDGAIGVFEADSLRLRCRIGPSAYIPPSMLPTSGRVYPLVVAAHPVEPNQIALGMSDGKVHVVEPLDADPKWGXAPPQDNGAHPAITAAPSAASNQASDQPTR

SEQ ID NO: 95449 - protein, 580 aa, Setaria italica
  misc_feature (141)..(141): Xaa can be any naturally occurring amino acid
  misc_feature (194)..(194): Xaa can be any naturally occurring amino acid
  misc_feature (197)..(197): Xaa can be any naturally occurring amino acid
  misc_feature (553)..(553): Xaa can be any naturally occurring amino acid
  Transcript Sequence Number=SeqID_29475
  Gene Ontology: Mol. function=metal ion binding; Cellular component =nucleus; Biological process=proteolysis
  Homolog annotation: Hit_ID=Q53PX0; Match level="QueryCoverage=98%, HitCoverage=33%, E-value=1e-52, Identity=28%"; Hit description=PHD -finger family protein, expressed
  Pfam annotation: Domain name=PHD; Domain location=15-60; Score=54.2; E_value=5.1e-13; Accession=PF00628.21; Description=PHD-finger
PPEGSDEMDDGNSDECYLCGMDGNLLCCDGCPAAFHSKCVGVVEDLLPEGDWYCPECLIQKNDGSRNMASPMRGAEVLGIDPHGRLYFGTCGYLLVIDSYEGSPPCHYYGQVDLHSLVTVLNTCHPSYGSIVNTISSFYGXAIESPNLNGRYQSSRECSTSDAETNCRLSSRLKQRSEHDQFKVEQDNSFEQLXCDXSGVTNLDQLDQDLSLRSITFRSALMSRSENAAEGDSNQIPQNGSSSAKNDHCNSQEDVHSHGNGLSAENQKDSPPKKKQSYWHLHSDLARYINYYSFGQIAASAAEELKHKLSENKEGKKPVQDALSFHLRTICKKYANIFALTDQKLSVELLKEKCGWCNSCQISGGVDCIFRVTDVKCMEGTKPHALGVEAEKNMESHIILAMHNILSIEERLNGLLTGPWQNPQYRIYWRKEVLKAADVSSLKQPLLMLESSLRRVAISMEWQKPADSVEVVGSAAHILVRSSNKSLSHGTARKPGRKPSSNGELKVDSRNVGVYWWRGGKLSRQVFHWKRLPQSLVYKAARQAGRRKIPTIXYTDGSQFARRFKYIAWRAAVEMAENVA

SEQ ID NO: 95450 - protein, 79 aa, Setaria italica
  Transcript Sequence Number=SeqID_29476
GDGTAAVEHGRVEQCNGEGAERSRLLQENEDSTADKHNTQKVNADAGIVLDEVLEEAPKWKVLQELLQEIAEEQTKGDG

SEQ ID NO: 95451 - protein, 620 aa, Setaria italica
  misc_feature (32)..(32): Xaa can be any naturally occurring amino acid
  misc_feature (279)..(279): Xaa can be any naturally occurring amino acid
  misc_feature (413)..(413): Xaa can be any naturally occurring amino acid
  misc_feature (606)..(606): Xaa can be any naturally occurring amino acid
  Transcript Sequence Number=SeqID_29477
  Gene Ontology: Mol. function=nuclease activity; Cellular component =nucleus; Biological process=DNA metabolic process
  Homolog annotation: Hit_ID=Q9LKI5-3; Match level="QueryCoverage=97%, HitCoverage=72%, E-value=1e-134, Identity=44%"; Hit description =Isoform 3 of DNA repair endonuclease UVH1
  Subcellular localization annotation: CTP_CleavageSite=60; ConfidenceScore=5.33e-01
PPPPPRQASGPRRAPDLPAQQRASLYASGAAXLFLSPRALAADLLTSRLHPSHVRALLLLSAHRSSDTSSDSFIARLLRQRHLLPVYAFSDRPHAMVAGFSKAERAMKSLYVRRLHLWPRFHVLAAADLERAPPDVVDVRVPMTPAMRGIQAAVLAAMDACLKELRRTNKVDVEDLTVDKGLFKSFDEIVRRQLDPIWHTLGKKTKQLVADLRTLRKLLDYLVRYDAVTYLKYLDTLRVSEGVRSVWILADSSHKIFELAKRRVYQVVRADGIKVSTEXKGTPTKKRKVAHNSTDKGKEYENEDSTADKHNTQKVNADAGIVLDEVLEEAPKWKVLQELLQEIAEEQTKGDGENAQAEDESGIVLVTCKDERTCFQLQECISKGPHKVMREEWEKYLLGKAELHGLQKKNKKXTEQPKGFGVLDGEVQMGPSESAGPVSISKLETNALLAAASELRNVTKEADVKDGSNVSCSKRRLVKEKAKGKSKKTTEKRQASNRKNKSKGGNDNDQGTALEVEGQSGKTDEHADIDASKVSTDASVSSSTAGDACNYSSDFRGLTNGNPLPPVQFHALDGDQHILDVWKPSIIIVYHPDITFVREIEVYKAXNPSRKLKVYFSFLL

SEQ ID NO: 95452 - protein, 218 aa, Setaria italica
  misc_feature (9)..(9): Xaa can be any naturally occurring amino acid
  Transcript Sequence Number=SeqID_29478
  Gene Ontology: Mol. function=peptidyl-prolyl cis-trans isomerase activity
  Homolog annotation: Hit_ID=A2Q1W0; Match level="QueryCoverage=97%, HitCoverage=65%, E-value=1e-68, Identity=57%"; Hit description =Peptidyl-prolyl cis-trans isomerase, cyclophilin type
  Pfam annotation: Domain name=Pro_isomerase; Domain location=46-204; Score=-64.2; E_value=0.017; Accession=PF00160.13; Description =Cyclophilin type peptidyl-prolyl cis-tr
GDERRCKDXGECWLKKQKDVMAPAVVARGEDVMWTSGLVFGKGEGIVELETNIGTLHIQLLPGCAPRSVDYFIELLGLRNCAGCRFYRAEGRGNVWDAKGNHERNAAFGSQYALLQGTLEVDGVPFKGIAREACPAVKRGSIAWVGPGPEFLISLANHEEWKDAYTVFGHVLPEDMGIAEEMALLPSSTDVWSNVTVKVLRDPVYFKVKRSSHASSSV

SEQ ID NO: 95453 - protein, 405 aa, Setaria italica
  Transcript Sequence Number=SeqID_29479
  Gene Ontology: Mol. function=nuclease activity; Cellular component =nucleus; Biological process=DNA metabolic process
  Homolog annotation: Hit_ID=B9SZ05; Match level="QueryCoverage=90%, HitCoverage=41%, E-value=1e-161, Identity=74%"; Hit description=DNA repair endonuclease xp-f / mei-9 / rad1, putative
  Pfam annotation: Domain name=ERCC4; Domain location=174-254; Score =99.2; E_value=1.4e-26; Accession=PF02732.7; Description=ERCC4 domain
NRGKTDEHADIDASKVSTDASVSSSTAGDACNYSSDFRGLTNGNPLPPVQFHALDGDQHILDVWKPSIIIVYHPDITFVREIEVYKAENPSRKLKVYFLFYEDSTEVQKFESSIRRENEAFESLIRQKSLMMIPVDQDGRCIGPTLANEPDPLLSQNSITRKAGGKKTPEKEMQVIVDMREFMSSLPNVLHQKGIRIVPVTLEVGDYVLSPLICVERKSIADLFQSFASGRLYNQVDTMARYYKIPVLLIEFSQDKSFSFQSASEIGDDVSPTNIISKLSLLVLHFPRLRIVWSRSLHATVEIFVSLKTNQDEPDEKKAIRVGVPSEDGIVEDDVRAENYNTSAIEFLRRLPGVTDSNYRAIMDGCNSLAELALLPVEELTGLMGSQKGARTLKEFLDAKCPTML

SEQ ID NO: 95454 - protein, 145 aa, Setaria italica
  Transcript Sequence Number=SeqID_29480
  Subcellular localization annotation: CTP_CleavageSite=29; ConfidenceScore=5.37e-01
GARPGARRTRLRRRAPPSQAAPPKSLSPRSSNSPKGSGGETDLGRGKKTRGEKAPRAYGGAFVTDQPRASANPTKEFLFLFAPRRNRIPRPRNPPDKDGESRCPYCRSPNAAWIPISAASPRNRRSIGQTGPNGFCSHRQPQNLG

SEQ ID NO: 95455 - protein, 266 aa, Setaria italica
  misc_feature (67)..(67): Xaa can be any naturally occurring amino acid
  misc_feature (122)..(122): Xaa can be any naturally occurring amino acid
  misc_feature (140)..(140): Xaa can be any naturally occurring amino acid
  Transcript Sequence Number=SeqID_29481
  Gene Ontology: Mol. function=guanyl-nucleotide exchange factor activity; Cellular component=anaphase-promoting complex; Biological process=regulation of mitotic metaphase/anaphase transition
  Homolog annotation: Hit_ID=Q653E0; Match level="QueryCoverage=82%, HitCoverage=82%, E-value=1e-77, Identity=70%"; Hit description=HERC2- like
  Pfam annotation: Domain name=RCC1; Domain location=113-161; Score =8.9; E_value=0.088; Accession=PF00415.10; Description=Regulator of chromosome condensation (RCC1)
  Pfam annotation: Domain name=RCC1; Domain location=164-213; Score =3.7; E_value=0.32; Accession=PF00415.10; Description=Regulator of chromosome condensation (RCC1)
  Pfam module annotation: Pfam domain module=RCC1::RCC1; Domain location=113-161::164-213
  Subcellular localization annotation: CTP_CleavageSite=26; ConfidenceScore=5.44e-01
KTTTDRPTGKLFRRLLPRRRRFSTSSASNATPTLYSSGTTPFSLLSWGRGASGQLGGGKEERRLYPXPVAHLLLPDSDPRLAPTPGRLPSAGETSGVEVGISCGLFHSALLVEGGAWVWGKXGDGGRLGLGDESSAFVPXHNPNLRELRLLALGGIHSAALTASGDVFTWGYGGFGALGHYVYHRELLPRQVKGPWDGNITHIATSGAHTAAITDSGELYTWGRDEGDGRLGLGSGGGPGEAGSLSVPSKVNALPVPVAAVAWWWL

SEQ ID NO: 95456 - protein, 395 aa, Setaria italica
  Transcript Sequence Number=SeqID_29482
  Gene Ontology: Mol. function=metalloendopeptidase activity; Cellular component=mitochondrial respiratory chain; Biological process =proteolysis
  Homolog annotation: Hit_ID=B9RQC8; Match level="QueryCoverage=99%, HitCoverage=77%, E-value=1e-121, Identity=52%"; Hit description =Mitochondrial processing peptidase alpha subunit, putative
  Pfam annotation: Domain name=Peptidase_M16; Domain location=3-142; Score=122.1; E_value=1.8e-33; Accession=PF00675.12; Description =Insulinase (Peptidase family M16)
  Pfam annotation: Domain name=Peptidase_M16_C; Domain location=147 -333; Score=146.3; E_value=9.2e-41; Accession=PF05193.13; Description= Peptidase M16 inactive domain
  Pfam module annotation: Pfam domain module=Peptidase_M16::Peptidase _M16_C; Domain location=3-142::147-333
MFPGPSACIGFFVNSGSVYESGETTGVSYMLEKMAFKGTNHRRHRNLVHELELAGGNVGASYSREQMVYSYDTLKGYMPEAIEILIDCMRNPLFLQEEVERQLVLAREEVQDLHKNPEKFLHEQLNLVGFSGALANPLIPPEDALSRINDKIIQKFYHENYTADRVVLAASGVDHEQLLNYAEFLLRDWHKGSPVEKPKSTYVGGDSRYRADSDMTHVALAFEVPGGWLQERDATIMTIIQTLMGGGGSFSSGGPGKGMHSRLYLRVLNKYHAVQSFSAFSNVYDNTGLFGIYLTTSSDFVAKAVDVAISELIAVATPGEVTEVELQRAKNSTISSVLMNLESRVIVAEDIGRQLLTYGCRKPIDYFLQCMEEITLDDITTFARKMLSSQPTTVS

SEQ ID NO: 95457 - protein, 123 aa, Setaria italica
  Transcript Sequence Number=SeqID_29483
LDTVVRLGCRRRLSPPRQPDNPFAAFLLPPPQPQKEKPAPAPAPEPAKEPEADAGWRFPDLFAGGGQDGDELLMALLAAHPPLPQPTLPTPTPPPPPPTQQQQQQPPVVAAVDAPPPQVRAAA

SEQ ID NO: 95458 - protein, 134 aa, Setaria italica
  misc_feature (118)..(118): Xaa can be any naturally occurring amino acid
  Transcript Sequence Number=SeqID_29484
  Gene Ontology: Mol. function=hydrolase activity, hydrolyzing O -glycosyl compounds; Cellular component=extracellular region; Biological process=cell wall organization and biogenesis
  Homolog annotation: Hit_ID=Q0J930; Match level="QueryCoverage=100%, HitCoverage=21%, E-value=9e-60, Identity=82%"; Hit description =Endoglucanase 13
  Pfam annotation: Domain name=Glyco_hydro_9; Domain location=1-134; Score=-244.1; E_value=0.002; Accession=PF00759.11; Description =Glycosyl hydrolase family 9
RAEDMSTPRTAFKIDRNHPGSEVAGETAAALAAAAKAFRPYDSMYADLLLLHAKQLFTFADTFRGRYDDSLQSAKKFYPSESGYQDELLWSAVWLYEATGDEEYLRYVSQNAEAFGGXGWSVLEFSWDNKYAGL

SEQ ID NO: 95459 - protein, 42 aa, Setaria italica
  misc_feature (10)..(10): Xaa can be any naturally occurring amino acid
  Transcript Sequence Number=SeqID_29485
  Gene Ontology: Cellular component=integral to membrane
  Homolog annotation: Hit_ID=Q10MX8; Match level="QueryCoverage=97%, HitCoverage=6%, E-value=2e-13, Identity=87%"; Hit description =Transmembrane protein G5p, putative, expressed
NDAIKHLTSXEKRDEAYFMSLLRIAETTCGLYYSYDRDLTLK

SEQ ID NO: 95460 - protein, 217 aa, Setaria italica
  misc_feature (198)..(198): Xaa can be any naturally occurring amino acid
  misc_feature (214)..(214): Xaa can be any naturally occurring amino acid
  Transcript Sequence Number=SeqID_29486
  Gene Ontology: Mol. function=phosphatase activity; Cellular component= integral to membrane; Biological process=biological_process
  Homolog annotation: Hit_ID=Q10MX8; Match level="QueryCoverage=73%, HitCoverage=29%, E-value=3e-73, Identity=76%"; Hit description =Transmembrane protein G5p, putative, expressed
  Pfam annotation: Domain name=Syja_N; Domain location=18-217; Score =71.7; E_value=2.7e-18; Accession=PF02383.10; Description=SacI homology domain
PLSPEEARVGSDCKVSRIYGVAGIIRLLAGSYVLVITSQKDAGSYQGSPVYHVNSMKFLCCNDAIKHLTSQEKRDEAYFMSLLRIAETTCGLYYSYDRDLTLNLQRASKLAAGRIHKPLWKQADPRLVWNKNLLEELIEAKLDEFIIPLIQGSFQSAQFTLKDRPVRITLFSRRCNRRLGTRMWRRGANLEGATDKFXETEQLVEYEGLTSSFXQVR

SEQ ID NO: 95461 - protein, 119 aa, Setaria italica
  Transcript Sequence Number=SeqID_29487
  Gene Ontology: Mol. function=phosphatase activity; Cellular component= integral to membrane; Biological process=biological_process
  Homolog annotation: Hit_ID=Q10MX8; Match level="QueryCoverage=100%, HitCoverage=20%, E-value=9e-60, Identity=93%"; Hit description =Transmembrane protein G5p, putative, expressed
LPGLIKDGMSALSRYYLNNFHDGVRQDALDLISGYYTVSQGSTSPFQTGGFESASYLPVASAIIVGGITATTFTLSQVGRNAQHFISSIICAGLTVGVVALVKANGKQFCSRPRLCGLI

SEQ ID NO: 95462 - protein, 373 aa, Setaria italica
  Transcript Sequence Number=SeqID_29488
  Gene Ontology: Mol. function=phosphatase activity; Cellular component= integral to membrane; Biological process=biological_process
  Homolog annotation: Hit_ID=B9T1J1; Match level="QueryCoverage=99%, HitCoverage=61%, E-value=1e-142, Identity=66%"; Hit description =Suppressor of actin, putative
  Pfam annotation: Domain name=Syja_N; Domain location=1-191; Score =133.9; E_value=5e-37; Accession=PF02383.10; Description=SacI homology domain
VTRTDPRFVWNKNLLEELIEAKLDEFIIPLIQGSFQSAQFTLKDRPVRITLFSRRCNRRLGTRMWRRGANLEGATANFVETEQLVEYEGLTSSFIQVRGSIPLLWEQIVDLSYKPRLSIIEHEETPKVVQRHFHDLSQRYGETVVVDLTDKRGDEGDLSNAFAAEMGRIHGVRYVHFDFHHVCHGGNFDNLQALYNQIEEAIQKQGYFLMDSKGEILLEQSGVVRSNCIDCLDRTNVTQSFLARKSLDSQLQRMGALSSSESISISDNNNDIFKKLWVEHGDELSLEYAGSYALKGDLVRYGRQTLPGLIKDGMSALSRYYLNNFHDGVRQDALDLISGYYTVSQGSTSPFQTGGFESASYLPVASAIIVVGA

SEQ ID NO: 95463 - protein, 668 aa, Setaria italica
  Transcript Sequence Number=SeqID_29489
  Gene Ontology: Mol. function=protein tyrosine kinase activity; Cellular component=integral to membrane; Biological process=protein amino acid phosphorylation
  Homolog annotation: Hit_ID=Q259R0; Match level="QueryCoverage=97%, HitCoverage=97%, E-value=0.0, Identity=83%"; Hit description =H0306F12.6 protein
  Pfam annotation: Domain name=LRRNT_2; Domain location=38-79; Score =52.9; E_value=1.2e-12; Accession=PF08263.4; Description=Leucine rich repeat N-terminal domain
  Pfam annotation: Domain name=LRR_1; Domain location=108-130; Score =13.1; E_value=0.95; Accession=PF00560.25; Description=Leucine Rich Repeat
  Pfam annotation: Domain name=LRR_1; Domain location=132-154; Score =18.6; E_value=0.026; Accession=PF00560.25; Description=Leucine Rich Repeat
  Pfam annotation: Domain name=LRR_1; Domain location=156-178; Score =10.4; E_value=3.1; Accession=PF00560.25; Description=Leucine Rich Repeat
  Pfam annotation: Domain name=LRR_1; Domain location=180-203; Score =12.4; E_value=1.3; Accession=PF00560.25; Description=Leucine Rich Repeat
  Pfam annotation: Domain name=LRR_1; Domain location=84-106; Score =8.3; E_value=7.9; Accession=PF00560.25; Description=Leucine Rich Repeat
  Pfam annotation: Domain name=Pkinase; Domain location=370-641; Score=- 43.4; E_value=6.6e-06; Accession=PF00069.17; Description=Protein kinase domain
  Pfam annotation: Domain name=Pkinase_Tyr; Domain location=371-642; Score=-80.6; E_value=2.3e-08; Accession=PF07714.9; Description =Protein tyrosine kinase
  Pfam module annotation: Pfam domain module=LRRNT_2::LRR_1::LRR_1::LRR_ 1::LRR_1::LRR_1::Pkinase::Pkinase_Tyr; Domain location=38-79::108 -130::132-154::156-178::180-203::84-106::370-641::371-642
  Subcellular localization annotation: CTP_CleavageSite=33; ConfidenceScore=5.16e-01
MSGRWAAAAPTPVPSLLQVLLALQCGVVFLQCSAASAMSRDVSALMAFKRAIIEDPHSVLSDWTDADGNACDWHGVICSAPQGSVISLKLSNSSLKGFIAPDLGRLSFLQELYLDHNLLFGTIPKQIGSLRNLRVLDLSVNRLTGPIPSELGGLNSVSLINFHSNGLTGNIPPELGKLQNLVELRLDRNRLKGSIPGSNAGSFSPTANIGSTAHNGLCPSPRLYVGDFSYNFLVGKIPPCLKYLPRSSFQGNCFQDEYSTQQRALQICISGSTGQRGGINGAKHPVHKHEKMQQPTWLLVLEIATGVLLVVFVITGIVTASRSCKLKPSIRISSWNRSKSWSDEITVLIDSDMLKSLPKLSRQELEVACEDFSNIIGSTPETVVYKGTMKDGPEVSVISLCAFEGHWTSHHELFYQNKVIDLARLNHENIAKFLGYCRESDPFSRMLVFEYASNGTLFEHLHYGEGAQLSWLRRMKIAIGIAQGLRYLHTELQPPFAISELNSNSVYVTEDFTPKLVDFECWKMMFSKHEKAPSHFNSKASFPGHGDSAEDLHADIQGNTYAFGVILLEIISGRLPYCKDKGYLVDWATKFLQQADEIGKLVDPELSNVRTEDLAVLCSVVSRCIDPDPSKRPSMQIITGVLENGIDLSAAAILKESSLAWAELALAL

SEQ ID NO: 95464 - protein, 95 aa, Setaria italica
  misc_feature (87)..(87): Xaa can be any naturally occurring amino acid
  Transcript Sequence Number=SeqID_29490
  Gene Ontology: Mol. function=protein disulfide oxidoreductase activity; Biological process=cell redox homeostasis
  Homolog annotation: Hit_ID=B6TSP7; Match level="QueryCoverage=80%, HitCoverage=33%, E-value=2e-15, Identity=60%"; Hit description =Electron transporter
  Subcellular localization annotation: CTP_CleavageSite=55; ConfidenceScore=5.10e-01
MEDCSGVAAGVGGGSCGKKPFQLARSLTYHHHQGHRPAGASAAKWRRSQLADEPRAQRPQAVVLYTTSLRGVRRTFTDCSAVRAILXGFRVAVDE

SEQ ID NO: 95465 - protein, 80 aa, Setaria italica
  misc_feature (29)..(29): Xaa can be any naturally occurring amino acid
  Transcript Sequence Number=SeqID_29491
  Subcellular localization annotation: CTP_CleavageSite=70; ConfidenceScore=5.22e-01
CSNRGTPQLVPGWCSPHCCMTFSSDFPHXLNANDLSLGNKMLQMMTLVPRFFFASFHPRNCRLVWKQRLSKNYYSSLIDW

SEQ ID NO: 95466 - protein, 129 aa, Setaria italica
  Transcript Sequence Number=SeqID_29492
  Homolog annotation: Hit_ID=B6SV40; Match level="QueryCoverage=72%, HitCoverage=15%, E-value=3e-36, Identity=77%"; Hit description =Growth regulator
CVLLAASLAMSALHQVQFRNAAISRNFRGLQELKQNIVRREKPDQIMHGRLLQMATSAVTKNGSESEDFAQWEEPYKQARKWTPCAAKHSLADEGNSTLFEQHDCFLRGSNNIISYTIHKHYTCNPGGL

SEQ ID NO: 95467 - protein, 611 aa, Setaria italica
  Transcript Sequence Number=SeqID_29493
  Homolog annotation: Hit_ID=B6SV40; Match level="QueryCoverage=96%, HitCoverage=94%, E-value=0.0, Identity=78%"; Hit description=Growth regulator
  Pfam annotation: Domain name=DUF246; Domain location=177-567; Score =586.1; E_value=3.9e-173; Accession=PF03138.6; Description=Plant protein family
SSSAAAALAVQGGRGGEVGIRVGATNIGRLRCTARQQQGKQHGGRGGGVTSWHLRVFAAVVGVMGCVLLAASLAMSALHQVQFRNAAISRNFRGLQELKQNIVRREKPDQIMHGRLLQMATSAVTKFPFPPVQNGSESEDFAQWEEPYKQARKWTPCAAKHSLADEEPDEINNGFILISANGGLNQQRVAVCNAVVVAALLNATLVLPRFLYSSVWKDTSQFGDIYQEDYFVNYMKNDVHIVKELPPHLQSLDLEAIGSQVTDMDISKEAEPSEFVRSVLPILQQNGVVHFLGFGNRLGFDSVPVHLQRLRCRCNFHALKFVPELQQAGSLLVQRLRKVSAMQTEMDKQLFGNNMVELDPAAFAEDHAAGGPSRYLALHMRFEEDMVAYSLCEFGGGEEERRELQAYRETHFPTLAMRLRNATVSPEEQRSLGRCPLTPEESGLILSALGYDGRTFIYVAGSQIYGGAPRLRPLTRLYPNLVTKEDILTTDELAPFKNFSSRLAALDFIACASADVFAVTDSGSQLSSLVSGFRIYHGRGRAPTLHPNRKRYAQVLSEEGSIAWGGFRRRVRQMVEEYKRVSPRPRGRSVYRQPRTPGCMCRAAGDGSVDF

SEQ ID NO: 95468 - protein, 136 aa, Setaria italica
  misc_feature (124)..(124): Xaa can be any naturally occurring amino acid
  Transcript Sequence Number=SeqID_29494
  Homolog annotation: Hit_ID=UPI000034EDDF; Match level="QueryCoverage =90%, HitCoverage=22%, E-value=3e-35, Identity=55%"; Hit description =emb1381 (embryo defective 1381)
AAVRRYDTAFCIGEGEATNCSMEERAYMQEAMAALRVAKEVLGLQEGWRKEAIREMNRTGRFSRSLANSATDWPCLLLDVLSGVAEEDFFQPKLVLNNVDVLRKAICEDETTVPAAMYHDSFIXVIALGANEQCLP

SEQ ID NO: 95469 - protein, 224 aa, Setaria italica
  misc_feature (66)..(66): Xaa can be any naturally occurring amino acid
  misc_feature (168)..(168): Xaa can be any naturally occurring amino acid
  misc_feature (184)..(184): Xaa can be any naturally occurring amino acid
  Transcript Sequence Number=SeqID_29495
  Gene Ontology: Mol. function=aspartic-type endopeptidase activity; Cellular component=chromatin; Biological process=RNA-dependent DNA replication
  Homolog annotation: Hit_ID=Q53P05; Match level="QueryCoverage=95%, HitCoverage=18%, E-value=2e-30, Identity=31%"; Hit description =Retrotransposon protein, putative, unclassified
EKWTGRNHKCPDQVPIHMIQELMEMFQLDDCSDGEEDSSNQTDEVIMTVKEDQPDQAKQKRERKIXFKGFIGKQEILILLDSGSVGTFVSDKLVSSLALQSKSCEQLQFITADGSPMNSDKFIRNMQLFIQGHTFSYDARVLPLKCFDMIIGANLLKDHNPTWTQWKXKIMRFPHSADNIRVLXIRNTKLPCTNIIPRKLKGLLRRKVVTNCVLVNAMCPSATP

SEQ ID NO: 95470 - protein, 139 aa, Setaria italica
  Transcript Sequence Number=SeqID_29496
  Gene Ontology: Mol. function=aspartic-type endopeptidase activity; Cellular component=chromatin; Biological process=RNA-dependent DNA replication
  Homolog annotation: Hit_ID=Q65XD2; Match level="QueryCoverage=86%, HitCoverage=9%, E-value=8e-41, Identity=61%"; Hit description =Putative polyprotein
VTTTAVAQQSAIAPAEPLFTLSDNTMVPPPVQDLLIKYEFLFKEPTDLPPTRDCDHSIPFLPGAQPVNVRPYRYSPQQKNEIEQQISSMLKSGVISHSSSLFASPMLLVKKKDGSWRFCIDYRHLNALTVKNKHPLPVL

SEQ ID NO: 95471 - protein, 63 aa, Setaria italica
  Transcript Sequence Number=SeqID_29497
  Subcellular localization annotation: CTP_CleavageSite=37; ConfidenceScore=5.01e-01
ASAAAGVNAWAGTVQALLPLAGALAADSRLGRYRAVLAAAGLYLLSLGMLTISSMLQALQTHA

SEQ ID NO: 95472 - protein, 212 aa, Setaria italica
  misc_feature (179)..(179): Xaa can be any naturally occurring amino acid
  misc_feature (182)..(182): Xaa can be any naturally occurring amino acid
  misc_feature (202)..(202): Xaa can be any naturally occurring amino acid
  Transcript Sequence Number=SeqID_29498
  Homolog annotation: Hit_ID=C0RWW9; Match level="QueryCoverage=100%, HitCoverage=28%, E-value=8e-85, Identity=71%"; Hit description =Ameiotic 1
KFPSLQALRSFFSSYPASGTGPELDECFIMSNNHATRILRHRVADEELEGTVHKDSFWLIKPHLYDFATSQQAPPAPPAAKVALVADSCLLTTLKCDGAGWGMRRRVRYIGRHRDEAPKEAGVNGYDTEVSIREEQQHPAMQEVTRSERNCKRKREAEGSSKDRHRDEGKTNRKVQGSXKKXSKKAKKRTVESNDGDPRHGXKDRWSAERYA

SEQ ID NO: 95473 - protein, 510 aa, Setaria italica
  misc_feature (348)..(348): Xaa can be any naturally occurring amino acid
  Transcript Sequence Number=SeqID_29499
  Gene Ontology: Mol. function=phospholipase C activity; Cellular component=nucleus; Biological process=multicellular organismal development
  Homolog annotation: Hit_ID=C0RWW9; Match level="QueryCoverage=99%, HitCoverage=62%, E-value=1e-168, Identity=65%"; Hit description =Ameiotic 1
  Pfam annotation: Domain name=HALZ; Domain location=185-218; Score =5.2; E_value=0.093; Accession=PF02183.10; Description=Homeobox associated leucine zipper
IRKVQGSSKKSSKKAKKRTVESNDGDPRHGKDRWSAERYAAAEKSLLDIMRSNGARSGAPVMRQVLREEARKHIGDTGLLDHLLKHMAGRVPEGSAHRFRRRHNADGVMEYWLEPAELAEVRRQAGVSDPYWVPPPGWKPGDDVSLVAGDLLVKRQVEELTEEVNGVKRQMEQLVDKDENFDAERAYSSLKEKYQSVMRDNEKLEKQVFSLKDMCENVVQMNGELKKEVLSFKDKYEHVAYKNDKLEEQVTYLSSSFLSFKDQLVLALKTGTSRQLGLAPSDGNQESAPLTEVYLASGDQMTPRADSTVIQGVPDSLARKSSFRVCKPQGTFLWPSMASGTTISGGGXSSSCPATATPGPGIPRSTSCTTSAGLGLQRSSRAPAVEVAVSAVSAVSGLDEHLMLGALSSTPPSASSTYTTATAAKLQLSLSSPRSPLQPQKLFGTSAAAAGFSPQKLLHFSGLTRLHVDTSSSSGACRASPPEGRRALFSADAGRISMVATELALATPSY

SEQ ID NO: 95474 - protein, 72 aa, Setaria italica
  misc_feature (45)..(45): Xaa can be any naturally occurring amino acid
  Transcript Sequence Number=SeqID_29500
  Gene Ontology: Mol. function=transporter activity; Cellular component= membrane; Biological process=transport
  Homolog annotation: Hit_ID=B9IF49; Match level="QueryCoverage=61%, HitCoverage=8%, E-value=1e-11, Identity=84%"; Hit description =Sulfate/bicarbonate/oxalate exchanger and transporter sat-1 (Fragment)
MTSKRTAPWHRLSEAEAAVNRAVASSRVGWYFKLDARKSSFTKEXLRAGAATFLTMAYIISVNAAILTDSGG

SEQ ID NO: 95475 - protein, 62 aa, Setaria italica
  Transcript Sequence Number=SeqID_29501
HQQTSWSQFLVLRLQNQLSRAPADKASMGSTMPHIQLSISESITDRRFKADEPIWIPLTTPQ

SEQ ID NO: 95476 - protein, 94 aa, Setaria italica
  Transcript Sequence Number=SeqID_29502
  Gene Ontology: Cellular component=extracellular region
  Homolog annotation: Hit_ID=B6U6G8; Match level="QueryCoverage=75%, HitCoverage=72%, E-value=1e-26, Identity=87%"; Hit description =Gibberellin-regulated protein 2
  Pfam annotation: Domain name=GASA; Domain location=3-94; Score=128.2; E_value=2.6e-35; Accession=PF02704.6; Description=Gibberellin regulated protein
MKLQTTATLALLLFLLLAPPSLSVSMAVGSEFCDSNCARRCSKASRHDDCLKYCGICCADCNCVPSGTAGHKDECPCYRDMTTGTGNRTRPKCP

SEQ ID NO: 95477 - protein, 105 aa, Setaria italica
  Transcript Sequence Number=SeqID_29503
  Homolog annotation: Hit_ID=B6TVC4; Match level="QueryCoverage=87%, HitCoverage=30%, E-value=9e-27, Identity=65%"; Hit description=Cell envelope integrity inner membrane protein TolA
  Pfam annotation: Domain name=HSP20; Domain location=1-90; Score=30.0; E_value=6.7e-06; Accession=PF00011.13; Description=Hsp20alpha crystallin family
ATSFILRLHLSGFRKEDFRVQVDGTGRLTVRGQRAVGGGKQSSFKKIFQLPEASNLDGITGRFDTGVLTLTVPKKVVEDAKPKEDATKAAPPPQEQGEPKEHEAK

SEQ ID NO: 95478 - protein, 458 aa, Setaria italica
  Transcript Sequence Number=SeqID_29504
  Gene Ontology: Mol. function=ATP binding; Biological process=apoptosis
  Homolog annotation: Hit_ID=Q53P16; Match level="QueryCoverage=77%, HitCoverage=50%, E-value=5e-58, Identity=41%"; Hit description =Leucine Rich Repeat, putative
SVLQTLAGLITDGRQGYFNFMDYMTKLRKVKVWCVSSAGASGNWTDLQKAIQKFIHDKNVANIGDRSLSLHFDKSFIESLNSLKEPCYLSSLKLHGELDALPQFVISLRGLKELCLTSVKCTKGLLEALTLLSNLKYLKLIADDLEKFTIKDKAFPSLLCLCFVLQHPTHPTLPTIQEGSMPFLNTLQLLCKGLHGLCGIKIEYLKVLKEVILDDRVDSDTWGEWEEAAKEHPNKPKVLPSKIADTSKREPKAEISKRKPTEDSDVLVPTRIEFTENSVASVGSVQDTGSSRIVNQGYSVASMGSTQDTGSSMLVNQGLDSSAEPKTHNICAVQASSDGGSYSSSNHMGVFEVPPMTNLSETASKAESEHAGDCVPVELTEVDSANNSVSPNETIEQTDTPIPVNQKLGSSYEPNSQNSSADIQNHAFKSMGVSEDSVSTELSITGNGIVPSHTLQGC

SEQ ID NO: 95479 - protein, 258 aa, Setaria italica
  misc_feature (13)..(13): Xaa can be any naturally occurring amino acid
  misc_feature (45)..(45): Xaa can be any naturally occurring amino acid
  Transcript Sequence Number=SeqID_29505
  Gene Ontology: Mol. function=binding; Cellular component=nucleus
  Homolog annotation: Hit_ID=B6TTL6; Match level="QueryCoverage=93%, HitCoverage=76%, E-value=3e-90, Identity=65%"; Hit description=Cell differentiation protein rcd1
  Pfam annotation: Domain name=Rcd1; Domain location=1-241; Score =394.0; E_value=2.5e-115; Accession=PF04078.5; Description=Cell differentiation family, Rcd1-like
KFQQDIAPLLWHXFGTMAALLQEICGNFTHRLSPATLLSATPCEXCNALALLQCVASHPDTRIPFITAEIPVYLYPFLNTTYRTRQYEYLRLTSLGVIGALVKVDDHEVIAYLLSTEIIPLCLRTMDLGSEISKTVSTFIVQKIILDDAGLKYICATRERFFALANVLAQMLEGLVEQPSPRLLKHIIRCYLRLTDNPSACHALRTHFPTVLRDGTFNDFLEKDLTTRLWLHQMLHNIAMANSGGGAPHTGLNRIMGM

SEQ ID NO: 95480 - protein, 266 aa, Setaria italica
  Transcript Sequence Number=SeqID_29506
  Gene Ontology: Mol. function=protein serine/threonine kinase activity; Biological process=protein amino acid phosphorylation
  Homolog annotation: Hit_ID=Q53J40; Match level="QueryCoverage=93%, HitCoverage=36%, E-value=2e-77, Identity=59%"; Hit description =Protein kinase domain containing protein
  Pfam annotation: Domain name=Pkinase; Domain location=1-250; Score =26.7; E_value=4.4e-10; Accession=PF00069.17; Description=Protein kinase domain
  Pfam annotation: Domain name=Pkinase_Tyr; Domain location=4-250; Score=15.2; E_value=9.8e-15; Accession=PF07714.9; Description =Protein tyrosine kinase
  Pfam module annotation: Pfam domain module=Pkinase::Pkinase_Tyr; Domain location=1-250::4-250
TTHSRRREIRQGGEFVDEIIFQFAISHTNIVRLVGCCLETSIPMLVFEFIPNGSLSDMLHGAGKQGSLSLQMRLDIAIGSAEALTYMHSHDAGHNNRIHGDVKSGNILLDDDLNPKVSDFGSSKLVSIASRYAKWAVSGDMSYIDPVYINTGSFTEKSDVYSFGVVLLELITRKKARYDGCNSLPMNFVKTCKKEGNGWKMYDRDIFSGEDAQTSQRYIECLDRIGALAVRCLKEDVEERPTMAEVVEKLKQVKLIAFGNSGSEAR

SEQ ID NO: 95481 - protein, 132 aa, Setaria italica
  Transcript Sequence Number=SeqID_29507
  Homolog annotation: Hit_ID=B9ST76; Match level="QueryCoverage=76%, HitCoverage=7%, E-value=5e-23, Identity=56%"; Hit description=DNA binding protein, putative
ARILVSQQPELCLDPTPKLDRLCQDPIPHKLSLGIGKKRRLRQNPEVIVTSSNMSHGKKVCIDRLPENAKADETGITGGNAAHQVVDNITIQNISGGSQLLRPNNCSQDANRMLLSQSGIQQNVSYSAVGNV

SEQ ID NO: 95482 - protein, 194 aa, Setaria italica
  misc_feature (117)..(117): Xaa can be any naturally occurring amino acid
  Transcript Sequence Number=SeqID_29508
  Gene Ontology: Mol. function=electron carrier activity; Cellular component=extracellular region; Biological process=response to oxidative stress
  Homolog annotation: Hit_ID=B6TU39; Match level="QueryCoverage=93%, HitCoverage=48%, E-value=1e-69, Identity=77%"; Hit description =Peroxidase 2
  Pfam annotation: Domain name=peroxidase; Domain location=12-194; Score=237.8; E_value=2.7e-68; Accession=PF00141.15; Description =Peroxidase
TPPCPRRPPRPIRSAVAAAVLLDRRMGASLLRLHFHDCFVQGCDASVLLDDAGGFTGEKGAGPNAGSLRGFDVIDNAKMLLELLCPQTVSCADILAVAARDAVEQLGGPSWTVPLGXRRDATTASASLANSDLPGPTSNLNGLLNAFSNKGLSTTDMVALSGSTLAHCNPIHASPFSCIMQRMCRQIRSRQAKD

SEQ ID NO: 95483 - protein, 266 aa, Setaria italica
  misc_feature (36)..(36): Xaa can be any naturally occurring amino acid
  Transcript Sequence Number=SeqID_29509
  Gene Ontology: Mol. function=electron carrier activity; Cellular component=extracellular region; Biological process=response to oxidative stress
  Homolog annotation: Hit_ID=B6TU39; Match level="QueryCoverage=100%, HitCoverage=78%, E-value=1e-132, Identity=89%"; Hit description =Peroxidase 2
  Pfam annotation: Domain name=peroxidase; Domain location=1-230; Score= 412.1; E_value=9.3e-121; Accession=PF00141.15; Description=Peroxidase
MGASLLRLHFHDCFVQGCDASVLLDDAGGFTGEKGXGPNAGSLRGFDVIDNAKMLLELLCPQTVSCADILAVAARDAVEQLGGPSWTVPLGRRDATTASASLANSDLPGPTSNLNGLLNAFSNKGLSTTDMVALSGAHTVGRAQCRNFRARIYNDTDIDATFAASLRASCPAQAGSSSDGALEPLDGTSPDAFDNDYFGNLLSQRGLLHSDQALFGGGATDGLVRAYASDAGRWGSDFAAAMVRMASIGPLTGTDGEIRVNCRRVN

SEQ ID NO: 95484 - protein, 61 aa, Setaria italica
  Transcript Sequence Number=SeqID_29510
  Subcellular localization annotation: CTP_CleavageSite=36; ConfidenceScore=5.52e-01
GCRGRKRCGRAPRPPRTPPRTPTPPHAPWRRPPPPSASTPAPSPSSPPPRSVCHQRSSAAA

SEQ ID NO: 95485 - protein, 274 aa, Setaria italica
  misc_feature (58)..(58): Xaa can be any naturally occurring amino acid
  misc_feature (251)..(251): Xaa can be any naturally occurring amino acid
  Transcript Sequence Number=SeqID_29511
  Gene Ontology: Mol. function=protein serine/threonine kinase activity; Cellular component=myosin complex; Biological process =protein amino acid phosphorylation
  Homolog annotation: Hit_ID=Q7XYY6; Match level="QueryCoverage=88%, HitCoverage=23%, E-value=1e-111, Identity=85%"; Hit description=EDR1
SALSVSTASSSPPSAAATPTGAAGAGAGAGGGEDYISSEEEFQMQLAMALSASSNGDXLGDLDGDQIRKAKLMSLDRFSAHRDEGHTADSLSRRYWDYNFLDYHEKVVDGFYDIFGSSMESSRQGKMPSLADLQTGIGDLGFEVIVINRAIDSTLQEMEQVAQCILLDFPVANIALLVQRIAELVTDNMGGPVKDANDMLTRWLEKSTELRTSLQTSLLPIGCIKIGLSRHRALLFKILADRVGIPCKLVXKGSNYTGGDDDDAINIIKMDNER

SEQ ID NO: 95486 - protein, 63 aa, Setaria italica
  Transcript Sequence Number=SeqID_29512
  Gene Ontology: Mol. function=acyltransferase activity; Biological process=metabolic process
SNGSQEHHVSGEEEVHHVSRPILNNGPKHRPLTPMRQCRGVACVAVILSTAFLLIVYLAPITT

SEQ ID NO: 95487 - protein, 130 aa, Setaria italica
  Transcript Sequence Number=SeqID_29513
  Gene Ontology: Mol. function=protein serine/threonine kinase activity; Biological process=protein amino acid phosphorylation
  Homolog annotation: Hit_ID=Q7X8R6; Match level="QueryCoverage=91%, HitCoverage=15%, E-value=8e-11, Identity=34%"; Hit description =OSJNBa0023J03.15 protein
MYTYMPWRNVPDVTSVVCNGIRGCCVKHLYGTNTMQLQFVRHTNGSFPKYREISVISRSMFLGWSVHADHPPCSDELRNDNNYACVSNNSSCDAEPIDENIYWYRCRCESEYAGNPYILDGCSHVDSAYY

SEQ ID NO: 95488 - protein, 128 aa, Setaria italica
  Transcript Sequence Number=SeqID_29514
  Gene Ontology: Mol. function=protein serine/threonine kinase activity; Biological process=protein amino acid phosphorylation
  Homolog annotation: Hit_ID=Q7XRN6; Match level="QueryCoverage=76%, HitCoverage=10%, E-value=2e-13, Identity=42%"; Hit description =OSJNBa0024J22.12 protein
  Subcellular localization annotation: CTP_CleavageSite=44; ConfidenceScore=5.26e-01
MGVLDALLAGLLFHAACVGAPTVNGTVLANHDNSNSSTTIVPSAASMASCPKSCGGKTFDYPFGIGVGCFRSPEFELICNTGGLYLSDNDTEVLLDINVSPQQGAGVSQNMLATHTYWMAAPMSIQRT

SEQ ID NO: 95489 - protein, 104 aa, Setaria italica
  Transcript Sequence Number=SeqID_29515
MSLPFTFWSSVFTVMLQVAVKYSEETIRTDALSIMILILRTTDPKEERHRFGFTSVITRLHLLLQKENGLLVKKHSVRLLFLLLNCPVMLKLLCSGGKDGSEQM

SEQ ID NO: 95490 - protein, 86 aa, Setaria italica
  Transcript Sequence Number=SeqID_29516
PAGKGIGINSCPWAERELGISPTGTYRVTRNTRNPFNYNLPKSNILDLAQAQTNPTHPNSCPSCTDLIHLTAHCPSLSFLPQVAAT

SEQ ID NO: 95491 - protein, 72 aa, Setaria italica
  Transcript Sequence Number=SeqID_29517
  Gene Ontology: Cellular component=protein complex
  Homolog annotation: Hit_ID=Q076B1; Match level="QueryCoverage=83%, HitCoverage=16%, E-value=7e-22, Identity=85%"; Hit description=RPN9 (Fragment)
PALVQNERKLLEKINILCLMEIIFSRSSENRTIPLSDIAERTRLSVEDVEYLLMKSLSVSPALQKPPLVVVL

SEQ ID NO: 95492 - protein, 354 aa, Setaria italica
  Transcript Sequence Number=SeqID_29518
  Gene Ontology: Mol. function=endopeptidase activity; Cellular component=protein complex; Biological process=proteolysis
  Homolog annotation: Hit_ID=Q076B1; Match level="QueryCoverage=100%, HitCoverage=98%, E-value=1e-163, Identity=76%"; Hit description=RPN9 (Fragment)
  Pfam annotation: Domain name=PCI; Domain location=204-312; Score =82.6; E_value=1.4e-21; Accession=PF01399.19; Description=PCI domain
WHQLTLKLDQFLGLAVVQAGDALIQLYNHFISDFETKINLLKFAHFTVVVSRQYLDKDAGINYLEGVISKLHDTREARVEEPILYVKMQIATFLLEKGNQKGCKKLLEEGKTTLDSMVDVDPSVHGTYYWVSSQYHKAHQDYCEFYKSALLYLAYTTVESLSEPFKQNLAFDLSLSALLGENIYNFGELLAHPIIHSLLGTQAEWIFHMLQAFNSGNIALYQELCKTHNGALSAQPALVQNERKLLEKINILCLMEIIFSRSSENRTIPLSDIAERTRLSVEDVEYLLMKSLSARLIEGIIDQVDGTVHVSWVQPRVLGIDQVNSLRDRLDTWVGKVHTTLLSVEAETPDLLSS

SEQ ID NO: 95493 - protein, 188 aa, Setaria italica
  Transcript Sequence Number=SeqID_29519
  Gene Ontology: Mol. function=hydrolase activity; Cellular component =anchored to membrane
  Homolog annotation: Hit_ID=B6TW10; Match level="QueryCoverage=59%, HitCoverage=60%, E-value=2e-50, Identity=85%"; Hit description =Glucan endo-1,3-beta-glucosidase 1
  Pfam annotation: Domain name=X8; Domain location=21-106; Score=144.3; E_value=3.8e-40; Accession=PF07983.5; Description=X8 domain
MATPVFLLLLLAMAFRGSDGAWCVCRSDATDTALQKTLDYACGHGADCAAVLPTGPCYSPTSVQAHCSYAANSYFQRNSQASGATCDFGGTANLTDTDPSSGTCKYPATPSEAGTSGNSTGAGAGTGTSPPGSTSNPATTPSMGGTFTTPVGASGPTPSFVSAATAAAFAGRHVLLLAVVSVLAFLVR

SEQ ID NO: 95494 - protein, 83 aa, Setaria italica
  Transcript Sequence Number=SeqID_29520
QSNANCPLCRAAISGHCLLPPLDHPPRPEPDEVVIQVGHTAEEEAAQAQHQQASMAVASYEPAEDTTAYLQVSSDKRKNMNAW

SEQ ID NO: 95495 - protein, 172 aa, Setaria italica
  Transcript Sequence Number=SeqID_29521
  Gene Ontology: Cellular component=plasma membrane
MMLQRSEQQRRLGLAMERPLDSYSSVKDVTYSCGYCGYALNLSSSARDTAGIGSKYRKQIKKGVVAFVAVDEGRFTLADEVACMPYFRSSRAWGLFRRRSRLLCRKCGGRIGDAYEDEDRDSGLSDGDAFSDDLRASSGSGGSSASSQRNYVIKISALQPSSEDSDAVSFTL

SEQ ID NO: 95496 - protein, 154 aa, Setaria italica
  misc_feature (12)..(12): Xaa can be any naturally occurring amino acid
  misc_feature (69)..(69): Xaa can be any naturally occurring amino acid
  Transcript Sequence Number=SeqID_29522
  Gene Ontology: Mol. function=hydrolase activity, acting on glycosyl bonds; Cellular component=beta-galactosidase complex; Biological process=carbohydrate metabolic process
  Homolog annotation: Hit_ID=B2Z6M9; Match level="QueryCoverage=100%, HitCoverage=18%, E-value=3e-72, Identity=81%"; Hit description=Beta -galactosidase
YMSYYMYHGGTXNFGRFSSSYVTTNYYDGAPLDEYGLIWQPTWGHLRELHTAVKQSSEPLLFGTYSNFXLGQEQEAHIFETESQCVAFLVNFDQHQISEVVFRNISLQLAPKSISILSDCKRVVFETAKVNAQHGSRTAEEVQSFSDINTWKAF

SEQ ID NO: 95497 - protein, 115 aa, Setaria italica
  Transcript Sequence Number=SeqID_29523
  Gene Ontology: Mol. function=electron carrier activity; Biological process=oxidation reduction
  Homolog annotation: Hit_ID=Q6ZIG7; Match level="QueryCoverage=100%, HitCoverage=21%, E-value=7e-46, Identity=73%"; Hit description =Putative cytochrome P450
LFGAGSKTAAITLQWAMSELIRSPNVMKKVQAELRNILDGKPKVTEDDLSEMKYLKLVIKETLRLHPPAPLLIPRESRESCKILGYDVPKGTTVLVNAWAIGRDPKYWEDADEFK

SEQ ID NO: 95498 - protein, 83 aa, Setaria italica
  Transcript Sequence Number=SeqID_29524
  Gene Ontology: Cellular component=extracellular region; Biological process=plant-type cell wall organization and biogenesis
  Homolog annotation: Hit_ID=Q4PR43; Match level="QueryCoverage=100%, HitCoverage=30%, E-value=1e-36, Identity=90%"; Hit description =Expansin-A23
  Pfam annotation: Domain name=DPBB_1; Domain location=31-83; Score =22.7; E_value=2.7e-05; Accession=PF03330.10; Description=Rare lipoprotein A (RlpA)-like double
ATFYGGADASGTMGGACGYGNLYSQGYGTRTAALSAALFNDGASCGQCYKIACDRKRANPLFCKPGVTVTVTATNFCPPNYGL

SEQ ID NO: 95499 - protein, 82 aa, Setaria italica
  Transcript Sequence Number=SeqID_29525
  Gene Ontology: Mol. function=zinc ion binding; Cellular component =intracellular; Biological process=regulation of transcription, DNA -dependent
  Homolog annotation: Hit_ID=B6SS63; Match level="QueryCoverage=100%, HitCoverage=15%, E-value=3e-41, Identity=93%"; Hit description =Nucleic acid binding protein
  Pfam annotation: Domain name=zf-C2H2; Domain location=1-22; Score =17.0; E_value=0.079; Accession=PF00096.18; Description=Zinc finger, C2H2 type
VCEICGKGFQRDQNLQLHRRGHNLPWKLRQRSGKEPPRKRVYVCPETSCVHHNPSRALGDLTGIKKHFCRKHGEKKWKCDKC

SEQ ID NO: 95500 - protein, 71 aa, Setaria italica
  Transcript Sequence Number=SeqID_29526
SIYLIKFSCVSLGMYVLHQRIVMHSICSRYECLSSIIMTRLHKPSRGQPANFKGFIRIRGYQRSQSQPKPI

SEQ ID NO: 95501 - protein, 96 aa, Setaria italica
  misc_feature (48)..(48): Xaa can be any naturally occurring amino acid
  Transcript Sequence Number=SeqID_29527
  Subcellular localization annotation: CTP_CleavageSite=69; ConfidenceScore=5.66e-01
PNPTPTLSSPPAKHLHYPMTRPAAPARHQPPPPSPKRRPGQDVSTPSXPIAPRGKIASTRSVLPAQWPRARLQSRRPPPPMTPPPMVPWPPARRSV

SEQ ID NO: 95502 - protein, 56 aa, Setaria italica
  Transcript Sequence Number=SeqID_29528
  Gene Ontology: Mol. function=hydrogen-translocating pyrophosphatase activity; Cellular component=membrane; Biological process=proton transport
  Homolog annotation: Hit_ID=Q9SP03; Match level="QueryCoverage=100%, HitCoverage=33%, E-value=4e-20, Identity=87%"; Hit description=H+ -pyrophosphatase (Fragment)
  Subcellular localization annotation: CTP_CleavageSite=47; ConfidenceScore=5.10e-01
TTAAIGKGFAIGSAALVSLALFGAFVSRAGVADVNVLNPKVFVGLLVGAMLPYWFS

SEQ ID NO: 95503 - protein, 279 aa, Setaria italica
  misc_feature (238)..(238): Xaa can be any naturally occurring amino acid
  Transcript Sequence Number=SeqID_29529
  Gene Ontology: Mol. function=hydrogen-translocating pyrophosphatase activity; Cellular component=membrane; Biological process=proton transport
  Homolog annotation: Hit_ID=B6UEE8; Match level="QueryCoverage=100%, HitCoverage=36%, E-value=1e-132, Identity=86%"; Hit description =Pyrophosphate-energized vacuolar membrane proton pump
  Pfam annotation: Domain name=H_PPase; Domain location=1-265; Score= -4.9; E_value=8.6e-24; Accession=PF03030.8; Description=Inorganic H+ pyrophosphatase
MLSTVATGLAIDAYGPISDNAGGIAEMAGMSRRIRQRTDALDAAGNTTAAIGKGFAIGSAALVSLALFGAFVSRAGIDAVDVLSPRVFVGLLAGAMLPYWFSAMTMRSVGSAALRMVEEVRRQFDTIPGLAEGMASPDYATCVRISTDASLRKMMAPGALVMLSPLVVGTLFGVETLAGLLAGALVSGVQVAISASNSGGAWDNAKKYIEAGVSEEARSLGPKGSEAHKAAVIGDTIXGDPLKDTSGPSLNILIKLMAVESLVFAPFFAAHGGIVFDRL

SEQ ID NO: 95504 - protein, 112 aa, Setaria italica
  Transcript Sequence Number=SeqID_29530
  Homolog annotation: Hit_ID=B6U077; Match level="QueryCoverage=100%, HitCoverage=28%, E-value=7e-44, Identity=80%"; Hit description=LMBR1- like conserved region family protein
KTSIHMNLLFYSIVGAIGLIGLILLLIMHRAWDGGIVGFAMACSNTFGLVTGAFLLGFGLSEIPRNIWKNADWSHRQKVLSHRVAKMAVKLDSAHQEYSNANVVAQATSNQM

SEQ ID NO: 95505 - protein, 129 aa, Setaria italica
  Transcript Sequence Number=SeqID_29531
  Gene Ontology: Mol. function=sequence-specific DNA binding; Cellular component=nucleus; Biological process=regulation of transcription, DNA-dependent
  Homolog annotation: Hit_ID=B2KJ78; Match level="QueryCoverage=91%, HitCoverage=35%, E-value=3e-11, Identity=39%"; Hit description=WRKY transcription factor 37 (Fragment)
STLEAAKAEMGEVREENERLKTMLSRIVNQYQSLHMHFLDVVKVHEQEAAKAKLPAAPAPAPGADGVDEDPDDLVSLSLGTRSNGARRKGHERSSSSSGTAETTAGEGQLSLGLGIARGSGVPADDDKA

SEQ ID NO: 95506 - protein, 210 aa, Setaria italica
  misc_feature (16)..(16): Xaa can be any naturally occurring amino acid
  misc_feature (29)..(29): Xaa can be any naturally occurring amino acid
  misc_feature (58)..(58): Xaa can be any naturally occurring amino acid
  Transcript Sequence Number=SeqID_29532
  Gene Ontology: Mol. function=transcription factor activity; Cellular component=nucleus; Biological process=regulation of transcription, DNA-dependent
  Pfam annotation: Domain name=AP2; Domain location=1-54; Score=50.8; E_ value=5.1e-12; Accession=PF00847.12; Description=AP2 domain
KQVRGVRKRPWGGWAXAEIRDPVRKTRKXWIGSYDSEEAAAAAYQAYANQIHAEVLAXKAQESVSERAALSSSSVSCVSSSAPCEQTARVQKGVFMEIDPEPVDEILLNFSTPKEISVDVLLGRIDETPVGDSVSLADELPLDDFTRLEDAFPISDFIGAVHKPLDDDYIGLADISHLPLPMKDPAFNLDAELDWSGFDFTAIEHELQVL

SEQ ID NO: 95507 - protein, 151 aa, Setaria italica
  Transcript Sequence Number=SeqID_29533
  Gene Ontology: Mol. function=transcription factor activity; Cellular component=nucleus; Biological process=regulation of transcription, DNA-dependent
MSEHAASNSSLVSCVSSSVSCEQKAQEAQNRVGPLMEMHREPMDESLLNFSPKALEISEDVMLNPKDEHQASDSDSPADEFPPDGFTRPEDMFTVGDFITATYKPLDDDYIGLADISHLPLPIKDPEFDLDAELDWSGFDFASMEHELELL

SEQ ID NO: 95508 - protein, 168 aa, Setaria italica
  Transcript Sequence Number=SeqID_29534
  Gene Ontology: Mol. function=protein serine/threonine kinase activity
  Homolog annotation: Hit_ID=Q6ASW0; Match level="QueryCoverage=99%, HitCoverage=15%, E-value=8e-74, Identity=81%"; Hit description =Protein kinase, putative, expressed
IVGALPNGSDGRKGSGIGQPQENNMGDLYPWTFTIANSTAEQLAELLVSEEVPRHRQGAMMAEKRDRGVGTEQPGPVLEQKVSFGRGKGKVDAAGRAETNEQGHSRDKNLVPEKEENMNGCTVKTVLPFSAENPSSSYNSAHHENDRKEVKKSINADGVAKSVKGQLD

SEQ ID NO: 95509 - protein, 149 aa, Setaria italica
  Transcript Sequence Number=SeqID_29535
  Gene Ontology: Mol. function=binding
  Homolog annotation: Hit_ID=Q2R300; Match level="QueryCoverage=75%, HitCoverage=11%, E-value=9e-43, Identity=74%"; Hit description =Importin, putative, expressed
SQALALADALLRCVAFTSDDWEIADSTLQFWCTLAHFILGIDVKTAKRNAAQELFLPVFSSLLDALLFRAQIDTDERGTDGATCMPDGLAQFRMNLEELLVDICLLLGAPAYINKLFSHGWDFSSQSVPWKEVEVRMYALSMVADTILQ

SEQ ID NO: 95510 - protein, 145 aa, Setaria italica
  Transcript Sequence Number=SeqID_29536
  Gene Ontology: Mol. function=DNA binding; Cellular component=nucleus
NQQSSGCEDDARSTLTSNRSVTDDLTRTCRSETNYSKGVSEQGRFDSIQEPDLQPNCFSRTLKLQKKLLSSGAAHTICLRIQPHNKMDFLPKKEFDTYFCAYEPYEQCSRSTSRATYSSRDDDLWSKNSRFGSNLLCWRAPKQSM

SEQ ID NO: 95511 - protein, 171 aa, Setaria italica
  Transcript Sequence Number=SeqID_29537
  Pfam annotation: Domain name=Inhibitor_I29; Domain location=12-69; Score=52.8; E_value=1.3e-12; Accession=PF08246.4; Description =Cathepsin propeptide inhibitor domain (
MRVDEKAMKARFEDWMKEYDKTSKSEEEKVRRYEIFKKNAIHADKVNAAFPNGPHHAPNNLGDWTEAELYSLRSRQGDFPWETYFRRLSKAYAEGRVDGVPGIVDAHDEEVQCTEAVKQRFKELTARKAKQDAREAEQAAAKSQQDAREAKQAATKSQQDAREAEPTATKS

SEQ ID NO: 95512 - protein, 138 aa, Setaria italica
  Transcript Sequence Number=SeqID_29538
  Pfam annotation: Domain name=Kelch_2; Domain location=62-107; Score =21.3; E_value=0.004; Accession=PF07646.7; Description=Kelch motif
LNCLTTIIFFLLILFSPCIFFFEGSAVNQNFILHIHCWIILRSFTVSVQWKRLPTSNEPPPPRAYHSMTSIGSQFLLFGGFDGKNTFGDLWWLVPEDDPIAKRGLAPNIDSNSRPSTTTGDAQQPNLKVHACMCGSSL

SEQ ID NO: 95513 - protein, 388 aa, Setaria italica
  misc_feature (171)..(171): Xaa can be any naturally occurring amino acid
  Transcript Sequence Number=SeqID_29539
  Gene Ontology: Mol. function=protein binding; Cellular component =microtubule cytoskeleton; Biological process=establishment or maintenance of cell polarity
  Homolog annotation: Hit_ID=Q01AT2; Match level="QueryCoverage=87%, HitCoverage=75%, E-value=1e-28, Identity=28%"; Hit description =Putative transcription factor (ISS)
  Pfam annotation: Domain name=Kelch_1; Domain location=127-181; Score =19.9; E_value=0.011; Accession=PF01344.17; Description=Kelch motif
  Pfam annotation: Domain name=Kelch_1; Domain location=186-231; Score =7.3; E_value=0.45; Accession=PF01344.17; Description=Kelch motif
  Pfam annotation: Domain name=Kelch_1; Domain location=19-65; Score =20.1; E_value=0.0089; Accession=PF01344.17; Description=Kelch motif
  Pfam annotation: Domain name=Kelch_1; Domain location=70-122; Score =9.9; E_value=0.22; Accession=PF01344.17; Description=Kelch motif
  Pfam annotation: Domain name=Kelch_2; Domain location=127-181; Score =6.7; E_value=5.6; Accession=PF07646.7; Description=Kelch motif
  Pfam annotation: Domain name=Kelch_2; Domain location=186-231; Score =21.3; E_value=0.004; Accession=PF07646.7; Description=Kelch motif
  Pfam annotation: Domain name=Kelch_2; Domain location=20-65; Score =28.0; E_value=3.9e-05; Accession=PF07646.7; Description=Kelch motif
  Pfam annotation: Domain name=Kelch_2; Domain location=70-122; Score =20.0; E_value=0.01; Accession=PF07646.7; Description=Kelch motif
  Pfam module annotation: Pfam domain module=Kelch_1::Kelch_1::Kelch _1::Kelch_1::Kelch_2::Kelch_2::Kelch_2::Kelch_2; Domain location=127 -181::186-231::19-65::70-122::127-181::186-231::20-65::70-122
DTDLWQWSEMTGFGDLPSPREFAAASAIGNRKIVMYGGWDGKNWLSDVYIMDTMSLEWTELAVTGSVPPPRCGHSATMIEKRLLIFGGRGGAGLIMGDLWALKGVTEEDNETPGWTQLKLPGQSPSPRCGHSVTSGGPYLLLFGGHGTGGWLSRYDVYYNECIILDRVSSXVQWKRLPTSNEPPPPRAYHSMTSIGSQFLLFGGFDGKNTFGDLWWLVPEDDPIAKRGLAPNIDSNSRPSTTTGDAQQPNLKESQAVVSPIIELAKRLGIPLSEEVSISSVDEMDDKELVELSSRLAGQSLPASDQVASIQVLRDHWKSSPASSLQLQELGPLLRDYQRLILRRYSGNQSAAFHEMEALRFFHLKSASQLRMDDIPILLREYGRLLST

SEQ ID NO: 95514 - protein, 90 aa, Setaria italica
  Transcript Sequence Number=SeqID_29540
TTNRTTEEAERLDGSSCFRLRCSVHRPAQRKGEQGGELLEAWIWLQALLPSADPSAFRSATPVHLTKYMASVLASLNASAALLICLLQHH

SEQ ID NO: 95515 - protein, 336 aa, Setaria italica
  Transcript Sequence Number=SeqID_29541
  Gene Ontology: Mol. function=transferase activity, transferring glycosyl groups; Biological process=metabolic process
  Homolog annotation: Hit_ID=Q69IU8; Match level="QueryCoverage=98%, HitCoverage=70%, E-value=2e-89, Identity=54%"; Hit description =Putative UDP-glucose:salicylic acid glucosyltransferase
  Pfam annotation: Domain name=UDPGT; Domain location=3-335; Score= -162.9; E_value=0.011; Accession=PF00201.10; Description=UDP -glucoronosyl and UDP-glucosyl transferase
YVRVSLPWARGVARRHGAAAAAFFTQPCAVNVTYGHVWCRRVGVPVPVEGDGTVRLPGLPALEPEGLPWFLRVGPGPYPAYFELVMRQFQGLEEADDVLVNSFYELEPEEAEYMASAWRAKTIGPTVPASYLGDDRLPSDTKYGLHLFELTAAPCVAWLDAHPPRSVVYASFGSLSDLDPLEMREVASGLLDAGRPFLWAVRSSESHKLPAGFGDACGRHGGMVVSWCPQLEVLAHRAVGCFLTHCGWNSTVEALVAGVPMVAVPQWTDQPMNAWYVESAWRAGVRVRPAAADGLVRRGEVARGVEEVMGGERSGEYRRNAAAWMEKARAASREGG

SEQ ID NO: 95516 - protein, 220 aa, Setaria italica
  misc_feature (12)..(12): Xaa can be any naturally occurring amino acid
  misc_feature (28)..(28): Xaa can be any naturally occurring amino acid
  Transcript Sequence Number=SeqID_29542
  Gene Ontology: Mol. function=metal ion binding; Cellular component =intracellular
  Homolog annotation: Hit_ID=Q7F9L6; Match level="QueryCoverage=97%, HitCoverage=39%, E-value=3e-51, Identity=50%"; Hit description =OSIGBa0142I02-OSIGBa0101B20.23 protein
  Pfam annotation: Domain name=IBR; Domain location=25-83; Score=44.7; E_value=3.7e-10; Accession=PF01485.13; Description=IBR domain
CPDDKCRGDVPXHLLKRLLGDADFERWXRLILQKTLDSMADAAYCPRCETICLEDEENNAQCSKCFFSFCTHCRLRCHIGEGCVSITPEEKLLSLREREKVRRLSKGDIEKTISLAKEILSIKEVLCLCVQCPYCGTGISRVSGCNHMVCGNCGQPFCYGCGVAGCGGCSSSTARNDPGKVKKLDVTPLLTAQIDAVEGTRKEPTIMRSRKYPCLKRQVD

SEQ ID NO: 95517 - protein, 56 aa, Setaria italica
  Transcript Sequence Number=SeqID_29543
ISNIKHMSIAPMDFFLGKGLPRFICNETKYTIGSQHLSAETIQGVPNKHSIATMNQ

SEQ ID NO: 95518 - protein, 114 aa, Setaria italica
  Transcript Sequence Number=SeqID_29544
EIDEALIYKRGASTSKARCVCASSARLAVCSAYCSKIYSLYMEPAAAWGPCEFQLANWTIEEPAVDEVWAPAASLPVEYASIDIFPDIWSLQSYVPSSSSGGQHRQVVYNSYAA

SEQ ID NO: 95519 - protein, 105 aa, Setaria italica
  Transcript Sequence Number=SeqID_29545
  Gene Ontology: Mol. function=cytokinin dehydrogenase activity; Cellular component=extracellular region; Biological process =cytokinin metabolic process
  Homolog annotation: Hit_ID=Q9T0N8; Match level="QueryCoverage=78%, HitCoverage=15%, E-value=2e-32, Identity=85%"; Hit description =Cytokinin dehydrogenase 1
MAVVYLLLAALIASCHAQATSGDRPWPASLAKLAKEGKLRTDSNATVPASMDFGNITSALPAAVLYPASPGDLAALLGAAYSTPGWPYTVAFRGRGHSLMGQAFA

SEQ ID NO: 95520 - protein, 138 aa, Setaria italica
  Transcript Sequence Number=SeqID_29546
  Subcellular localization annotation: CTP_CleavageSite=75; ConfidenceScore=5.71e-01
PRLASSALLSLCVRACPSAGTYTQTPLPGFQPATATASMSSRSSRRGRSGSFTLRQPPVVDIGCNCRRPKLFSVLSSSTSSLFRGGGKPKSPNASSTSTTTAFTATTAGGRSGTTATSTDSSSWGPASFVATNSLYED

SEQ ID NO: 95521 - protein, 169 aa, Setaria italica
  Transcript Sequence Number=SeqID_29547
  Gene Ontology: Mol. function=transcription factor activity; Cellular component=nucleus; Biological process=regulation of transcription, DNA-dependent
  Homolog annotation: Hit_ID=B9SYF9; Match level="QueryCoverage=84%, HitCoverage=37%, E-value=1e-73, Identity=90%"; Hit description =Transcription factor, putative
  Pfam annotation: Domain name=AP2; Domain location=68-120; Score=59.2; E_value=1.6e-14; Accession=PF00847.12; Description=AP2 domain
KNVGGYDKEEKAARAYDLAALKYWGPTTTTNFPVSNYEKELEEMKSMTRQEFIASLRRKSSGFSRGASIYRGVTRHHQHGRWQARIGRVAGNKDLYLGTFSTQEEAAEAYDIAAIKFRGLNAVTNFDMSRYDVESILNSDLPIGGGAAGRASKFPLDSLPPASAAAMIT

SEQ ID NO: 95522 - protein, 132 aa, Setaria italica
  Transcript Sequence Number=SeqID_29548
KVQREVNGVNGTVEFNKETVKENLEEDDKVNTAEGLGLHADAHVVAKEEGDPSNLLMTLPSTPLQLLEDIDKEVYITRDTQETTTSTQGDQSQLILLEEYEVVKLENGEISSKCMQLAAKNSNVGIISIDGV

SEQ ID NO: 95523 - protein, 84 aa, Setaria italica
  Transcript Sequence Number=SeqID_29549
RVKAFRVEELLPATLAPASVRPREREQGEITSKQRGGSKQGKGSGREMVGSGAAGGGGDHARSKEAAGMMALHEALRNVCLSSD

SEQ ID NO: 95524 - protein, 345 aa, Setaria italica
  Transcript Sequence Number=SeqID_29550
  Gene Ontology: Mol. function=calcium ion binding
  Homolog annotation: Hit_ID=B9S7L4; Match level="QueryCoverage=99%, HitCoverage=63%, E-value=1e-169, Identity=79%"; Hit description =Calcium ion binding protein, putative
IEFVTREAFIDFWVNSNLMSLDSATQVFTILKQQNRNYLMKEDFKPVLKDLLDNHPGLEFLKSTPEFQERYAETVVHRIFYCLNRIGGGHLTLRELKRGNLLSALRHADDEEDINKVLRYFSYEHFYVIYCKFWELDTDHDFLIDKENLIKYGNHALTYRIVDRIFSEVPRKFTSKAEGKMGYEDFVHFILSEEDKSTGPSQEYWFKCIDLDGNGILTHNELQFFFEEQLHRMECMAQEPVLFEDILCQLIDMIGPENESYLTLKDFRRCKLSGHFFNILFNLNKFMAFEARDPFLIRQMREEPSLTDWDRFARREYVRLAMEEDGEDASNASGDVWDESLESPF

SEQ ID NO: 95525 - protein, 130 aa, Setaria italica
  Transcript Sequence Number=SeqID_29551
TTQHTRIHEATQIFNHHIYCHDWPSVPNHHHIYSLDWQIQSSVLSSFVRVLLSVASDGCTYHSYSHTAQPMQLLPNCIPLITWKPWLPFPANHHECQAPLIKMFLPCDCHLATKRDEIIFWVAGAWLIQN

SEQ ID NO: 95526 - protein, 90 aa, Setaria italica
  Transcript Sequence Number=SeqID_29552
KLVTEDPVGRAVYEMLASPSGDYQKPVHKCLNSDESMIDAIRYSSQGDTAPYSDTDQLTKIRTTQLHNRTEWPAPTQPSESNEAGARILW

SEQ ID NO: 95527 - protein, 89 aa, Setaria italica
  Transcript Sequence Number=SeqID_29553
RVAIHENICLILEVKNLGPWAKGLLRGMPAAAAGPAAMAPLAKYPLVLAEDRTRRPDVLRHLRMYEGGWNVTSKHYWASVSFTGVSGFL

SEQ ID NO: 95528 - protein, 496 aa, Setaria italica
  Transcript Sequence Number=SeqID_29554
  Homolog annotation: Hit_ID=Q25A81; Match level="QueryCoverage=38%, HitCoverage=93%, E-value=4e-40, Identity=42%"; Hit description =H0413E07.1 protein
PVNVTVTVTFVICFLSVPYFFVVPAAMARIRLAEDRTRRPDVLRHLRMYEGGWNVTSKHYWASVSFTGVSGFLLAALWFIFFGMAAVGRCYFRSRMAKEKVSHADVVRPVLLVVFALTLIAGCIVLLYGQSKFHEETTRTVDFVVNQSDFTIQSLRNVTEYLSFAKTITVAALYLPPDVQGQIDNLKGDLNKAADTISQKTAENYIRIRKVLHIMSVILICIAVLLPVLAFLGYVLELYGPRYTVYIFVTFCCIMVAALFILLGIFLILNSAAKDTCEAMDQWAQHPQAETALSNILPCVDESTTNRTLYQSKEVVVMLVRIVNRAISALSNRRPHHKHPGQLMPYLCSPYDSNFNDRKCKPREVTFENATTAWQNYTCLTQDTDLCSGNKTLTPEIYGQLVLAANVSYALYHYAPVLLNFQDCKFVRATFSTIASQYCPPVERDLGLVSTGLALIASGLVLHLVWMLFADRPQREEVSDLASGSRITPVDSSPLQ

SEQ ID NO: 95529 - protein, 94 aa, Setaria italica
  Transcript Sequence Number=SeqID_29555
KILTNINLCQEIWQVHCIHTDGHGLLLEQARCRRKYHPHSGHICWQYSTHSQLQRSHIQFAATVIAMASMASISTMATAILLFLSAAIIVSTLP

SEQ ID NO: 95530 - protein, 123 aa, Setaria italica
  Transcript Sequence Number=SeqID_29556
MDPHPLTGPAASDADDWDNDDFVIPSFSVEESNLGDWEAARASDPQPPPKATKDTENIYLGPHGAPPSRAKKPEDTSATTGFRDKNKAREADQKVSGAGRNNKGDFHRHNGGNHAKDPFKRGA

SEQ ID NO: 95531 - protein, 165 aa, Setaria italica
  Transcript Sequence Number=SeqID_29557
  Homolog annotation: Hit_ID=B9S3L3; Match level="QueryCoverage=87%, HitCoverage=26%, E-value=8e-52, Identity=64%"; Hit description =Cytosolic purine 5-nucleotidase, putative
  Pfam annotation: Domain name=5_nucleotid; Domain location=1-160; Score=-169.7; E_value=0.0026; Accession=PF05761.6; Description=5' nucleotidase family
FSYYRFVLTVSDCLTLFCGTRYGWRTAAVIRELEDEIEIQNSENYRFQQAKLSIIHDLLGKVHATVVSTEKGQVYRALLDELNAERRQCQSGMRDLFNSSFGATFLTDTGRESSFAYHIHQYADIYTSKLENFLSYAPESWLHPPHDIKIMPHNAKVPASLFSTS

SEQ ID NO: 95532 - protein, 82 aa, Setaria italica
  Transcript Sequence Number=SeqID_29558
  Gene Ontology: Mol. function=protein serine/threonine kinase activity; Cellular component=integral to membrane; Biological process=protein amino acid phosphorylation
  Homolog annotation: Hit_ID=Q65X95; Match level="QueryCoverage=98%, HitCoverage=8%, E-value=7e-30, Identity=75%"; Hit description =Putative receptor like protein kinase
QIAGNGRHGKRLTWRQRLRISLDSAQGLEYLHKGCNPPLIHRDVKATNILLNAKLEAKIADFGLSKVFNHDDETRISMNTLV

SEQ ID NO: 95533 - protein, 145 aa, Setaria italica
  misc_feature (18)..(18): Xaa can be any naturally occurring amino acid
  Transcript Sequence Number=SeqID_29559
  Gene Ontology: Mol. function=electron carrier activity; Cellular component=extracellular region; Biological process=response to oxidative stress
  Homolog annotation: Hit_ID=Q5U1J1; Match level="QueryCoverage=95%, HitCoverage=40%, E-value=8e-42, Identity=63%"; Hit description=Class III peroxidase 102
  Pfam annotation: Domain name=peroxidase; Domain location=5-141; Score= -12.3; E_value=6e-09; Accession=PF00141.15; Description=Peroxidase
GRRDGKNSIAAEADLHVXPMGGKSVTDLVRFFESKGLTIFDLVVLSGAHTIGRATCGAVKPGLCKRKDKPALLDRRYGDFLRRKCGAGGDGEYVELDGETPTAFDNQYYKNLMHGRGVLDTDQKLLLDSRTGDHVRAFANRIIKK

SEQ ID NO: 95534 - protein, 72 aa, Setaria italica
  Transcript Sequence Number=SeqID_29560
  Homolog annotation: Hit_ID=B6TXE3; Match level="QueryCoverage=69%, HitCoverage=27%, E-value=2e-11, Identity=68%"; Hit description=Fiber protein Fb34
MAGSTAVLAAILLVDLAAFGLAIGAVQSHPSARLETDERKEWTYCVYRPDAATALGGVALALLLVGQAVAVV

SEQ ID NO: 95535 - protein, 125 aa, Setaria italica
  Transcript Sequence Number=SeqID_29561
PHALVLLSMAVMAVSFYPSLSPCLLSFGGIKRAATAIQFSNKQKLAWEEENERKQEHQFLQQIEHDLCKSTFKYYCYGILLQRISEKFDCSILQYLPPQVFWGYGSADSNSYYLEFIYKLMGRKS

SEQ ID NO: 95536 - protein, 195 aa, Setaria italica
  misc_feature (39)..(39): Xaa can be any naturally occurring amino acid
  misc_feature (184)..(184): Xaa can be any naturally occurring amino acid
  Transcript Sequence Number=SeqID_29562
  Homolog annotation: Hit_ID=Q9ZVF7; Match level="QueryCoverage=89%, HitCoverage=30%, E-value=1e-71, Identity=69%"; Hit description =Similar to axi 1 protein
  Pfam annotation: Domain name=DUF246; Domain location=11-195; Score =0.1; E_value=1.4e-14; Accession=PF03138.6; Description=Plant protein family
MALFFLLTTAQVSYLHLCFLHSKFGDIYDEDHFYPNILXKNDVRVVNKVPEFIMERFGHNLSNAFNFKIKAWSPIQFYEDAVLPKLIEERLIRISPFANRLSFDAPPAVQRLRCLANFEALKFSKSITALSNTLVSRMREKSAENNGKYVAVHLRFEEDMVAFSCCVFDGGDNEKKELDAAREXGWRGKFTRPGR

SEQ ID NO: 95537 - protein, 88 aa, Setaria italica
  misc_feature (20)..(20): Xaa can be any naturally occurring amino acid
  Transcript Sequence Number=SeqID_29563
  Gene Ontology: Mol. function=phosphotransferase activity, alcohol group as acceptor
  Homolog annotation: Hit_ID=B9S6P3; Match level="QueryCoverage=93%, HitCoverage=2%, E-value=3e-28, Identity=70%"; Hit description =Inositol or phosphatidylinositol kinase, putative
AHQRPHEQHSKRLLEPDLPXVQVRLQLAMEVRDSLEMTHTPDYLNFLRCYFRAFSAILTNYTKPQATENAEHKLRNVVIEILNRLPHS

SEQ ID NO: 95538 - protein, 171 aa, Setaria italica
  Transcript Sequence Number=SeqID_29564
  Pfam annotation: Domain name=DUF789; Domain location=51-170; Score =15.5; E_value=1.9e-12; Accession=PF05623.4; Description=Protein of unknown function (DUF789)
AADPAAPPPKEAERRADAPSKTSVSTAAAPTSKATAAADAAVAPPPVDDVGNLERFLSFTTPSVPVQYLPKTSMRGWRIGDVPNSPPYFCLGDLWEAFKEWSFYGAGVPLVLNGSDSVIQYYVPYLSAIQLYADPSKLSARTRHPWEESDGESMDTSSEGSSETDVDRLRG

SEQ ID NO: 95539 - protein, 229 aa, Setaria italica
  Transcript Sequence Number=SeqID_29565
  Homolog annotation: Hit_ID=Q9LR63; Match level="QueryCoverage=67%, HitCoverage=49%, E-value=1e-32, Identity=45%"; Hit description =F21B7.22
  Pfam annotation: Domain name=DUF789; Domain location=2-220; Score =302.0; E_value=1.2e-87; Accession=PF05623.4; Description=Protein of unknown function (DUF789)
CRPSKLSARTRHPWEESDGESMDTSSEGSSETDVDRLRGSLEATCRLEGGFQRDDGEMHSPSTRPIFEYLETDPPFGREPLTDKVSILASKFPDLKTFRSCDLLPTSWISVAWYPIYRIPTGPTLKDLDACFLTFHYLSTPSKDTDRAAPACPSFGGLNHCVNAAGKLTLPVFGLASYKLRSSIWSSNRPEEQHRAASLMQAADEWLRQRQVYHPDFRFFLTHYNNSLR

SEQ ID NO: 95540 - protein, 133 aa, Setaria italica
  misc_feature (109)..(109): Xaa can be any naturally occurring amino acid
  Transcript Sequence Number=SeqID_29566
  Gene Ontology: Mol. function=heat shock protein binding; Biological process=protein folding
  Homolog annotation: Hit_ID=Q108V8; Match level="QueryCoverage=87%, HitCoverage=4%, E-value=7e-56, Identity=86%"; Hit description=DNAJ heat shock N-terminal domain-containing protein, putative, expressed
LRHRLLLLLKALMNDLSNVEACVLVGGCVLAVDLLTVAHETSERTAIPLQSNLIAATAFMEPSKEWMYIDKDGTQVGPLEKDALRRLWSKKSIDWTTKCWASGMSDWTXTLGLRELRWALSVRVPVLTPTQVG

SEQ ID NO: 95541 - protein, 32 aa, Setaria italica
  Transcript Sequence Number=SeqID_29567
VETKEPYHQLQLSCKQKNNTLTTSTLLYHYVQ

SEQ ID NO: 95542 - protein, 41 aa, Setaria italica
  misc_feature (18)..(18): Xaa can be any naturally occurring amino acid
  Transcript Sequence Number=SeqID_29568
ATRVLAVVDSKFRLILVXESRIHRLARYYKRTKSLPPTWKV

SEQ ID NO: 95543 - protein, 111 aa, Setaria italica
  misc_feature (83)..(83): Xaa can be any naturally occurring amino acid
  misc_feature (102)..(102): Xaa can be any naturally occurring amino acid
  Transcript Sequence Number=SeqID_29569
  Gene Ontology: Mol. function=UDP-glucuronate decarboxylase activity; Biological process=cellular metabolic process
  Homolog annotation: Hit_ID=Q5QMG6; Match level="QueryCoverage=98%, HitCoverage=26%, E-value=1e-56, Identity=97%"; Hit description=UDP -glucuronic acid decarboxylase
YKTNVMGTLNMLGLAKRIGARFLLTSTSEVYGDPLEHPQKETYWGHVNPIGVRSCYDEGKRTAETLTMDYHRGGGVEVRIARXIFNTYGPRMCLDDGRVVSXFCAQALRRQ

SEQ ID NO: 95544 - protein, 151 aa, Setaria italica
  Transcript Sequence Number=SeqID_29570
  Gene Ontology: Mol. function=structural constituent of ribosome; Cellular component=ribonucleoprotein complex; Biological process =translation
  Homolog annotation: Hit_ID=Q69UI2; Match level="QueryCoverage=100%, HitCoverage=100%, E-value=3e-78, Identity=94%"; Hit description=40S ribosomal protein S13-1
  Pfam annotation: Domain name=Ribosomal_S13_N; Domain location=1-60; Score=132.9; E_value=1e-36; Accession=PF08069.4; Description =Ribosomal S13S15 N-terminal domain
  Pfam annotation: Domain name=Ribosomal_S15; Domain location=65-151; Score=106.3; E_value=1e-28; Accession=PF00312.14; Description =Ribosomal protein S15
  Pfam module annotation: Pfam domain module=Ribosomal_S13_N::Ribosomal_ S15; Domain location=1-60::65-151
MGRMHSRGKGISSSALPYKRTPPTWLKPATSDVEEMITKAAKKGQMPSQIGVLLRDQHGIPLVKSVTGSKILRILKAHGLAPEIPEDLYFLIKKAVAIRKHLERNRKDKDSKFRLILVESRIHRLARYYKRTKKLPPTWKYESTTASTLVA

SEQ ID NO: 95545 - protein, 361 aa, Setaria italica
  Transcript Sequence Number=SeqID_29571
  Gene Ontology: Mol. function=UDP-glucuronate decarboxylase activity; Biological process=cellular metabolic process
  Homolog annotation: Hit_ID=Q5QMG6; Match level="QueryCoverage=100%, HitCoverage=89%, E-value=0.0, Identity=87%"; Hit description=UDP -glucuronic acid decarboxylase
  Pfam annotation: Domain name=3Beta_HSD; Domain location=55-286; Score= -81.5; E_value=5.5e-05; Accession=PF01073.11; Description=3-beta hydroxysteroid dehydrogenaseisomerase family
  Pfam annotation: Domain name=Epimerase; Domain location=54-287; Score= 193.7; E_value=5.1e-55; Accession=PF01370.13; Description=NAD dependent epimerasedehydratase family
  Pfam annotation: Domain name=NAD_binding_4; Domain location=56-269; Score=-24.8; E_value=1.3e-07; Accession=PF07993.4; Description=Male sterility protein
  Pfam annotation: Domain name=Polysacc_synt_2; Domain location=54-333; Score=-160.4; E_value=0.0009; Accession=PF02719.7; Description =Polysaccharide biosynthesis protein
  Pfam annotation: Domain name=RmlD_sub_bind; Domain location=52-356; Score=-136.0; E_value=0.0001; Accession=PF04321.9; Description=RmlD substrate binding domain
  Pfam module annotation: Pfam domain module=3Beta_HSD::Epimerase::NAD _binding_4::Polysacc_synt_2::RmlD_sub_bind; Domain location=55 -286::54-287::56-269::54-333::52-356
  Subcellular localization annotation: CTP_CleavageSite=44; ConfidenceScore=5.48e-01
LFVVLGALIASTFFLLRPYLSLSPSSHLPDARPLFSFAARSGVPAGYRPPPRRVVVTGGAGFVGSHLVDRLLEQGDSVIVVDNFFTGRKENVAHHLRNPRFELLRHDVVEPILLEVDRIYHLACPASPVHYKYNPIKTIKTNVMGTLNMLGLAKRIGARFLLTSTSEVYGDPLEHPQKETYWGHVNPIGVRSCYDEGKRTAETLTMDYHRGGGVEVRIARIFNTYGPRMCLDDGRVVSNFVAQALRRQPMTVYGNGKQTRSFQYVSDLVAGLMALMESDHIGPFNLGNPGEFTMLELAQVVKETIDPMATIEFKPNTADDPHMRKPDITKAKQLLHWEPKVSLKEGLPLMVTDFRQRISDE

SEQ ID NO: 95546 - protein, 274 aa, Setaria italica
  Transcript Sequence Number=SeqID_29572
  Gene Ontology: Mol. function=structural constituent of ribosome; Cellular component=ribonucleoprotein complex; Biological process =translation
  Homolog annotation: Hit_ID=Q69UI2; Match level="QueryCoverage=54%, HitCoverage=99%, E-value=4e-75, Identity=92%"; Hit description=40S ribosomal protein S13-1
  Pfam annotation: Domain name=Ribosomal_S13_N; Domain location=125 -183; Score=115.8; E_value=1.4e-31; Accession=PF08069.4; Description =Ribosomal S13S15 N-terminal domain
  Pfam annotation: Domain name=Ribosomal_S15; Domain location=188-274; Score=106.3; E_value=1e-28; Accession=PF00312.14; Description =Ribosomal protein S15
  Pfam module annotation: Pfam domain module=Ribosomal_S13_N::Ribosomal_ S15; Domain location=125-183::188-274
MIRGLAAHDSGKHLVLRRRAAASQLSLYCTAIGGIGAALMAAFMYHMLRRTDQLTGLWVVSIFSGLIWFIGICHGLFTNRPSSSSPATAFEPNFFTKLGYSMTLLLQQAPAPPSPETNSQPPPWGGMHSRGKGISSSALPYKRTAPTWLKTPASDVDEMITKAAKKGQMPSQIGVLLRDQHGIPLVHSVTGSKILRILKAHGLAPEIPEDLYFLIKKAVAIRKHLERNRKDKDSKFRLILVESRIHRLARYYKRTKKLPPTWKYESTTASTLVA

SEQ ID NO: 95547 - protein, 597 aa, Setaria italica
  misc_feature (392)..(392): Xaa can be any naturally occurring amino acid
  Transcript Sequence Number=SeqID_29573
  Pfam annotation: Domain name=MFS_1; Domain location=107-518; Score= -11.4; E_value=0.067; Accession=PF07690.8; Description=Major Facilitator Superfamily
MSEQQPLPQPRSSMREALEKEDKEKAAAAAAKDKAAVPKNGGGGGGGNGGGKNGGGNGGNNGGGPPQSGEETAREIQVVREAYRRETAAPAYVIPEEPPAMVESVGWYLYGFCSYFITHLLLPVLFPAIITQVAFPSSDFTPDPKYTVKGAICSVHEMSMYQRLTRHSIAIDGSRLSPLGWSGLSWAIGILIVAPILTQTAHHLDRGQYQSLILIAATSFGSFFCLLTGFFKTVWVFLFYILFIAGSIIVAEAVHTRNLGLMIRGLAAHDSGKHLVLRRRAAASQLSLYCTAIGGIGAALMAAFMYHMLRRTDQLTGLWVVSIFSGLIWFIGICHGLFTNRPSSSSPATAFEPNFFTKLGYSMTLLRYPQAIGSLVAVFLSSFATMCIFTSXGTLYAIGGVCIKPVLVLVLWILYFLFPLISLPLLHPIQIIIRADAVRMQLLGFIICLFVSGAGFYFKSHRWRAAHIIVIALVQSTANGILYSFGRILLLDASPPGKEGAFAVWYAFVRCTGAMIGYAAASAGPGRAGGSFAAAFLGSFLGIIVLIFGNVSNIGALKAAGHLKGMDDEKRMGGLGMEKGEGMGSAVADSGEGRGRV

SEQ ID NO: 95548 - protein, 154 aa, Setaria italica
  misc_feature (136)..(136): Xaa can be any naturally occurring amino acid
  Transcript Sequence Number=SeqID_29574
  Gene Ontology: Mol. function=1,3-beta-glucan synthase activity; Cellular component=1,3-beta-glucan synthase complex; Biological process=1,3-beta-glucan biosynthetic process
  Homolog annotation: Hit_ID=Q8W0J2; Match level="QueryCoverage=99%, HitCoverage=8%, E-value=2e-38, Identity=50%"; Hit description=1,3 -beta-glucan synthase component-like
GRPYRKIEGNEVEAKRFALIWNEIIQTFREEDIVSDKEVELLELPPVVWRIRVVRWPCFLLNNELLLALSQAKELVADDRAHWTRICNNEYRRCAVIEAYDSIRHLLLEIIEERTVEHVIVSQLFLAFDDAMKDGXFSEQYKLELLPEIHSYLI

SEQ ID NO: 95549 - protein, 101 aa, Setaria italica
  Transcript Sequence Number=SeqID_29575
LARSWSLSAAEISKALKVLSCGKAASDSPAVVATTEKRPSTLLDSNDHRQQGADAAMAVAQAGEAGSAMSPPVSPRANLDVKLLRAAGRGKTVGAWIKEQR

SEQ ID NO: 95550 - protein, 80 aa, Setaria italica
  Transcript Sequence Number=SeqID_29576
  Gene Ontology: Mol. function=cysteine-type peptidase activity; Cellular component=nucleus; Biological process=ubiquitin-dependent protein catabolic process
  Homolog annotation: Hit_ID=Q8H7M6; Match level="QueryCoverage=100%, HitCoverage=21%, E-value=4e-33, Identity=87%"; Hit description =Ubiquitin carboxyl-terminal hydrolase
CLADLFSQISNQKKKTGVIAPKRFIQRLKKQNEIFRSYMHQDAHEFLNFLLNELVDILEKEHNAARESLQNLSLQKNSNG

SEQ ID NO: 95551 - protein, 263 aa, Setaria italica
  misc_feature (17)..(17): Xaa can be any naturally occurring amino acid
  Transcript Sequence Number=SeqID_29577
  Gene Ontology: Mol. function=cysteine-type peptidase activity; Cellular component=nucleus; Biological process=ubiquitin-dependent protein catabolic process
  Homolog annotation: Hit_ID=Q8H7M6; Match level="QueryCoverage=97%, HitCoverage=69%, E-value=1e-132, Identity=90%"; Hit description =Ubiquitin carboxyl-terminal hydrolase
  Pfam annotation: Domain name=UCH; Domain location=1-256; Score=93.4; E_value=8.2e-25; Accession=PF00443.21; Description=Ubiquitin carboxyl-terminal hydrolase
TQHCCNLQDAHEFLNFXLNELVDILEKEHNAARESLQNLSLQKNSNGPINGLPNGCHKESAATWVHKCFQGILTNETRCLRCETVTDRDETFFDLSLDIEQNSSITSCLKNFSSTETLNAEDKFFCDKCCSLQEAQKRMKIKKPPNILVIHLKRFKYIEQLQRYKKLSYRVVFPLELKLLNTVDNSDLEYSLFAVVVHVGSGPNHGHYISLVKSHNHWLFFDDENVEMTDESMVQAFFGSPQEFSGNTDNGYILFYESLAEKS

SEQ ID NO: 95552 - protein, 95 aa, Setaria italica
  Transcript Sequence Number=SeqID_29578
  Homolog annotation: Hit_ID=B9SVB5; Match level="QueryCoverage=100%, HitCoverage=11%, E-value=2e-46, Identity=87%"; Hit description =Transferase, transferring glycosyl groups, putative
WGAVFFPKHWREFYAYMAARFTEDAKKNPVQIPRSRTNGWQASWKKFLIDMMYLRGYVSLYPNFPNQTSFSTNHMEPGAHISAKDNMLKHDKTDF

SEQ ID NO: 95553 - protein, 120 aa, Setaria italica
  Transcript Sequence Number=SeqID_29579
MSLSNLADDLTLHVAAVPDPFPRERFERPFFQLEVLSLGSLVGRTSQLAAESIPFSDMPGGRGGGKASSSSSSQPESSSTSSSQPTAASSLLNVSAELSLSGEPYANVSSLFLEGVYNPV

SEQ ID NO: 95554 - protein, 99 aa, Setaria italica
  Transcript Sequence Number=SeqID_29580
  Gene Ontology: Mol. function=protein serine/threonine kinase activity; Biological process=protein amino acid phosphorylation
  Homolog annotation: Hit_ID=Q5N8C4; Match level="QueryCoverage=71%, HitCoverage=6%, E-value=6e-25, Identity=80%"; Hit description =Putative receptor-like protein kinase 2
  Pfam annotation: Domain name=LRR_1; Domain location=48-70; Score =15.2; E_value=0.28; Accession=PF00560.25; Description=Leucine Rich Repeat
  Pfam annotation: Domain name=LRR_1; Domain location=72-93; Score =10.5; E_value=3; Accession=PF00560.25; Description=Leucine Rich Repeat
  Pfam module annotation: Pfam domain module=LRR_1::LRR_1; Domain location=48-70::72-93
  Subcellular localization annotation: CTP_CleavageSite=75; ConfidenceScore=5.30e-01
AVFCVCNSYFLFFNFTSVSHPLSVINSRIFDNNNFTGPIPTSLGQVTSLQIIRLDHNQFSGPVPDSIGNLSNLMELSLANNLLNGAVPDLTSLTQLDYV

SEQ ID NO: 95555 - protein, 151 aa, Setaria italica
  Transcript Sequence Number=SeqID_29581
ADVPDEGADAALEVGHGAARASAGAAHPLDVVPTGAIGAGPHLGHGGSLELQKVFRQPNRARASTRLISSAEDEDEAEPNRTQPWIGLRGRTTARKSAAKREGRDRGKCGWMDLHSTPVQWQHKADRRRRMNKTPLHEKNAPVQGSPSSAA

SEQ ID NO: 95556 - protein, 444 aa, Setaria italica
  Transcript Sequence Number=SeqID_29582
  Gene Ontology: Mol. function=protein phosphatase type 2A regulator activity; Cellular component=protein phosphatase type 2A complex; Biological process=signal transduction
  Homolog annotation: Hit_ID=Q0E2P1; Match level="QueryCoverage=100%, HitCoverage=87%, E-value=0.0, Identity=75%"; Hit description =Serine/threonine protein phosphatase 2A 55 kDa regulatory subunit B beta isoform
  Pfam annotation: Domain name=PP2A_B_N; Domain location=35-106; Score =177.5; E_value=3.9e-50; Accession=PF10586.1; Description=Serine -threonine phosphatase 2A subunit B al
  Pfam annotation: Domain name=PP2A_B_subs_rcg; Domain location=149 -209; Score=147.2; E_value=5.1e-41; Accession=PF10594.1; Description =Serine-threonine phosphatase 2A subun
  Pfam annotation: Domain name=WD40; Domain location=154-192; Score =10.5; E_value=2.2; Accession=PF00400.24; Description=WD domain, G -beta repeat
  Pfam annotation: Domain name=WD40; Domain location=204-243; Score =6.0; E_value=7.6; Accession=PF00400.24; Description=WD domain, G -beta repeat
  Pfam annotation: Domain name=WD40; Domain location=263-300; Score =8.7; E_value=3.7; Accession=PF00400.24; Description=WD domain, G -beta repeat
  Pfam annotation: Domain name=WD40; Domain location=51-90; Score=12.0; E_value=1.5; Accession=PF00400.24; Description=WD domain, G-beta repeat
  Pfam module annotation: Pfam domain module=PP2A_B_N::PP2A_B_subs _rcg::WD40::WD40::WD40::WD40; Domain location=35-106::149-209::154 -192::204-243::263-300::51-90
TGDRGGRVVLFERTDVKDHACRKDAEKADYSISRHPEFRYKTEFQSHEPEFDYLKSLEIEEKINQIKWCQAANGALFLLSTNDKTIKFWKVQEKKIKKVSEMNLDRSTAPSNGSPGGVGSLSPSLSNGNALKPGPFALLRMPVVVTSQETSLAASCRRVYAHAHDYHINSISNNSDGETFISADDLRINLWNLEISNQSFNIIDVKPTNMEDLTEVITSAEFHPTHCNTLAYSSSKGSIRLVDLRQSALCDTHSQIFEQHEAPGSRSFFTEIIASISDIKFSKDGRHILSRDYMTLKLWDVKMNSGPVATFQVHEYLRPKLCDLYENDSIFDKFECCQSGDGLQVATGSYSNIFRVFGVGTGSNEASTLEATRNPTRRQLQNPTRAARSLSTLTRAVRRGGESTGIDANGNSYDLSTKLLHLAWHPSENLIACAAANSLYMYYA

SEQ ID NO: 95557 - protein, 100 aa, Setaria italica
  Transcript Sequence Number=SeqID_29583
  Gene Ontology: Biological process=protein localization
SIRPEISEYSENISQPASVNWSEDITGEKAIRISGVIEKLNYNLRKAFNVDSMKSSFSTLSCPLFANGHHVTDLHFLIHTLGRDVPVQPYKLELRSYSCK

SEQ ID NO: 95558 - protein, 450 aa, Setaria italica
  Transcript Sequence Number=SeqID_29584
  Gene Ontology: Mol. function=protein serine/threonine kinase activity; Biological process=protein amino acid phosphorylation
  Homolog annotation: Hit_ID=C4P7S7; Match level="QueryCoverage=97%, HitCoverage=97%, E-value=0.0, Identity=86%"; Hit description=CBL -interacting protein kinase 25
  Pfam annotation: Domain name=NAF; Domain location=312-371; Score =104.0; E_value=5.1e-28; Accession=PF03822.6; Description=NAF domain
  Pfam annotation: Domain name=Pkinase; Domain location=13-267; Score =345.2; E_value=1.3e-100; Accession=PF00069.17; Description=Protein kinase domain
  Pfam annotation: Domain name=Pkinase_Tyr; Domain location=13-265; Score=59.6; E_value=1.1e-17; Accession=PF07714.9; Description =Protein tyrosine kinase
  Pfam module annotation: Pfam domain module=NAF::Pkinase::Pkinase_Tyr; Domain location=312-371::13-267::13-265
MAEQKGNVLMQKYEMGKMLGQGTFAKVYRARNTKTSESVAIKVIDKEKVMKVGLIDQIKREISVMKLVRHPNIVQLYEVMATKTKIYFVLEHVRGGELFNKVQRGRLKEDAARKYFQQLICAVDFCHSRGVYHRDLKPENLLLDENSNLKVSDFGLSALAECKRQDGLLHTTCGTPAYVAPEVINRKGYDGAKADIWSCGVILFVLLAGYLPFHDKNLMDMYKKIGKAEFKCPSWFSTDVRRLLQRILDPNPSTRISMEKIMENPWFRKGLNAKLLRYNLQTKDAPPLDMNADFDSVSTIANTESKQQEAKKPINMNAFDIISLSTGLDLSGMFEESDKKRESKFTSTNTSSTIISKIEDVAKSLRLKLTKKDGGLLKMEGSKPGRKGVMGIDAEIFEVSPNFHLVEIKKANGDTLEYQKVLNQEMRPALKDIVWAWQGEQPKQQQQPCC

SEQ ID NO: 95559 - protein, 44 aa, Setaria italica
  Transcript Sequence Number=SeqID_29585
DIFSSYPSLTTRHQYVTLHSLGALHSLGASRHVQDFMKSDSPTC

SEQ ID NO: 95560 - protein, 99 aa, Setaria italica
  Transcript Sequence Number=SeqID_29586
  Subcellular localization annotation: CTP_CleavageSite=74; ConfidenceScore=5.24e-01
TARSSLLRRFVLVPTLVGGGRRPATRPSFVVFSEQGESSHGAGAVSCQGVSGGPCTAAAMKIVRGQSSQAAVAVASLVSTFLGFSLAEPPCPTSRLPPC

SEQ ID NO: 95561 - protein, 171 aa, Setaria italica
  Transcript Sequence Number=SeqID_29587
  Gene Ontology: Mol. function=catalytic activity; Biological process =cellular metabolic process
  Homolog annotation: Hit_ID=B6T4L2; Match level="QueryCoverage=77%, HitCoverage=80%, E-value=1e-65, Identity=90%"; Hit description =Calcitonin peptide-receptor component protein
  Pfam annotation: Domain name=RNA_pol_III_C17; Domain location=1-124; Score=64.8; E_value=3.2e-16; Accession=PF09417.2; Description=RNA polymerase III subunit C17
MKILKENAGSLTNFEVLDFLRSRGAKIDPMGCLGAVAASECKVYEYLLKTPACNQTRESIYEFVKRSEGFRLADADKLNVINWRPSSAADAYAMIEECGRRFNRDERGETCNEDKRVQEFLDIVKEVLPPPPPKAEGEGEGEGEGAEAEAEAEAEAEAEGEGEAEAEATQE

SEQ ID NO: 95562 - protein, 606 aa, Setaria italica
  misc_feature (90)..(90): Xaa can be any naturally occurring amino acid
  Transcript Sequence Number=SeqID_29588
  Gene Ontology: Mol. function=peptidase activity; Cellular component =cytoplasm; Biological process=ubiquitin-dependent protein catabolic process
  Homolog annotation: Hit_ID=A3AF13; Match level="QueryCoverage=99%, HitCoverage=56%, E-value=0.0, Identity=76%"; Hit description =Ubiquitin carboxyl-terminal hydrolase 26
  Pfam annotation: Domain name=ubiquitin; Domain location=492-561; Score=13.6; E_value=0.013; Accession=PF00240.15; Description =Ubiquitin family
LSDQINELNASYVKSCEEYQSKKDSHLAYITERRQEVKSILTEAPVDPENDSYFWISTDWLRQWADNTAPPSSIDNGPIQCEHGKVPASXKVTSMKRLSSVAWQKLFSKYGGGPTLSNDDYCMECLKDGAKNAVSADVYRERKASLKNIAEAALAGSCPDGPSYFISKTWLTHWLRRKNTDITSDADSGPTSALRCCHGDLLPEHAPGAKRISVPESLWLFLYQTINEKKADDIMTFPSDCQPCEICNQELSDVASVEGNLRAVKLKQRQNHEKLISGKSFALHPGQKYYLVPSSWLSEWRAYVTATGKNISSLLEPQSLEAIVNSLICEKHSRLLQRPLDLVCKRGSITQKISNGDGLTMIPEYNWKLFSEEWSATPEKGISAEIAFSKSSQEKLPGSSEAMPIMDGDLDQSLDDANDDLGAREPYVRTDPEVCEDCIGERESCALVEKLNYQNEDIHVYLVRGKEAPKSIKEASKAVAVSDRRTSKRSRRTSSGTSISLKVSGSTSVYQLKLMIWESLGIVKENQKLHKGSVEIEDDFATLADKSIFPGDVLWVRDSEIYENRDIADEISDQKADMLQAEEGFRGTLLTSSVSAQLCQDIAFSE

SEQ ID NO: 95563 - protein, 542 aa, Setaria italica
  Transcript Sequence Number=SeqID_29589
  Gene Ontology: Mol. function=ubiquitin thiolesterase activity; Cellular component=cytoplasm; Biological process=ubiquitin-dependent protein catabolic process
  Homolog annotation: Hit_ID=A3AF13; Match level="QueryCoverage=100%, HitCoverage=49%, E-value=0.0, Identity=75%"; Hit description =Ubiquitin carboxyl-terminal hydrolase 26
  Pfam annotation: Domain name=UCH; Domain location=104-445; Score =195.4; E_value=1.5e-55; Accession=PF00443.21; Description=Ubiquitin carboxyl-terminal hydrolase
MSRHNTRNKNKRQRSDESSSPSAAVFKKIHSDGNISKSDIRQLYMVWKPLCQGCHGNTKDSPNCFCGLIPTANGVRKTGLWQKMQEIVRGLGPNPSRDLRDSTETPAGLTNLGATCYANSILQCLYMNSSFRSGIFSLELDILRKHPVLDQLAQLFAQLHSSKMAFIDSAPFIKALELDNGVQQDSHEFLTLFLSLLEQSLSHSKVPGARTIVQNLFCGSVSHVTRCSSCGKDSAASSKMEDFYELELNIKGLNNLEESLNDYFNEEALDGENQYFCESCQKRVDATRCIKLQSLPPVVNFQLKRYVFLPKTTTKKKISSTFSFPGQLDLGKRLSNPSSSCTYELAAILIHKGTGANSGHYVAHIKDESNGQWWEFDDETVSKLGLHPFGEKPGKASNKDDQKSQGMSAAGSIINNNSNNGHQEAAPTSTTAEMFSSTDAYMLMYKCTSRDVNATESNKNVEINESLPRHLSDQINELNASYVKSCEEYQSKKDSHLAYITERRQEVKSILTEAPVDPENDSYFWISTDWLRQWADNTAPPS

SEQ ID NO: 95564 - protein, 102 aa, Setaria italica
  Transcript Sequence Number=SeqID_29590
  Gene Ontology: Mol. function=protein serine/threonine kinase activity
  Homolog annotation: Hit_ID=B6SRN3; Match level="QueryCoverage=70%, HitCoverage=10%, E-value=2e-11, Identity=50%"; Hit description=WAK -like kinase
  Subcellular localization annotation: CTP_CleavageSite=24; ConfidenceScore=5.14e-01
MPLVFLLLSLIPHATFSATAAGVGGAGGGGCNRQRGGVTVPYPFGFSGDCPIILAFNQTTSTSLLQGSTAAAPYPVLSFNSTSSTFLVALSPLCNRTVPEAK

SEQ ID NO: 95565 - protein, 184 aa, Setaria italica
  Transcript Sequence Number=SeqID_29591
IIYKNLWIDAERANCALKYQLKQTCMEIDLESSRAHIGGGSRIPSFHVCDTGAHPCSSNGSAITSPLMLEDCPGGRNSHNLLYADHIQSGESSVLSSSKGHIPVPKNTEDEYFLSGLEETGVHLHAHSGLQMASNRAHRGLDASTSDGMRSLSHITGRDGISCGSCGFGSSDWEHVLKEEIGST

SEQ ID NO: 95566 - protein, 191 aa, Setaria italica
  Transcript Sequence Number=SeqID_29592
  Gene Ontology: Mol. function=ATPase activity, coupled to transmembrane movement of substances; Cellular component=integral to membrane; Biological process=transport
  Homolog annotation: Hit_ID=A1KXD8; Match level="QueryCoverage=91%, HitCoverage=13%, E-value=1e-91, Identity=93%"; Hit description =Putative MDR-like P-glycoprotein
  Pfam annotation: Domain name=ABC_membrane; Domain location=1-187; Score=-33.0; E_value=0.04; Accession=PF00664.15; Description=ABC transporter transmembrane region
YLEAVLRQDVGFFDTDARTGDVVFSVSTDTLLVQDAIGEKVGNFIHYLATFLAGLVVGFVSAWRLALLSIAVIPGIAFAGGLYAYTLTGLTSKSRDSYANAGIIAEQAIAQVRTVYSYVGETKALNSYSEAIQNTLKLGYKAGMAKGLGIGCTYGIACMSWALVFWYAGVFIRNWPSTSIGWVKVPFLLCS

SEQ ID NO: 95567 - protein, 76 aa, Setaria italica
  Transcript Sequence Number=SeqID_29593
AAAAAPASPADEGSDGEAEEGGGRAFIDFFARADARQRQRRASSPVVSSSCLTDASHEQHGREQETTSRGRGGALP

SEQ ID NO: 95568 - protein, 74 aa, Setaria italica
  Transcript Sequence Number=SeqID_29594
  Homolog annotation: Hit_ID=B6U3S0; Match level="QueryCoverage=100%, HitCoverage=33%, E-value=2e-16, Identity=62%"; Hit description=SLD5
DDFADSGVDDLVVSLYQMDLDRTLFLLRSYLRLRLQKIKKYTMHISRSDDLLSQLSLQERRFAKSCAEIMEKHL

SEQ ID NO: 95569 - protein, 140 aa, Setaria italica
  misc_feature (104)..(104): Xaa can be any naturally occurring amino acid
  Transcript Sequence Number=SeqID_29595
  Homolog annotation: Hit_ID=B6U3S0; Match level="QueryCoverage=70%, HitCoverage=41%, E-value=3e-31, Identity=75%"; Hit description=SLD5
  Pfam annotation: Domain name=Sld5; Domain location=16-133; Score= -9.0; E_value=1.8e-06; Accession=PF05916.3; Description=Synthetic lethal mutants of dpb11-1 five
MSSWDDDESAAASAAEATTTDVELLKRAWRNEKAAPEILRFDSPLVSRVREQIQLLEETLDDFADSGVDDLVVSLYQMDLDRTLFLLRSYLRLRLQKFDYLLAXIEKYTMHISRSDDLLKTGLVRLDKEVDRLRLKKLDY

SEQ ID NO: 95570 - protein, 108 aa, Setaria italica
  Transcript Sequence Number=SeqID_29596
  Gene Ontology: Cellular component=nucleus; Biological process=DNA replication
  Homolog annotation: Hit_ID=B6U3S0; Match level="QueryCoverage=100%, HitCoverage=49%, E-value=1e-52, Identity=92%"; Hit description=SLD5
LSQLSLQERRFAKSCAEIMEKHLEQSVLSKLPYGYDSVTRQSLSSTEDDMVPEPQLGTFVFCKTKSDVGAFQLDDIGEEVVDLVADDLYILRYKSIKGLVEGGRIDLI

SEQ ID NO: 95571 - protein, 214 aa, Setaria italica
  misc_feature (117)..(117): Xaa can be any naturally occurring amino acid
  Transcript Sequence Number=SeqID_29597
  Homolog annotation: Hit_ID=B6U3S0; Match level="QueryCoverage=71%, HitCoverage=66%, E-value=3e-51, Identity=71%"; Hit description=SLD5
  Pfam annotation: Domain name=Sld5; Domain location=27-213; Score =99.7; E_value=1e-26; Accession=PF05916.3; Description=Synthetic lethal mutants of dpb11-1 five
MAAVDTFLFTSESVNEGHPDKSAVASAAEAATTDVELLKRAWRNEKAVPEILRFDSPLVSRVREQIQLLEETLDDFADSGVDDLVVSLYQMDLDRTLFLLRSYLRLRLQKFDYLLAXIEKYTMHISRSDDLLSRLSLQECRFAKSCSEIMEKHLEQSVLSKLPYGYDSVTRQSLSSTEDDMGIYPSLDLPNFGVPCPVAVLLLSFAASVITYFA

SEQ ID NO: 95572 - protein, 219 aa, Setaria italica
  Transcript Sequence Number=SeqID_29598
  Gene Ontology: Mol. function=3'-5' DNA helicase activity; Cellular component=nucleus; Biological process=DNA replication
  Homolog annotation: Hit_ID=B6U3S0; Match level="QueryCoverage=90%, HitCoverage=90%, E-value=9e-87, Identity=81%"; Hit description=SLD5
  Pfam annotation: Domain name=Sld5; Domain location=16-219; Score =175.7; E_value=1.4e-49; Accession=PF05916.3; Description=Synthetic lethal mutants of dpb11-1 five
MSSWDDDESAAASAAEATTTDVELLKRAWRNEKAAPEILRFDSPLVSRVREQIQLLEETLDDFADSGVDDLVVSLYQMDLDRTLFLLRSYLRLRLQKIKKYTMHISRSDDLLSQLSLQERRFAKSCSEIMEKHLEQSVLSKLPYGYDSVTRQSLSSTEDDMVPEPQLDTFVFCKTKSDVGAFQLDDIGEEVVDLVANDLYVLRYKSIKGLVEGGQIDLI

SEQ ID NO: 95573 - protein, 286 aa, Setaria italica
  Transcript Sequence Number=SeqID_29599
  Gene Ontology: Mol. function=translation initiation factor activity; Cellular component=eukaryotic translation initiation factor 2B complex; Biological process=cellular metabolic process
  Homolog annotation: Hit_ID=Q2QQD9; Match level="QueryCoverage=94%, HitCoverage=71%, E-value=1e-145, Identity=93%"; Hit description =Initiation factor 2 subunit family protein, expressed
  Pfam annotation: Domain name=IF-2B; Domain location=1-274; Score =258.6; E_value=1.5e-74; Accession=PF01008.9; Description=Initiation factor 2 subunit family
EAAEAVAAIMALAAVIRSSRATTMMELEIELKKASDKLKSWDATSISLSAACDLFMRFVTRTSHLEHEKFDAAKSRLIERGEKFGEISLKARKTIAMLSQDFIYDGCTMLVHGYSRVVLEVLKLAASNRKLFRVLCTEGRPDRTGLRMSNALAALGIPVKVLIDSAVAYSMDEVDMVFVGADGVVESGGIINMMGTYQIALVAHSMNKPVYVAAESYKFARLYPLDQKDMTPAHRPIDFGVPVPTGVEVETSARDYTPPQYLTLLLTDLGVLTPSVVSDELIQLYL

SEQ ID NO: 95574 - protein, 39 aa, Setaria italica
  Transcript Sequence Number=SeqID_29600
PLLESSTLHVRYILSSPMWVSAKMRLVRCYINQCGICEV

SEQ ID NO: 95575 - protein, 218 aa, Setaria italica
  Transcript Sequence Number=SeqID_29601
  Gene Ontology: Mol. function=protein binding; Cellular component =signalosome; Biological process=red or far red light signaling pathway
  Homolog annotation: Hit_ID=B6TEU8; Match level="QueryCoverage=100%, HitCoverage=65%, E-value=1e-114, Identity=90%"; Hit description=COP9 signalosome complex subunit 6a
KKVFPDFYVLGWYSTGSDVQDTDMQIHKALMDINESPVYLLLNPAINLSQKDLPVTIYESELHVIDGSPQLIFVRSNYTIETVEAERISVDHVAHLKPSDGGSAATQLAAHLTGIHSAIKMLNSRVRVIHQYLVAMQKGEIPVDNSLLRQVSSLVRRLPAMESQKFQDDFLMEYNDTLLMTYLAMFTNCSSTMNELVEKINTSYERPATRRGGRGAFM

SEQ ID NO: 95576 - protein, 44 aa, Setaria italica
  Transcript Sequence Number=SeqID_29602
GWSGDEQFSWTRVSDITSVVFDDQTLGCLSSQISYIYRFIVLFR

SEQ ID NO: 95577 - protein, 122 aa, Setaria italica
  Transcript Sequence Number=SeqID_29603
  Gene Ontology: Mol. function=phosphatase activity; Biological process= metabolic process
  Homolog annotation: Hit_ID=B6TXH8; Match level="QueryCoverage=90%, HitCoverage=40%, E-value=5e-37, Identity=70%"; Hit description =Phosphatase phospho1
  Pfam annotation: Domain name=Put_Phosphatase; Domain location=8-122; Score=14.3; E_value=4.8e-11; Accession=PF06888.4; Description =Putative Phosphatase
MAASNGAPLVVFDFDKTIVDCDSDNWVVDSLGATRRFDDLLRHLPWNHAIDAMMGELHAEGRTAEDVAACLRAAPLSPHVAAAIESAHARGCELRVLSDANAFFIETVLAHHGLAGYFSGTD

SEQ ID NO: 95578 - protein, 75 aa, Setaria italica
  Transcript Sequence Number=SeqID_29604
PTWAAIILFNCARQDSNLRPLALILWACLVAWMEESSLARTSQPGSPEPGLIHAGALCLVACSHEPGSSENLFGC

SEQ ID NO: 95579 - protein, 88 aa, Setaria italica
  Transcript Sequence Number=SeqID_29605
  Homolog annotation: Hit_ID=Q67UH7; Match level="QueryCoverage=78%, HitCoverage=17%, E-value=6e-13, Identity=56%"; Hit description =Mitochondrial transcription termination factor-like
  Subcellular localization annotation: CTP_CleavageSite=70; ConfidenceScore=5.26e-01
RLSLSTNAAAAAATPPTGFLANDYLVASCGLTPAQAQKASKYVSRLSSPVKPDAVRAFLAGIGLAEADVAAAIVSYPPLLSCKVDENP

SEQ ID NO: 95580 - protein, 146 aa, Setaria italica
  Transcript Sequence Number=SeqID_29606
  Pfam annotation: Domain name=Methyltransf_16; Domain location=1-114; Score=-42.1; E_value=0.00045; Accession=PF10294.1; Description =Putative methyltransferase
GLSRLGLTDLVLTDIAPVLPALRRNLRRNRLHLPRAPRLAQLHWNCPAHLATLATPRRFDLVVAADVVYVQESVPHLIAAMDALADAERGVVLLGYQIRSPEAHQAFWDSVPSAFPVIEKVAREHLDPDYAYEESDVYILRRRPRQ

SEQ ID NO: 95581 - protein, 50 aa, Setaria italica
  Transcript Sequence Number=SeqID_29607
AGKAALGFSLLLNLVLPGSCLGIRAVCKSCYMIFSQYILVVLNHSLLSCR

SEQ ID NO: 95582 - protein, 81 aa, Setaria italica
  Transcript Sequence Number=SeqID_29608
  Subcellular localization annotation: CTP_CleavageSite=33; ConfidenceScore=5.55e-01
RIQTRCYDQHSSSVSVHYGKSSRKKNKTSTTASLQRVKSSLTNREPLCIPKVDLCSSGNNHLKFCYKGRNTRSILQAATRH

SEQ ID NO: 95583 - protein, 77 aa, Setaria italica
  Transcript Sequence Number=SeqID_29609
  Homolog annotation: Hit_ID=Q6ZCP9; Match level="QueryCoverage=100%, HitCoverage=11%, E-value=3e-29, Identity=81%"; Hit description =Pentatricopeptide (PPR) repeat-containing protein-like
GIAGISFDAATTTMSLPIITLDANTEVVLRNLVAYEAVAVRGPLVLARYTELMNGIIDTARDVKILRQGGVVVNQLK

SEQ ID NO: 95584 - protein, 270 aa, Setaria italica
  misc_feature (223)..(223): Xaa can be any naturally occurring amino acid
  misc_feature (256)..(256): Xaa can be any naturally occurring amino acid
  Transcript Sequence Number=SeqID_29610
  Homolog annotation: Hit_ID=Q6ZCP9; Match level="QueryCoverage=92%, HitCoverage=38%, E-value=2e-53, Identity=42%"; Hit description =Pentatricopeptide (PPR) repeat-containing protein-like
  Pfam annotation: Domain name=DUF247; Domain location=1-266; Score= -94.7; E_value=1.2e-06; Accession=PF03140.7; Description=Plant protein of unknown function
ANHQDDGYDIEEQPVDGGDAEDEEQKPAAGWEYIKQLLVTIGGMASGGRIRYVTKPIAFVVKAPWKMLTVVPGFSAMKQPVEAFFMSGADGSTTNPRDPSTSAAGYLTRPPLIEEIMIPSVSELVNVGIKFLPTAGDLSTVSFDAKTATFSLPVVTLDSNTEVVLRNLVAYEAAAASGPLVLARYTELMNGIIDTGEDVALLRRGGVVLNRMKSDGEVAKLWXGMTRSVRLTKVASMDRAVEEVNRYYNSRWRVKXKRFMRKYVFSSWQL

SEQ ID NO: 95585 - protein, 33 aa, Setaria italica
  Transcript Sequence Number=SeqID_29611
  Pfam annotation: Domain name=L15; Domain location=1-27; Score=16.7; E_ value=0.031; Accession=PF00256.15; Description=Ribosomal protein L15
VLPSKPIVVKAKLISKVAEKKIKAAGGAVVLTA

SEQ ID NO: 95586 - protein, 145 aa, Setaria italica
  Transcript Sequence Number=SeqID_29612
  Gene Ontology: Mol. function=structural constituent of ribosome; Cellular component=ribonucleoprotein complex; Biological process =translation
  Homolog annotation: Hit_ID=Q9LR33; Match level="QueryCoverage=100%, HitCoverage=100%, E-value=1e-58, Identity=78%"; Hit description=60S ribosomal protein L27a-2
  Pfam annotation: Domain name=L15; Domain location=107-139; Score =40.2; E_value=8.4e-09; Accession=PF00256.15; Description=Ribosomal protein L15
MTTSLKKNRKKRGHVSAGHGRIGKHRKHPGGRGNAGGMHHHRILFDKYHPGYFGKVGMRYFHKLRNKFYCPSVNVERLWSMVPADKAAEAGGDKAPLVDVTQFGYFKVLGKGMLPPKPIVVKAKLISKVAEKKIKAAGGAVVLTA

SEQ ID NO: 95587 - protein, 145 aa, Setaria italica
  Transcript Sequence Number=SeqID_29613
  Gene Ontology: Mol. function=structural constituent of ribosome; Cellular component=ribonucleoprotein complex; Biological process =translation
  Homolog annotation: Hit_ID=Q9MAW6; Match level="QueryCoverage=100%, HitCoverage=100%, E-value=7e-60, Identity=79%"; Hit description=60S ribosomal protein L27a
  Pfam annotation: Domain name=L15; Domain location=107-139; Score =43.2; E_value=1e-09; Accession=PF00256.15; Description=Ribosomal protein L15
MTTRFKKNRKKRGHVSAGHGRIGKHRKHPGGRGNAGGMHHHRILFDKYHPGYFGKVGMRYFHKLRNKFYCPAVNVERLWSMVPAEKAAEAGGDKAPQIDVTQFGYFKVLGKGKLPSKPIVVKAKLISKVAEKKIKAAGGAVVLTA

SEQ ID NO: 95588 - protein, 83 aa, Setaria italica
  Transcript Sequence Number=SeqID_29614
  Gene Ontology: Cellular component=chloroplast envelope
  Homolog annotation: Hit_ID=Q6K999; Match level="QueryCoverage=86%, HitCoverage=14%, E-value=2e-21, Identity=72%"; Hit description =Cticosapeptide/Phox/Bem1p (PB1) domain-containing protein-like
PPRHPRLPTAAMAESGDSSPHSAAATDDTHHEGSDASAAAAAPPLPPAKVRLMVSYGGRIQPRPHDNQLAYVNGETKILSLER

SEQ ID NO: 95589 - protein, 171 aa, Setaria italica
  Transcript Sequence Number=SeqID_29615
  Gene Ontology: Mol. function=protein serine/threonine kinase activity; Cellular component=chloroplast envelope; Biological process=protein amino acid phosphorylation
  Homolog annotation: Hit_ID=Q6K999; Match level="QueryCoverage=67%, HitCoverage=22%, E-value=8e-39, Identity=76%"; Hit description =Cticosapeptide/Phox/Bem1p (PB1) domain-containing protein-like
  Pfam annotation: Domain name=PB1; Domain location=56-157; Score=68.4; E_value=2.6e-17; Accession=PF00564.16; Description=PB1 domain
  Subcellular localization annotation: CTP_CleavageSite=43; ConfidenceScore=5.11e-01
LTSPLSLLAPPIPHSRWPRLAPRRWGSLGAGPAAPPLPPAKVRLMVSYGGRIQPRPHDNQLAYVNGETKILSLERPLRFADFAARLAALAGNMGDICIKYQLPGEDLDALVSVTNDEDLEHLVLEYDRLHLLRPAPGSGGGSNRGSTLRLRVFLFPVQSPPPPSPPAGLLE

SEQ ID NO: 95590 - protein, 71 aa, Setaria italica
  misc_feature (69)..(69): Xaa can be any naturally occurring amino acid
  Transcript Sequence Number=SeqID_29616
IEGQSHLAMVPFCLYCVRVRLVQCKRVTDTPKGVRNVGRDFYFDIKCIVVLLILSYWGWGTNRCQQPPXSS

SEQ ID NO: 95591 - protein, 45 aa, Setaria italica
  Transcript Sequence Number=SeqID_29617
GYLSQISGHMTMLTVGKWERLPWPVTEGPSCYPNNIIMHFLTRNP

SEQ ID NO: 95592 - protein, 98 aa, Setaria italica
  Transcript Sequence Number=SeqID_29618
EDTRMLKILSKQRAQRNWSKVRKFVMYTWGPSNLDPTDRSGKWPEASVMDSLHGSFHKRRKPIRRGTSSGSKPKKPADMAIEIERVGEMQQPSSSRQP

SEQ ID NO: 95593 - protein, 100 aa, Setaria italica
  misc_feature (20)..(20): Xaa can be any naturally occurring amino acid
  Transcript Sequence Number=SeqID_29619
  Gene Ontology: Mol. function=DNA (cytosine-5-)-methyltransferase activity; Biological process=DNA methylation
  Homolog annotation: Hit_ID=O65343; Match level="QueryCoverage=100%, HitCoverage=6%, E-value=1e-46, Identity=88%"; Hit description =Cytosine-specific methyltransferase
KQQTGEWISGCSKRGASWSXNGDGHVTRKRPRRAAACSDFKEKSIRLSEKTSVVKVKKNRMEEEEIDAVNLTKLGPENPPPCRKLIDFILHDAEGNPQPF

SEQ ID NO: 95594 - protein, 627 aa, Setaria italica
  misc_feature (8)..(8): Xaa can be any naturally occurring amino acid
  Transcript Sequence Number=SeqID_29620
  Gene Ontology: Mol. function=nucleic acid binding; Cellular component= nucleus; Biological process=jasmonic acid mediated signaling pathway
  Homolog annotation: Hit_ID=Q10EL1; Match level="QueryCoverage=100%, HitCoverage=81%, E-value=0.0, Identity=79%"; Hit description=Zinc finger CCCH domain-containing protein 24
  Pfam annotation: Domain name=Ank; Domain location=1-37; Score=34.5; E_ value=4.2e-07; Accession=PF00023.22; Description=Ankyrin repeat
  Pfam annotation: Domain name=zf-CCCH; Domain location=181-206; Score =26.2; E_value=0.00014; Accession=PF00642.16; Description=Zinc finger C-x8-C-x5-C-x3-H type (and similar)
  Pfam module annotation: Pfam domain module=Ank::zf-CCCH; Domain location=1-37::181-206
DGTTALHXCAASGGSRTAVEAVKLLLGAGADADATDDSGRRPADVISVLPKMFDAKFALQDLLGCPKSEHGMLRVVTRSTNWISSPVSSPTAEDARSPSAAVMMTTKFADLPRVATSEKKEYPVDPSLPDIKNSIYASDEFRMYSFKIRPCSRAYSHDWTECPFVHPGENARRRDPRKYHYSCVPCPDFRKGVCRRGDMCEYAHGVFECWLHPAQYRTRLCKDGTSCNRRVCFFAHTTDELRPLYVSTGSAVPSPRASATAAMEMAAAMGLMPGSPSSVSAVMSPFTPPMSPSGNGMPPSLGWQQPNVPTLHLPGSSLQSSRLRTSLSARDMPADDYSLMQDLDSQLMNDLCYSRLSSSTGNHSARTKSLNPSNLDDLFSAEMVSSPRYSNADQGAMFSPSHKAAILNQFQQQQQALLSPINTGVYSPKAVDNQQLPSHSSLLQASLGMSSPGRMSPRCVESGSPMNSHLAAALVQREKQQQQQQTMRSLSSRDLGPSAARASALVGSPLSSSWSKWGSPSGTPDWGVNGEELGKLRRSSSFELRSGGDDPDLSWVHTLVKESPPEKQVTMAESINSVGPSPLMPPGMNNSEGSGLNTQLDGHDQAAVIGALLEQMQLDQQVGSLAT

SEQ ID NO: 95595 - protein, 72 aa, Setaria italica
  Transcript Sequence Number=SeqID_29621
  Gene Ontology: Mol. function=glycerone kinase activity; Biological process=glycerol metabolic process
  Homolog annotation: Hit_ID=Q10DU3; Match level="QueryCoverage=100%, HitCoverage=14%, E-value=2e-25, Identity=81%"; Hit description=3,4 -dihydroxy-2-butanone kinase, putative, expressed
DDCALPPTQGIAGRRGLAGTILVNKVAGAAADAGLPLEKVAEQARHASELVGTMGVALSVCTLPGQETSDSV

SEQ ID NO: 95596 - protein, 153 aa, Setaria italica
  misc_feature (7)..(7): Xaa can be any naturally occurring amino acid
  misc_feature (10)..(10): Xaa can be any naturally occurring amino acid
  Transcript Sequence Number=SeqID_29622
  Gene Ontology: Mol. function=nucleoside-triphosphatase activity; Cellular component=membrane; Biological process=transport
  Homolog annotation: Hit_ID=Q2R1Y0; Match level="QueryCoverage=100%, HitCoverage=10%, E-value=9e-66, Identity=79%"; Hit description=ABC transporter, putative, expressed
PPPETYXLFXDIILLSEGYIVYHGPRENILEFFESAGFRCPERKGVADFLQEVTSKKDQQQYWYLDQDQYRYVSVAEFAERFRSSHVGQLMHKELQTPFDKSKTHPAALTTRKYGLSSWESFKAVMSREQLLMKRNSFIYIFKVTQLIILALM

SEQ ID NO: 95597 - protein, 219 aa, Setaria italica
  Transcript Sequence Number=SeqID_29623
  Gene Ontology: Mol. function=NAD+ ADP-ribosyltransferase activity; Cellular component=nucleus
QPSLWYKSSVKAVPSDPARMTAAEQLSLDGTSRDCSLTLSGNHFDSYAPNAVAEHSAALSTKGCSALPTDMVPKGHDCPAQSAVPKFSSSAGAKSPGSQGVEPKCRDSPSRQVMSLGNSATRCARYQDPIVTRMPPISRDGLLRMTSGISASPGMEVCNSVAPTTGLPGCASLARINTSKSHGIMAPGFAPSPKGCESVVPSLALGNSKGVGAKCLNSA

SEQ ID NO: 95598 - protein, 188 aa, Setaria italica
  Transcript Sequence Number=SeqID_29624
  Gene Ontology: Mol. function=hydrolase activity
  Homolog annotation: Hit_ID=B9SJW6; Match level="QueryCoverage=100%, HitCoverage=31%, E-value=1e-74, Identity=69%"; Hit description =Catalytic, putative
VTLASSVDYTTSNSSLKLLLPLAHPAQALNVPAVPLGTLLAAAYPWASGPPYLFSWLNPQISAQDMMHPELLSKLVFNNFCTVPAKVVLQLTTAFREGGLCNRNGTFSYKDHLRECQTPVLALAGDKDLICPPEAVYETAKLIPKHKVKYRVFGKPQGPHYAHYDLVGGRLAIDEVYPCIIEFLSRHD

SEQ ID NO: 95599 - protein, 378 aa, Setaria italica
  Transcript Sequence Number=SeqID_29625
  Gene Ontology: Mol. function=hydrolase activity
  Homolog annotation: Hit_ID=B9SJW6; Match level="QueryCoverage=85%, HitCoverage=56%, E-value=1e-114, Identity=61%"; Hit description =Catalytic, putative
  Pfam annotation: Domain name=Abhydrolase_1; Domain location=115-362; Score=-1.6; E_value=0.0078; Accession=PF00561.12; Description =alphabeta hydrolase fold
SGSVTFQDASGSIQPLDKQGAFEAASLQSSSGYASDCDDLGIVALDEPPLLAELSNFFDRISKLMEEAATNGNFHEITEKVSVLSEMVESSTIIGPVREESLRLLKNFQDQLDSWERFVSTQMDLTSEYNWDFDHYLEEDIPAAVEYIRQHSKTKDGKLLAIGHSMGGILLYAMLSRSGFEGVPSNLAAIVTLASSVDYTTSNSSLKLLLPLAHPAQALNVPAVPLGTLLAAAYPWASGPPYLFSWLNPQISAQDMMHPELLSKLVFNNFCTVPAKVVLQLTTAFREGGLCNRNGTFSYKDHLRECQTPVLALAGDKDLICPPEAVYETAKLIPKHKVKYRVFGKPQGPHYAHYDLVGGRLAIDEVYPCIIEFLSRHD

SEQ ID NO: 95600 - protein, 162 aa, Setaria italica
  Transcript Sequence Number=SeqID_29626
  Gene Ontology: Mol. function=protein serine/threonine kinase activity; Cellular component=plasma membrane; Biological process =protein amino acid phosphorylation
  Homolog annotation: Hit_ID=B9TAC6; Match level="QueryCoverage=99%, HitCoverage=51%, E-value=3e-37, Identity=33%"; Hit description =Receptor protein kinase CLAVATA1, putative
  Pfam annotation: Domain name=LRR_1; Domain location=119-141; Score =11.1; E_value=2.3; Accession=PF00560.25; Description=Leucine Rich Repeat
  Pfam annotation: Domain name=LRR_1; Domain location=143-162; Score =1.2; E_value=1.8e+02; Accession=PF00560.25; Description=Leucine Rich Repeat
  Pfam annotation: Domain name=LRR_1; Domain location=23-45; Score=2.0; E_value=1.3e+02; Accession=PF00560.25; Description=Leucine Rich Repeat
  Pfam annotation: Domain name=LRR_1; Domain location=47-69; Score =13.7; E_value=0.74; Accession=PF00560.25; Description=Leucine Rich Repeat
  Pfam annotation: Domain name=LRR_1; Domain location=71-93; Score =12.8; E_value=1.1; Accession=PF00560.25; Description=Leucine Rich Repeat
  Pfam annotation: Domain name=LRR_1; Domain location=95-117; Score =6.7; E_value=16; Accession=PF00560.25; Description=Leucine Rich Repeat
  Pfam module annotation: Pfam domain module=LRR_1::LRR_1::LRR_1::LRR _1::LRR_1::LRR_1; Domain location=119-141::143-162::23-45::47-69::71 -93::95-117
TGLNLAGMNLSGTIPDDILGLTGLTSIVLQSNAFEHELPQALVSIPTLQELDVSDNNFAGHFPAGLGACASLTYLNASGNNFAGPLPADIANASALETLDFRGGYFSGTIPKSYGKLRKLKFLGLSGNNLGGALPAELFDMSALEQLVIGYNEFSGAIPAAK

SEQ ID NO: 95601 - protein, 110 aa, Setaria italica
  misc_feature (45)..(45): Xaa can be any naturally occurring amino acid
  Transcript Sequence Number=SeqID_29627
  Homolog annotation: Hit_ID=Q5JMT5; Match level="QueryCoverage=96%, HitCoverage=19%, E-value=7e-41, Identity=75%"; Hit description=CBS domain-containing protein-like
HLPVVEHGEVIAMLDITKFLYDAISRMEMAAEQGSLIATAIEGVXRQWGNDFPGPHAFMESLREQMFKPSLSTIITENSSVPVVSPSDPVILAAKKMREHRVNSMFPHSF

SEQ ID NO: 95602 - protein, 84 aa, Setaria italica
  misc_feature (59)..(59): Xaa can be any naturally occurring amino acid
  Transcript Sequence Number=SeqID_29628
AGGAFGLIDRRGRRRMDCFSLAFHGGQLTQPDLRRCLDYAAVCEVEDLHLRVDGGAGRXARGRGTRGRGMLTVHFPVGSRLLAR

SEQ ID NO: 95603 - protein, 286 aa, Setaria italica
  Transcript Sequence Number=SeqID_29629
  Homolog annotation: Hit_ID=Q9LNS7; Match level="QueryCoverage=24%, HitCoverage=11%, E-value=7e-22, Identity=69%"; Hit description =T20H2.23 protein
ATVAGTAAVKRPRKEEEDEEDDDELDNVPIALSRAKKAGNASASKVQKEEEDDDEEDNLPISHSRAKKGNEKQKGTMNSSTKASKVKKQEVESDDDDFMPTSQKKNSNAKASKVKKLKDEDLEDLKEDKKRKKRAGVKEGARMIVVKGEKAKRERKVYDLPGQKHDPPTERDPLRIFYESLYEQVPTSDMAATWLMEWGLLPLDVARKVFEKKQGQKLKSPVKTTVSKRKPTSPTKTPASSAMKSVSAKKSAGKPTSQKKRKASSESDDDDDDFVAPKAKTKRQKA

SEQ ID NO: 95604 - protein, 165 aa, Setaria italica
  Transcript Sequence Number=SeqID_29630
RSPSLKSPEPSSPLDDPVRFHGAAPPPDRRKQDERTPRGTRRAGGQPGAQEERGGNAPEQARPRRNKSGGGRKRVGQRTGKRRRRRVVGRRRNPEVEFAPRLWGEERRRRRMLRWSPPNGFIAGRIEQLPSSEGEGARPVPSRTSTDPLGFASLRFRACAVPLVR

SEQ ID NO: 95605 - protein, 507 aa, Setaria italica
  misc_feature (19)..(19): Xaa can be any naturally occurring amino acid
  misc_feature (473)..(473): Xaa can be any naturally occurring amino acid
  Transcript Sequence Number=SeqID_29631
  Gene Ontology: Mol. function=protein serine/threonine kinase activity; Cellular component=plasma membrane; Biological process =protein amino acid phosphorylation
  Homolog annotation: Hit_ID=Q1SMZ9; Match level="QueryCoverage=51%, HitCoverage=25%, E-value=1e-77, Identity=55%"; Hit description =Protein kinase
  Subcellular localization annotation: CTP_CleavageSite=36; ConfidenceScore=5.44e-01
HDQRQQPSAVSSWLDSVPXRPPPPIPVEAEVPTSASASSVGVGAEERSARQSAATERRRSQQEEMERRRLQEEEVLRERRRSQEEEMGRERRRSQQEDEVEERVIRESSEAAERKREREKEEDDLEAYQIQLVLEMSARDNPEEMEIEVAKQLSLGFCPPQTSPAEVIAARYWNFNALTYDDKISDGFYDLFYVGNGPASVTMPSFSELRAQPFSHKVNWEAVLVHRGEDPVLMKLQQEALIMALDLQSRTSESVSNALVKRLASLVARHMGGIFDPESMSVKYQNMLNSLRSSIGSVVVPLGQLKIGLARHRALLFKVLADGLDVPCRLLKGRQYTGSDDGALNIVKFKDGREFIVDLVADPGTLIPSEGAENFTSDNHHLKKDDTTNLLGSSFSGASSSAYGSFEYELLDRRSTSSNVGASDTDGPTTNQTSNQQSMLSSSFEKLSVSTCTSGNKPIINESTNTDYIMVAXKNKEKSIAPVDSSSSSPSTSDMGSTPVLRRMEGE

SEQ ID NO: 95606 - protein, 185 aa, Setaria italica
  Transcript Sequence Number=SeqID_29632
  Gene Ontology: Mol. function=transcription regulator activity; Cellular component=nucleus; Biological process=regulation of transcription
MDRGLVHKSSPLVGEMGEAGHGWWSVNNLRPPFEQQHHPSLFMPSTTTTTTTAAPSSSSSPLHSFSSLLLSNHYPLPTTSTSPWHHDSSSTSSHGQQDSWSQLIQGGLATNGEEMYKEGQMLFPTTTVCSEAGGSGGSYLYSAATASHGSSTSDEIQLPWGSSVHQHHKALQQKSASSPRSSSIT

SEQ ID NO: 95607 - protein, 194 aa, Setaria italica
  Transcript Sequence Number=SeqID_29633
  Gene Ontology: Mol. function=protein serine/threonine kinase activity; Biological process=protein amino acid phosphorylation
  Homolog annotation: Hit_ID=Q7XTR9; Match level="QueryCoverage=89%, HitCoverage=16%, E-value=7e-80, Identity=83%"; Hit description =OSJNBa0008M17.16 protein
  Pfam annotation: Domain name=LRR_1; Domain location=119-141; Score =14.0; E_value=0.64; Accession=PF00560.25; Description=Leucine Rich Repeat
  Pfam annotation: Domain name=LRR_1; Domain location=143-165; Score =8.9; E_value=6; Accession=PF00560.25; Description=Leucine Rich Repeat
  Pfam annotation: Domain name=LRR_1; Domain location=167-189; Score =9.3; E_value=4.9; Accession=PF00560.25; Description=Leucine Rich Repeat
  Pfam module annotation: Pfam domain module=LRR_1::LRR_1::LRR_1; Domain location=119-141::143-165::167-189
MKPRLSGGGFLLVLLLLNSWRAVAQAPPPPQTDPVEAAAVNAILSKLGLSAPASWNISGNPCSGAATDDTQLDDNPAFNPAIKCDCSDRNNTLCHVIRFKINTLDAVGPIPEELRNLTHLRKLDLRKNYLTGPLPAFIGELTALEYITVGINALSGPIPKELGNLVNLVSLALGSNNFNGTLPDELGKIEQNFE

SEQ ID NO: 95608 - protein, 86 aa, Setaria italica
  Transcript Sequence Number=SeqID_29634
  Gene Ontology: Mol. function=binding
  Homolog annotation: Hit_ID=UPI0001A7B242; Match level="QueryCoverage =96%, HitCoverage=3%, E-value=1e-16, Identity=56%"; Hit description =binding
  Pfam annotation: Domain name=DRIM; Domain location=1-86; Score=10.4; E_value=7.2e-07; Accession=PF07539.4; Description=Down-regulated in metastasis
NIKNLIDIKTLREEMTTWAVSHDSLSILKDHRSRVVPLVIRVLTPKVRKLKLLGSRKHAGVSHRKAILRFLLQFDSNELQLFFSLL

SEQ ID NO: 95609 - protein, 110 aa, Setaria italica
  Transcript Sequence Number=SeqID_29635
  Gene Ontology: Mol. function=hydrolase activity
  Homolog annotation: Hit_ID=B6TJ32; Match level="QueryCoverage=92%, HitCoverage=30%, E-value=2e-33, Identity=63%"; Hit description =Catalytic/ hydrolase
PDRFYKYYLKVMFTNRKERMELLQGLLTSTMDAKIPVFQQKIMLLWGEEDKIFDIELAKKMKEQLGDNCFLHGIRKAGHLLHVERPCAYNRQLQRWLAYVNSPAGGDQAS

SEQ ID NO: 95610 - protein, 185 aa, Setaria italica
  Transcript Sequence Number=SeqID_29636
  Gene Ontology: Cellular component=chloroplast
  Homolog annotation: Hit_ID=B6TJX4; Match level="QueryCoverage=86%, HitCoverage=86%, E-value=6e-82, Identity=92%"; Hit description=SnRK1- interacting protein 1
MAPGALARHLLRRAPTPRLARPFAAKARASRRPQEPELPSEEENDFAGGEVAAPTEGISKPLAEVLKELGKRVPDSLVKTRVEDNGFAIKYIPWHIVNKILNIHAPEWSGEVRSIVYSSDGKSVSVVYRVTLHGIDAEIYREATGTASVDDTGYGDPVQKAEAMAFRRACARLGLGLHLYHEDMS

SEQ ID NO: 95611 - protein, 88 aa, Setaria italica
  Transcript Sequence Number=SeqID_29637
  Homolog annotation: Hit_ID=Q7XBV0; Match level="QueryCoverage=52%, HitCoverage=9%, E-value=2e-13, Identity=93%"; Hit description =Transposon protein, putative, CACTA, En/Spm sub-class, expressed
  Subcellular localization annotation: CTP_CleavageSite=82; ConfidenceScore=5.33e-01
AAAAAAAAAAASAAAGQGPPPPHPHPPPLHPHPPPPPPVPSPGILHSPSGFLNLLSPTPRSPYPLLSPGFQHPPPLTPNFPALSPLAG

SEQ ID NO: 95612 - protein, 109 aa, Setaria italica
  Transcript Sequence Number=SeqID_29638
MVQLWGCSFHVPTVRVLVVCVYTLLVVSCVLYLLPCSFCSEAAMMGFFRDTGVVSVGGRGGSRTGGLFQYQRLECLDEEVAPRSRWRWLPAALNGKVASPCLFHVKKVK

SEQ ID NO: 95613 - protein, 104 aa, Setaria italica
  Transcript Sequence Number=SeqID_29639
  Gene Ontology: Mol. function=protein serine/threonine kinase activity; Cellular component=integral to membrane; Biological process=protein amino acid phosphorylation
  Homolog annotation: Hit_ID=B9SM68; Match level="QueryCoverage=100%, HitCoverage=24%, E-value=2e-36, Identity=50%"; Hit description =Leucine-rich repeat receptor protein kinase EXS, putative
  Pfam annotation: Domain name=LRR_1; Domain location=32-54; Score=8.8; E_value=6.2; Accession=PF00560.25; Description=Leucine Rich Repeat
  Pfam annotation: Domain name=LRR_1; Domain location=56-78; Score =10.9; E_value=2.5; Accession=PF00560.25; Description=Leucine Rich Repeat
  Pfam annotation: Domain name=LRR_1; Domain location=8-30; Score=3.3; E_value=72; Accession=PF00560.25; Description=Leucine Rich Repeat
  Pfam annotation: Domain name=LRR_1; Domain location=80-102; Score =13.9; E_value=0.67; Accession=PF00560.25; Description=Leucine Rich Repeat
  Pfam module annotation: Pfam domain module=LRR_1::LRR_1::LRR_1::LRR _1; Domain location=32-54::56-78::8-30::80-102
PSLGALSNLTVFGAAATALSGPIPEELGNLVNLQTLALYDTAVSGSIPAALGGCVELRNLYLHMNKLTSPIPPELGRLQKLTSLLLWGNALSGKIPPELSNCSA

SEQ ID NO: 95614 - protein, 72 aa, Setaria italica
  Transcript Sequence Number=SeqID_29640
NLLKLVRLGQHHLKCIQLSINTNSIISSWFRTISEFGSWVKMVLKFRMTIQLHEKSFLCLGSLDLQDIQSSL

SEQ ID NO: 95615 - protein, 95 aa, Setaria italica
  misc_feature (91)..(91): Xaa can be any naturally occurring amino acid
  Transcript Sequence Number=SeqID_29641
WAGFEAVTLSLSQDPGNTAKAYECSAPAILNMSAEYNGSSEMGVGQQKAVRRRHLPRGPNGRFITTKGNQAATNGNSEVRSPMAVRCQATXRRLL

SEQ ID NO: 95616 - protein, 429 aa, Setaria italica
  misc_feature (15)..(15): Xaa can be any naturally occurring amino acid
  Transcript Sequence Number=SeqID_29642
  Gene Ontology: Mol. function=metal ion binding; Cellular component =nucleus; Biological process=regulation of transcription, DNA -dependent
  Homolog annotation: Hit_ID=Q6I576; Match level="QueryCoverage=98%, HitCoverage=49%, E-value=1e-164, Identity=67%"; Hit description =Squamosa promoter-binding-like protein 9
MQQIFSETLVNSPNXSLLLGKGAFFIHVNNMIFQVLKDGATLMGTRLDVQSPRIDYVYPTWFEAGKPVELILCGSSLDQPKFRSLLSFDGDYLKHDCYRLKSLDTFNCIDNGDLIVDSQHEIFRINITQSRPDIHGPAFVEVENMFGLSNFVPILFGSKQLCSELERIQDALSGSSDSSLFGELPGAPCDPCERRKLQMAAMSGFLTDIGWLIRKPAPDEFKNVLSSTNIQRWVCILKFLIRNDFMNVLEIIVKSMDNIMGSEVLSNLEKGRLEDHVTAFLGYVSHARNIIDCRANNDKETQLETRLISIDSPNQRSLGTSVPLANENAGAGGDNNMHSANAAYEEENVPLVTRDVSHRYCCQPDMNARWLNPSLVVKYPGGATRMRLGMTLVIATVLCFTACLVLFHPHGVGVLASPVKRYLSSDSTS

SEQ ID NO: 95617 - protein, 499 aa, Setaria italica
  Transcript Sequence Number=SeqID_29643
  Gene Ontology: Mol. function=metal ion binding; Cellular component =nucleus; Biological process=regulation of transcription, DNA -dependent
  Homolog annotation: Hit_ID=Q6I576; Match level="QueryCoverage=85%, HitCoverage=50%, E-value=1e-179, Identity=72%"; Hit description =Squamosa promoter-binding-like protein 9
  Pfam annotation: Domain name=SBP; Domain location=151-229; Score =154.7; E_value=2.8e-43; Accession=PF03110.6; Description=SBP domain
  Pfam annotation: Domain name=zf-NADH-PPase; Domain location=169-201; Score=13.8; E_value=0.015; Accession=PF09297.3; Description=NADH pyrophosphatase zinc ribbon domai
  Pfam module annotation: Pfam domain module=SBP::zf-NADH-PPase; Domain location=151-229::169-201
FVVDGDDSLVLPWDDDAAGIGAADPTEAAAPPLPAPMPQPVEVEAEPEPEPEAEAGPVLPPPPLRVQGIGRRVRKRDPRLVCPNYLAGMVPCACPEVDEMVAAAEVEDVAAEFLAGARKKTKTAARRGKAGAAGVGGVAGGTARAAAMEMKCQVPGCEADIRELKGYHRRHRVCLRCAHASAVILDGVQKRYCQQCGKFHVLLDFDEDKRSCRRKLERHNKRRRRKPDSKGLLDKEIDEQLDLSADVSADGELREENMEGTTSEMLETVLSNKVLDRGTPAGSEDVLSSPTCTQPSLQTEQSKSVVTFAASVEACVGAKQENAKLTTNSPIHDTKSAYSSSCPTGRISFKLYDWNPAEFPRRLRHQIFEWLASMPVELEGYIRPGCTILTVFVAMPQHMWDKLSDDAANLLRNLVNSPNSLLLGKGAFFIHVNNMIFQVLKDGATLMGTRLDVQSPRIDYVYPTWFEAGKPVELILCGSSLDQPKFRYKVPPLLILRKQ

SEQ ID NO: 95618 - protein, 99 aa, Setaria italica
  misc_feature (64)..(64): Xaa can be any naturally occurring amino acid
  Transcript Sequence Number=SeqID_29644
  Gene Ontology: Cellular component=nucleus; Biological process =regulation of transcription, DNA-dependent
  Homolog annotation: Hit_ID=Q7XVB8; Match level="QueryCoverage=89%, HitCoverage=17%, E-value=2e-35, Identity=83%"; Hit description =OSJNBa0072D21.8 protein
HKDIEADITSSQASIKKIHEHRRRRAFFLGFSQSPVEFINGLIASQSKVLKLVAGEANRNIERXKTRRFYNQPWVEDAVIRYLNRKPANEGPGGGAGGS

SEQ ID NO: 95619 - protein, 141 aa, Setaria italica
  Transcript Sequence Number=SeqID_29645
  Gene Ontology: Mol. function=transcription coactivator activity; Cellular component=nucleus; Biological process=regulation of transcription, DNA-dependent
  Homolog annotation: Hit_ID=Q7XVB8; Match level="QueryCoverage=85%, HitCoverage=23%, E-value=7e-53, Identity=81%"; Hit description =OSJNBa0072D21.8 protein
STKYLSLLLGNEASGSACYDVLVDIPFPLQKEMMAFLANTEKHKDIEACDEVISTSIKKIHEHLRRRAFFLGFSQSPVEFINALIASQSKDLKLVAGEANRNVERERRADFYNQPWVEDAVIRYLNRKPASEGPGGGAGGS

SEQ ID NO: 95620 - protein, 427 aa, Setaria italica
  misc_feature (29)..(29): Xaa can be any naturally occurring amino acid
  Transcript Sequence Number=SeqID_29646
  Gene Ontology: Mol. function=transcription coactivator activity; Cellular component=nucleus; Biological process=regulation of transcription, DNA-dependent
  Homolog annotation: Hit_ID=Q7XVB8; Match level="QueryCoverage=92%, HitCoverage=77%, E-value=0.0, Identity=93%"; Hit description =OSJNBa0072D21.8 protein
  Pfam annotation: Domain name=SWIB; Domain location=206-281; Score =92.7; E_value=1.3e-24; Accession=PF02201.10; Description=SWIBMDM2 domain
  Subcellular localization annotation: CTP_CleavageSite=13; ConfidenceScore=5.14e-01
TASAAAAYKASAAAAAVANSGGVDLTPAXRRNKKRKLPEKQLPDRVAALLPESALYTQLLEFEARVDAALARKKVDIQEALKTPPSLQRTLRIYVFNTFANQGPRAIPPPKNADPPTWSLKIIGRVLEDGAELDPASVVPKHNPVYPKFSQFFKRVTIALDPQLYPENPLIIWENARSAAQQEGFEVKRKGDKEFVANIRLEMNYNPEKFKLSQPLMEVLGVEVDTRARVIAALWQYIKAKKLQNPNDPSFFMCDPQLKKVFGEDKLKFAMLSQKISQHLSAPPPINLEHKIKLSGNGASASACYDVLVDVPFPLQKEMMAFLANTEKHKDIEACDDVISASIKKIHEHRRRRAFFLGFSQSPVEFINGLIASQSKDLKLVAGEANRNIEKERRADFYNQPWVEDAVIRYLNRKPASEGPGGGAGGS

SEQ ID NO: 95621 - protein, 53 aa, Setaria italica
  Transcript Sequence Number=SeqID_29647
ESNQTLAYDTYKNQLISHYAPLYLPLQTSLHGMALIFVVLPKQFSISAGVLSG

SEQ ID NO: 95622 - protein, 66 aa, Setaria italica
  Transcript Sequence Number=SeqID_29648
  Gene Ontology: Mol. function=oxidoreductase activity; Biological process=oxidation reduction
  Homolog annotation: Hit_ID=B6U9L0; Match level="QueryCoverage=84%, HitCoverage=16%, E-value=6e-10, Identity=55%"; Hit description =Leucoanthocyanidin dioxygenase
MAEDQAQPWKIPPIVQELATGVQEPPSRYVVREQDRPAAAAAATMPEPIPIVDLSRLTAADDDGGA

SEQ ID NO: 95623 - protein, 59 aa, Setaria italica
  Transcript Sequence Number=SeqID_29649
  Gene Ontology: Mol. function=translation release factor activity, codon specific; Cellular component=cytoplasm; Biological process =translational termination
  Homolog annotation: Hit_ID=Q9LPV8; Match level="QueryCoverage=98%, HitCoverage=13%, E-value=5e-24, Identity=87%"; Hit description =Eukaryotic peptide chain release factor subunit 1-2
  Pfam annotation: Domain name=eRF1_3; Domain location=1-59; Score= -4.1; E_value=0.00027; Accession=PF03465.7; Description=eRF1 domain 3
MFYSNFTNAELEVQEKMSLLEWFANEYKKFGCSLEFVTNKSQEGSQFCRGFGGIGGMLR

SEQ ID NO: 95624 - protein, 82 aa, Setaria italica
  misc_feature (30)..(30): Xaa can be any naturally occurring amino acid
  Transcript Sequence Number=SeqID_29650
  Gene Ontology: Mol. function=translation release factor activity, codon specific; Cellular component=cytoplasm; Biological process =translational termination
  Homolog annotation: Hit_ID=B9RGS5; Match level="QueryCoverage=84%, HitCoverage=19%, E-value=2e-30, Identity=88%"; Hit description =Eukaryotic peptide chain release factor subunit, putative
  Pfam annotation: Domain name=eRF1_3; Domain location=7-63; Score=8.3; E_value=3e-05; Accession=PF03465.7; Description=eRF1 domain 3
HLFLNFQLSIGGCITEKMSLLEWFANEYKXFGCSLEFVTNKSQEGSQFCRGFGGIGGMLRYQLDIRSFDELSDDDGLYEDSD

SEQ ID NO: 95625 - protein, 86 aa, Setaria italica
  Transcript Sequence Number=SeqID_29651
  Gene Ontology: Mol. function=translation release factor activity, codon specific; Cellular component=cytoplasm; Biological process =translational termination
  Homolog annotation: Hit_ID=B9RGS5; Match level="QueryCoverage=80%, HitCoverage=19%, E-value=3e-30, Identity=88%"; Hit description =Eukaryotic peptide chain release factor subunit, putative
  Pfam annotation: Domain name=eRF1_3; Domain location=11-67; Score =10.9; E_value=1.8e-05; Accession=PF03465.7; Description=eRF1 domain 3
IQKRHLFLNFQLSIGGCITEKMSLLEWFANEYKKFGCSLEFVTNKSQEGSQFCRGFGGIGGMLRYQLDIRSFDELSDDDGLYEDSD

SEQ ID NO: 95626 - protein, 656 aa, Setaria italica
  Transcript Sequence Number=SeqID_29652
  Gene Ontology: Cellular component=integral to membrane
  Homolog annotation: Hit_ID=B9SEZ5; Match level="QueryCoverage=95%, HitCoverage=96%, E-value=0.0, Identity=78%"; Hit description =Endosomal P24A protein, putative
  Pfam annotation: Domain name=EMP70; Domain location=59-614; Score =866.3; E_value=1.7e-257; Accession=PF02990.8; Description =Endomembrane protein 70
MVAKMPSSKWISASLLVLLLSLHPAVHAFYLPGTFMHTYSPGEAISAKVNSLTSIETELPFSYYSLPYCKPPEGVKKSAENLGEILMGDQIDNSPYRFRVNVNESVYLCTTDPLTKEQAELLKKRARNLYQVNMVLDNLPVMRFTDQNGMIIQWTGFPVGYNPTGSNEDYIINHLKFRVLVHQYQAQGDVVVTSEDGVAMVESDRKSGFQIVGFEVVPCSVRRDAEAMSKLKMYDKVDSVNCPLELEKSQAIRENERITFTYEVEYVKSNIKWPSRWDAYLKMDGAKVHWFSIMNSMMVVFFLAGIVFVIFLRTVRRDLTRYEEMDKEAQAQMNEELSGWKLVVGDVFREPCCSKLLCVMVADGIQITGMAVVTIVFAALGFLSPASRGMLLTGMIILYLFLGIIAGYVGVRVWRTIKGTTEGWKSVAWLTACFFPGIVFVILTVLNSILWGKKSTGAIPISLFFTLLALWFCISVPLTLIGGLLGTRAASIDYPVRTNQIPREIPERKFPSWLLVLGAGTLPFGTLFIELFFILSSIWLGRFYYVFGFLFIVLFLLVIVCGEVSLVLTYMHLCVEDWKWWWKAFFASGSVAFYVFLYSINYLVFDLRSLSGPVSATLYLGYSLIMALAIMLSTGAIGFLLSFYFVHYLFSSVKID

SEQ ID NO: 95627 - protein, 137 aa, Setaria italica
  Transcript Sequence Number=SeqID_29653
  Gene Ontology: Mol. function=Rho guanyl-nucleotide exchange factor activity
  Homolog annotation: Hit_ID=B4F9P8; Match level="QueryCoverage=100%, HitCoverage=30%, E-value=7e-47, Identity=58%"; Hit description =Pollen-specific kinase partner protein
  Pfam annotation: Domain name=PRONE; Domain location=1-137; Score= -228.6; E_value=0.0003; Accession=PF03759.5; Description=PRONE (Plant- specific Rop nucleotide
TNLYATVFGTCHRLEPLPPEKRSMWNREMDCLLSICEYIVEFSPTVQSMPDGSTHDVMATSPRSDILMNLPALEKLETMLLGILDSFDKPEFWYADQRNQSFNESKKSFQRSEDKWWLPEPCVPDSGLSDHMHRELQ

SEQ ID NO: 95628 - protein, 133 aa, Setaria italica
  Transcript Sequence Number=SeqID_29654
ARKLQEQLNQEQPGSQHSESVDMTIAWTLHEQDAEHARFAAREGQSSSSQRDRSMAHLYSFGRHSPVQSSASWAPNRTPIPVSSRSLPRNTNCPQAAQRDMLISQLTRGCFREDMDLETRMAVLDSNASASES

SEQ ID NO: 95629 - protein, 310 aa, Setaria italica
  Transcript Sequence Number=SeqID_29655
  Gene Ontology: Mol. function=magnesium ion binding; Cellular component=chloroplast; Biological process=metabolic process
  Homolog annotation: Hit_ID=Q673F9; Match level="QueryCoverage=95%, HitCoverage=35%, E-value=1e-124, Identity=74%"; Hit description=Ent -kaurene synthase-like protein 1
  Pfam annotation: Domain name=Terpene_synth_C; Domain location=1-242; Score=225.5; E_value=1.3e-64; Accession=PF03936.8; Description =Terpene synthase family, metal binding domain
VKENKLDQLQFARQKLTYCYLSAAATIFPSELSDARISWAKNGVLTTVVDDFFDVGGSKEELENLIALVEKWHEHHADKFYSEQVKIVFSAIYATTNQLGAKASAAQGRDVTKHLAKIWLDLLRSMMTEAEWQRSQHVTAVEEYMTNAVVSFALGPIVLPALYFVGEELSEHAVKDQEYDKLFRLMSTCGRLLNDIQGFEREGSEGKLNSVSLLVHSGSSVSIEAAKKVIQKSIDTSRRDLLRLVLRKESIVPRPCKELFWKMCKILHLFYFQTDGFSSPKEMVSAVNAVINEPLKIQMGDSSLNILSEK

SEQ ID NO: 95630 - protein, 78 aa, Setaria italica
  misc_feature (32)..(32): Xaa can be any naturally occurring amino acid
  Transcript Sequence Number=SeqID_29656
  Gene Ontology: Mol. function=transferase activity, transferring glycosyl groups; Biological process=metabolic process
  Homolog annotation: Hit_ID=Q7XHS0; Match level="QueryCoverage=100%, HitCoverage=15%, E-value=3e-19, Identity=64%"; Hit description =Putative glucosyltransferase-2
ALAHIAPRMQDLFAVGPLHAMSPASAAGGSLXARQREDDGCMAWLDGLSDKSVVYASLGSLATISREQFTEFFSGLVA

SEQ ID NO: 95631 - protein, 212 aa, Setaria italica
  Transcript Sequence Number=SeqID_29657
FGLLVQVYYQSSYAESTILDYESLRSSYKEQKRVVRKHILRPLSGASPYTICNSCFNLVQMPSDIYISKSKIGKMQCGKCSKVFALSFPSVHQADAKISMDVPQQSYNPVDSTIPTNEYITSYYAECLTGGPVSTSEDYGASYTRSLPTQAGSSSLAATQSGKKVSDSALHRLMGYDSASQLLRHSRVFDDGYESFESMVPVSSRVSRRKNN

SEQ ID NO: 95632 - protein, 59 aa, Setaria italica
  Transcript Sequence Number=SeqID_29658
TYALIMSGRVFSRSFRSDRPPNSLFFIQDRLIFGLTSSETPGQDNDSQDQPITRHAGFD

SEQ ID NO: 95633 - protein, 134 aa, Setaria italica
  misc_feature (121)..(121): Xaa can be any naturally occurring amino acid
  Transcript Sequence Number=SeqID_29659
  Gene Ontology: Mol. function=transferase activity, transferring hexosyl groups; Cellular component=integral to membrane
  Homolog annotation: Hit_ID=Q2P9N4; Match level="QueryCoverage=72%, HitCoverage=20%, E-value=9e-37, Identity=69%"; Hit description =Putative glycosyltransferase
  Subcellular localization annotation: CTP_CleavageSite=12; ConfidenceScore=5.04e-01
PTTSSSSRGRVVVSPNNATAGLGNFSSSATLIRVKEYILGPKVSDWDSQRQEWLSRHPEFPSRDARGSPRVLLVTGSPPGPCDNPAGDHYLLKAIKNKIDYCRLHGMDIVHNMAHLDPELXGYWSKIPLVPPPH

SEQ ID NO: 95634 - protein, 159 aa, Setaria italica
  misc_feature (6)..(6): Xaa can be any naturally occurring amino acid
  Transcript Sequence Number=SeqID_29660
VYLDNXVLSQQQVQLATTVFPLDNPVSFIEPLSNPQNNGQLDTAKDIEVASYPLQHAKSIKQSTGMLSLVNNHSAQSAPFPISLKEQQQLTNQSCTTAQLHEDKDHDHNGVSCVDKGSSCCADNPDDWNGDFMDIELRKDGLGVNDEDIQRNQQQRYSG

SEQ ID NO: 95635 - protein, 87 aa, Setaria italica
  misc_feature (79)..(79): Xaa can be any naturally occurring amino acid
  misc_feature (83)..(83): Xaa can be any naturally occurring amino acid
  Transcript Sequence Number=SeqID_29661
HDNNRKRAWQVAVVRHVPRGGGGLAGQDAADEASSDRPPLGACRCCHARTDRSGGKGAQKMNRRTDEQSCAATARLGEXVERXLWVF

SEQ ID NO: 95636 - protein, 62 aa, Setaria italica
  Transcript Sequence Number=SeqID_29662
  Pfam annotation: Domain name=DUF26; Domain location=17-61; Score=0.6; E_value=0.097; Accession=PF01657.9; Description=Domain of unknown function DUF26
STVFGTSAVGSGGPNTVFGLGQCLRDLSPVDCMLCFAEVRSLLEKPPPPPEAGRQPTADKFV

SEQ ID NO: 95637 - protein, 178 aa, Setaria italica
  Transcript Sequence Number=SeqID_29663
AWSGGGGGGGGRRGHVRHRHGLVCRFVFAKVFLKEFAKVLACNASCVFKISCEHETSASSNLDSGELEPVARCAQCSERDQSALVSGSRGCPGFCRCFVVTCPGIVVSSLLAERLFIHRILSTLVKTMFVTRIVRHSFARPPFLSSDWMRPCAGGPCTPRRTTRTWRTRCARRSCRTM

SEQ ID NO: 95638 - protein, 119 aa, Setaria italica
  Transcript Sequence Number=SeqID_29664
  Homolog annotation: Hit_ID=B6TIB8; Match level="QueryCoverage=87%, HitCoverage=87%, E-value=2e-30, Identity=67%"; Hit description=Seed specific protein Bn15D1B
  Subcellular localization annotation: CTP_CleavageSite=21; ConfidenceScore=5.04e-01
MAAAASSKGRAIAGSFVSRVLAGKAAASPRRAVHASAYDKNLEDQVRPAFVPDDVIGGAANPDKYWGPHPKTGVFGPAAVDANKAAGAPDAAANGAGSVLDQKVWFRPLEDVEKPPPAA

SEQ ID NO: 95639 - protein, 100 aa, Setaria italica
  Transcript Sequence Number=SeqID_29665
  Homolog annotation: Hit_ID=Q53NA2; Match level="QueryCoverage=56%, HitCoverage=12%, E-value=1e-12, Identity=57%"; Hit description =D8Ertd354e protein, putative
MDATVVAIAGDGDDLARRPLVGPTEEIHPYAEPPSPQHPSLEAAAAQPEQQRKPQRVASLDVFRGFTVAMMIVVDDAGGAWPGINHSPWFGVTVADFVMP

SEQ ID NO: 95640 - protein, 156 aa, Setaria italica
  misc_feature (131)..(131): Xaa can be any naturally occurring amino acid
  Transcript Sequence Number=SeqID_29666
  Pfam annotation: Domain name=DUF1118; Domain location=1-156; Score =92.0; E_value=2.1e-24; Accession=PF06549.4; Description=Protein of unknown function (DUF1118)
  Subcellular localization annotation: CTP_CleavageSite=45; ConfidenceScore=5.87e-01
MASLSLTGVAATTARPSSSGGRGRRLRVASMATQKGQKPTPKTVSSGTRRSGGTTVFPLGEPGPRPATASGKAPVKLLTNVEKLRLLTKAERAGLLSAAERAGLSLSAVERLGLLSKAEELGALSAATDPXTPGALLALALPLLAAGPAVVYLVPE

SEQ ID NO: 95641 - protein, 86 aa, Setaria italica
  Transcript Sequence Number=SeqID_29667
  Gene Ontology: Mol. function=phosphoglycolate phosphatase activity; Biological process=metabolic process
  Homolog annotation: Hit_ID=B6TNH8; Match level="QueryCoverage=100%, HitCoverage=32%, E-value=3e-41, Identity=94%"; Hit description=HAD -superfamily hydrolase, subfamily IA, variant 1
GLLLDAGGTLLQVARPVAETYASIGRRYGVTKPEKGIMEGFKRAFSAPWPKTLRYQGDGRPFWRIVVAEATNCTDDDYFEEVYQYY

SEQ ID NO: 95642 - protein, 92 aa, Setaria italica
  Transcript Sequence Number=SeqID_29668
  Gene Ontology: Mol. function=metal ion binding; Biological process =metal ion transport
  Homolog annotation: Hit_ID=Q01IL4; Match level="QueryCoverage=45%, HitCoverage=31%, E-value=3e-09, Identity=76%"; Hit description =OSIGBa0150F01.6 protein
FPTVRVRAGVSSMGVTGDGKDQLEVVGDGVDTVCLVLCLRKKIGHAEILKVEEVKPAEKKPEEKKPDEKKPEPLPYWWYHNYYHCHPQPPCW

SEQ ID NO: 95643 - protein, 180 aa, Setaria italica
  Transcript Sequence Number=SeqID_29669
SILKKSTDDGTAGAAAREAPRVKFMLDAGDSKVDPPAPPATGGADSSKATKSVGFAPQPPARTLQPPMRPTQPPLQQPPRAATAAAVTQQLPPPPPLPYQPRPSDGLLPGSGQQLPYPPRHTEMPLAAFSNSLPPPPYPPRHSEGPSALPGPPPLPPYPPRSAGFPSQQQQEIPAWKRSK

SEQ ID NO: 95644 - protein, 64 aa, Setaria italica
  Transcript Sequence Number=SeqID_29670
  Homolog annotation: Hit_ID=B6SKQ4; Match level="QueryCoverage=82%, HitCoverage=12%, E-value=4e-11, Identity=67%"; Hit description=MYB2
  Subcellular localization annotation: CTP_CleavageSite=35; ConfidenceScore=5.27e-01
MAVEKGNTTFGYSSESGSGDGASMNSLWFNQNDFNCSTISTVMPPVSPSALSTSMGLNLPPNNP

SEQ ID NO: 95645 - protein, 401 aa, Setaria italica
  Transcript Sequence Number=SeqID_29671
  Gene Ontology: Mol. function=DNA binding; Cellular component=nucleus; Biological process=regulation of transcription
  Homolog annotation: Hit_ID=Q5NKI1; Match level="QueryCoverage=100%, HitCoverage=93%, E-value=1e-151, Identity=69%"; Hit description =MYB18 protein
  Pfam annotation: Domain name=Myb_DNA-binding; Domain location=2-32; Score=0.4; E_value=4.5; Accession=PF00249.23; Description=Myb-like DNA-binding domain
  Pfam annotation: Domain name=Myb_DNA-binding; Domain location=38-83; Score=38.1; E_value=3.4e-08; Accession=PF00249.23; Description=Myb -like DNA-binding domain
  Pfam module annotation: Pfam domain module=Myb_DNA-binding::Myb_DNA -binding; Domain location=2-32::38-83
TKHGHGCWSSVPKLAGLQRCGKSCRLRWINYLRPDLKRGAFSQEEEDLIIELHAVLGNRWSQIAAQLPGRTDNEIKNLWNSCIKKKLRQKGIDPNTHKPLAEADCSGAAPTISTERTSGSSDVNPSSTGALGNLSHLLSETAQSSMLLPVYDKNHPETPNLARPKVPPKELFLDQLTAGHESSSTCRSSGQTLYFPFQQPLGYSSESGSGDGASMNSLWFNQNDFNCSTISTVMPPVSPSALSTSMGLNLPPNNPRHGGTGIGSASVDSLYWDGTNPSSSSSTGSRGSNSLGFEPQSTSSILENSVFPWTDVGQEKDSRAHLVEELKWPDLLHGTFAETTVAMQDQSQSLYDDVIKAESQFNMEGICASWYQNQQPQQQLQAAPDMYDKDLQRMQLSFENI

SEQ ID NO: 95646 - protein, 97 aa, Setaria italica
  Transcript Sequence Number=SeqID_29672
CPVLGCTEDLNPRCPAGRRVTAAGGGGVVACRSDPAPGGYFKQRCPKTLTWSGDAVDVDQRCVAPGELKVIFCPKTMVTTNAAGGEPELLRAAVAVA

SEQ ID NO: 95647 - protein, 81 aa, Setaria italica
  Transcript Sequence Number=SeqID_29673
  Gene Ontology: Mol. function=DNA binding; Cellular component=nucleus
  Homolog annotation: Hit_ID=B6TTZ0; Match level="QueryCoverage=100%, HitCoverage=34%, E-value=8e-31, Identity=86%"; Hit description=DNA -binding protein
LIAAGPVMVIASTFANATYERLPLDEEEEGPAPPMPDPLMGGGHGIADPSALPMFNLPPSNGQLGGGDGGFPWAAHPRPPY

SEQ ID NO: 95648 - protein, 264 aa, Setaria italica
  Transcript Sequence Number=SeqID_29674
  Gene Ontology: Mol. function=serine-type carboxypeptidase activity; Cellular component=extracellular region; Biological process =proteolysis
  Homolog annotation: Hit_ID=Q69MD7; Match level="QueryCoverage=99%, HitCoverage=52%, E-value=2e-89, Identity=62%"; Hit description =Putative serine carboxypeptidase
  Pfam annotation: Domain name=Peptidase_S10; Domain location=1-264; Score=110.8; E_value=4.5e-30; Accession=PF00450.14; Description =Serine carboxypeptidase
GAMLEIGPFRVNPDGKTLSRNKHAWNNLANVIFLESPAGVGFSISRDAADFKTVHDGRTAEDTYTFLLNWFERFPEYKGREFFVAGESYGGHYVPQVATVIALMNRRIPVLQTPINLRGIFVGNPLLDNDLFNKGYLEFLWSHGVVSDEVWADILSNGSFALPDDLMYSLADRTLKGAKVDCFNIYAPVCLQSRNGTHYSSSYLPGYDPCSEHYVKSYLNHLEVQTALHARIGNWSACIPNLTRIDSPTFMVPTVRYLVDIGLR

SEQ ID NO: 95649 - protein, 102 aa, Setaria italica
  Transcript Sequence Number=SeqID_29675
  Subcellular localization annotation: CTP_CleavageSite=83; ConfidenceScore=5.07e-01
SAHPPTQRAVSEAREAPTSSPASPPSLIKTAHAGTRGAGRALLAWPSCLATTVPTDWPGGGSPVSRCGSPSCAVVPRGVWHVRFEARRAKLAGLLGLGMAGA

SEQ ID NO: 95650 - protein, 301 aa, Setaria italica
  Transcript Sequence Number=SeqID_29676
  Gene Ontology: Cellular component=nucleus
  Homolog annotation: Hit_ID=A2Q1I0; Match level="QueryCoverage=64%, HitCoverage=98%, E-value=2e-49, Identity=52%"; Hit description =Nuclear protein SET, putative
GLIPGIDFCNHNVKALATWEVDSMGNATGVPASTYLMLADKSSVEAGAEIYINYGNKGNEELLYLYGFVVDNNPDDYLMVHYPAEALRQIQSADIKMRLLEIQKGELRCLLPRSLLDNGFFCICSSEDKDDKKNISPFCNYSWSGQRKVPSYLHKIVFPQEFLSTLRTIAMQEHEIEQVASLLGEVGSSEDREPSDAEIQSAIWEVCGDQGALGLLVDLLRVKMAELEEGTGTEASDSELLEQFNSHYSEDCTSGSDENNKNKSKINSHSCIVYRRGQKQLTRLFLREAEYLLELSAKEQT

SEQ ID NO: 95651 - protein, 46 aa, Setaria italica
  Transcript Sequence Number=SeqID_29677
GLLTPGSRSSHMSLMVRLLLVSNYKIQYSTASTALFRIPFIPDLVL

SEQ ID NO: 95652 - protein, 124 aa, Setaria italica
  misc_feature (10)..(10): Xaa can be any naturally occurring amino acid
  Transcript Sequence Number=SeqID_29678
  Gene Ontology: Mol. function=transferase activity, transferring groups other than amino-acyl groups; Cellular component=chloroplast; Biological process=cellular amine metabolic process
  Homolog annotation: Hit_ID=B6TT96; Match level="QueryCoverage=75%, HitCoverage=20%, E-value=1e-34, Identity=77%"; Hit description =Transferase
RWVAEAATGXHFRELVDWVEARRPEPTVARAYLGRGEGGEGATACVVSSGMRLPIGEVDFGWGRPAFASYHFPWPGGAGYVMPMPSARGDGDWVVYVHVAPEVVEAMEEEPTVFRALDSGYMFG

SEQ ID NO: 95653 - protein, 101 aa, Setaria italica
  Transcript Sequence Number=SeqID_29679
  Gene Ontology: Mol. function=DNA binding; Cellular component=nucleus; Biological process=regulation of transcription
  Homolog annotation: Hit_ID=Q7XM98; Match level="QueryCoverage=53%, HitCoverage=22%, E-value=1e-25, Identity=100%"; Hit description =OSJNBa0043L24.19 protein
  Pfam annotation: Domain name=Myb_DNA-binding; Domain location=1-38; Score=24.5; E_value=0.00045; Accession=PF00249.23; Description=Myb -like DNA-binding domain
ESIIVQLHALWGNRWSTIARSLPGRTDNEIKNYWRTHFKKGKPSKNIERARARFLKQRQEMQSQKQQQLLQMGHVVAKDENEDGGARTVTAADDDDRGSAV

SEQ ID NO: 95654 - protein, 82 aa, Setaria italica
  Transcript Sequence Number=SeqID_29680
  Gene Ontology: Mol. function=catalytic activity; Cellular component =integral to membrane; Biological process=metabolic process
  Homolog annotation: Hit_ID=Q10AR7; Match level="QueryCoverage=100%, HitCoverage=11%, E-value=7e-38, Identity=97%"; Hit description=Ion channel DMI1-like, chloroplast, putative, expressed
IVVMAERDKEEMEADIAKMEFDLKGTAVICRSGSPLILADLKKVSVSKARAIVVLAEEGNADQSDARALRTVLSLTGVKEGL

SEQ ID NO: 95655 - protein, 122 aa, Setaria italica
  Transcript Sequence Number=SeqID_29681
  Gene Ontology: Mol. function=catalytic activity; Cellular component =integral to membrane; Biological process=metabolic process
  Homolog annotation: Hit_ID=Q75LD5; Match level="QueryCoverage=85%, HitCoverage=11%, E-value=3e-50, Identity=94%"; Hit description =Probable ion channel DMI1-like, chloroplastic
VLSWFLSMMLGLVTDSISEKFDSLRKGRSEVIEQSHTLILGWSDKLGSLLNQIAIANESLGGGTIVVMAERDKEEMEADIAKMEFDLKGTAVICRSGSPLILADLKKVNNVICRFTFRHTFF

SEQ ID NO: 95656 - protein, 203 aa, Setaria italica
  Transcript Sequence Number=SeqID_29682
  Gene Ontology: Mol. function=catalytic activity; Cellular component =integral to membrane; Biological process=metabolic process
  Homolog annotation: Hit_ID=Q75LD5; Match level="QueryCoverage=96%, HitCoverage=21%, E-value=1e-108, Identity=96%"; Hit description =Probable ion channel DMI1-like, chloroplastic
  Pfam annotation: Domain name=DUF1012; Domain location=14-203; Score= -0.4; E_value=0.00037; Accession=PF06241.4; Description=Protein of unknown function (DUF1012)
LNIPSCTKVSVSKARAIVVLAEEGNADQSDARALRTVLSLTGVKEGLRGHIVVELSDLDNEVLVKLVGGDLVETVVAHDVIGRLMIQCARQPGLAQIWEDILGFENCEFYIKRWPKLDGMRFEDVLISFPDAVPCGIKVASYGGKIILNPDDCYVLQEGDEVIVIAEDDDTYAPAPLPKVRRGYLPKDFVVPKSPERILFCGW

SEQ ID NO: 95657 - protein, 297 aa, Setaria italica
  misc_feature (41)..(41): Xaa can be any naturally occurring amino acid
  misc_feature (125)..(125): Xaa can be any naturally occurring amino acid
  Transcript Sequence Number=SeqID_29683
  Gene Ontology: Mol. function=ion channel activity; Cellular component= integral to membrane; Biological process=metabolic process
  Homolog annotation: Hit_ID=Q75LD5; Match level="QueryCoverage=84%, HitCoverage=28%, E-value=1e-131, Identity=92%"; Hit description =Probable ion channel DMI1-like, chloroplastic
YIVHPERNPQKILLCGWRRDIDDMIMVSSFFEAPNSFSLCXTVQQVRRGYLPKDFVVPKSPERILFCGWRRDIEDMIMVLDAFLAPGSELWMFNDVPEVDRERKLIDGGLDFSRLDNITLVHREXNAVIRRHLESLPLESFDSILILADESVEDSAIQADSRSLATLLLIRDIQAKRLPYKEAMVSPVPRGTFSEGAWIGEMQQASDKSVIISEILDPRTKNLMSMSKISDYVLSNELVSMALAMVAEDRQINDVLEELFAEQGNEMQIRPSDLYLRGEEELNFFEVILRARQRKED

SEQ ID NO: 95658 - protein, 261 aa, Setaria italica
  Transcript Sequence Number=SeqID_29684
  Gene Ontology: Mol. function=ion channel activity; Cellular component= integral to membrane; Biological process=metabolic process
  Homolog annotation: Hit_ID=Q208N3; Match level="QueryCoverage=90%, HitCoverage=83%, E-value=1e-122, Identity=94%"; Hit description =Putative ion channel protein CASTOR (Fragment)
SLNLGSLILFWFLVTSLVLLTWLLLPRERKLIDGGLDFSRLDNITLVHREGNAVIRRHLESLPLESFDSILILADESVEDSAIQADSRSLATLLLIRDIQAKRLPYKEAMVSPVPRGTFSEGAWIGEMQQASDKSVIISEILDPRTKNLMSMSKISDYVLSNELVSMALAMVAEDRQINDVLEELFAEQGNEMQIRPSDLYLRGEEELNFFEVILRARQRKEIVIGYRLEGAERAIINPTDKVSRRRWSPKDVFVVISEKE

SEQ ID NO: 95659 - protein, 117 aa, Setaria italica
  Transcript Sequence Number=SeqID_29685
  Gene Ontology: Mol. function=protein binding; Cellular component =integral to membrane
  Homolog annotation: Hit_ID=Q7XH49; Match level="QueryCoverage=89%, HitCoverage=25%, E-value=4e-14, Identity=45%"; Hit description =Leucine Rich Repeat family protein, expressed
  Pfam annotation: Domain name=LRRNT_2; Domain location=4-46; Score =39.5; E_value=1.3e-08; Accession=PF08263.4; Description=Leucine rich repeat N-terminal domain
  Pfam annotation: Domain name=LRR_1; Domain location=89-111; Score =17.7; E_value=0.05; Accession=PF00560.25; Description=Leucine Rich Repeat
  Pfam module annotation: Pfam domain module=LRRNT_2::LRR_1; Domain location=4-46::89-111
NSKLDSEAEALLRWKSTFGDDSGPSSCLKSWSKHISPCNWTGVACGTTVPHGRGLGDGGDAVPVVASISLPMCNLSGRLDGLDLVALPRLAHLDLNDNNLSGPIPPSIGTLGELTLL

SEQ ID NO: 95660 - protein, 82 aa, Setaria italica
  Transcript Sequence Number=SeqID_29686
  Gene Ontology: Mol. function=transporter activity; Cellular component= membrane; Biological process=oligopeptide transport
  Homolog annotation: Hit_ID=Q7XUE5; Match level="QueryCoverage=100%, HitCoverage=14%, E-value=3e-13, Identity=49%"; Hit description =OSJNBa0076N16.17 protein
GLLEFFNSEAPNGMKSIGVALFWCQIGLSSLLGTLLVKLVNKVTQSSSAHGWLEGPNLNSSHLDLFYWVVTAVAFLGWFNYL

SEQ ID NO: 95661 - protein, 139 aa, Setaria italica
  misc_feature (28)..(28): Xaa can be any naturally occurring amino acid
  Transcript Sequence Number=SeqID_29687
  Gene Ontology: Mol. function=ubiquitin-protein ligase activity; Cellular component=ubiquitin ligase complex; Biological process =ubiquitin-dependent protein catabolic process
  Homolog annotation: Hit_ID=C3SA81; Match level="QueryCoverage=84%, HitCoverage=10%, E-value=9e-44, Identity=72%"; Hit description=Beta -catenin repeat family protein
HNAQIQCDALELLCLLAEDEEGRDIIGXTKAIARTIKLLSSNTTDERHAAISFLLELSKSQLLLENIGSTPGSILILTTMKINNSDDPIAAEKAGALLKNLEKCAKNIKHMAESGYLEPLQRHLVEGSEEMQMEMVSFL

SEQ ID NO: 95662 - protein, 192 aa, Setaria italica
  misc_feature (67)..(67): Xaa can be any naturally occurring amino acid
  Transcript Sequence Number=SeqID_29688
  Gene Ontology: Cellular component=mitochondrion
  Homolog annotation: Hit_ID=B9SYF1; Match level="QueryCoverage=100%, HitCoverage=36%, E-value=2e-44, Identity=43%"; Hit description =Pentatricopeptide repeat-containing protein, putative
  Pfam annotation: Domain name=PPR; Domain location=131-165; Score =21.3; E_value=0.004; Accession=PF01535.12; Description=PPR repeat
  Pfam annotation: Domain name=PPR; Domain location=26-60; Score=30.7; E_value=5.8e-06; Accession=PF01535.12; Description=PPR repeat
  Pfam annotation: Domain name=PPR; Domain location=61-95; Score=25.3; E_value=0.00025; Accession=PF01535.12; Description=PPR repeat
  Pfam annotation: Domain name=PPR; Domain location=96-130; Score=20.1; E_value=0.0091; Accession=PF01535.12; Description=PPR repeat
  Pfam module annotation: Pfam domain module=PPR::PPR::PPR::PPR; Domain location=131-165::26-60::61-95::96-130
GIVRNAARAQLLFDEMEKWGVTPDRGAHNALMGAYVRARDLKSAMAVMDKMERKGVGLDDVSYNTMXCGFQRVGNLEGIWKVYSKMVASGFMPRTRTTMLLMKVFCENGRPDLGLELWDYIMGKGCVPHRHALDILVTGLCCRGVVSEAYRCFREIIEMGMAPTERAFMVLEGFLRRTREYGKVEVLRRLGK

SEQ ID NO: 95663 - protein, 54 aa, Setaria italica
  Transcript Sequence Number=SeqID_29689
RRRPGTPRVAGTTSLPSKHYQPLVVLSITLINCVLMNLVSLDLIRSEQAEVVYL

SEQ ID NO: 95664 - protein, 113 aa, Setaria italica
  Transcript Sequence Number=SeqID_29690
  Gene Ontology: Mol. function=protein binding; Cellular component =cytoplasm; Biological process=multicellular organismal development
  Homolog annotation: Hit_ID=A8WES8; Match level="QueryCoverage=100%, HitCoverage=63%, E-value=1e-57, Identity=94%"; Hit description=ZCN17
  Pfam annotation: Domain name=PBP; Domain location=20-113; Score=44.1; E_value=5.5e-10; Accession=PF01161.12; Description=Phosphatidylethanol amine-binding protein
MFNMSRDPLVVGHVVGDIVDPFITTASMRVFYNNKEMTNGSELKPSQVMNEPRVHISGRDMRTLYTLVMVDPDAPSPSNPTKRENLHWLVTDIPETTDTSFGNEIVPYESPRP

SEQ ID NO: 95665 - protein, 90 aa, Setaria italica
  misc_feature (18)..(18): Xaa can be any naturally occurring amino acid
  misc_feature (27)..(27): Xaa can be any naturally occurring amino acid
  Transcript Sequence Number=SeqID_29691
YTLGGDNQNSVGHTQKIXAMAVNKWQXSVLLFTSGAKGDGKLLLWNALRGELASDLNSNLRSQDMVYPSVDTMEFYSENHLACGSDCDYG

SEQ ID NO: 95666 - protein, 100 aa, Setaria italica
  Transcript Sequence Number=SeqID_29692
VKNIVITSPDCRPRFTANVDFDQNPDNRTCDAAMSALAGIFETILWYCFFFRPTAVSILPCCCFFLALLLFLYFSAVYYLPIMFSQCAAVSNVLLSFWPI

SEQ ID NO: 95667 - protein, 124 aa, Setaria italica
  Transcript Sequence Number=SeqID_29693
RSAQLALSYASAGLLQVDGGYPISSMPSAARKIGGHLFLKEYQYTVDILRKIEPLNFRYVMTQLVYPRHWKIIAESNPYVQAVIERGDYDSERSKESTYTPLEPLILLAASWRQWHGACLCRQT

SEQ ID NO: 95668 - protein, 80 aa, Setaria italica
  Transcript Sequence Number=SeqID_29694
SIYITNYTSVRRLHFNSRGIGSRFVGRRDGLHGGGASWSEASKCSDIMYRAWFISLGSKPRPCGTHLLAKSWRQWQVGHA

SEQ ID NO: 95669 - protein, 391 aa, Setaria italica
  Transcript Sequence Number=SeqID_29695
MRTGEAPRQARGGFLVGRVGDWIRARTACAHCADYPIRIHVLRRSPAGVVKRAGRICAGYRLYLSLRSVYSFFQESILTVFAYFQGMEPAKLRDYILHSERWVYLDVYVGTLDGGPLLGNVPKGQMVGYLPRHLHLNAQKTMYLSIQLLLKVIGIGCCPRNLIVKNIVITSPDCRPRFTANVDFDQNPDNRTCDAAMSALAGIFETILCKHLPGHESVPDEVHNLLYLMRQPDCFKLTEAIQYHPCLVPLENRGHLFLKEYQYTVDILRKIEPLNFRYVMTQLVYPRHWKIIAESNPYVQAVIERGDYDSERSKESTYTPLEPLKLQRHAPCHCLQDAANKMMPHGLGFEPADMNHSLYIMSEHLLASLQLALHRVGHLACLKTSFLFPWN

SEQ ID NO: 95670 - protein, 235 aa, Setaria italica
  Transcript Sequence Number=SeqID_29696
  Gene Ontology: Cellular component=membrane
  Homolog annotation: Hit_ID=B9T353; Match level="QueryCoverage=52%, HitCoverage=55%, E-value=2e-29, Identity=62%"; Hit description =Transmembrane protein 14, putative
  Pfam annotation: Domain name=Tmemb_14; Domain location=117-220; Score= 3.5; E_value=0.00049; Accession=PF03647.5; Description=Transmembrane proteins 14C
  Subcellular localization annotation: CTP_CleavageSite=63; ConfidenceScore=5.43e-01
MAAAQIRGSAAPAKATARRWLAQPSARILRFAPLAPSTVPASLRWGAFGDLAASAAYKPLTTMCMKADYTTPVDSVTATEQTGGEIEEPAIAAPANEEISTEQEVVPQQKCAKIHDFCLGIPFGGFLFSMGLIGFLFWRSPVSLTFGVAPGLAILALGVLSLKVWRSGKSSLPFILAQAGVAAAVSWKHCQAYTQTKKVLPWGFYAALSAAMICFYAYVLLAGGNPPPKKARAAA

SEQ ID NO: 95671 - protein, 78 aa, Setaria italica
  Transcript Sequence Number=SeqID_29697
  Gene Ontology: Mol. function=oxidoreductase activity, acting on the CH-NH2 group of donors, NAD or NADP as acceptor; Cellular component =chloroplast; Biological process=nitrogen compound metabolic process
  Homolog annotation: Hit_ID=A7VKB1; Match level="QueryCoverage=78%, HitCoverage=2%, E-value=3e-28, Identity=93%"; Hit description=NADH -glutamate synthase 2
LVSEVGVGVVASGVVKGHADHILISGHDGGTGASRWTGIKNAGLPWELGLAEIHQTLVANGLRGRAVLQTDGQLKIGR

SEQ ID NO: 95672 - protein, 81 aa, Setaria italica
  Transcript Sequence Number=SeqID_29698
IARLIHSVQIQTKVPIATETNIMRNLKTHCLPSSCFLPLCPLMLPHQSHDLLLHPLQCLRSASILFISHITCVLHSWYGVG

SEQ ID NO: 95673 - protein, 73 aa, Setaria italica
  Transcript Sequence Number=SeqID_29699
  Homolog annotation: Hit_ID=B6TE30; Match level="QueryCoverage=100%, HitCoverage=19%, E-value=4e-34, Identity=95%"; Hit description =Mitochondrial carrier protein
REDNYVYYSEAMLAGIAAGAVEAVFCTPFELFKLRNQVSSVIPSRAMGPANVAQESFPLLSKLLPGYVPDMRV

SEQ ID NO: 95674 - protein, 132 aa, Setaria italica
  Transcript Sequence Number=SeqID_29700
  Gene Ontology: Mol. function=nucleic acid binding; Cellular component= ribonucleoprotein complex; Biological process=mitotic spindle organization and biogenesis
  Homolog annotation: Hit_ID=B6UDW2; Match level="QueryCoverage=73%, HitCoverage=73%, E-value=5e-50, Identity=96%"; Hit description=Small nuclear ribonucleoprotein Sm D3
  Pfam annotation: Domain name=LSM; Domain location=10-75; Score=62.4; E_value=1.7e-15; Accession=PF01423.14; Description=LSM domain
MSRSLGIPVKLLHEAAGHVVTVELKTGEVYRGAMVECEDNWNCQLDNITFTAKDGKVSQLEHVFIRGSRVRFMIIPDMLKNAPMFKRLEARIRGKGSAVGVGRGRAVAMRARAAAGRGGGPVGRGGAPPVRR

SEQ ID NO: 95675 - protein, 132 aa, Setaria italica
  Transcript Sequence Number=SeqID_29701
  Gene Ontology: Mol. function=nucleic acid binding; Cellular component= ribonucleoprotein complex; Biological process=mitotic spindle organization and biogenesis
  Homolog annotation: Hit_ID=B6UDW2; Match level="QueryCoverage=73%, HitCoverage=73%, E-value=8e-51, Identity=98%"; Hit description=Small nuclear ribonucleoprotein Sm D3
  Pfam annotation: Domain name=LSM; Domain location=10-75; Score=64.8; E_value=3.3e-16; Accession=PF01423.14; Description=LSM domain
MSRSLGIPVKLLHEAAGHVVTVELKTGEVYRGSMVECEDNWNCQLENITFTAKDGKVSQLEHVFIRGSRVRFMIIPDMLKNAPMFKRLEARIRGKGSAVGVGRGRAVAMRARAAAGRGGGPVGRGGAPPVRR

SEQ ID NO: 95676 - protein, 70 aa, Setaria italica
  Transcript Sequence Number=SeqID_29702
  Subcellular localization annotation: CTP_CleavageSite=36; ConfidenceScore=5.61e-01
MAAIVAAPRASAPGGAAVSTIAAFHSHASPTRAPPRAVTTAASSSVGATRRYHHGSACCFAAKPTTPVAA

SEQ ID NO: 95677 - protein, 62 aa, Setaria italica
  Transcript Sequence Number=SeqID_29703
  Gene Ontology: Mol. function=peptidyl-prolyl cis-trans isomerase activity; Cellular component=cytoplasm; Biological process=protein folding
  Homolog annotation: Hit_ID=B6TB16; Match level="QueryCoverage=93%, HitCoverage=31%, E-value=8e-22, Identity=84%"; Hit description =Peptidyl-prolyl cis-trans isomerase
  Pfam annotation: Domain name=Pro_isomerase; Domain location=1-56; Score=-39.6; E_value=9.3e-05; Accession=PF00160.13; Description =Cyclophilin type peptidyl-prolyl cis-tr
GSQFFITFAETPWLDDRHVAFGRVVEGMDAVRAIEKAGSMSGRTVRPVVIADCGEVKHRALF

SEQ ID NO: 95678 - protein, 205 aa, Setaria italica
  Transcript Sequence Number=SeqID_29704
  Gene Ontology: Mol. function=protein serine/threonine kinase activity
  Homolog annotation: Hit_ID=Q9LQA1; Match level="QueryCoverage=98%, HitCoverage=18%, E-value=3e-49, Identity=48%"; Hit description =F4N2.17
  Pfam annotation: Domain name=DUF150; Domain location=31-200; Score =22.9; E_value=1.3e-07; Accession=PF02576.9; Description =Uncharacterised BCR, YhbC family COG0779
VAQIGDGGDGGGVALRDVKWGERALAAAQEVLAGHFGDDVAMFAFKVSPKGYVYVRLDKLTNIYGCPDIEEIESFNRLYKQKLDEIIERGEIPLDLALEVSSPGAERLLKVPGDLDRFKDMAMRVQYLAEGDNDLVSKQNLLKDGIFLLELVDTQAEHCIWKLADVKENRAEAGKGRPLNRKQKDWRLQTSFTSVKKVTLYLDSN

SEQ ID NO: 95679 - protein, 186 aa, Setaria italica
  misc_feature (110)..(110): Xaa can be any naturally occurring amino acid
  Transcript Sequence Number=SeqID_29705
  Homolog annotation: Hit_ID=B9SB08; Match level="QueryCoverage=96%, HitCoverage=11%, E-value=5e-14, Identity=32%"; Hit description=ATP binding protein, putative
HSGSSGLEINCGELCCISKQGKLAEDSGNCPAGISLCYFTELISLLELFGIYMSCEWTYSNVIVRLLEILESCMCDEYSAALLVLVSQLGRSFIDNVGYEQRRVSELRDXLSSLLAGTSFTKSRSLSVQFSAIGALLSVLPLPFDKIIATQSRQLSGPFVVQERQISEWFVQLSNEHQSLARSFFS

SEQ ID NO: 95680 - protein, 46 aa, Setaria italica
  Transcript Sequence Number=SeqID_29706
AGYPLISYDSINLSQGLPIYLYTLYTLINLLFHTISIAFIYKSSIR

SEQ ID NO: 95681 - protein, 71 aa, Setaria italica
  Transcript Sequence Number=SeqID_29707
SQYYLIYGKHDISAKIRLSPVNYRPSVLMILNCLSPVNHRSRVMIVRYVCAVCVYGPGVSHANAQAGSPPC

SEQ ID NO: 95682 - protein, 138 aa, Setaria italica
  Transcript Sequence Number=SeqID_29708
  Gene Ontology: Mol. function=protein binding
  Homolog annotation: Hit_ID=B6SHJ4; Match level="QueryCoverage=96%, HitCoverage=22%, E-value=5e-53, Identity=75%"; Hit description=BSD domain containing protein
LVIRNVVHSNLALKVFSELNKGISYSRRRNLKNPHENLLGQLPCQTRDELVDHWTDIQELLRHFWSSYPITSAVLCDKVERLKGAMAQIYQKLQDMKESAPPEARHEMSRLVKPMAQAMDAAFSHDLEQQQKSSKATN

SEQ ID NO: 95683 - protein, 94 aa, Setaria italica
  misc_feature (17)..(17): Xaa can be any naturally occurring amino acid
  Transcript Sequence Number=SeqID_29709
  Homolog annotation: Hit_ID=C3SAF5; Match level="QueryCoverage=88%, HitCoverage=14%, E-value=1e-24, Identity=65%"; Hit description =Transcription factor related protein
ANDGKEACNCSLSTDDXFFHLIDQVSSIKANGLNCDVVHSNLALKVFSELNKGISYSRRRNLKNPHENLLGQLPCQTRDELVDVRCCTYLLPPS

SEQ ID NO: 95684 - protein, 397 aa, Setaria italica
  Transcript Sequence Number=SeqID_29710
  Gene Ontology: Mol. function=protein binding; Cellular component =nucleus; Biological process=regulation of transcription, DNA -dependent
  Homolog annotation: Hit_ID=B6SHJ4; Match level="QueryCoverage=98%, HitCoverage=71%, E-value=1e-152, Identity=63%"; Hit description=BSD domain containing protein
  Pfam annotation: Domain name=BSD; Domain location=34-95; Score=47.5; E_value=5.2e-11; Accession=PF03909.9; Description=BSD domain
YLWPLHNLIDEEAIKASKQRPGFKSAMLDLRPSADGQTNRVTFSVNKEIIHQIFVEKPAVHRAFLDFVPEKMSEDHFWSKYREAEYLLRTKNTALAAAQAAEDEVLAVSLKSDDVVAKEAKFKIKQVDPTLDMEADAGDYYIHLLDHRILRDGSIQTVDPDSEFVMRTLSQDLNQHAAVVLEGRSQDIKLTDTKTVAEALARLKKEPSSSYNTDDANHERLVKVARMTYIEDLQAPRNILYAPLCIKNPQEYFDSQQANALRSLDGSNDGKEACNCSLSTDDAFFHLIDQVSSIKANGLNCDVVHSNLALKHWTDIQELLRHFWSSYPITSAVLCDKVERLKGAMAQIYQKLQDMKESAPPEARHEMSRLVKPMAQAMDAAFSHDLEQQQKSSKATN

SEQ ID NO: 95685 - protein, 58 aa, Setaria italica
  Transcript Sequence Number=SeqID_29711
  Homolog annotation: Hit_ID=C3SAF5; Match level="QueryCoverage=77%, HitCoverage=7%, E-value=5e-09, Identity=64%"; Hit description =Transcription factor related protein
CCSLNLASKVFSELNKGISYSRRRNLKNPHENLLGQLPCQTRDELVDVRCCTYLLPPS

SEQ ID NO: 95686 - protein, 56 aa, Setaria italica
  Transcript Sequence Number=SeqID_29712
KHVLFIYAHTIVGQILWMKSSTVKCPPIHFFIHCIVDSFPFTATATVFFTATFSEI

SEQ ID NO: 95687 - protein, 100 aa, Setaria italica
  Transcript Sequence Number=SeqID_29713
  Gene Ontology: Mol. function=electron carrier activity; Biological process=metabolic process
  Homolog annotation: Hit_ID=Q2QY23; Match level="QueryCoverage=56%, HitCoverage=3%, E-value=5e-10, Identity=51%"; Hit description =Cytochrome P450 family protein
SSSNVDRATELAILLSFFPFSLNAPTPRAAAAAPAPHHPAPADAGMEGKAAETCARAREMHSTLPEARHCNRLLRLLVERLRWEDARKLYDEMLAEEGGA

SEQ ID NO: 95688 - protein, 52 aa, Setaria italica
  misc_feature (51)..(51): Xaa can be any naturally occurring amino acid
  Transcript Sequence Number=SeqID_29714
HKCHRSLTAFCYNTMHIFVDELNNDFSLYEELASSAIKSFTIRPKKKKKKXE

SEQ ID NO: 95689 - protein, 273 aa, Setaria italica
  misc_feature (41)..(41): Xaa can be any naturally occurring amino acid
  Transcript Sequence Number=SeqID_29715
  Gene Ontology: Mol. function=binding; Cellular component=mitochondrion
  Homolog annotation: Hit_ID=B9T1G4; Match level="QueryCoverage=100%, HitCoverage=49%, E-value=1e-105, Identity=41%"; Hit description =Pentatricopeptide repeat-containing protein, putative
  Pfam annotation: Domain name=PPR; Domain location=103-137; Score =21.8; E_value=0.0027; Accession=PF01535.12; Description=PPR repeat
  Pfam annotation: Domain name=PPR; Domain location=138-171; Score =18.6; E_value=0.026; Accession=PF01535.12; Description=PPR repeat
  Pfam annotation: Domain name=PPR; Domain location=172-206; Score =13.0; E_value=0.26; Accession=PF01535.12; Description=PPR repeat
  Pfam annotation: Domain name=PPR; Domain location=33-67; Score=11.9; E_value=0.35; Accession=PF01535.12; Description=PPR repeat
  Pfam annotation: Domain name=PPR; Domain location=68-102; Score=22.9; E_value=0.0013; Accession=PF01535.12; Description=PPR repeat
  Pfam module annotation: Pfam domain module=PPR::PPR::PPR::PPR::PPR; Domain location=103-137::138-171::172-206::33-67::68-102
VMVDVLAKAGRLDAAMGMYREMVAVGHWVSTAVSTAMVEGXLVRSGKLDAGMELWEEMRRGGLRPSFGLYTMVVEANARSGRLDIAAKLFGDMEKAGFFPTPATYACLVEMHASAGQVDAAMRLYHSMANAGTRPGLSTFTALLTMLANKGLLDLAAKVLLEMKASGFPIEVTASDLLMIYIKDGSTDMALRWLRFMGSAGIRTNNFIIRQLFESCMKTGLYDSARPLLETYVAGAAKVDLILYTSILAHLVRCQDESSERAIMDILSASKHK

SEQ ID NO: 95690 - protein, 295 aa, Setaria italica
  misc_feature (261)..(261): Xaa can be any naturally occurring amino acid
  Transcript Sequence Number=SeqID_29716
  Gene Ontology: Mol. function=triacylglycerol lipase activity; Biological process=lipid metabolic process
  Homolog annotation: Hit_ID=B6TJX9; Match level="QueryCoverage=97%, HitCoverage=62%, E-value=1e-139, Identity=85%"; Hit description =Calmodulin-binding heat-shock protein
  Pfam annotation: Domain name=Lipase_3; Domain location=1-103; Score =52.1; E_value=2.1e-12; Accession=PF01764.17; Description=Lipase (class 3)
TRDRPEWVLDAECDLLRELLERYPDYTLTFTGHSLGAGIAAMLTMVVVLNLDKLGNVDRSRTRCYAMAPARCMSLNLAVRYADVINSVVLQDDFLPRTATPLEDIFKSILCLPCLLCLRCLRDTCIPEDAMLKDPRRLYAPGRIYHIVERKMCRCGRYPPVVKTAVPVDGRFEHIVLSCNATADHAIIWIEREAQKALDLMLEEEETMSVPSEQRMERNETLQREHVEEHRAALRRAVTLSVPDARAPSLYGTFDDDDGGXRRQQQQQPERSESFPPAGARQRMSWNDLIERVFD

SEQ ID NO: 95691 - protein, 167 aa, Setaria italica
  misc_feature (85)..(85): Xaa can be any naturally occurring amino acid
  Transcript Sequence Number=SeqID_29717
FPEVSWKNDVGIVRPRKRRKCRCDENEVDSWPSGFVTTGQMKVGPAYPDTLNSSSTLRRILLPPCRSYEDVISLSPLGLTRIFKXSNADGNEHVKIFHTELLMYSSFLGERDIDVGFMDKRLPFKKDSAFVGDSVVCCCQGYLYLITQNGLSVVLPPVSISFFFVSW

SEQ ID NO: 95692 - protein, 120 aa, Setaria italica
  Transcript Sequence Number=SeqID_29718
RIRNRWTPGLLCSASASAPPWNLGNLLSAAGVDGDAAPRPLGLRAEEHEHQRDDGGDEQPQQVEPGVLLGLAAAAHLAHGGALPPQLPRARAEEWEMVVGRRREEMVPTTKLVIWFVPLR

SEQ ID NO: 95693 - protein, 120 aa, Setaria italica
  Transcript Sequence Number=SeqID_29719
AWTPSAFVYPAQKLVCAESLVCISLMHVKMVRDKEYSQLVVVNTEEARPADKAANRRRRARSRGGFRATLTKLSKFMWPRARRSVSPPPPSPLRVEHTDNPAPAASGGPSSHPSSVLSPT

SEQ ID NO: 95694 - protein, 322 aa, Setaria italica
  Transcript Sequence Number=SeqID_29720
  Gene Ontology: Mol. function=hydrolase activity, hydrolyzing O -glycosyl compounds; Cellular component=extracellular region; Biological process=carbohydrate metabolic process
  Homolog annotation: Hit_ID=Q0JJD4; Match level="QueryCoverage=87%, HitCoverage=62%, E-value=1e-136, Identity=80%"; Hit description =Mannan endo-1,4-beta-mannosidase 2
  Pfam annotation: Domain name=Cellulase; Domain location=64-321; Score= -79.0; E_value=0.042; Accession=PF00150.10; Description=Cellulase (glycosyl hydrolase family
  Subcellular localization annotation: CTP_CleavageSite=34; ConfidenceScore=5.44e-01
TFGEVDLRHISLSSLPASGFGFGSGAGPSSSSSRAAAAVTAPFVERRGAQLFLDGQPFYPNGWNSYWLMDQAVEPRSRDRVSRMFRAAAEMGLTVCRSWAFNDGAYNALQVSPGHFDTRVFKALDWVVVEAGRHGVRLILSLANNLEAYGGKTQYVRWAWEEGVGLSASNDSFFYDPAIRDYFKAYLKTLLTRKNHLTGVEYRDDPTILAWELMNEPRCTTDPSGDTLQRWIEEMAAYVKSIDKKHLLTVGTEGFYGPTSPESKRDVNPGVWKDNNYGSDFIRNAKIPDIDFASIHLYPDTWLQKQHATVNEKLQFVKRWVS

SEQ ID NO: 95695 - protein, 119 aa, Setaria italica
  Transcript Sequence Number=SeqID_29721
  Gene Ontology: Mol. function=hydrolase activity, hydrolyzing O -glycosyl compounds; Biological process=carbohydrate metabolic process
  Homolog annotation: Hit_ID=Q8L6H7; Match level="QueryCoverage=100%, HitCoverage=18%, E-value=3e-62, Identity=96%"; Hit description =Glycosyl hydrolase family 1 protein, putative, expressed
VISGPGLKLVDNDEYSESGRGVYPDGLFRVLIQFNERYKSLNIPFMITENGVSDETDLIRKPYILEHLLAIYAAIIMGVRVLGYLFWTTSDNWEWADGYGPKFGLVAVDRANNLARKPR

SEQ ID NO: 95696 - protein, 371 aa, Setaria italica
  misc_feature (24)..(24): Xaa can be any naturally occurring amino acid
  Transcript Sequence Number=SeqID_29722
  Gene Ontology: Mol. function=transferase activity, transferring glycosyl groups; Cellular component=membrane
  Homolog annotation: Hit_ID=B6UBD2; Match level="QueryCoverage=90%, HitCoverage=63%, E-value=1e-160, Identity=84%"; Hit description =Transferase, transferring glycosyl groups
  Pfam annotation: Domain name=DUF604; Domain location=219-371; Score =244.3; E_value=2.9e-70; Accession=PF04646.4; Description=Protein of unknown function, DUF604
  Pfam annotation: Domain name=Fringe; Domain location=80-325; Score= -86.4; E_value=0.011; Accession=PF02434.8; Description=Fringe-like
  Pfam annotation: Domain name=Galactosyl_T; Domain location=100-280; Score=-68.7; E_value=0.071; Accession=PF01762.13; Description =Galactosyltransferase
  Pfam module annotation: Pfam domain module=DUF604::Fringe::Galactosyl_ T; Domain location=219-371::80-325::100-280
  Subcellular localization annotation: CTP_CleavageSite=73; ConfidenceScore=5.51e-01
TLLRFLLLLLLPLTALYFFYTLHXLLLTSASSSAASNCMPDSTAAAATTASVSVSRMSANLTAAAVEAEKRPTAAAAASTATTLQHVVFGIAASSRFWDKRKDYIRVWWRPRGAMRGYVWLDRAVRESNMSTARTGLPAIRISSDTSAFPYTHRRGHRSAIRISRIVSETFRLGLPGVRWFVMGDDDTVFFPDNLLAVLNKFDHRQPYYIGSLSESHLQNIYFSYGMAYGGGGFAISRPLAEALSRMQDGCLRRYPALYGSDDRIQACMAELGVPLTKHPGFHQYDVYGDLLGLLASHPVAPIVTLHHLDVVKPLFPDARSRPAAVRRLFDGPVKLDAAGLMQQSICYDGANRWTVSVAWGFAVLVARGVM

SEQ ID NO: 95697 - protein, 218 aa, Setaria italica
  Transcript Sequence Number=SeqID_29723
  Homolog annotation: Hit_ID=B9SBF1; Match level="QueryCoverage=98%, HitCoverage=9%, E-value=1e-25, Identity=31%"; Hit description =Nucleotide binding protein, putative
KKNSTSIHIWEAVKLIGDGSFLLEDALILQDYIVGIEGLSLGDGRFLLAVCLPNELCIYSHKHASVQNVLHNDNSKEEHLWSCIALSHSHHDIAGFLWGPKGTITLVHENHLSLFSSWLVTGADEYTTQIRACPIYVHDMLPCANNFNETAFGKFKLPENYNSGTIGSNSVLRTDQDDSHCSHSLWNLLDIADKLSGPVASYHPRALVQYLYSGEWKR

SEQ ID NO: 95698 - protein, 309 aa, Setaria italica
  Transcript Sequence Number=SeqID_29724
  Gene Ontology: Mol. function=carbon-nitrogen ligase activity, with glutamine as amido-N-donor
  Homolog annotation: Hit_ID=B6TMI1; Match level="QueryCoverage=100%, HitCoverage=100%, E-value=1e-142, Identity=80%"; Hit description =Amidase
  Pfam annotation: Domain name=Amidase; Domain location=1-289; Score= -121.6; E_value=2.3e-05; Accession=PF01425.13; Description=Amidase
  Subcellular localization annotation: CTP_CleavageSite=51; ConfidenceScore=5.21e-01
MAAVTLGSETDGSILCPSSSNSVVGIKPTVGLSSRSGVIPITPRQDTIGPMCRTVSDAVHVLDAIVGYDKLDAEATGAASKFIPRGGYTQFLKMDGLRGKRIGAPAVFFQGYNDFQTAVYEKHLNTMREHGATVIKDLDIATNFTDLNAQETLLMIAEFKISLNAYLSDLLRSPVRSLSDVIAFNNAHPVEERLKDFGQPDLIAAEETNGIGARERAAIRRLEEISANGLEKLMKEHQLDAIVAPNSDASSVLAVGGYPGIAVPAGYDKEGVPFAISFGGLRGYEPRLIEMAYAFEQATKVRRPPTFKR

SEQ ID NO: 95699 - protein, 272 aa, Setaria italica
  misc_feature (38)..(38): Xaa can be any naturally occurring amino acid
  misc_feature (69)..(69): Xaa can be any naturally occurring amino acid
  Transcript Sequence Number=SeqID_29725
  Homolog annotation: Hit_ID=Q38888; Match level="QueryCoverage=79%, HitCoverage=84%, E-value=3e-78, Identity=61%"; Hit description =OBP32pep (Fragment)
  Pfam annotation: Domain name=DUF220; Domain location=102-174; Score =106.4; E_value=9.8e-29; Accession=PF02713.6; Description=Domain of unknown function DUF220
TAAAAQVSLDRQLQAWRNNPSWTDEPPEIKVTVPEGSXLCNLNLRFKAGLPPDAVYNIIIDPANKRVFXNIKEVISRKVLLDEGSRQVVEVEQAAIWKFLWWSGILAVHVFVDQNRKNHTVKFKQGRAGFMRKFEGCWRIEPIFVDKDVCLPLHPCTLEEYESCTGSRGRVASAITLDQLIEPALLPPPPISWYLRGITSRTTEMLVNDLIAETARLRGISNNANGKQDVEEICDASKSRPGIECGDIKERWRQRRKSGRHGNSLRLTSQFL

SEQ ID NO: 95700 - protein, 111 aa, Setaria italica
  Transcript Sequence Number=SeqID_29726
  Gene Ontology: Mol. function=protein binding; Cellular component=cell wall
  Homolog annotation: Hit_ID=O48809; Match level="QueryCoverage=80%, HitCoverage=11%, E-value=6e-27, Identity=68%"; Hit description =F24O1.18
  Pfam annotation: Domain name=LRRNT_2; Domain location=14-54; Score =16.5; E_value=0.019; Accession=PF08263.4; Description=Leucine rich repeat N-terminal domain
  Subcellular localization annotation: CTP_CleavageSite=5; ConfidenceScore=5.04e-01
RRWPSASTTAAPRLQAAYAALQSWKRTAIFSDPFNFTANWVGPNVCSYNGVFCAPHPSGGGLAVAGIDLNHADIAGYIPEDLPRGLPDLALLHLNSNRFCGVLPDTFLHLR

SEQ ID NO: 95701 - protein, 181 aa, Setaria italica
  Transcript Sequence Number=SeqID_29727
  Homolog annotation: Hit_ID=Q9LPT5; Match level="QueryCoverage=98%, HitCoverage=26%, E-value=1e-37, Identity=46%"; Hit description =F11F12.2 protein
SAVCQIEPEIATKWNHQFMKASRGGYYDYIEHNLRDAGGEIYSVKEELMVAQDRIHELEAECRSTKKQLDHLVKNLAEEKASWKSREHGKVHHILDAVKEELNRERKQRQRAEMMNSKLLNDLSEMKFAAKRYLQDYEKERKARVLMEEVCDELAKEIAEDKAEVEAMRSESMKFRDELEE

SEQ ID NO: 95702 - protein, 123 aa, Setaria italica
  Transcript Sequence Number=SeqID_29728
  Gene Ontology: Mol. function=heat shock protein binding
  Homolog annotation: Hit_ID=Q8LIK7; Match level="QueryCoverage=93%, HitCoverage=53%, E-value=1e-38, Identity=76%"; Hit description=DnaJ protein family-like protein
VRNSNNNGFRTHDFYYGNFRSRGGFEFCTSDEDEDEPEILFRDAFRDQHTYYWSFSSDNFQWRNSRRARSEKSRKWSSETDDEDEVSTPSEVSLARQALGLSTSGPLKLEDVKSAYRACALRW

SEQ ID NO: 95703 - protein, 144 aa, Setaria italica
  misc_feature (43)..(43): Xaa can be any naturally occurring amino acid
  Transcript Sequence Number=SeqID_29729
  Gene Ontology: Mol. function=heat shock protein binding; Cellular component=nucleus
  Homolog annotation: Hit_ID=B9SXJ3; Match level="QueryCoverage=92%, HitCoverage=53%, E-value=8e-31, Identity=55%"; Hit description=Heat shock protein binding protein, putative
  Pfam annotation: Domain name=DnaJ; Domain location=81-142; Score =34.2; E_value=5.4e-07; Accession=PF00226.23; Description=DnaJ domain
TSFVSCLATGGFEFCTSDEDEDEPEILFRDAFRDQHTYYWSFXSDNFQWRNSRRARSEKSRKWSSETDDEDEVSTPSEVSLARQALGLSTSGPLKLEDVKSAYRACALRWHPDRHNGSSKATAEEKFKHCSAAYQTLCDSLAAA

SEQ ID NO: 95704 - protein, 127 aa, Setaria italica
  Transcript Sequence Number=SeqID_29730
  Homolog annotation: Hit_ID=B9R8W0; Match level="QueryCoverage=100%, HitCoverage=22%, E-value=5e-26, Identity=47%"; Hit description =Electron transporter, putative
  Pfam annotation: Domain name=DUF547; Domain location=63-127; Score =31.3; E_value=4.6e-10; Accession=PF04784.6; Description=Protein of unknown function, DUF547
DSWSPRCHYNVDTTSDAYGSFDGSNVQYTGMIIFPRIHIDEDKFEYASKMLDTIRTLIKRLEKIDPTKMEHEEQLCFWINIHNALVMHAFMAYGLQEKRMKSTDMILKAAYNVGGHSVNSQIIQNSI

SEQ ID NO: 95705 - protein, 61 aa, Setaria italica
  Transcript Sequence Number=SeqID_29731
  Subcellular localization annotation: CTP_CleavageSite=48; ConfidenceScore=5.00e-01
PNSAHLALIKASILHQFPYSFPIMPNPLATSIIKGRGTFQSPKTCKPRKRALVEYAGFDQG

SEQ ID NO: 95706 - protein, 196 aa, Setaria italica
  misc_feature (60)..(60): Xaa can be any naturally occurring amino acid
  misc_feature (178)..(178): Xaa can be any naturally occurring amino acid
  Transcript Sequence Number=SeqID_29732
  Gene Ontology: Mol. function=structural constituent of ribosome; Cellular component=intracellular; Biological process=metabolic process
  Homolog annotation: Hit_ID=Q53NY3; Match level="QueryCoverage=98%, HitCoverage=43%, E-value=8e-80, Identity=70%"; Hit description =Transposon protein, putative, ping/pong/SNOOPY sub-class
  Pfam annotation: Domain name=Plant_tran; Domain location=119-195; Score=114.0; E_value=5.1e-31; Accession=PF04827.6; Description=Plant transposon protein
VVIGESTGVECLKKFVKGVIEVFGKEYLRRPTAQDIERLVHIGEWHGFPGMLWSIDCMHXHWEKCPYEWKGMYTCGDQGVPTVILEAVASHDRWIWHAFFGVAGSNNDINVLNQSPLFVQQLRGEGPQVQFYVNGREYNTGYYLADGIYPEWATFVKSIRQPQSEKHKLFAEHQEGQXKDVECAFGLLQSLFSILK

SEQ ID NO: 95707 - protein, 157 aa, Setaria italica
  Transcript Sequence Number=SeqID_29733
  Gene Ontology: Mol. function=molecular_function; Cellular component =membrane; Biological process=auxin mediated signaling pathway
  Homolog annotation: Hit_ID=B6TLA9; Match level="QueryCoverage=99%, HitCoverage=38%, E-value=1e-47, Identity=61%"; Hit description =Nodulin-like protein 5NG4
WTGLAKVAGTALCVAGASVITLFKGPAVFGPAAALDVAHHHQPAAPASGGGGKSWMLGCLYLMGHCVSWSGWLVLQAPVLKRYPARLSVTSYTCLFGLLQFLAVAAVAERDAAAWALGSGAELLTVLYAGLVASGVAFAVQTWCIDRSGPVFVAVYQ

SEQ ID NO: 95708 - protein, 147 aa, Setaria italica
  misc_feature (7)..(7): Xaa can be any naturally occurring amino acid
  Transcript Sequence Number=SeqID_29734
  Gene Ontology: Mol. function=DNA binding
YDDTNGXKGKDGRRPQTRQRRPFTELPGAGSYRHESNKTHLRPILPYVPTAVVTPAHAFGWQYPTQNALFPSSLALVTCAPLVCGFTDQQLGQLHVLIYEHAQLLIQTFSLCVLDPSKQDVANNIKKMIVELVGSRDQALARSAPHR

SEQ ID NO: 95709 - protein, 240 aa, Setaria italica
  misc_feature (10)..(10): Xaa can be any naturally occurring amino acid
  misc_feature (149)..(149): Xaa can be any naturally occurring amino acid
  Transcript Sequence Number=SeqID_29735
  Gene Ontology: Mol. function=glycerol-3-phosphate dehydrogenase activity; Cellular component=glycerol-3-phosphate dehydrogenase complex; Biological process=glycerol-3-phosphate metabolic process
  Homolog annotation: Hit_ID=B9SN12; Match level="QueryCoverage=100%, HitCoverage=57%, E-value=6e-83, Identity=61%"; Hit description=NAD dehydrogenase, putative
IVDSHSFMLXLLADAENLGTTISYNTAVIGGQVGYEGLELHICESKELQNHPVGSHVTPQLVLLPKLLINSAGLSAVPLAKQFHGLDQAFVPNPHYARGCYFTLSQTKSPFSHLIYPLPEDGGIGVHVTIDLNGQVRFGPDVEWLDGGXDPVSCFLNRFDYSVNPTRCSVFYPVVRKYFPNLKDGSLEPGYSGIRPKLSGPGQPPSDFVIQGQDIHGITGLVNLFGIESPGLTSSLSIAE

SEQ ID NO: 95710 - protein, 92 aa, Setaria italica
  Transcript Sequence Number=SeqID_29736
  Gene Ontology: Mol. function=metal ion binding; Cellular component =integral to membrane; Biological process=ubiquitin-dependent protein catabolic process
  Homolog annotation: Hit_ID=Q6K5E4; Match level="QueryCoverage=98%, HitCoverage=22%, E-value=3e-36, Identity=80%"; Hit description=RING -H2 zinc finger protein ATL6-like
SLFSIYVRHCYGDGSSGYSASPAPNGAAARSRRQRGLDAAVLETFPTMAYADVKAHKAGKGALECAVCLSEFDDDETLRLLPKCSHVFHPDC

SEQ ID NO: 95711 - protein, 181 aa, Setaria italica
  Transcript Sequence Number=SeqID_29737
  Homolog annotation: Hit_ID=B8LVM8; Match level="QueryCoverage=82%, HitCoverage=51%, E-value=2e-17, Identity=29%"; Hit description =Vesicle-mediated transport protein Vid24, putative
  Pfam annotation: Domain name=Vac_ImportDeg; Domain location=23-174; Score=216.7; E_value=6e-62; Accession=PF09783.1; Description =Vacuolar import and degradation protein
  Subcellular localization annotation: CTP_CleavageSite=21; ConfidenceScore=5.04e-01
MLTKILIVGQDSNAGQPSPPSCSLLSAGRCFAGTQNVSSLQKDEAWKVNVRIHGCDLEQGYLCGTMEALNVPLADTPVVPEDDIRHWSKFSSFTPLLSQIETDGGKSLDLSNYPHIFMRWKEQYFVNVGVDCGLTIAGFYYVCFSCSDGSISGFYYDPNSSPFQKLELKCTNEKNSWYFYL

SEQ ID NO: 95712 - protein, 77 aa, Setaria italica
  Transcript Sequence Number=SeqID_29738
  Pfam annotation: Domain name=Vac_ImportDeg; Domain location=1-77; Score=-31.9; E_value=5.2e-07; Accession=PF09783.1; Description =Vacuolar import and degradation protein
RHWSKFSSFTPLLSQIETDGGKSLDLSNYPHIFMRWKEQYFVNVGVDCGLTIAGFYYVCFSCSDGSISGFYYDPNSR

SEQ ID NO: 95713 - protein, 218 aa, Setaria italica
  Transcript Sequence Number=SeqID_29739
  Homolog annotation: Hit_ID=B8LVM8; Match level="QueryCoverage=78%, HitCoverage=51%, E-value=6e-26, Identity=35%"; Hit description =Vesicle-mediated transport protein Vid24, putative
  Pfam annotation: Domain name=Vac_ImportDeg; Domain location=32-206; Score=319.3; E_value=7.8e-93; Accession=PF09783.1; Description =Vacuolar import and degradation protein
  Subcellular localization annotation: CTP_CleavageSite=30; ConfidenceScore=5.60e-01
MPVRVVDTATPSSQPSPGQDSNAGQPSPPSCSLLSAGRCFAGTQNVSSLQKDEAWKVNVRIHGCDLEQGYLCGTMEALNVPLADTPVVTFWEGEIVDAKNYTFFTGKWEASPEDDIRHWSKFSSFTPLLSQIETDGGKSLDLSNYPHIFMRWKEQYFVNVGVDCGLTIAGFYYVCFSCSDGSISGFYYDPNSSPFQKLELKCTNEKNSGFTFSSYELQ

SEQ ID NO: 95714 - protein, 131 aa, Setaria italica
  misc_feature (91)..(91): Xaa can be any naturally occurring amino acid
  Transcript Sequence Number=SeqID_29740
  Gene Ontology: Mol. function=transporter activity; Cellular component= integral to membrane; Biological process=transport
  Homolog annotation: Hit_ID=B6T5Y2; Match level="QueryCoverage=89%, HitCoverage=29%, E-value=4e-38, Identity=69%"; Hit description =Triose phosphate/phosphate translocator
  Subcellular localization annotation: CTP_CleavageSite=73; ConfidenceScore=5.59e-01
MAALGTLPGGGAAASVPQRRRRGVFSSLAAAYAPDGARLACGRQLRPAPVLTSSSVTLSGPARRQFLRAAPPAASSGSAGEAKPQGIAERXPTLVTGFFFFLWYFLNVIFNILNKKIFDYFPYPYFVSVSH

SEQ ID NO: 95715 - protein, 39 aa, Setaria italica
  Transcript Sequence Number=SeqID_29741
IVTQGHCNRINANSMIYVKQRIISFAYVLLTNIVFSMCN

SEQ ID NO: 95716 - protein, 106 aa, Setaria italica
  Transcript Sequence Number=SeqID_29742
  Homolog annotation: Hit_ID=A7UQS8; Match level="QueryCoverage=96%, HitCoverage=21%, E-value=9e-35, Identity=66%"; Hit description=Metal ion transporter , putative
ARLGTHVDHVHDIVTRLEMDLDAIELQLDKGGHFMRKLLLDGRRFPKMHLDLQRLLQVVSHGEQVFPRVKEKCASKSWFSTGDIAALEDLIGRLRRLKENLGFITN

SEQ ID NO: 95717 - protein, 263 aa, Setaria italica
  Transcript Sequence Number=SeqID_29743
  Gene Ontology: Mol. function=metal ion binding; Biological process =metal ion transport
  Homolog annotation: Hit_ID=B6U064; Match level="QueryCoverage=79%, HitCoverage=56%, E-value=1e-43, Identity=50%"; Hit description=Metal ion binding protein
  Pfam annotation: Domain name=BON; Domain location=32-87; Score=16.4; E_value=0.034; Accession=PF04972.9; Description=Transport-associated domain
  Pfam annotation: Domain name=HMA; Domain location=142-205; Score =27.8; E_value=4.5e-05; Accession=PF00403.18; Description=Heavy-metal- associated domain
  Pfam annotation: Domain name=HMA; Domain location=20-82; Score=45.4; E_value=2.3e-10; Accession=PF00403.18; Description=Heavy-metal -associated domain
  Pfam module annotation: Pfam domain module=BON::HMA::HMA; Domain location=32-87::142-205::20-82
MGAGKGGDDRAEEAAAAEPVVLKMELHCAGCAQKVKKAIKRVPGVESIKADAAANRVVVTGTADAAALKARLEAKTKKAVEIISAGGGPKKTAPAAEPKDAGAGEKKDGGAGEKKADKDASPKEEKEKKQPPEEKKPKEETVLLKIRLHCDGCADRIRRRIYKIKGVKDVVLDGNAKDEVKVRGTMDIPAMLSYLKDKLNRDVEAVAPAKKDGGGEGKDDKKDKAGEGEKNKGAAAAPVGDDTKSKGKGIEVAAAGPSTAAAA

SEQ ID NO: 95718 - protein, 162 aa, Setaria italica
  Transcript Sequence Number=SeqID_29744
  Gene Ontology: Cellular component=integral to membrane
  Homolog annotation: Hit_ID=B6U045; Match level="QueryCoverage=96%, HitCoverage=67%, E-value=3e-39, Identity=66%"; Hit description =UPF0497 membrane protein 1
  Pfam annotation: Domain name=DUF588; Domain location=64-161; Score =22.2; E_value=5.9e-06; Accession=PF04535.4; Description=Domain of unknown function (DUF588)
  Subcellular localization annotation: CTP_CleavageSite=83; ConfidenceScore=5.24e-01
MSTSEAPAAATVIPIDDVAHHHGKAPAVATAPPATSSAVPAAAAATTAPRKTGVPFFRRADRGSRCVALVDFVLRIAAFGPTLAAAIATGTSDETLSVFTQFFQFRARFDDFPALLFFMVANAIAAGYLVLSLPFSAVVVLRPQAIGLRHLLLVCDTIIVAM

SEQ ID NO: 95719 - protein, 88 aa, Setaria italica
  Transcript Sequence Number=SeqID_29745
  Gene Ontology: Mol. function=catalytic activity; Biological process =carbohydrate metabolic process
  Homolog annotation: Hit_ID=Q8GTM7; Match level="QueryCoverage=100%, HitCoverage=27%, E-value=8e-40, Identity=86%"; Hit description =Putataive glucan 1,3-beta-glucosidase
CNGYGITKATEVLRNHWNTYITENDFNFIASSGLNAVRIPVGWWIASDPNPPLPFVGGSLQALDNAFSWAEKYNLGVIVDLHARPGSQ

SEQ ID NO: 95720 - protein, 141 aa, Setaria italica
  Transcript Sequence Number=SeqID_29746
LTEQTAGCIGTFYPHAIPRPQPSWRPPLLVPQTLTHGRCPLPCTFSIGNIGACHHPRRVSGLGKPGYAWSTRRPDSIDFRIDLSFYNCLDASPSSSLVSSLCATIPLVSPRTPAASCPTPSFSATLTTTSTTATLRTASST

SEQ ID NO: 95721 - protein, 36 aa, Setaria italica
  Transcript Sequence Number=SeqID_29747
EVNIHIKLKVLIKHYFETCGNNILLKKYLPLYSLIA

SEQ ID NO: 95722 - protein, 74 aa, Setaria italica
  Transcript Sequence Number=SeqID_29748
  Gene Ontology: Mol. function=metal ion binding
  Homolog annotation: Hit_ID=B6SKK2; Match level="QueryCoverage=100%, HitCoverage=13%, E-value=3e-27, Identity=78%"; Hit description=Zinc ion binding protein
  Pfam annotation: Domain name=DUF500; Domain location=1-72; Score= -4.0; E_value=1.7e-05; Accession=PF04366.4; Description=Family of unknown function (DUF500)
DGGYAACYTYSCSKGAFVGCAFNGSIVSTRDTENARFYGGPVKASDILLGSMARPPAASPLYKALPELFDRIGK

SEQ ID NO: 95723 - protein, 210 aa, Setaria italica
  Transcript Sequence Number=SeqID_29749
  Gene Ontology: Mol. function=hydrolase activity, hydrolyzing O -glycosyl compounds; Cellular component=anchored to membrane; Biological process=carbohydrate metabolic process
  Homolog annotation: Hit_ID=B6TW83; Match level="QueryCoverage=100%, HitCoverage=42%, E-value=4e-83, Identity=67%"; Hit description =Glucan endo-1,3-beta-glucosidase 6
  Pfam annotation: Domain name=Glyco_hydro_17; Domain location=1-210; Score=37.9; E_value=5.2e-13; Accession=PF00332.10; Description =Glycosyl hydrolases family 17
VRLLQDNGFDKVKLFDAEDAILGALKGSGIQVMVGIPNDMLADLAAGGKAAEDWVARNVSGHVRDGVDIRYVAVGNEPFLETFNGTYLNTTFPAMQNIQSALMKAGLADKVKVTVPLNADVYQSSTGKPSDGDFRADIHGLMLTIVQFLASTGAPFVANVYPFISLYSDPNFPLDYAFFQGSSSPVADGGVTYQNTFDANHDTLVAALRR

SEQ ID NO: 95724 - protein, 91 aa, Setaria italica
  Transcript Sequence Number=SeqID_29750
  Gene Ontology: Mol. function=molecular_function; Cellular component =extracellular region; Biological process=biological_process
  Homolog annotation: Hit_ID=B6THQ3; Match level="QueryCoverage=97%, HitCoverage=32%, E-value=4e-29, Identity=74%"; Hit description =Thaumatin-like protein 1a
  Pfam annotation: Domain name=Thaumatin; Domain location=1-89; Score= -40.4; E_value=4.5e-05; Accession=PF00314.9; Description=Thaumatin family
GDVNAMCPADLRVVAASGGVVACKSACAAYGSARYCCTGQYGTPATCGPTNYSQVFKSTCPAAYSYAYDDASSTFTCSGATSYDVTFCPGS

SEQ ID NO: 95725 - protein, 250 aa, Setaria italica
  misc_feature (233)..(233): Xaa can be any naturally occurring amino acid
  Transcript Sequence Number=SeqID_29751
  Gene Ontology: Mol. function=structural molecule activity; Cellular component=chloroplast
  Homolog annotation: Hit_ID=B6UEL0; Match level="QueryCoverage=100%, HitCoverage=93%, E-value=1e-88, Identity=69%"; Hit description =Structural molecule
  Pfam annotation: Domain name=PAP_fibrillin; Domain location=74-250; Score=68.4; E_value=2.7e-17; Accession=PF04755.4; Description=PAP _fibrillin
  Subcellular localization annotation: CTP_CleavageSite=51; ConfidenceScore=5.48e-01
MAATVLLPPAHCHGHRAAASAATTSGRGPGALSHCALPPPRRQRRGSRAVRAAAPPEQSRGVSLAGDSGQASAGDAKAALYRALDGVDRGIFGMTSAQRSEIHGLVELLEARNPTPEPTAALQDKVDGCWKLIYSTISILGKKRTKLGLRDFISLGDFLQIIDVKEEKAVNVIKFSARALKILSGKFTIEASYSVTSKTRVDIKLESSTITPEQLMNIFQKNYDMLLAIFNPXGWLEITYVDESLRIGRD

SEQ ID NO: 95726 - protein, 142 aa, Setaria italica
  Transcript Sequence Number=SeqID_29752
  Gene Ontology: Mol. function=structural molecule activity; Cellular component=chloroplast
  Homolog annotation: Hit_ID=B6UEL0; Match level="QueryCoverage=97%, HitCoverage=53%, E-value=6e-68, Identity=91%"; Hit description =Structural molecule
  Pfam annotation: Domain name=PAP_fibrillin; Domain location=2-135; Score=-14.7; E_value=1.8e-05; Accession=PF04755.4; Description=PAP _fibrillin
GGTFLWKLIYSTISILGKKRTKLGLRDFISLGDFLQIIDVKEEKAVNVIKFSARALKILSGKFTIEASYSVTSKTRVDIKLESSTITPEQLMNIFQKNYDMLLAIFNPEGWLEITYVDESLRIGRDDKENIFVLERADPSEV

SEQ ID NO: 95727 - protein, 91 aa, Setaria italica
  Transcript Sequence Number=SeqID_29753
ALILTIVYYLFGVTICFVYDIGLLYMYCTVHLLFHVVEIFYLCPAQHVNPVFLRFDLLDLILGLSGFLILSSCVCILEYCQNLVLYKQFSE

SEQ ID NO: 95728 - protein, 126 aa, Setaria italica
  Transcript Sequence Number=SeqID_29754
VIDEALDPQQLERQRDSAMPAYNDEACRKRSLPAETQDETSDLQLSLSPTTVMEAKKRTTTALSGEQEIMDTRELSISLSLSPPAAASMQKRQQEKTRRSNDSRSSGEAVLGQSTLDLTMSIRALE

SEQ ID NO: 95729 - protein, 104 aa, Setaria italica
  misc_feature (83)..(83): Xaa can be any naturally occurring amino acid
  Transcript Sequence Number=SeqID_29755
EEEIGLARGRRVPAAGNDGHGGIQSRTCSKKKRSSHSQEPAPPPGAGGERGAGDVDRISGLPDAIIGGIISLLPSTDRARTSXSRWRLLSCFAPLNLDQSDLPS

SEQ ID NO: 95730 - protein, 81 aa, Setaria italica
  Transcript Sequence Number=SeqID_29756
ITITMGSLSFADIFFITSQFLTCFYFKAQKLLLPAMGRRSIQYQLSEPWMPQAFQSHMLALAKKIKTTSNNLELGCQFGHN

SEQ ID NO: 95731 - protein, 178 aa, Setaria italica
  Transcript Sequence Number=SeqID_29757
  Gene Ontology: Mol. function=thymidylate synthase activity; Cellular component=intracellular
  Homolog annotation: Hit_ID=C1XQ72; Match level="QueryCoverage=93%, HitCoverage=83%, E-value=9e-41, Identity=47%"; Hit description =Uncharacterized conserved protein
  Pfam annotation: Domain name=UPF0029; Domain location=1-99; Score =170.6; E_value=4.4e-48; Accession=PF01205.11; Description =Uncharacterized protein family UPF0029
KFIAIAAPVVNERAAMAFLDEVKDPRATHNCWAYKLGEQFRYNDDGEPSSTAGKPIYSAIISSGIDMVMVVVIRYFGGIKLGTGGLVRAYGGVASECLKDAPTNLVKPKARAGMEVPFDLLGTVYHQLQHFQAEDIKQDYDTGKDGTVMVMFRVEYEKIEDLGSAVNSACSRKIELFL

SEQ ID NO: 95732 - protein, 108 aa, Setaria italica
  misc_feature (74)..(74): Xaa can be any naturally occurring amino acid
  Transcript Sequence Number=SeqID_29758
  Homolog annotation: Hit_ID=Q9FKE9; Match level="QueryCoverage=87%, HitCoverage=11%, E-value=7e-24, Identity=57%"; Hit description=GTP -binding protein-like; root hair defective 3 protein-like
LLRMKERFFTVLSRDRDSMPRTWTGDEDLWAITREARLAALRLMSVMAAIRLDDKPDKIERALITALLDGGPLXQKRSVEFTYDPPASSTWEEVLLPTLHLHIYGLLG

SEQ ID NO: 95733 - protein, 306 aa, Setaria italica
  misc_feature (259)..(259): Xaa can be any naturally occurring amino acid
  Transcript Sequence Number=SeqID_29759
  Homolog annotation: Hit_ID=B9RQ05; Match level="QueryCoverage=90%, HitCoverage=34%, E-value=1e-80, Identity=54%"; Hit description =Protein SEY1, putative
  Pfam annotation: Domain name=RHD3; Domain location=1-284; Score= -372.3; E_value=0.048; Accession=PF05879.4; Description=Root hair defective 3 GTP-binding protein (RHD3)
DLDQTISSEMVSDLRKHARSVVEMKSREEAGNVLLRMKERFFTVLSRDRDSMPRTWTGDEDLWAITREARLAALRLMSVMAAIRLDDKPDKIERALITALLDGGPLSQKRSVEFTYDPLASSTWEEVSPRDTLITPVQCKSIWRQFKAETEYAVAQAMSMQESHRRSKNWLPPAWTVLLLAILGYNEFMFLVRNPLYLLGLFVAFVLSYAIWLQYDITAYFRHGTLSALLTILSRLLPTIMDIVTAIVNMSHSQKHSTXPVSHPPLLHAQSLMNQTWQRSQVKYQSPDSPPGLPRTRTAVYCLNSL

SEQ ID NO: 95734 - protein, 76 aa, Setaria italica
  Transcript Sequence Number=SeqID_29760
  Gene Ontology: Mol. function=structural molecule activity; Cellular component=viral capsid; Biological process=oxidation reduction
MVPVRAEVAALLLLLLVAAVGVAAGFRPGPPVSEDTLEKVAASLEMYVDLLPQMPKVLGYSLKYGRPAPTHLTIGI

SEQ ID NO: 95735 - protein, 92 aa, Setaria italica
  Transcript Sequence Number=SeqID_29761
  Gene Ontology: Mol. function=heat shock protein binding; Biological process=protein folding
  Homolog annotation: Hit_ID=B9S2N8; Match level="QueryCoverage=86%, HitCoverage=20%, E-value=2e-30, Identity=77%"; Hit description =Chaperone protein dnaJ, putative
  Pfam annotation: Domain name=DnaJ; Domain location=15-77; Score =120.2; E_value=6.5e-33; Accession=PF00226.23; Description=DnaJ domain
RAAPAAAAAMAKEMEYYDVLGVCPAASDDEIRKAYYIKARQVHPDKNPNDPQAAEKFQALGEAYQVLSDPLQRKAYDGYGKNSISRDNILDG

SEQ ID NO: 95736 - protein, 106 aa, Setaria italica
  Transcript Sequence Number=SeqID_29762
  Subcellular localization annotation: CTP_CleavageSite=45; ConfidenceScore=5.93e-01
MGFQVAAVAPSPCARSSSVSSSPSTSSRPLPALLGGGCAGLARSRGVMVWRPRPARTTARSALSASLDGMGAGDAEFLRRIEELAAAAGVQPAGAAGCGWPASVER

SEQ ID NO: 95737 - protein, 81 aa, Setaria italica
  Transcript Sequence Number=SeqID_29763
  Homolog annotation: Hit_ID=B9RE28; Match level="QueryCoverage=100%, HitCoverage=7%, E-value=1e-16, Identity=55%"; Hit description=F-box and wd40 domain protein, putative
  Subcellular localization annotation: CTP_CleavageSite=51; ConfidenceScore=5.29e-01
MASPHAIDVSDESQQPAEASGLGRSWVHSMFSRDRSLRTSSFNRANDASTVSTTGKTDMSAPQKKTQTNMRTLRGHTGAIT

SEQ ID NO: 95738 - protein, 235 aa, Setaria italica
  misc_feature (79)..(79): Xaa can be any naturally occurring amino acid
  misc_feature (173)..(173): Xaa can be any naturally occurring amino acid
  Transcript Sequence Number=SeqID_29764
  Gene Ontology: Mol. function=nucleoside-triphosphatase activity; Cellular component=endoplasmic reticulum; Biological process=defense response
  Homolog annotation: Hit_ID=B9RE28; Match level="QueryCoverage=84%, HitCoverage=16%, E-value=1e-88, Identity=80%"; Hit description=F-box and wd40 domain protein, putative
  Pfam annotation: Domain name=WD40; Domain location=136-173; Score =32.6; E_value=1.5e-06; Accession=PF00400.24; Description=WD domain, G-beta repeat
  Pfam annotation: Domain name=WD40; Domain location=178-216; Score =11.0; E_value=2; Accession=PF00400.24; Description=WD domain, G-beta repeat
  Pfam annotation: Domain name=WD40; Domain location=40-90; Score=30.0; E_value=9.5e-06; Accession=PF00400.24; Description=WD domain, G-beta repeat
  Pfam annotation: Domain name=WD40; Domain location=96-132; Score =30.3; E_value=8e-06; Accession=PF00400.24; Description=WD domain, G -beta repeat
  Pfam module annotation: Pfam domain module=WD40::WD40::WD40::WD40; Domain location=136-173::178-216::40-90::96-132
  Subcellular localization annotation: CTP_CleavageSite=60; ConfidenceScore=5.27e-01
QRKKQRKFKRNQDSFNRANDASTVSTTGKTDMSAPQKKTQTNMRTLRGHTGAITALHCVTRKEVWDLVGDREDAGFFIXGSTDCTVKIWDPSLRGSELRATLKGHTRTIRTISSDRGKIVSGADDQSVIVWDKQTFNLLEELKGHEAPVSSVRMLSGERVLTASHDGTVKMWXDVRTDTCVATVGRCQSAVLCMEYDDSTGILAAAGRDVMAHVWEQLRLPRQRQRNKLTKELNK

SEQ ID NO: 95739 - protein, 671 aa, Setaria italica
  misc_feature (314)..(314): Xaa can be any naturally occurring amino acid
  Transcript Sequence Number=SeqID_29765
  Gene Ontology: Mol. function=phosphatase activity; Cellular component= integral to membrane; Biological process=intracellular signaling cascade
  Homolog annotation: Hit_ID=B9RE28; Match level="QueryCoverage=93%, HitCoverage=51%, E-value=0.0, Identity=70%"; Hit description=F-box and wd40 domain protein, putative
  Pfam annotation: Domain name=DENN; Domain location=1-115; Score=15.4; E_value=9.6e-08; Accession=PF02141.13; Description=DENN (AEX-3) domain
  Pfam annotation: Domain name=dDENN; Domain location=175-245; Score =60.1; E_value=8.2e-15; Accession=PF03455.11; Description=dDENN domain
  Pfam module annotation: Pfam domain module=DENN::dDENN; Domain location=1-115::175-245
AEAPPKDWLPHADISFQPLVQCLDVDKLILLFTAVLLERRILLRSNKYTLLTLVSEAICHLIYPIRWQHVYIPIIFSSGVDYIDAPTPYMMGLHSGVDTSAVTMDGVVVVDLEYNRITTTEEIPPIPETEHSFLRGEILKLLQPNVMGIDYMKINLGSMSDHSLRSGTKPWGQEHDFQLRLIFLRFFAQILSGYRNFIDTASTTGFNSQAFLKKRSRATNQPVESMSMIMQFLETQGFLDYLERCNSAEENANNLLDKLQDATGRGQNPLSIFPSEAADPEIVTIADPETEGSEPGNRHCYKRFPANARTEEQXEKRKQILALASGASKQVPSSPSIQVNGASKAESLSPRERAAERERMVLDIKVKLQGLWLRLLRLGATEDPLSSFEYGTILALIESDAEGIGGSGFVECIREHIHSGWQCRLTDEQFIAVKELLKTAITRANSRNDLATIRDALEVSAEMYRKDPNNVQDYVQRHLLSLSVWEELRFWDGYFEYLMENCSNKSANYVTLVTAQLIVMATHMAGLGLPDIDSWNMIEKIAERNNLGYKQLIKLRALLTHLQQLRIGYWGVATGKSQPLQSYGMASPHAIDVSDESQQPAEASGLGRSWVHSMFSRDRSLRTSSFNRANDASTVSLDFILLFTTLFVFLVFLYLLLLYWVLFLFSFGFVF

SEQ ID NO: 95740 - protein, 397 aa, Setaria italica
  Transcript Sequence Number=SeqID_29766
  Gene Ontology: Mol. function=nucleotide binding; Cellular component =contractile ring; Biological process=protein amino acid autophosphorylation
  Homolog annotation: Hit_ID=B9RE28; Match level="QueryCoverage=93%, HitCoverage=31%, E-value=0.0, Identity=80%"; Hit description=F-box and wd40 domain protein, putative
  Pfam annotation: Domain name=WD40; Domain location=133-170; Score =36.9; E_value=7.9e-08; Accession=PF00400.24; Description=WD domain, G-beta repeat
  Pfam annotation: Domain name=WD40; Domain location=174-212; Score =13.3; E_value=1; Accession=PF00400.24; Description=WD domain, G-beta repeat
  Pfam annotation: Domain name=WD40; Domain location=216-252; Score =33.1; E_value=1.1e-06; Accession=PF00400.24; Description=WD domain, G-beta repeat
  Pfam annotation: Domain name=WD40; Domain location=256-294; Score =41.2; E_value=4.1e-09; Accession=PF00400.24; Description=WD domain, G-beta repeat
  Pfam annotation: Domain name=WD40; Domain location=299-335; Score =11.9; E_value=1.5; Accession=PF00400.24; Description=WD domain, G -beta repeat
  Pfam annotation: Domain name=WD40; Domain location=354-392; Score =22.2; E_value=0.0022; Accession=PF00400.24; Description=WD domain, G- beta repeat
  Pfam annotation: Domain name=WD40; Domain location=37-87; Score=35.5; E_value=2.1e-07; Accession=PF00400.24; Description=WD domain, G-beta repeat
  Pfam annotation: Domain name=WD40; Domain location=93-129; Score =30.3; E_value=8e-06; Accession=PF00400.24; Description=WD domain, G -beta repeat
  Pfam module annotation: Pfam domain module=WD40::WD40::WD40::WD40::WD4 0::WD40::WD40::WD40; Domain location=133-170::174-212::216-252::256 -294::299-335::354-392::37-87::93-129
  Subcellular localization annotation: CTP_CleavageSite=57; ConfidenceScore=5.23e-01
LINYIYYTFFLTVVSNDASTVSTTGKTDMSAPQKKTQTNMRTLRGHTGAITALHCVTRKEVWDLVGDREDAGFFISGSTDCTVKIWDPSLRGSELRATLKGHTRTIRTISSDRGKIVSGADDQSVIVWDKQTFNLLEELKGHEAPVSSVRMLSGERVLTASHDGTVKMWDVRTDTCVATVGRCQSAVLCMEYDDSTGILAAAGRDVMAHVWDIRSSKQMFKLQGHTKWIRSMRMTGETIITGSDDWTARVWSLNRGTCDAVLACHAGPILCVEYSPSDKGIITGSSDGLIRFWENEGGIKCVKNLTLHTASVLSISAGDHWLGIGAADNSMSLFHRPQERFGGFSNAGSKVAGWQLYRTPQKTAAVVRCIASDLDRKRICSGGRNGLLRLWDATTSI

SEQ ID NO: 95741 - protein, 237 aa, Setaria italica
  misc_feature (116)..(116): Xaa can be any naturally occurring amino acid
  Transcript Sequence Number=SeqID_29767
  Homolog annotation: Hit_ID=B9FUS4; Match level="QueryCoverage=98%, HitCoverage=14%, E-value=5e-40, Identity=47%"; Hit description=DNA polymerase
  Subcellular localization annotation: CTP_CleavageSite=63; ConfidenceScore=5.18e-01
RSKITRKTVGSPSYTPTKNSSKSASKRAGTEHLWGSLPLSRKKGLHRNADDSCSAMPSQKDLSASNKSTTDKNYHDITSNTDGESSSFVGVHDSVCHSVRDLMRRRRSLRREQLEXGSSGAATCTMDKESEIVNSGGLEFHDFASDIPNSAMAYSDDECLQMTFSQKPPLKNHVHSSLESPSGCEQRESAKGLADLLPFFNQNIEDNKQNELFQHMESGGFAVAVGEWLTQQSRSNI

SEQ ID NO: 95742 - protein, 41 aa, Setaria italica
  Transcript Sequence Number=SeqID_29768
MRPGSGDARQPAPAPWAYALYHFGTSGAAVAAATAVTHPLG

SEQ ID NO: 95743 - protein, 60 aa, Setaria italica
  Transcript Sequence Number=SeqID_29769
PFAMLTTTIRQQTVVPSVLGKFRRGEVSDENSEGNGMGTSTIMMWTGELSDIFRSHSRID

SEQ ID NO: 95744 - protein, 149 aa, Setaria italica
  Transcript Sequence Number=SeqID_29770
  Gene Ontology: Mol. function=protein serine/threonine kinase activity; Biological process=protein amino acid phosphorylation
  Homolog annotation: Hit_ID=O49974; Match level="QueryCoverage=71%, HitCoverage=12%, E-value=2e-35, Identity=73%"; Hit description=KI domain interacting kinase 1
  Subcellular localization annotation: CTP_CleavageSite=43; ConfidenceScore=5.25e-01
MGGGGGVFRFSSMASSSPRLLVLLLAWLCCAAAQAQTTTDTLRQGASLSGSATLVSLPDRVFEVGFFPPDPKQPSRLYLGVWYRGITPRTVVWVANRAAPAVSGAPSLALTDAGELQVLDGAAAVNGTAAPRLLWSSNTSRAAPRGGYY

SEQ ID NO: 95745 - protein, 87 aa, Setaria italica
  Transcript Sequence Number=SeqID_29771
IIVRKLCQPMWCYCNFDKQIMRCIYIGQLISFYLQFSVLEYYRLTDIFKHWWSNCIIIMRMHNFLVFGKCLCSKLMIQSGNLMVPLW

SEQ ID NO: 95746 - protein, 115 aa, Setaria italica
  misc_feature (62)..(62): Xaa can be any naturally occurring amino acid
  Transcript Sequence Number=SeqID_29772
RGRDKGAAGRKKKDRADVGMSVSVDGERVLHVRRLRWKFRGSERVDLSGGDGVQVSRDLHNXALPPHDPLPADASTQAQAHAVLVFRFELANGGEERDADLGKDPSQDKASFYSN

SEQ ID NO: 95747 - protein, 56 aa, Setaria italica
  misc_feature (38)..(38): Xaa can be any naturally occurring amino acid
  misc_feature (49)..(49): Xaa can be any naturally occurring amino acid
  Transcript Sequence Number=SeqID_29773
  Gene Ontology: Cellular component=integral to membrane; Biological process=response to stress
  Homolog annotation: Hit_ID=B6UCA0; Match level="QueryCoverage=98%, HitCoverage=29%, E-value=7e-21, Identity=87%"; Hit description=HVA22- like protein a
  Pfam annotation: Domain name=TB2_DP1_HVA22; Domain location=7-55; Score=4.4; E_value=0.0003; Accession=PF03134.11; Description=TB2DP1, HVA22 family
MGSGSLLKVLAKNFDVLAGPLVALAYPLYASVKAIETXSPVDDQQWLTXWVLYSFK

SEQ ID NO: 95748 - protein, 98 aa, Setaria italica
  Transcript Sequence Number=SeqID_29774
  Gene Ontology: Mol. function=hydrolase activity, hydrolyzing O -glycosyl compounds; Cellular component=cell wall; Biological process= carbohydrate metabolic process
  Homolog annotation: Hit_ID=B9S199; Match level="QueryCoverage=72%, HitCoverage=23%, E-value=6e-10, Identity=50%"; Hit description =Brassinosteroid-regulated protein BRU1, putative
MPLTASLLLLLMAMAARPGVAKLLYDQIEVTWGGDHSFYYMEQPGVDVLALCLEETNGGSGFASKDAYLFGRFDIDIMLVANNSAGTVATFYLLPDEV

SEQ ID NO: 95749 - protein, 383 aa, Setaria italica
  Transcript Sequence Number=SeqID_29775
  Gene Ontology: Mol. function=phosphoprotein binding; Cellular component=chloroplast
  Homolog annotation: Hit_ID=Q8VXD2; Match level="QueryCoverage=99%, HitCoverage=63%, E-value=3e-53, Identity=38%"; Hit description=P70 protein
  Pfam annotation: Domain name=DUF904; Domain location=5-64; Score= -11.7; E_value=0.066; Accession=PF06005.4; Description=Protein of unknown function (DUF904)
RPSRLSELESKVSQLQDELKKAKEQLSSSEARRRHTQQEAEEAKKQEQAATSKLEDLQRQLDEYSTAEESRLQELRKISQERDRAWESELEAVQKQQSVDATALNSAMSEIQRLKQQLEATSESDAARAKQCEYAEAEIEGLKQEMEIRLATIEGLKVNVGESDKAAAEANAVATEAKQQLETARTTIDSLIAEGVRMQECLRSKDMELNESKAHIVLLEEDLKKAQEMANTEVSFGDPEPEALKKVVTGDGNGFCDSSDQEIEHLRTALEVAEIRYQEEQTRMTIETKTAYEMLENMKAEYTRRVGELELELKNKNDALMEATATACAAGKVQQDPHKSDAMQPELEAKLMRSITDIAELKASLMDKENALQSLAEENETLN

SEQ ID NO: 95750 - protein, 94 aa, Setaria italica
  Transcript Sequence Number=SeqID_29776
RRLLKKGGVLTERVPNNIKLPISGYHCLHDIGGFQLMRLICAHGPVIGILWAELDDYDRAIGDIVYRRTPMEYRFPNSGAYHAVVCFGYKYDPQ

SEQ ID NO: 95751 - protein, 80 aa, Setaria italica
  Transcript Sequence Number=SeqID_29777
  Gene Ontology: Mol. function=oxidoreductase activity; Cellular component=membrane; Biological process=oxidation reduction
  Homolog annotation: Hit_ID=B6TBV5; Match level="QueryCoverage=100%, HitCoverage=21%, E-value=4e-13, Identity=46%"; Hit description =Leucoanthocyanidin dioxygenase
TSHGVDEAVIQRMKESAAEFFSLPLESKNAIAFQGGGDKFQGFGHHFSGGSSAGKLDWAECVLLVTQPVQGRKTELWPAN

SEQ ID NO: 95752 - protein, 770 aa, Setaria italica
  misc_feature (12)..(12): Xaa can be any naturally occurring amino acid
  Transcript Sequence Number=SeqID_29778
  Gene Ontology: Mol. function=ubiquitin thiolesterase activity; Cellular component=integral to membrane; Biological process =ubiquitin-dependent protein catabolic process
  Homolog annotation: Hit_ID=Q9FPS9; Match level="QueryCoverage=65%, HitCoverage=50%, E-value=1e-159, Identity=55%"; Hit description =Ubiquitin carboxyl-terminal hydrolase 15
  Pfam annotation: Domain name=UCH; Domain location=232-538; Score =176.2; E_value=9.7e-50; Accession=PF00443.21; Description=Ubiquitin carboxyl-terminal hydrolase
SENGAVGMSYEXNNHNADDETRSSEILSGNKVSNNYFGCADVMSGNGDGTYPVKSNAQQPSSSAPEIRKRTKASITIYEPDMGVYLTSDMVSSCEGPYASASEPLQRSLSSGRTIGKANVVNKRLPCPSGKVASLQKSQERVSTSYQNDGHEKNPCNKNDQRSAQATEPASSNLQGCNGISKFGASKVEVLKKPSKFLKTSLVGLINDNKRNKVLFPYEDLVKFFQYEARGISPRGLFNCGNSCYANAVLQCLMCTKPLMIYLLLRLHSKDCCSKNWCLMCELEQYASTLRETGGPLSPSRILSNLRNIGCRLGGGTQEDAHEFLRHLVMSMQAACLDGLGGEKHVEPSLQETTLIQQMFGGRLKSKVKCLRCYHESERYENIMDLTLEIHGWVESLQDALTQFTAPEDLDGENMYKCGRCSAYVKARKQLSVHEVPNILTVVLKRFKTGKYGKINKCVTFPDMLDMVPFVTGSGDNPPLYFLYAVVVHVDTENASFSGHYISYVKDMQGTWLRIDDSEVQVVSVNQVMSEGAYMLFYLRSFPRPPRIYIEKGLLPVPTSGKRHTSKSSKGSKHERKQTELLFSANDQTYGIYDFRPDGEGYMQDQHAELRSRDFHHADDTFADSVSTDFSEATSSEWSLFTSSDESSFTTESTRDSFSVVDYGDNAGLDPISSIFGPCYAPEHPPGNFVSCIRFSPSNPQTRYFSESTDFVSDSSMPTHPHGNVHRGRYPDRACASSAEPLVSAHQRSGYGRYPLSRDGFVQTSGFCQM

SEQ ID NO: 95753 - protein, 264 aa, Setaria italica
  Transcript Sequence Number=SeqID_29779
  Gene Ontology: Mol. function=double-stranded RNA binding; Cellular component=intracellular
  Homolog annotation: Hit_ID=Q7XUL7; Match level="QueryCoverage=99%, HitCoverage=27%, E-value=1e-132, Identity=85%"; Hit description =OSJNBa0074L08.12 protein
DDKSILKQYIESDQVIDGGEVYKAQSEVIPPLADNHQQPMTRPIIRLQEKHIILTRINPSIRDTSVLVRLRPAWDDLRNYLIARGRKRFEVYVCTMAERDYALEMWRLLDPDSKLINSVQLLDRLVCVKSGSRKSLLNVFHDGSCHPRMALVIDDRLKVWNEKDQHRVHVVPAFAPYYAPQAEANFPIPVLCVARNVACNVRGGFFKEFDEGILPQISEVRYEDEMDGIPSAPDVSNYLISEDENSAIININKDPHAIDGMAVL

SEQ ID NO: 95754 - protein, 89 aa, Setaria italica
  Transcript Sequence Number=SeqID_29780
FIEDISEWIIKLRQQASHWWMIEGDKLRIEANIGMGLACRQGIAFTFTCKMLAYSILFLPRKSEVLIYSIPSVVARKGLFCHWALRGIG

SEQ ID NO: 95755 - protein, 229 aa, Setaria italica
  Transcript Sequence Number=SeqID_29781
  Gene Ontology: Mol. function=phosphotransferase activity, phosphate group as acceptor; Cellular component=chloroplast; Biological process=nucleobase, nucleoside, nucleotide and nucleic acid metabolic process
  Homolog annotation: Hit_ID=B6THB3; Match level="QueryCoverage=71%, HitCoverage=57%, E-value=5e-73, Identity=83%"; Hit description =Adenylate kinase
  Pfam annotation: Domain name=ADK; Domain location=74-213; Score=81.0; E_value=4.3e-21; Accession=PF00406.14; Description=Adenylate kinase
  Subcellular localization annotation: CTP_CleavageSite=21; ConfidenceScore=5.09e-01
AKYLFVPRSSRRDAGISRAIRACAAASRRSLSASSAAAVPKDAAAAGVRAAAAAAVAGHKGRDREDGRRVQWVFLGCPGVGKGTYASRLSQLLDVPHIATGDLVRDALASPGPFSKQLAEIVNHGKLVSDEIIINLLSRRLEEGEEKGELGFILDGFPRTIRQAEILEGVTDIDLVINLKLREEALVRKCLGRRMCSQCGGNFNVASIDIEGENGGPRMYMPPLLPPPQ

SEQ ID NO: 95756 - protein, 142 aa, Setaria italica
  Transcript Sequence Number=SeqID_29782
  Gene Ontology: Mol. function=phosphotransferase activity, phosphate group as acceptor; Cellular component=chloroplast; Biological process=nucleobase, nucleoside, nucleotide and nucleic acid metabolic process
  Homolog annotation: Hit_ID=B6THB3; Match level="QueryCoverage=90%, HitCoverage=44%, E-value=3e-48, Identity=77%"; Hit description =Adenylate kinase
  Pfam annotation: Domain name=ADK; Domain location=14-141; Score= -21.8; E_value=2.3e-06; Accession=PF00406.14; Description=Adenylate kinase
FHFLDCVVCVLFFQLAEIVNHGKLVSDEIIINLLSRRLEEGEEKGELGFILDGFPRTIRQAEILEGVTDIDLVINLKLREEALVAKCLGRRMCSQCGGNFNVASIDIEGENGGPRMYMPPLLPPPQCESKLITRPDDTEEVG

SEQ ID NO: 95757 - protein, 147 aa, Setaria italica
  Transcript Sequence Number=SeqID_29783
  Gene Ontology: Mol. function=phosphotransferase activity, phosphate group as acceptor; Cellular component=chloroplast; Biological process=nucleobase, nucleoside, nucleotide and nucleic acid metabolic process
  Homolog annotation: Hit_ID=B6THB3; Match level="QueryCoverage=99%, HitCoverage=51%, E-value=7e-71, Identity=89%"; Hit description =Adenylate kinase
  Pfam annotation: Domain name=ADK; Domain location=2-113; Score=-41.9; E_value=6.5e-05; Accession=PF00406.14; Description=Adenylate kinase
YYPRTIRQAEILEGVTDIDLVINLKLREEALVAKCLGRRMCSQCGGNFNVASIDIEGENGGPRMYMPPLLPPPQCESKLITRPDDTEEVVKERLRVYHDLSEPVEEFYRARGKLLEFNLPGGIPESWPKLLRALNIEDPDNERSAAA

SEQ ID NO: 95758 - protein, 70 aa, Setaria italica
  Transcript Sequence Number=SeqID_29784
SMLNTVCAHATQQETYGNTFQLPFLTCWEIVKRKLLHLPCLPCELVVSFAAIACGPTLFRDKHFKPNIEQ

SEQ ID NO: 95759 - protein, 71 aa, Setaria italica
  Transcript Sequence Number=SeqID_29785
VHEGDFPEDFVFGSATSAYQVTDDSINTPVHGLDSWGFLVCSTRSRLTWCVRESLIILIHTGGRLVTCSRP

SEQ ID NO: 95760 - protein, 81 aa, Setaria italica
  Transcript Sequence Number=SeqID_29786
  Gene Ontology: Mol. function=two-component response regulator activity; Cellular component=nucleus; Biological process=two -component signal transduction system (phosphorelay)
  Homolog annotation: Hit_ID=B6U1H8; Match level="QueryCoverage=98%, HitCoverage=12%, E-value=1e-23, Identity=70%"; Hit description=Two -component response regulator-like PRR95
KLNHSTSSAFSLYNCRTASTLGNAGDGQLCSTSETQADVENRNGDSATPSHDTTETNRPPIRVVPFPVPVQGLTFDGQPFW

SEQ ID NO: 95761 - protein, 102 aa, Setaria italica
  misc_feature (46)..(46): Xaa can be any naturally occurring amino acid
  Transcript Sequence Number=SeqID_29787
  Homolog annotation: Hit_ID=B6U1H8; Match level="QueryCoverage=100%, HitCoverage=11%, E-value=1e-24, Identity=61%"; Hit description=Two -component response regulator-like PRR95
  Pfam annotation: Domain name=CCT; Domain location=23-97; Score=50.4; E_value=7.1e-12; Accession=PF06203.6; Description=CCT motif
SSNTFKDVPEAPNAEASRHLSQREAALNKFRLKRKDRCFEKKVGNXFHIIISIQFLLSPIRTFGLHLYTLLQVRYQSRKLLAEQRPRVKGQFVRQDHSIQGS

SEQ ID NO: 95762 - protein, 74 aa, Setaria italica
  Transcript Sequence Number=SeqID_29788
  Gene Ontology: Mol. function=two-component response regulator activity; Cellular component=nucleus; Biological process=two -component signal transduction system (phosphorelay)
  Homolog annotation: Hit_ID=B6U1H8; Match level="QueryCoverage=60%, HitCoverage=7%, E-value=1e-12, Identity=82%"; Hit description=Two -component response regulator-like PRR95
VRSYSWKYLVDRYNCRTASTLGNAGDGQLCSTSETQADVENRNGDSATPSHDTTETNRPPIRVVPFPVPVQGLT

SEQ ID NO: 95763 - protein, 65 aa, Setaria italica
  Transcript Sequence Number=SeqID_29789
  Gene Ontology: Mol. function=calcium ion binding; Cellular component =mitochondrial inner membrane; Biological process=transport
  Homolog annotation: Hit_ID=B9RA47; Match level="QueryCoverage=84%, HitCoverage=10%, E-value=9e-22, Identity=83%"; Hit description =Succinate/fumarate mitochondrial transporter, putative
  Pfam annotation: Domain name=Mito_carr; Domain location=7-65; Score= -4.7; E_value=0.0089; Accession=PF00153.19; Description=Mitochondrial carrier protein
SKRKSLHSSKDLVKTRLQTYSCEGGKVPRIGALSRDILMHEGPRAFYRGLVPSLLGIVPYAGIDL

SEQ ID NO: 95764 - protein, 297 aa, Setaria italica
  Transcript Sequence Number=SeqID_29790
  Gene Ontology: Mol. function=calcium ion binding; Cellular component =mitochondrial inner membrane; Biological process=transport
  Homolog annotation: Hit_ID=B6TXR3; Match level="QueryCoverage=100%, HitCoverage=55%, E-value=1e-138, Identity=81%"; Hit description =Calcium-binding mitochondrial carrier F55A11.4
  Pfam annotation: Domain name=Mito_carr; Domain location=108-199; Score=101.5; E_value=2.8e-27; Accession=PF00153.19; Description =Mitochondrial carrier protein
  Pfam annotation: Domain name=Mito_carr; Domain location=13-100; Score= 114.3; E_value=4.1e-31; Accession=PF00153.19; Description =Mitochondrial carrier protein
  Pfam annotation: Domain name=Mito_carr; Domain location=206-296; Score=101.6; E_value=2.7e-27; Accession=PF00153.19; Description =Mitochondrial carrier protein
  Pfam module annotation: Pfam domain module=Mito_carr::Mito_carr::Mito_ carr; Domain location=108-199::13-100::206-296
KAAIPEGISKHVNASKYLIAGGIAGAASRTATAPLDRLKVIMQVQTTRTTVMHAIKDIWAKGGMLGFFRGNGLNVVKVAPESAIRFYAYEMLKEYIMKSKGENKSEVGASERLIAGGLAGAVAQTAIYPIDLVKTRLQTYSCEGGKVPRIGALSRDILMHEGPRAFYRGLVPSLLGIVPYAGIDLAVYETLKDMSKTYILKDSDPGPLVQLGCGTVSGALGATCVYPLQVIRTRLQAQQANSEAAYRGMSDVFWRTLQHEGVSGFYKGIIPNLLKVVPAASITYLVYEAMKKNLSLD

SEQ ID NO: 95765 - protein, 239 aa, Setaria italica
  Transcript Sequence Number=SeqID_29791
  Gene Ontology: Mol. function=calcium ion binding; Cellular component =mitochondrial inner membrane; Biological process=transport
  Homolog annotation: Hit_ID=B6TXR3; Match level="QueryCoverage=99%, HitCoverage=46%, E-value=1e-105, Identity=77%"; Hit description =Calcium-binding mitochondrial carrier F55A11.4
  Pfam annotation: Domain name=Mito_carr; Domain location=141-228; Score=114.3; E_value=4.1e-31; Accession=PF00153.19; Description =Mitochondrial carrier protein
  Pfam annotation: Domain name=efhand; Domain location=10-38; Score =23.2; E_value=0.0011; Accession=PF00036.24; Description=EF hand
  Pfam annotation: Domain name=efhand; Domain location=41-69; Score =17.7; E_value=0.05; Accession=PF00036.24; Description=EF hand
  Pfam annotation: Domain name=efhand; Domain location=77-105; Score =26.6; E_value=0.0001; Accession=PF00036.24; Description=EF hand
  Pfam module annotation: Pfam domain module=Mito_carr::efhand::efhand:: efhand; Domain location=141-228::10-38::41-69::77-105
ALQVPAECKYARELLRACDRDRDGRVGYDDFRRYMDDKELELYRIFQAIDVEHNGCILPEELWDALIKAGIEINDEELARFVEHVDKDNNGIITFEEWRDFLLLYPNEVTIENIYHHWERVCLVDIGEQAAIPEGISKHVNASKYLIAGGIAGAASRTATAPLDRLKVIMQVQTTRTTVMHAIKDIWAKGGMLGFFRGNGLNVVKVAPESAIRFYAYEMLKEYIMKSKGENKSEVGASE

SEQ ID NO: 95766 - protein, 52 aa, Setaria italica
  Transcript Sequence Number=SeqID_29792
  Gene Ontology: Mol. function=ligase activity; Cellular component =chloroplast envelope; Biological process=response to auxin stimulus
  Homolog annotation: Hit_ID=P0C0M3; Match level="QueryCoverage=94%, HitCoverage=8%, E-value=2e-17, Identity=83%"; Hit description =Probable indole-3-acetic acid-amido synthetase GH3.11
MSPDQYIRGLGEGKAMYLLFVKAETLTNAGIPIRSVLTSYYKSPHFLQRKYD

SEQ ID NO: 95767 - protein, 490 aa, Setaria italica
  Transcript Sequence Number=SeqID_29793
  Gene Ontology: Mol. function=ligase activity; Cellular component =chloroplast envelope; Biological process=response to auxin stimulus
  Homolog annotation: Hit_ID=P0C0M3; Match level="QueryCoverage=99%, HitCoverage=82%, E-value=0.0, Identity=86%"; Hit description =Probable indole-3-acetic acid-amido synthetase GH3.11
  Pfam annotation: Domain name=GH3; Domain location=1-471; Score=770.0; E_value=1.7e-228; Accession=PF03321.5; Description=GH3 auxin -responsive promoter
EPRLMPSISEDLYRRTYLYSLIMPIMNKYIRGLGEGKAMYLLFVKAETLTNAGIPIRSVLTSYYKSPHFLQRKYDLYNKYTSPDEVILCPDNKQSMYCQLLCGLVERQHVLRLGAVFASAFLRSISFLEQHWCDLVNDIRIGQLSSNITNSTCQLAMQSFLALPNPELADEIEAICSSGSWKGILGRLWPNVKYIEAVLTGTMAQYIPMLEFYSDGRIPLVCTMYASSESYFGVNLRPLCSPKDVSYTILPNMAYFEFIPLEDGLKLTEDYEVVENDKLVSMVDVKIGCYYELVVTTFSGLYRYRVGDVLQVTGFYNRAPQFKFICRRNVILSVDTDKTNEEDLHNSVTRAKKILESRNYLLLEYTSCTDTSTIPGHYVLFWEIKSTYEDATPCVPIDAQFLESCCIAVEEALDYVYRRCRAHDKSVGPLEIRLVEAGAFDALMDLLVSQGSSINQYKTPRCIESGLALKLLNSRVTGSFFSPRDPEWAV

SEQ ID NO: 95768 - protein, 58 aa, Setaria italica
  Transcript Sequence Number=SeqID_29794
LLFLGKAAVLSSDLISSALFLVQPDYHTRASDSSYVSLHLWRNQCVYLLGSAYVNNYL

SEQ ID NO: 95769 - protein, 93 aa, Setaria italica
  Transcript Sequence Number=SeqID_29795
  Subcellular localization annotation: CTP_CleavageSite=30; ConfidenceScore=5.55e-01
MAEPSPPASNAGLRILLSKDRPSPSPPSTAGSTVSSHTDRDRIIGVFRSALSRTEPPETFALQTVQEAIKPQKETVLVLEENQSLENALRTLL

SEQ ID NO: 95770 - protein, 229 aa, Setaria italica
  misc_feature (9)..(9): Xaa can be any naturally occurring amino acid
  misc_feature (202)..(202): Xaa can be any naturally occurring amino acid
  Transcript Sequence Number=SeqID_29796
  Gene Ontology: Mol. function=aspartic-type endopeptidase activity; Cellular component=anchored to membrane; Biological process =proteolysis
  Homolog annotation: Hit_ID=B6U239; Match level="QueryCoverage=91%, HitCoverage=41%, E-value=1e-101, Identity=86%"; Hit description =Aspartic-type endopeptidase/ pepsin A
RDGIGRISXFGDQGSSDQEETPLDINQQHPTYAISITGIAIGNNPTDLEFSTIFDTGTSFTYLADPAYTYITQSFHAQVQANRHAADSRIPFEYCYDLSSGEARILTPDIILRTASGSLFPVIDPGQVISIQEHEYIYCLAIVKSMKLNIIGQNFMTGLRVVFDRERKILGWKKFNCFSPSTPENYSPQETRNPAGVSQSEXTQNNSSPLTLHDSLLLMLLLVHLFIML

SEQ ID NO: 95771 - protein, 107 aa, Setaria italica
  misc_feature (35)..(35): Xaa can be any naturally occurring amino acid
  Transcript Sequence Number=SeqID_29797
  Gene Ontology: Mol. function=hydrolase activity; Biological process =lipid catabolic process
  Homolog annotation: Hit_ID=Q9XE77; Match level="QueryCoverage=100%, HitCoverage=29%, E-value=2e-37, Identity=67%"; Hit description =Patatin-like protein
LFTAKDLNTFYLKNGPTSPEKKAGFCTRGATCRGXMRGPKYDGVFLHDKIKSLTHDVRVADTVTNVIVPAFDVKYLQPVIFSTYEAKHEPLKNALLSDICISASAAP

SEQ ID NO: 95772 - protein, 143 aa, Setaria italica
  Transcript Sequence Number=SeqID_29798
  Gene Ontology: Mol. function=electron carrier activity; Cellular component=integral to membrane; Biological process=oxidation reduction
  Homolog annotation: Hit_ID=B9NKS6; Match level="QueryCoverage=87%, HitCoverage=30%, E-value=5e-38, Identity=58%"; Hit description =Cytochrome P450
VMKLIHQKREQMNGQDNRAREDILSRFIIQSKTDPETMNDQYLRDIVLNFLIAGKDTTGNTLTWFFYMLCKNPLVQDKVALEINESVEWAREDSNTEDFTVRLNEGAIDKMHYLHAAISETLRLYPAVPLVQINSLWGITCID

SEQ ID NO: 95773 - protein, 89 aa, Setaria italica
  misc_feature (9)..(9): Xaa can be any naturally occurring amino acid
  misc_feature (76)..(76): Xaa can be any naturally occurring amino acid
  Transcript Sequence Number=SeqID_29799
  Gene Ontology: Mol. function=acyltransferase activity; Cellular component=integral to membrane; Biological process=metabolic process
  Homolog annotation: Hit_ID=B6SRR0; Match level="QueryCoverage=80%, HitCoverage=13%, E-value=5e-22, Identity=75%"; Hit description =Glycerol-3-phosphate acyltransferase 8
IKAVLVGEXRKREVVERMFPAGDMPDVGLGDRESDHDFMAICKEAYMVPPDRRAPRAAADTLLSRAVFHDGRLVRXAPDPAHALFALAY

SEQ ID NO: 95774 - protein, 78 aa, Setaria italica
  Transcript Sequence Number=SeqID_29800
  Gene Ontology: Mol. function=nucleic acid binding
  Homolog annotation: Hit_ID=Q0JF58; Match level="QueryCoverage=79%, HitCoverage=6%, E-value=5e-28, Identity=90%"; Hit description =Protein argonaute 4B
FCAFLYQVRNSQEPTTRPTHYHILHDEIGFNPDDLQELVHSLSYVYQRSTTAISVVAPICYAHLAAAQVGQFIKLKRC

SEQ ID NO: 95775 - protein, 141 aa, Setaria italica
  Transcript Sequence Number=SeqID_29801
  Gene Ontology: Mol. function=nucleic acid binding
  Homolog annotation: Hit_ID=Q2LFC1; Match level="QueryCoverage=99%, HitCoverage=13%, E-value=2e-60, Identity=77%"; Hit description=AGO4 -2 (Fragment)
  Pfam annotation: Domain name=Piwi; Domain location=1-141; Score= -33.9; E_value=5.1e-07; Accession=PF02171.9; Description=Piwi domain
RESRKRKPDQIIIFRDGVSESQFNQVLNIELDQIIEACKFLDEKWNPKFTLILLGNNQCELGIPLIIAQKNHHTKFFIPGAPENVPPGTVVDNKVCHPRNYDFYMCSHAGMIGTTRPTHYHILHDEIGLQPDDLQELVHSL

SEQ ID NO: 95776 - protein, 831 aa, Setaria italica
  misc_feature (17)..(17): Xaa can be any naturally occurring amino acid
  Transcript Sequence Number=SeqID_29802
  Gene Ontology: Mol. function=nucleic acid binding; Biological process= multicellular organismal development
  Homolog annotation: Hit_ID=Q9SDG8; Match level="QueryCoverage=99%, HitCoverage=92%, E-value=0.0, Identity=85%"; Hit description=Protein argonaute 4A
  Pfam annotation: Domain name=DUF1785; Domain location=149-201; Score =98.6; E_value=2.2e-26; Accession=PF08699.2; Description=Domain of unknown function (DUF1785)
  Pfam annotation: Domain name=PAZ; Domain location=202-339; Score =140.9; E_value=3.9e-39; Accession=PF02170.14; Description=PAZ domain
  Pfam annotation: Domain name=Piwi; Domain location=485-792; Score =508.1; E_value=1.2e-149; Accession=PF02171.9; Description=Piwi domain
  Pfam module annotation: Pfam domain module=DUF1785::PAZ::Piwi; Domain location=149-201::202-339::485-792
FHYYVNLKYEDDTPVDXGAGRSVIEKLQQTYATELANKDFAYDGEKSLFTIGALPQVNNEFTVVVEDVSTGKTPANGSPGNDSPPGSDRKRVRRPYNTKTYKVELSFAARIPMNAIAHALRGQESEHTQEAIRVIDIILRQHSAKQGCLLVRQSFFHNNPSNFVDLGGSVMGCRGFHSSFRATQSGLSLNIDVSTTMIVKPGPVVDFLLANQKVDHPNMIDWAKAKRSLRNLRIKITPTNAENKIAGLSDKPCRETMFTLKRRNGDNGDSEEISVYDHFVKNRGIELRYSGDFPCINVGKPKRPSYFPIELCNLVSLQRYTKALSTLQRSSLVEKSRQKPQERMSVLSDVLQRSNYDSEPMLMACGISIAKSFTEVDGRVLQPPKLKAGNGEDIFTRNGRWNFNNKRLIRASSVDKWAVVNFSARCNVRDLVRDLIKCGGMKGIKVEPPFNAFEENPSMRRAPAVRRVEDMFEQVKTKLPGAPKFLLCVLAERKNSDVYGPWKKKCLAEFGIVTQCVAPTRVNDQYLTNVLLKINAKLGGLNSMLQVESSPAMPLISKVPTMILGMDVSHGSPGQSGVPSIAAVVSSREWPLISKYRASVRSQSPKMEMIDSLFKPRGTDDDGLIRECLIDFYTSSGKRKPDQIIIFRDGVSESQFNQVLNIELDQIIEACKFLDEKWNPKFTLIIAQKNHHTKFFIPGAPENVPPGTVVDNKVCHPRNYDFYMCSHAGMIGTTRPTHYHILHDEIGFNPDDLQELVHSLSYVYQRSTTAISVVAPICYAHLAAAQVGQFIKFEEMSETSSSQGEHTSAGSVPVQELPRLHEKVRSSMFFC

SEQ ID NO: 95777 - protein, 80 aa, Setaria italica
  Transcript Sequence Number=SeqID_29803
GQPALLRASVVPPRRLGGRLASGQAGQLSSAGGGGGEVDLGGHWHLARHQHELSSSSFLVLILPIHRNLPKRDDWWQEMA

SEQ ID NO: 95778 - protein, 135 aa, Setaria italica
  Transcript Sequence Number=SeqID_29804
IFRLQRDSSCCTTTFRYRTWTSLAKQLSKEEDLRANTHTTPYVDSTCCKSERPHLWPGRGCGTATRMAARGAGLAPCLRRPAEKAWRPAGQRAGRSAQLSWGRRGRGGLGRGRRGSARRRGPRARRRTSGSGARR

SEQ ID NO: 95779 - protein, 101 aa, Setaria italica
  Transcript Sequence Number=SeqID_29805
  Gene Ontology: Mol. function=structural constituent of ribosome; Cellular component=ribonucleoprotein complex; Biological process =metabolic process
  Homolog annotation: Hit_ID=Q2RA11; Match level="QueryCoverage=100%, HitCoverage=18%, E-value=5e-43, Identity=86%"; Hit description=CBS domain-containing protein, putative, expressed
  Pfam annotation: Domain name=CBS; Domain location=11-101; Score=5.9; E_value=0.027; Accession=PF00571.20; Description=CBS domain
  Subcellular localization annotation: CTP_CleavageSite=63; ConfidenceScore=5.22e-01
RMFKPSLSTIITENTKVATVSPSDPVYVATQKMRELRVNSVVITAGNSLQGIFTSKDVLMRVVAQKLSPELTLVEKVMTAHPDCATLDTTILDALHIMHDG

SEQ ID NO: 95780 - protein, 986 aa, Setaria italica
  misc_feature (15)..(15): Xaa can be any naturally occurring amino acid
  Transcript Sequence Number=SeqID_29806
  Gene Ontology: Mol. function=acid-amino acid ligase activity; Cellular component=intracellular; Biological process=ubiquitin -dependent protein catabolic process
  Homolog annotation: Hit_ID=Q8RWB8; Match level="QueryCoverage=99%, HitCoverage=95%, E-value=0.0, Identity=58%"; Hit description=E3 ubiquitin-protein ligase UPL6
  Pfam annotation: Domain name=HECT; Domain location=679-986; Score =435.0; E_value=1.2e-127; Accession=PF00632.17; Description=HECT -domain (ubiquitin-transferase)
LRLQNSSATKIQKFXRIKKALELARSEIRKNFCSTFGEHCERIDWKNFGTNSDFLRQLLFFFNANEDNDIAILCQVCNLLLQYVKRGGDTVTLFAGVNDSSLQPLVAHRVKKLALICVQAVYQKRHDWGSQLLTTPGSASVPSVSLLETVACLINPKLPWNCKVVGYLQRRKIYCLFRGIIISIPQKDRSFGHFDSASALEQVLMLVASHVGHHPCCCPVVDPRWSFSSQLLSIPFLRHRLPQLKKVFSVNGLSKYYIHQIASFLPSLRDVLPNDISANHPGYACVLANVLEAATWILSDAKFASDTAADIIAVSTSLLDTLPAVTSPTERADDDDEMPMDVDVKNGLDVDLERQITTAIDSKLLQHLVNALFRGTLSTYHSDLSGPSDAEVDAVGSICAFLHVTFNTFPLERIMTVLAYRTEIVPALWNFIKRCHENRTWPCFSKFASSLPADAPGWLLPMSVFCPIYKHMLKIIDNGEFYEQEKPLSLKDLKSLVLILKQALWQLLWVIPSSSTLKVSPNPSGLKKLSVENVKTRARVGLSELLTQLQDWNSRLPFTSASDFYSQEATSENFVSQAILGNTRASEIIKLAPFLAPFTSRVKIFTSQLTSSRQSASHSAFTRHRFKIRRNRLLEDAFDQLSLLSEEDLKGPIRVSFINEHGEEEAGIDGGGIFKDFMENITRAAFDVQYGLFKETADHLLYPNPASGLVHELHLQYFHFLGSLLGKAMYEGILVDLPFATFFLSKLKQKYNFLNDLPSLDPELYRHLLFLKHYNGDISELELYFVIVNNEYGEQSEEELLPGGRDMRVTNDNVITFIHLVANHRLNYQIRAQSTHFLRGFQQLIPKDWIDMFNEHEIQVLISGSLESLDIDDLRSNTNYSAGYHPDHEVIEMFWEVMKSFSSDNQKKFLKFVTGCSRGPLLGFQYLEPKFCIHRAGVPGMEEHADRLPTSATCMNLLKLPPYKTKEQLQTKLLYAINSEAGFDLS

SEQ ID NO: 95781 - protein, 38 aa, Setaria italica
  Transcript Sequence Number=SeqID_29807
NTMRYIYCNPNKSQSRHANQWIDSDIITQKTEGATKAI

SEQ ID NO: 95782 - protein, 228 aa, Setaria italica
  Transcript Sequence Number=SeqID_29808
  Gene Ontology: Mol. function=binding
TNAWGLDSPVSGSDGADELPALYAVAITFSSSAQFGKIPSCHVPFILGEPPGSGMDIVPVDNQNREESTYCASVVIELEPREPSPGLIDVSVAANTENCQVLSGSLKPITVGIEDMFMKAIVPPDTPKEGVAMYYQDLFHALWEACDSSSNTGRETFPLSGGKGSAAINGTRSVKLMEVTPKVLIGAVERYLASFVVSVAGDSLVTILRGNGVIKNVLWEESVSDCQC

SEQ ID NO: 95783 - protein, 55 aa, Setaria italica
  Transcript Sequence Number=SeqID_29809
  Pfam annotation: Domain name=DUF538; Domain location=1-55; Score= -39.1; E_value=0.03; Accession=PF04398.4; Description=Protein of unknown function, DUF538
TAFRHDAATGAFEADLAAPCTTRFEVELRYNATVAGVISRGRIAAISGVAAQDLF

SEQ ID NO: 95784 - protein, 81 aa, Setaria italica
  Transcript Sequence Number=SeqID_29810
  Subcellular localization annotation: CTP_CleavageSite=32; ConfidenceScore=5.52e-01
FSQTCVMSRLAFGLATCSSVRFSLPSRGQPPMAAVVEPRPGAAAVVERCMLQLDLLSSQADRHAWCALVSCKATGKGRPTE

SEQ ID NO: 95785 - protein, 135 aa, Setaria italica
  Transcript Sequence Number=SeqID_29811
  Homolog annotation: Hit_ID=B6TWE7; Match level="QueryCoverage=100%, HitCoverage=40%, E-value=1e-33, Identity=57%"; Hit description=PHI-1
  Pfam annotation: Domain name=Phi_1; Domain location=1-135; Score= -57.1; E_value=8.2e-07; Accession=PF04674.4; Description=Phosphate -induced protein 1 conserved region
VLSAAPLRLYVLWYGRWDPAHQAPVRDFLLSISDPSPPRPSVADWWATAALYADQTLANVTRRVALAGEAADESASLGRSLSRLDIQRVLASTVAAGHLPADTRGGAYLVLTAPGVGVQDFCRAVCGFHYFTFPS

SEQ ID NO: 95786 - protein, 286 aa, Setaria italica
  misc_feature (6)..(6): Xaa can be any naturally occurring amino acid
  misc_feature (40)..(40): Xaa can be any naturally occurring amino acid
  misc_feature (278)..(278): Xaa can be any naturally occurring amino acid
  Transcript Sequence Number=SeqID_29812
  Gene Ontology: Cellular component=plasma membrane
  Homolog annotation: Hit_ID=Q9SY82; Match level="QueryCoverage=87%, HitCoverage=30%, E-value=1e-20, Identity=31%"; Hit description =F14N23.28
  Pfam annotation: Domain name=Vps51; Domain location=18-99; Score=8.0; E_value=0.032; Accession=PF08700.3; Description=Vps51Vps67
MESSSXEELEEEFPGHEWITPQSSINAAYQSQTEKGIRKXCSELLELKDAIENLSGNMQSKYLAFLRISEEVVEAEQELIELQKHVSAQGILVQDLMSGVSRELDVWFKSNKEEDVKEKDFQTELDEILSDDTQDPKAIFLDKLDALLAEHKMEEAVLALEDEEKKYLVANESSKESNAELSAFKTALFKRKAILEDQLVRWSEQPSLPIAELRKTLAGLVKIGKGSLAHQLLLKAYGSRLHKNVEAFLPSCSIYTETYAASLSQIVFSAIAKAAKEXNTLFGDSP

SEQ ID NO: 95787 - protein, 89 aa, Setaria italica
  Transcript Sequence Number=SeqID_29813
  Gene Ontology: Mol. function=hydrolase activity, hydrolyzing O -glycosyl compounds; Cellular component=integral to membrane; Biological process=cell wall organization and biogenesis
  Homolog annotation: Hit_ID=Q5Z9P8; Match level="QueryCoverage=100%, HitCoverage=17%, E-value=1e-32, Identity=76%"; Hit description =Endoglucanase 18
PKADHKCWERPETMSEKRPLTKITTKSPGSDVAAETAAAMAAASLVYKPINGTYSSALLDHAQRLFAFADKYRGSYTRTFPELSAYYNS

SEQ ID NO: 95788 - protein, 87 aa, Setaria italica
  misc_feature (73)..(73): Xaa can be any naturally occurring amino acid
  Transcript Sequence Number=SeqID_29814
  Subcellular localization annotation: CTP_CleavageSite=13; ConfidenceScore=5.39e-01
SITTPQTLVPPPSAGRSSYLPAAPLDPIRPPPIDGRRRGRRLRRGEALRLRACLLCSTAPAPNRACRSATARXPRGRPRRRLLPLQG

SEQ ID NO: 95789 - protein, 201 aa, Setaria italica
  Transcript Sequence Number=SeqID_29815
MVPMEVDDLAEVQPRIEPAEDGEITRVQNNTSKSMKADEEAESEPSMAATNSENIPAMAPMEVDGPAEVQPYVERIEDGEITEEAVGEHSADRANGSVAQAKESVETNDNAAPGKTIKIQVEGKVFTVLQQQNGGLSCQTCGVHGCNKDGMILHLYTRMHWDKANLAQKEKEAAATAVDDKDGNGGSAAGECSGGALTTTV

SEQ ID NO: 95790 - protein, 59 aa, Setaria italica
  Transcript Sequence Number=SeqID_29816
KCSKSGKIYKHHNHCKKGTKYDVSEQLEYASLCAKVNFIMLILKLFSNQLPEMLFMAKQ

SEQ ID NO: 95791 - protein, 112 aa, Setaria italica
  Transcript Sequence Number=SeqID_29817
  Gene Ontology: Mol. function=transferase activity, transferring glycosyl groups; Biological process=metabolic process
  Homolog annotation: Hit_ID=B6TIY9; Match level="QueryCoverage=88%, HitCoverage=22%, E-value=7e-40, Identity=80%"; Hit description =Cytokinin-N-glucosyltransferase 1
EAAELAALRRDLAVPVFDVGPLHKLSPAAANSLLRQDHGCLDWLDTQAPASVLYVSFGSLASLSATDLVEIAWGIANSGLPFLWVLRPGLVRGAPASQDPPPLPDGFDAATR

SEQ ID NO: 95792 - protein, 185 aa, Setaria italica
  Transcript Sequence Number=SeqID_29818
  Gene Ontology: Mol. function=beta-N-acetylhexosaminidase activity; Cellular component=cell wall; Biological process=carbohydrate metabolic process
  Homolog annotation: Hit_ID=B9RM00; Match level="QueryCoverage=89%, HitCoverage=31%, E-value=1e-36, Identity=43%"; Hit description=Beta -hexosaminidase, putative
  Pfam annotation: Domain name=Glyco_hydro_20b; Domain location=43-172; Score=56.4; E_value=1.1e-13; Accession=PF02838.7; Description =Glycosyl hydrolase family 20, domain 2
MSHSAKMATALGLLLAFLAIGSCIAADNIDLWPMPKTVSHGTQKLYVKKDITMSMGGSTYSDEKSILKDAFQRMVDLITLNHVIDGINPSSLVLTCVNIVVHTPDDELNFGADESYNLTVPTTGDPLYAQIEAQTVFGALHGLQTFGQLCYFDFTSRLIELNSAPWIITDTPRFPYRGLLIDTAR

SEQ ID NO: 95793 - protein, 79 aa, Setaria italica
  Transcript Sequence Number=SeqID_29819
ALPTQAVASTGALLLLSRLFSVLLCKDLILNILMDKCSDVRNYGSFSVELYFSLTILSKFLSNVRISFGERVNILLSAW

SEQ ID NO: 95794 - protein, 112 aa, Setaria italica
  Transcript Sequence Number=SeqID_29820
  Gene Ontology: Mol. function=protein binding; Cellular component =chromosome; Biological process=regulation of transcription, DNA -dependent
  Homolog annotation: Hit_ID=B9RS31; Match level="QueryCoverage=94%, HitCoverage=17%, E-value=1e-36, Identity=68%"; Hit description =Transcription factor, putative
  Pfam annotation: Domain name=CXC; Domain location=29-70; Score=86.6; E_value=9.1e-23; Accession=PF03638.7; Description=TesminTSO1-like CXC domain
RLHSGLKIGSSPHANRNNEVSSDLPLIGKHNKGCHCKKSGCLKKYCECFQANILCSENCKCMDCKNFEASDERRALFQGDHKNSINMQQVTNAAVNGAIGATGFPSPSTSRK

SEQ ID NO: 95795 - protein, 74 aa, Setaria italica
  Transcript Sequence Number=SeqID_29821
  Gene Ontology: Mol. function=binding; Cellular component=nuclear pore; Biological process=protein import into nucleus, docking
  Homolog annotation: Hit_ID=Q01KY9; Match level="QueryCoverage=87%, HitCoverage=6%, E-value=3e-29, Identity=93%"; Hit description =OSIGBa0137O04.8 protein
LQRREASSQLTRMLTSDGQDVYEEVLEIVSYMTFFSPTISLDMWTLWPLMMEALNDWAIDFFENILVPLDNYIS

SEQ ID NO: 95796 - protein, 82 aa, Setaria italica
  Transcript Sequence Number=SeqID_29822
  Gene Ontology: Mol. function=protein transporter activity; Cellular component=nuclear pore; Biological process=protein import into nucleus, docking
  Homolog annotation: Hit_ID=Q7XTA3; Match level="QueryCoverage=54%, HitCoverage=16%, E-value=3e-13, Identity=77%"; Hit description =OSJNBa0008A08.7 protein
NALYYNPALTLETLNKLGVAADIFNHWFVMLQQVKKSGARVNFKRYGSRFCTVIFLHVPTMSQYCCIASFAESMIRKFAAWA

SEQ ID NO: 95797 - protein, 82 aa, Setaria italica
  misc_feature (32)..(32): Xaa can be any naturally occurring amino acid
  Transcript Sequence Number=SeqID_29823
  Gene Ontology: Mol. function=protein transporter activity; Cellular component=nuclear pore; Biological process=protein import into nucleus, docking
  Homolog annotation: Hit_ID=Q01KY9; Match level="QueryCoverage=75%, HitCoverage=5%, E-value=6e-21, Identity=74%"; Hit description =OSIGBa0137O04.8 protein
KCLSVIVCFVSCSVTKNSMYQMMQPQIDILLXFEIIFPLMCFNDNDQKLWDEDPHEYVRKGYGEFTHFCICLDWSWRLLIKM

SEQ ID NO: 95798 - protein, 934 aa, Setaria italica
  Transcript Sequence Number=SeqID_29824
  Gene Ontology: Mol. function=protein transporter activity; Cellular component=nuclear pore; Biological process=protein import into nucleus, docking
  Homolog annotation: Hit_ID=Q01KY9; Match level="QueryCoverage=100%, HitCoverage=90%, E-value=0.0, Identity=80%"; Hit description =OSIGBa0137O04.8 protein
  Pfam annotation: Domain name=CAS_CSE1; Domain location=465-850; Score= -259.6; E_value=0.061; Accession=PF03378.7; Description=CASCSE protein, C-terminus
  Pfam annotation: Domain name=HEAT; Domain location=402-437; Score =16.7; E_value=0.1; Accession=PF02985.14; Description=HEAT repeat
  Pfam module annotation: Pfam domain module=CAS_CSE1::HEAT; Domain location=465-850::402-437
FIVQVPPLLRAQLGESIKTIIHSDYPEQWPSLLHWVTHNLEIQNQIFGALYVLRVLARKYEFKSEEERIPLYHIVEETFPRLLSIFSKLVQIVNPPIEVADLIKLICKIFWSSIYLEIPKQLFDPNVFNSWMVLFINLLERPVPVEGQPIDPEIRKSWGWWKVKKWTIHILNRLYTRFGDLKLQKPESKAFAQMFQKTYAGKILACHMLLLNAIRTGDYLPDRVINLVLQYLTNSVTKNSMYQMMQPQIDILLFEIIFPLMCFNDNDQKLWDEDPHEYVRKGYDIIEDLYSPRTAAMDFVSELVRKRGKNNLQKFIHFIVDIFRRYDEAPADLKPYRQKDGALLAIGTLCDKLKQTDPYKSELERMLVQHVFPEFSSRVGHLRAKAAWVAGQYAHINFSDPNNFRQAMHCIVSGMRDPDLPVRVDSVFALRSFVEACKDLDEIRPILPQLLDEFFKLMNEVENEDLVFTLETIVDKFGEEMAPYALGLCQNLAAAFWRCMASSEADDEADDSGALAAVGCLRAISTILESISSLPHLFIQIEPTLLPIMRRMLTSDGQDVYEEVLEIVSYMTFFSPTISLDMWTLWPLMMEALNDWAIDFFENILVPLDNYISRGTDHFLACKDPDYQQSLWNALQSIMMDENMEDSDIEPAPKLIEVLFQNCKGNVDQWVEHYLRITIERLRRTKKPYLKCLLVQVIANALYYNPALTLETLNKLGVAADIFNHWFVMLQQVKKSGARVNFKREHDKKVCCLGLTSLIGLPADKIPPEALDRIFKATLELLVAYKDQVAENKKQNEEAADDMDGFDADEEDDEEIDSDKDMGLDDEDGDEVSSLQLQKLAAEARGFQPADEDDDSDDDFSDDEELQSPIDEVDPFIFFVETVQGLQVSDPARFQNLMQTLDFRYQALASGIAQHAEERKVEIEKEKLEKANTQ

SEQ ID NO: 95799 - protein, 151 aa, Setaria italica
  misc_feature (69)..(69): Xaa can be any naturally occurring amino acid
  Transcript Sequence Number=SeqID_29825
  Gene Ontology: Mol. function=metalloendopeptidase activity; Biological process=proteolysis
  Homolog annotation: Hit_ID=B6UCS1; Match level="QueryCoverage=100%, HitCoverage=26%, E-value=5e-54, Identity=69%"; Hit description =Metalloendopeptidase
CLPIAGHRLRSRRVACQAMTETEPEGNDDDEEKEVFGDDASSPSADSAAEVNEPAKSDSNIDNLSHDSXKKDETTNAELLSSSDAAQNIDGDATTTNDMQENVEVVEVASGSPLPGMKQQLDDAERIPKATIDILKDQVFGFDTFFVTSQE

SEQ ID NO: 95800 - protein, 195 aa, Setaria italica
  Transcript Sequence Number=SeqID_29826
  Gene Ontology: Mol. function=binding
  Homolog annotation: Hit_ID=Q6H6D6; Match level="QueryCoverage=100%, HitCoverage=19%, E-value=1e-84, Identity=80%"; Hit description =Transducin-like
EGAIPETAPTQRKSYPFRLFSCQGDISRKVINHPKIAKKEVLSVEKALYNSELTMTLERAISMVSNSDSLRQCEDAVHEVARACSTLQGDPNLVNLLSCASFIQGLLEVTFTSKDDAVLESAILIMGKLVLGNEVIRQLVLNADPQLEVFLRLLRSNELFLKAAILLYMMKPKAKQMLSLDWIPLVLHILECGDE

SEQ ID NO: 95801 - protein, 55 aa, Setaria italica
  misc_feature (19)..(19): Xaa can be any naturally occurring amino acid
  Transcript Sequence Number=SeqID_29827
MEGAAGRTAAAAAVCVTGXGGFVASWLVERLLAAGRYTVHGTVRDPGDAKNAHLA

SEQ ID NO: 95802 - protein, 64 aa, Setaria italica
  Transcript Sequence Number=SeqID_29828
SAIILAYIFLFSSYVVFHTQTDFKNLAHAFINKSSKVLLWHSQWHSKCCIHVQSSLCASKLAFW

SEQ ID NO: 95803 - protein, 263 aa, Setaria italica
  Transcript Sequence Number=SeqID_29829
  Homolog annotation: Hit_ID=B6TGJ0; Match level="QueryCoverage=100%, HitCoverage=100%, E-value=8e-47, Identity=78%"; Hit description =Glycine-rich protein
  Subcellular localization annotation: CTP_CleavageSite=37; ConfidenceScore=5.20e-01
MAAGSNLPPKPWERAGASSGPAPFKPPSGGTTNEVVEASGTAKHGEIVSATGNNVTSNVTSNISRPVPPRPWQQQGYGNSYGGYGSNMYSSYGGFNGTYGNNMYSGYGGGYGTTYGGYGGPMYNGGTGGPYGGYGMGMGPYNQGPNSFGPPAPPPGFWVSFLRVMHGVVNFCGRVSFLVSQNTQAFHMFITALLQLCDRAGMLYGELARFVLRLLGIKTKPKKGGVKGSGAPPLEGTSQQFVEAPKATNSSWDSVWTENGKGK

SEQ ID NO: 95804 - protein, 124 aa, Setaria italica
  misc_feature (17)..(17): Xaa can be any naturally occurring amino acid
  misc_feature (68)..(68): Xaa can be any naturally occurring amino acid
  Transcript Sequence Number=SeqID_29830
  Gene Ontology: Mol. function=structural molecule activity; Cellular component=chloroplast
  Homolog annotation: Hit_ID=Q69WE1; Match level="QueryCoverage=94%, HitCoverage=26%, E-value=1e-36, Identity=65%"; Hit description =Plastid-lipid associated protein PAP/fibrillin family-like
QLYLHGTGVEEVIDDFXSSQNRAEVDLDILVGEWQLLWRSQTEGESWSSVASAGLKDFQIIKEDGQLXNSVSPFPGVNLSARGNICKTGKSNTFSVSMNEGAVQVGGVQFPLDTKGEFVMEILY

SEQ ID NO: 95805 - protein, 87 aa, Setaria italica
  Transcript Sequence Number=SeqID_29831
  Subcellular localization annotation: CTP_CleavageSite=52; ConfidenceScore=5.61e-01
AGLPLPHLPAGRRLQPHTGHRRLGLPSRSQPDTSLLPSRSQPTGGGSSRRPRVGNVARAAWPDHHLLYRPQLRPAAMRNNPGKTCCK

SEQ ID NO: 95806 - protein, 95 aa, Setaria italica
  Transcript Sequence Number=SeqID_29832
HRPYNTCHEQAFRCLIFPPGLSRPAVEAAGGRGVGNVARAAWPDHHLLYRPQLRPAAMRNNPGHSSHVFMKYAGFTRFGLGHQAMPNKTKATTQT

SEQ ID NO: 95807 - protein, 91 aa, Setaria italica
  misc_feature (73)..(73): Xaa can be any naturally occurring amino acid
  Transcript Sequence Number=SeqID_29833
  Subcellular localization annotation: CTP_CleavageSite=49; ConfidenceScore=5.69e-01
MEPPPPPPPATPSAAVRVLSRNPLPASPNPSSAPSAVPGAGAASHDGVVAVGFVGAAGTACLADRILDAHVFXPGGSARSLAGSVRYHRDG

SEQ ID NO: 95808 - protein, 108 aa, Setaria italica
  misc_feature (62)..(62): Xaa can be any naturally occurring amino acid
  Transcript Sequence Number=SeqID_29834
  Gene Ontology: Mol. function=unfolded protein binding; Cellular component=chloroplast; Biological process=cellular protein metabolic process
  Homolog annotation: Hit_ID=B9RLC9; Match level="QueryCoverage=100%, HitCoverage=16%, E-value=3e-31, Identity=67%"; Hit description =Rubisco subunit binding-protein beta subunit, rubb, putative
VALIKGQIENSKERYNKKILGERIARLCGGIAIIQVGAQTVIEMKDKKLRIEDALNATRVPXLIKSMPIEEGVVVGGGCSLLRLSKKIDAIKDSSLDNMEQKIGADIF

SEQ ID NO: 95809 - protein, 61 aa, Setaria italica
  Transcript Sequence Number=SeqID_29835
PQVLIAVLGSIEHAAVVAKSFLTSDVVVVEAKESKPIRIRPPMPPRSLIPPMPASVSGIRV

SEQ ID NO: 95810 - protein, 176 aa, Setaria italica
  Transcript Sequence Number=SeqID_29836
  Gene Ontology: Mol. function=unfolded protein binding; Cellular component=chloroplast; Biological process=cellular protein metabolic process
  Homolog annotation: Hit_ID=Q56XN6; Match level="QueryCoverage=94%, HitCoverage=27%, E-value=1e-74, Identity=82%"; Hit description =Chaperonin
KPPPMPIYKDLHFNRDLSATKKLQAGVDLVARLVGVTLGPKGRNVVLGNKYGPPKIVNDGETVLKEIELEDPLENLGVKLVRQAGARTNDIAGDGCTTSIILARGLIAEGMKVLAAGINPVQVARGIEKTAAALVSELKLMSREIEDHELAHVAAVSAGNDYAVGNMISDAFTKEV

SEQ ID NO: 95811 - protein, 452 aa, Setaria italica
  Transcript Sequence Number=SeqID_29837
  Gene Ontology: Mol. function=unfolded protein binding; Cellular component=chloroplast; Biological process=cellular protein metabolic process
  Homolog annotation: Hit_ID=Q56XN6; Match level="QueryCoverage=94%, HitCoverage=70%, E-value=1e-166, Identity=66%"; Hit description =Chaperonin
  Pfam annotation: Domain name=Cpn60_TCP1; Domain location=1-426; Score= 291.5; E_value=1.8e-84; Accession=PF00118.16; Description=TCP-1cpn60 chaperonin family
GFRFLQLEFNPVQVARGIEKTAAALVSELKLMSREIEDHELAHVAAVSAGNDYAVGNMISDAFQRVGRKGMVRIENGRGTENSLDVVEGMQFERGYLSPYFVTDRSNMTVEFTDCKILMVDKKITDASEIIRILDSAVKENYPLLIIAEDVEEAAMADLIKNKLKGTMKIAAVKAFSFGEQKTQCLDDIAVMTGGTVVRDDMGYSLEKAGKEVLGSAAKVVIRKDSTLIVTDGSTHHAVEKRVALIKGQIENSKERYNKKILGERIARLCGGIAIIQVGAQTVIEMKDKKLRIEDALNATRAAIEEGVVVGGGCSLLRLSKKIDAIKDSSLDNMEQKIGADIFKKALSYPTSLIANNAGVNGDFVIEKVLLNDTTNYGYNAAKNRYEDLMAAGILDPSKVVRCCIEHAAVVAKSFLTSDVVVVEAKESKPIRIRPPMPPRSLIPPMLLPVLM

SEQ ID NO: 95812 - protein, 100 aa, Setaria italica
  Transcript Sequence Number=SeqID_29838
  Gene Ontology: Mol. function=protein binding; Cellular component =nuclear envelope; Biological process=poly(A)+ mRNA export from nucleus
  Homolog annotation: Hit_ID=B6UGZ9; Match level="QueryCoverage=100%, HitCoverage=28%, E-value=2e-47, Identity=86%"; Hit description=Rae1 -like protein
YSVNSLNFHPVHGTFATTGSDGGFNFWDKDSKQRLKAFSKCPAPITCSTFNQDGSIFAYAVCYDWSKGAEKHNPSTAKTNIFIHSVQESDVKGKPRTGKK

SEQ ID NO: 95813 - protein, 112 aa, Setaria italica
  misc_feature (78)..(78): Xaa can be any naturally occurring amino acid
  Transcript Sequence Number=SeqID_29839
  Gene Ontology: Mol. function=inositol or phosphatidylinositol phosphatase activity
LVIEDNEPAARWLVLINQALNRPADTDANVFQHEPSPSVDSASSRASSSLDTSFSDLSKTASGATIFQKSLLKAISKXSFMPVRRKQLKACNCPVEMTKTSYRDACFRCPKA

SEQ ID NO: 95814 - protein, 188 aa, Setaria italica
  Transcript Sequence Number=SeqID_29840
  Gene Ontology: Mol. function=zinc ion binding; Cellular component =cytoplasm; Biological process=apoptosis
  Homolog annotation: Hit_ID=B6TEZ7; Match level="QueryCoverage=94%, HitCoverage=42%, E-value=2e-92, Identity=89%"; Hit description =Programmed cell death protein 2
  Pfam annotation: Domain name=PDCD2_C; Domain location=21-185; Score =46.4; E_value=2.3e-11; Accession=PF04194.5; Description=Programmed cell death protein 2, C-terminal putative domain
QLISSSDSSKSVLPAIGKVPASTSWPEFEIEIDYEATFDSDSCDENNSKSLVMQRHGKPDAMMQSWMDQFEADADNKCWASFQERVSRAPKQVLRYCREPNAKPFWALSSGCPANADIPSCSSCKGPLCYEFQIMPQLLYYFGVGNQPDSLDWATIAVYTCQGSCDQSVSYKEEFAWVQLYPTTTTRR

SEQ ID NO: 95815 - protein, 72 aa, Setaria italica
  Transcript Sequence Number=SeqID_29841
VGPGIICIHSRSVFQATLFDTGDFEIGSGSNVAGSLPRKNVSKSIGRAVLSIFRPWSRAHNARCSLHWLWSI

SEQ ID NO: 95816 - protein, 219 aa, Setaria italica
  Transcript Sequence Number=SeqID_29842
  Gene Ontology: Mol. function=protein serine/threonine kinase activity; Cellular component=integral to membrane; Biological process=protein amino acid phosphorylation
  Homolog annotation: Hit_ID=B9T2T2; Match level="QueryCoverage=97%, HitCoverage=21%, E-value=7e-55, Identity=53%"; Hit description =Serine/threonine-protein kinase PBS1, putative
  Pfam annotation: Domain name=LRRNT_2; Domain location=142-184; Score =28.3; E_value=3.1e-05; Accession=PF08263.4; Description=Leucine rich repeat N-terminal domain
  Pfam annotation: Domain name=LRR_1; Domain location=103-126; Score =8.9; E_value=5.9; Accession=PF00560.25; Description=Leucine Rich Repeat
  Pfam annotation: Domain name=LRR_1; Domain location=187-209; Score =3.5; E_value=65; Accession=PF00560.25; Description=Leucine Rich Repeat
  Pfam annotation: Domain name=LRR_1; Domain location=5-27; Score=15.0; E_value=0.32; Accession=PF00560.25; Description=Leucine Rich Repeat
  Pfam annotation: Domain name=LRR_1; Domain location=55-77; Score =15.7; E_value=0.2; Accession=PF00560.25; Description=Leucine Rich Repeat
  Pfam annotation: Domain name=LRR_1; Domain location=79-101; Score =5.5; E_value=28; Accession=PF00560.25; Description=Leucine Rich Repeat
  Pfam module annotation: Pfam domain module=LRRNT_2::LRR_1::LRR_1::LRR_ 1::LRR_1::LRR_1; Domain location=142-184::103-126::187-209::5-27::55 -77::79-101
HHRTRLQNLTLSYNNLSGPIPDTFNGSAIQRLWLNNQLGEAKLSGTLDVIATMTSLQELWLHGNQFTGPIPDDIAACKGLYTVRLNSNQLRGLVPPGLATLPALQELKIDNNNLLGPVPPVKAPNFTFAGNEFCAAKPGDTCAPEVMALLQFLAGVQYPTGLVDSWSGNDPCAGAASWAGVTCVQGKLTVLNLPNKGLNGTISPSLGNITTLVDVNLGG

SEQ ID NO: 95817 - protein, 87 aa, Setaria italica
  Transcript Sequence Number=SeqID_29843
MAGMKLAALGFIVLISIGLGEAARVARYSSSEGSGTGRGEGSGSMDGAGSGSGSGTGSGVSGDYGGSAHGSGGGGGKGGGGGLYGGS

SEQ ID NO: 95818 - protein, 168 aa, Setaria italica
  misc_feature (57)..(57): Xaa can be any naturally occurring amino acid
  Transcript Sequence Number=SeqID_29844
  Gene Ontology: Mol. function=transporter activity; Cellular component= integral to membrane; Biological process=transport
  Homolog annotation: Hit_ID=B9R8F8; Match level="QueryCoverage=95%, HitCoverage=36%, E-value=5e-51, Identity=60%"; Hit description =Tetracycline transporter, putative
MEEAAELGHLLVFAFLFFFATFMVGSVITDVTMGALCPGRDECSLAIYLTGLQQAVXGLGALVLTPVVGNLSDRYGRKALLALPATASIVPLGILAYGRTKGYFYAYYVTKMLTAMVSDGSMMCLSLAYVADRVPEARRAAAFGVFTGVCSAGFVASNLTTDPTYLPR

SEQ ID NO: 95819 - protein, 106 aa, Setaria italica
  Transcript Sequence Number=SeqID_29845
  Gene Ontology: Mol. function=protein serine/threonine kinase activity; Cellular component=integral to membrane; Biological process=protein amino acid phosphorylation
  Homolog annotation: Hit_ID=B9S566; Match level="QueryCoverage=100%, HitCoverage=9%, E-value=2e-47, Identity=79%"; Hit description =Receptor protein kinase CLAVATA1, putative
YGYMMKITEKSDVYSYGVVVLEVLTGKQPIDPTIPDGLHVVDWVRRCRDRADVLDPALRGRSDGEVEEMMQVMGVALLCVSPTPDDRPTMKDVAAMLKEIRMERED

SEQ ID NO: 95820 - protein, 67 aa, Setaria italica
  Transcript Sequence Number=SeqID_29846
TLGELLQTKLPENYIPCIPRCCKSKASRKIESVQFNFHTIPVIHQACTANFPLMSLSTMSAIEGLSF

SEQ ID NO: 95821 - protein, 330 aa, Setaria italica
  Transcript Sequence Number=SeqID_29847
  Gene Ontology: Mol. function=protein serine/threonine kinase activity; Cellular component=integral to membrane; Biological process=protein amino acid phosphorylation
  Homolog annotation: Hit_ID=A3FPG3; Match level="QueryCoverage=92%, HitCoverage=92%, E-value=3e-78, Identity=49%"; Hit description =Serine/threonine protein kinase
  Pfam annotation: Domain name=Pkinase; Domain location=36-321; Score =116.7; E_value=7.7e-32; Accession=PF00069.17; Description=Protein kinase domain
  Pfam annotation: Domain name=Pkinase_Tyr; Domain location=36-321; Score=34.1; E_value=5.4e-16; Accession=PF07714.9; Description =Protein tyrosine kinase
  Pfam module annotation: Pfam domain module=Pkinase::Pkinase_Tyr; Domain location=36-321::36-321
MVAEVMGASSESEPTLLSTLPNEVPLDFLREITSDFSEERRLSEDAFGTVYKGVLGNGQLVAVKKLAAYVQVPAGKRFLNAATNLMAVQHDNIVKLLSCCSESKKKVVEHKGRFILVDMDECVLCYEFLHKGSLHDYLSDSTRKTDWDTNFKIIKGICQGLSFLHEGMMLGRIVHLDLHPANILLDNNKVPKIANFGLSQLFDTDKSRTYTMNVMGLKGYMAPEYLYRGEISPQCDIYSLGVVIIEITTGEKNCSNDKDMAGRNFIDRIRQTWTDDHIASMYPLLRADRLVEVKACIHIGLECVDVNQKERPSIADIVDKLINGKFAVQA

SEQ ID NO: 95822 - protein, 90 aa, Setaria italica
  Transcript Sequence Number=SeqID_29848
PPAVVAREQLRRLRLGRRRRPRHVRHYDDHGQLGGAHRVHADHPRKEVELNRCGASRPAAVTTVTITAGAVWPGPSSLLVNLCLHKVQQG

SEQ ID NO: 95823 - protein, 138 aa, Setaria italica
  Transcript Sequence Number=SeqID_29849
  Homolog annotation: Hit_ID=B9SKL1; Match level="QueryCoverage=79%, HitCoverage=12%, E-value=2e-23, Identity=46%"; Hit description =Suppression of tumorigenicity, putative
  Subcellular localization annotation: CTP_CleavageSite=39; ConfidenceScore=5.71e-01
MHSAPSSPARSATSTSSSPLSQIKQQARHVRTGSFQRFRQQMQRAWKWGPIGGGGGGERSPREQLLRTSLNIEAMANQKRQWYQIHSKAQDHWQYKEPASLFEHFFVVGLHSYANVGVIEDAFAKKKAWESNVARSEI

SEQ ID NO: 95824 - protein, 110 aa, Setaria italica
  misc_feature (8)..(8): Xaa can be any naturally occurring amino acid
  misc_feature (45)..(45): Xaa can be any naturally occurring amino acid
  Transcript Sequence Number=SeqID_29850
  Gene Ontology: Mol. function=DNA binding; Biological process =regulation of transcription
  Homolog annotation: Hit_ID=B4F7W7; Match level="QueryCoverage=100%, HitCoverage=25%, E-value=1e-27, Identity=63%"; Hit description=MYB -CC type transfactor
DRATPKGXVLRIMGVPGLTIYHVKSHLQKYRLAKYIPDPSTDGRXPLSSCFITFKKDHHFTIILLHFIHTCRVDNKAEKKDPGDLLAALEGSSTMQISEALKLQMEVQKR

SEQ ID NO: 95825 - protein, 302 aa, Setaria italica
  Transcript Sequence Number=SeqID_29851
  Gene Ontology: Mol. function=DNA binding; Biological process =regulation of transcription
  Homolog annotation: Hit_ID=B4F7W7; Match level="QueryCoverage=99%, HitCoverage=99%, E-value=1e-102, Identity=63%"; Hit description=MYB -CC type transfactor
  Pfam annotation: Domain name=Myb_DNA-binding; Domain location=45-96; Score=40.4; E_value=6.9e-09; Accession=PF00249.23; Description=Myb -like DNA-binding domain
  Subcellular localization annotation: CTP_CleavageSite=43; ConfidenceScore=5.08e-01
MYQPNPSIGPTQSNPAPHDQMGPGDGAMVPHNGGNSNPNMAARQRLRWTNELHDRFVEAVTQLGGPDRATPKGVLRIMGVPGLTIYHVKSHLQKYRLAKYIPDPSTDDNKAEKKDPGDLLAALEGSSTMQISEALKLQMEVQKRLHEQLEVQRQLQLRIEAQGKYLQKIIEEQQRISGAGASRDTSSEQLPDSERTNPSTPVPTSESPLQAVPFSKDNGSRVEPMESASHDDLPHGEPVTPDSNCRPGSPTLSPKHERAAKRQRGSSDGTPIADGDFALPHHIFESSTDSEFQQCSMPYSSH

SEQ ID NO: 95826 - protein, 83 aa, Setaria italica
  Transcript Sequence Number=SeqID_29852
  Gene Ontology: Cellular component=plasma membrane
  Homolog annotation: Hit_ID=B6U7W3; Match level="QueryCoverage=46%, HitCoverage=6%, E-value=2e-11, Identity=87%"; Hit description =Nitrate and chloride transporter
HEARAEAPEPSPATVAAKPAPLPEPLPVTSKPARVGARLVAALRPPPRGEDYTILQALVSVDMLFLFTATVFGVGGTLTAIDN

SEQ ID NO: 95827 - protein, 228 aa, Setaria italica
  misc_feature (210)..(210): Xaa can be any naturally occurring amino acid
  Transcript Sequence Number=SeqID_29853
  Gene Ontology: Cellular component=nucleolus
VKAAARVRYEPGPAFAEVKEEAMLDISPTESTEFWLIQWPKDQLDVSDFHGKELSLKLHKDGNIGSLESSSGKSYELVSFAAQQPDATVFQPSGSEMKPVGKISRRVCLVRYPEAEELAKPNFGGLTPSSKISAGSSRKTKSRFTSASKNRSSQGSALSLGQWSAEPTPKHKQKRKDKSNLGHSNMSGKASEGSQARGAESNTTTSEMPXLSSEKSKKKKRLDRGVVV

SEQ ID NO: 95828 - protein, 254 aa, Setaria italica
  Transcript Sequence Number=SeqID_29854
  Homolog annotation: Hit_ID=Q9M9X3; Match level="QueryCoverage=87%, HitCoverage=10%, E-value=2e-34, Identity=39%"; Hit description =F18C1.5 protein
DDKKLLVVLQSAVVKVISDLPTDKLSIDGVPFLISASVELAELSKLIIFCGPIEDPSPVATARRIFKSEHLEGLLSYKATIGLITSSKYSFLQFDTDPYLLSLIQERSFFPLSAALLSSPILHLASGPAAEILMEIASSIESIILSLLFCRSGLSFLLSQPEATELIVLSLQDAENMNKTECITLRQAFVLLSKGFFCRPQEVGMITELHLKVGSAANRILSVPLNSDELLWVLWELCAISRSDSGRQALLALG

SEQ ID NO: 95829 - protein, 125 aa, Setaria italica
  Transcript Sequence Number=SeqID_29855
MTSHGKRIRKLSPSPSLSSGKQTDREMKEKNVAKNAQVLKKKGDEKVIPGPLKLSRSLNMSGKSITSLRLKAIRKDKIAPPIKSSKKVSETENSVTDAKNAKEKFLKMASPKVRKPEVNNKVTRP

SEQ ID NO: 95830 - protein, 551 aa, Setaria italica
  Transcript Sequence Number=SeqID_29856
  Gene Ontology: Cellular component=plasma membrane
  Pfam annotation: Domain name=CaM_binding; Domain location=419-534; Score=70.2; E_value=7.7e-18; Accession=PF07839.3; Description=Plant calmodulin-binding domain
MGWQCGWNCWCGWLSWCGLWRSFCVQKMASCEPDHFSSISCVEDLSAEASEPIVAEMLPADAECFVISHDDVEDCEDRVSSDGAESIELEMPLAIQDIDESDEQTEDAILPANNVCEVGQPSLVDHLPDQSANECASSDKRTSQAVIASEKHEQAAFGTKSKGSANKPEKPKVKATSSVTRNTVSSQRNGRASHLKASGAADESSRGPKTIRKTADATAAKKFSKPERKFSSNVASAAPKAKEIKVPSPSNAMDSSAKPPRLAKPKATTAKKAPSPSLSSGKQTDREMKEKNVAKNAQVLKKKGDEKVIPGPLKLSRSLNMSGKSITSLRLKAIRKDKIAPPIKSSKKVSETENSVTDAKNAKEKFLKMASPKVRKPEVNNKVTRPPRKEKSDTPRTAIARRPKPAPITSSSTMAPAPQPRKLTFRRGKVLNPDESSSTPRRLRFRSAMAVADTSGSRSRGSRITGRRNGISIAAKDPGAEVVVLRRRQDGKEVKKQEQVLLNNVIEETASRLVAEARKSKVKALVGAFETVISLQETGKASAPAAASVAP

SEQ ID NO: 95831 - protein, 156 aa, Setaria italica
  Transcript Sequence Number=SeqID_29857
MARHGPLLVLLLALTALNNSFAARHLLDTEAAPEAAPAQPSTPAVPTTLPPVPSIPAVPTTLPPVPSIPLPAMPKMAIPPIPSIPIPKVTLPPAAAGAIPSLPNIPAVPVTLPPIPSIPTTMPSIPTTMPTTIPTIPGLQVPPIPFTAPPPQTSSP

SEQ ID NO: 95832 - protein, 137 aa, Setaria italica
  Transcript Sequence Number=SeqID_29858
LNSPYDTENFFIPYLTPSLTFMPHLTLPFIPFHLRPRSMSDYMWMDQNAIDNARRPSGVTASTQGAPQSALNTSFSNLSPSPFSSLSRRPSPKIQIPAAGQILWKAAWEFARCSTAAGVVLGEGRNESWWGWSRSIL

SEQ ID NO: 95833 - protein, 190 aa, Setaria italica
  Transcript Sequence Number=SeqID_29859
  Homolog annotation: Hit_ID=A9PAC1; Match level="QueryCoverage=99%, HitCoverage=54%, E-value=2e-75, Identity=68%"; Hit description=F-box family protein
  Pfam annotation: Domain name=Kelch_1; Domain location=107-153; Score =50.8; E_value=5.3e-12; Accession=PF01344.17; Description=Kelch motif
  Pfam annotation: Domain name=Kelch_1; Domain location=49-105; Score =36.9; E_value=7.9e-08; Accession=PF01344.17; Description=Kelch motif
  Pfam annotation: Domain name=Kelch_2; Domain location=107-153; Score =29.9; E_value=1.1e-05; Accession=PF07646.7; Description=Kelch motif
  Pfam annotation: Domain name=Kelch_2; Domain location=49-105; Score =20.0; E_value=0.0099; Accession=PF07646.7; Description=Kelch motif
  Pfam module annotation: Pfam domain module=Kelch_1::Kelch_1::Kelch _2::Kelch_2; Domain location=107-153::49-105::107-153::49-105
TFFKIRNQIGATEELLCVLAFEPENMWQLYDPLRDKWITLPVMPSQIRNIARFGVASVAGKLYVIGGGSDRVDPLTGDHDRIFASNEVWSYDPLQRVWSQRAPMLVARAMFACCALDGKIIVAGGFTNCRKSISKAEIYDPEADMWEPLPDLRQAHSSACSGLVIKGKMHVLHKGLSTVQILEDGGSHWA

SEQ ID NO: 95834 - protein, 49 aa, Setaria italica
  Transcript Sequence Number=SeqID_29860
IRSISKYKQEVTHLEQSLDYAYVVDLARWQANTRFSYKASLNHHLRYES

SEQ ID NO: 95835 - protein, 137 aa, Setaria italica
  misc_feature (19)..(19): Xaa can be any naturally occurring amino acid
  misc_feature (98)..(98): Xaa can be any naturally occurring amino acid
  misc_feature (107)..(107): Xaa can be any naturally occurring amino acid
  misc_feature (124)..(124): Xaa can be any naturally occurring amino acid
  Transcript Sequence Number=SeqID_29861
  Gene Ontology: Mol. function=ribonuclease H activity
  Homolog annotation: Hit_ID=B6SJ51; Match level="QueryCoverage=99%, HitCoverage=55%, E-value=2e-64, Identity=91%"; Hit description=FIP1
  Pfam annotation: Domain name=GRAM; Domain location=41-120; Score =42.0; E_value=2.3e-09; Accession=PF02893.12; Description=GRAM domain
KTEGIAGDVWQHLKTGSHXSDTAMGRIAQISKVISEGGYDKIFQQTFECLPDEKLKKAYVCYLSTSHGPIMGVLYLSTVKIAFGSDSPVKYVTEDNKXESSFYKVVXLPLPHLRSVNPTASQQXNPAERYIQVVSVG

SEQ ID NO: 95836 - protein, 189 aa, Setaria italica
  Transcript Sequence Number=SeqID_29862
  Gene Ontology: Mol. function=ribonuclease H activity
  Homolog annotation: Hit_ID=B6SJ51; Match level="QueryCoverage=100%, HitCoverage=79%, E-value=1e-95, Identity=89%"; Hit description=FIP1
  Pfam annotation: Domain name=GRAM; Domain location=68-144; Score =36.4; E_value=1.2e-07; Accession=PF02893.12; Description=GRAM domain
PDRPKSATDNLKEMFGMVGKKFNEAARKTEGIAGDVWQHLKTGSSMTDTAMGRIAQISKVISEGGYDKIFQQTFECLPDEKVVYVCYLSTSHGPIMGVLYLSTVKIAFGSDSPVKYVTEDNKSESSFYKVVLPLPHLRSVNPTASQQNPAERYIQVVSVDNHEFWFMGFVNYDSAVKNLQEAVRGVQGA

SEQ ID NO: 95837 - protein, 90 aa, Setaria italica
  Transcript Sequence Number=SeqID_29863
  Gene Ontology: Mol. function=zinc ion binding; Cellular component =intracellular
  Homolog annotation: Hit_ID=Q01MU4; Match level="QueryCoverage=54%, HitCoverage=14%, E-value=4e-20, Identity=89%"; Hit description =OSIGBa0102O13.12 protein
  Pfam annotation: Domain name=zf-C2H2; Domain location=50-72; Score =18.5; E_value=0.029; Accession=PF00096.18; Description=Zinc finger, C2H2 type
ALCLMLLAHGVPAAAAVGAKEDEVAVVVAKEARFRSRRPADGAAAGEYVYECKTCNKCFPSFQALGGHRTSHKKPRLVPPPSALTSEDSS

SEQ ID NO: 95838 - protein, 149 aa, Setaria italica
  Transcript Sequence Number=SeqID_29864
  Gene Ontology: Mol. function=zinc ion binding; Cellular component =intracellular
  Homolog annotation: Hit_ID=Q6K9W9; Match level="QueryCoverage=67%, HitCoverage=31%, E-value=4e-26, Identity=57%"; Hit description =Putative finger protein EPF1
  Pfam annotation: Domain name=zf-C2H2; Domain location=107-129; Score =19.9; E_value=0.011; Accession=PF00096.18; Description=Zinc finger, C2H2 type
VVKRKRTKRPRHHPARAVFLPSVGLFVLSEDDAEEEDMAHCLILLAQGAGGGSSGAHAAVDSKHSPSLSPPPAAAPPAPAKSERYTSRKYTEAVTTADGVKAGFYVYECKTCNKCFPTFQALGGHRASHKKPRIAGTDDEIVLTTTYLP

SEQ ID NO: 95839 - protein, 65 aa, Setaria italica
  Transcript Sequence Number=SeqID_29865
  Homolog annotation: Hit_ID=Q5VPU9; Match level="QueryCoverage=96%, HitCoverage=15%, E-value=2e-23, Identity=79%"; Hit description =Carboxyl-terminal peptidase-like
  Pfam annotation: Domain name=DUF239; Domain location=1-65; Score= -44.0; E_value=2.7e-05; Accession=PF03080.7; Description=Arabidopsis proteins of unknown function
GNDLNTIEAGWQVYPELYGDRSTRLFIYWTRDAYRRTGCYNLQCSGFIQTNNQIAIGGSFSPVSR

SEQ ID NO: 95840 - protein, 134 aa, Setaria italica
  Transcript Sequence Number=SeqID_29866
SLGASQRAQNSEEPKPFLEEEKRESPGRANQNQLPPLPLQMKAFTKLWPALAESKLAIAVFAGLFVGAVVLFSVPPQFPLHGANVLLRGSPGNGGAGSRADETNGPAQPPLADMSAEAPAPTKQAQEKEATSSP

SEQ ID NO: 95841 - protein, 96 aa, Setaria italica
  Transcript Sequence Number=SeqID_29867
  Gene Ontology: Mol. function=transferase activity, transferring glycosyl groups; Biological process=metabolic process
  Homolog annotation: Hit_ID=B6SXW3; Match level="QueryCoverage=100%, HitCoverage=19%, E-value=2e-47, Identity=91%"; Hit description =Cytokinin-O-glucosyltransferase 2
VPCALFWTASVCGYMGYRYYRDLMDKGIFPLKDAEQLTNGFLDTPVDWAPGMSKHTRLKDMPSFMRSTDPDEFMFHFALKVTEQIAGADAVILNTF

SEQ ID NO: 95842 - protein, 424 aa, Setaria italica
  Transcript Sequence Number=SeqID_29868
  Gene Ontology: Mol. function=transporter activity; Cellular component= intracellular; Biological process=transport
  Homolog annotation: Hit_ID=Q6ZG68; Match level="QueryCoverage=99%, HitCoverage=68%, E-value=1e-168, Identity=70%"; Hit description =Putative SEC14 cytosolic factor
  Pfam annotation: Domain name=CRAL_TRIO; Domain location=1-174; Score =113.8; E_value=5.6e-31; Accession=PF00650.12; Description=CRALTRIO domain
RPVYIVRHKKIDVNRLMQVTTMDRFVKNHVKEFEKNFAVKFPACSIAAKRHIDQSTTILDVQGVGMKQFSKAARDLIGMLQKIDGDNYPESLCRMFIINAGQGFRLLWSTVKSFLDPKTTAKIHVLGNKYQSKLLEVIDASELPEFFGGTCQCEGGCMKADKGPWKDPEIMKMVQSGVGRCGSRRSASSEVEDKMICEDDIIYPKKQTSSDGEAQLVGDGQPTLSRKISRVQIEYPQLSPVHEELIPTLYPTPGSPYSCDVPMVEKAIDAICKSQGTLPDEKLAITKAVVTASNGSNPPLFGGIIALVMSIATMLRLTRNMPVKVLGAAIGDAKPTTPQKSKSKVQARQRSKLSPEAVKAAEDVISMKRLAELEEKIKALLTKSATMPADKEEMLQAAVTRISTLEEELAATKKALQKTPECQG

SEQ ID NO: 95843 - protein, 251 aa, Setaria italica
  Transcript Sequence Number=SeqID_29869
  Gene Ontology: Mol. function=binding
KSKANRLLDDGLVCVSAFRCLPAWSTETGVAFRALHRVLVIAAPHSTDDTCCSGAGELLNSTIFPPGLAILVDMALEHRGLVPVIAEFTNRLLACNSHRWAGEWLLRTLDERLLPRLEPGYQLASYYPLFEKIAQNETVPQLRLLELLTKQMVSLTKKHGPDTELTSWSQGSKVVGICRVMLKHHHSSHVFLPLSHLLVLTIESFPDLEVRDHARICLRMLSCVPGKKLRHLMGVGEQPSGVAPSHPGSLF

SEQ ID NO: 95844 - protein, 86 aa, Setaria italica
  Transcript Sequence Number=SeqID_29870
PLFINCSDEVTKRFYACNESRNLMNLWAEMFHRARRLAIWPYTNAAVPAHRPASNPDETESTAWISCAHTRNSDAGTPSSSIASRP

SEQ ID NO: 95845 - protein, 209 aa, Setaria italica
  misc_feature (187)..(187): Xaa can be any naturally occurring amino acid
  Transcript Sequence Number=SeqID_29871
  Gene Ontology: Cellular component=nucleus; Biological process=cell division
  Homolog annotation: Hit_ID=B6U4E0; Match level="QueryCoverage=100%, HitCoverage=43%, E-value=9e-96, Identity=80%"; Hit description =Cyclin-A2
  Pfam annotation: Domain name=Cyclin_C; Domain location=78-205; Score =164.6; E_value=2.9e-46; Accession=PF02984.11; Description=Cyclin, C -terminal domain
  Pfam annotation: Domain name=Cyclin_N; Domain location=1-76; Score =53.3; E_value=9.5e-13; Accession=PF00134.15; Description=Cyclin, N -terminal domain
  Pfam module annotation: Pfam domain module=Cyclin_C::Cyclin_N; Domain location=78-205::1-76
LYLTVYLIDQYLSQKCIQKQELQLLGITSMLIASKYEEFCAPSVEEFCIITDSTYQKAEVLDMERKVLNDLGFYLSVPTTNTFLRRFLRAAQPSCTAPLSTLCYLAKYLAELTLIDYGFLKFLPSVVAASSVFLAKWTLNQSDHPWNPTLEYYTSYKSSNIRTCVCALQELQHNTRDCPLNSIREKXGQQKFECFSNLRSPELLQSLFT

SEQ ID NO: 95846 - protein, 148 aa, Setaria italica
  Transcript Sequence Number=SeqID_29872
  Gene Ontology: Mol. function=nucleotide binding; Cellular component =chromosome; Biological process=chromosome organization and biogenesis
  Homolog annotation: Hit_ID=B9H079; Match level="QueryCoverage=89%, HitCoverage=11%, E-value=1e-26, Identity=51%"; Hit description =Condensin complex components subunit
IERDAAVKDVEDGASDMKRKAEDLTRKLDENEKEYQGVLAGKSNANEKKCLEDQLRDAKAAVGDAESGLKQLTTKISHSEKELKEKKALLVSKRDEATAAENELKERTKDLEAIKTSMGSFNYNEAQMEALQKAILRSQKSDLKDCIR

SEQ ID NO: 95847 - protein, 63 aa, Setaria italica
  Transcript Sequence Number=SeqID_29873
KGKTKIKPFRHRVKTDPKFFDKSWRKLHDAIREIYNIETEPSSPLTPLSWRPPPSRASSILHP

SEQ ID NO: 95848 - protein, 110 aa, Setaria italica
  Transcript Sequence Number=SeqID_29874
  Gene Ontology: Mol. function=phosphatidylinositol binding; Cellular component=clathrin coat; Biological process=clathrin coat assembly
  Homolog annotation: Hit_ID=B6TZA2; Match level="QueryCoverage=100%, HitCoverage=27%, E-value=7e-39, Identity=75%"; Hit description =Clathrin assembly protein
YFRFLDTRSLFAAQELDDAGGGSGSDDDEDARLDRVTKQQHLLDLLMQIRPYGDGMEQGLILEAMDCVVIEIFEVYSQVCTGIARFLVAVLGSAPTPPPRRPGETMAEAR

SEQ ID NO: 95849 - protein, 123 aa, Setaria italica
  Transcript Sequence Number=SeqID_29875
FYPILYVHCLISYCSCRGSPEKRKTTKSSETSIVPFQGDELPASSMSFPPNQSLESAAVRKGKSTNSASIGFKRSRSGSNQLEPIPVSSEQTSQQPIAPVKAKVKRKRKQPAKKQGKNLRAII

SEQ ID NO: 95850 - protein, 193 aa, Setaria italica
  Transcript Sequence Number=SeqID_29876
  Gene Ontology: Mol. function=transcription factor activity; Cellular component=nucleus; Biological process=regulation of transcription, DNA-dependent
  Homolog annotation: Hit_ID=B6SZ49; Match level="QueryCoverage=38%, HitCoverage=41%, E-value=7e-17, Identity=65%"; Hit description =Ethylene-responsive transcription factor 3
  Pfam annotation: Domain name=AP2; Domain location=14-65; Score=75.5; E_value=1.9e-19; Accession=PF00847.12; Description=AP2 domain
MMCDTAAAVPVAAPRYRGVRKRPWGRFAAEIRDPAKRARVWLGTFDSAEAAARAYDVAARTLRGPLARTNFPSAASRLPLASRPVAPAPAAPTCSSSSTVESSSGPRGAQPRAAAGTTAVAPRSSRRLVKPRPPRKAAPEADCHSDCASSASVVDDGDDASTVRSRAPLGLDLNLPAPVDEDHGLQLCTELRL

SEQ ID NO: 95851 - protein, 72 aa, Setaria italica
  Transcript Sequence Number=SeqID_29877
  Subcellular localization annotation: CTP_CleavageSite=30; ConfidenceScore=5.11e-01
MGIEAKCGGLAVATGATVRRPLQPRDTNVAASTVVVGKAAPKPKAKPKAVTRLAASPPPLPPSPPPPPPAPV

SEQ ID NO: 95852 - protein, 93 aa, Setaria italica
  Transcript Sequence Number=SeqID_29878
  Gene Ontology: Mol. function=RNA binding
  Homolog annotation: Hit_ID=B9S9M0; Match level="QueryCoverage=79%, HitCoverage=10%, E-value=1e-12, Identity=50%"; Hit description =Poly(RC)-binding protein, putative
  Pfam annotation: Domain name=KH_1; Domain location=19-87; Score=29.6; E_value=1.3e-05; Accession=PF00013.21; Description=KH domain
GDEAMGGEEEEREVTGAVGCRMLAAGAVTCCVLGMGGKTVERMRQESGAQIRVFRNREQLPPCAGPGDELIHISGSFSQVRKGLLAVSTCLQD

SEQ ID NO: 95853 - protein, 95 aa, Setaria italica
  Transcript Sequence Number=SeqID_29879
SPWPIVCCLITIEKTCSLIEPQLQTIFAVLLYNILISIFCKYNKVLVMIFNHFCFLFHTESTITASSVILLIFVPCLYPADNKNFVEQWVSSLQN

SEQ ID NO: 95854 - protein, 158 aa, Setaria italica
  misc_feature (134)..(134): Xaa can be any naturally occurring amino acid
  Transcript Sequence Number=SeqID_29880
  Gene Ontology: Mol. function=aspartic-type endopeptidase activity; Cellular component=cell wall; Biological process=proteolysis
  Homolog annotation: Hit_ID=B9SA95; Match level="QueryCoverage=75%, HitCoverage=27%, E-value=2e-17, Identity=37%"; Hit description =Aspartic proteinase nepenthesin-1, putative
FSYCFTSMFESTSSLVTLGGAPAALHGHAHSGEVRSTPLLRDPSQPSLYFLSLKAISVGSTRIPLPASRRRSAIIDSGASITTLPEDLYEAVRAEFAAQVGLPLSGAAEGSALDLCFALPVTAFWRRHAVPALXRCTWRAPTGSYRAGTTCSRTSARG

SEQ ID NO: 95855 - protein, 61 aa, Setaria italica
  Transcript Sequence Number=SeqID_29881
  Gene Ontology: Mol. function=protein serine/threonine kinase activity; Biological process=protein amino acid phosphorylation
  Homolog annotation: Hit_ID=B6SWH3; Match level="QueryCoverage=88%, HitCoverage=7%, E-value=9e-13, Identity=72%"; Hit description=Lectin- like receptor kinase 7
PPPLPPACSGEVGFDDFVHSYPSSSFERAAAAGGGWDAGTQTSVATFPFSPLSMRSTHVSM

SEQ ID NO: 95856 - protein, 173 aa, Setaria italica
  Transcript Sequence Number=SeqID_29882
  Gene Ontology: Mol. function=heat shock protein binding; Biological process=response to stress
  Homolog annotation: Hit_ID=B9RB96; Match level="QueryCoverage=97%, HitCoverage=49%, E-value=7e-79, Identity=82%"; Hit description =Protein SIS1, putative
  Pfam annotation: Domain name=DnaJ_C; Domain location=49-171; Score =62.8; E_value=1.2e-15; Accession=PF01556.10; Description=DnaJ C terminal region
ACRCSLEELYKGTTKKMKISREIADASGKTIPVEEILTIDVKPGWKKGTKITFPEKGNETPNTIPADLVFIIDEKPHPVFTRDGNDLVVTQKIPLAEALTGYTAHLTTLDGRSLTVPISSVIHPGYEEVVRGEGMPIPKDPSRKGNLRIKFDIKFPSRLTADQKSGVKRLLGQ

SEQ ID NO: 95857 - protein, 65 aa, Setaria italica
  Transcript Sequence Number=SeqID_29883
MEAAAAKLISRDRITDAAATLFSTNSVKQIPERFIRTDELQAAGAVVSDGEAFELPVVDMAKLMD

SEQ ID NO: 95858 - protein, 123 aa, Setaria italica
  Transcript Sequence Number=SeqID_29884
  Gene Ontology: Mol. function=amino acid transmembrane transporter activity; Cellular component=integral to membrane; Biological process=amino acid transport
  Homolog annotation: Hit_ID=B9I635; Match level="QueryCoverage=97%, HitCoverage=18%, E-value=4e-48, Identity=75%"; Hit description =Cationic amino acid transporter
WEFRNGWAGYKGPDGYFPNGVGGVLSGSATLFFAFIGFDTVASTAEEVKNPQRDLPLGMGLTLSLCCFLYMMVSAVVVGLVPYHAIDPDTPISSAFAQYGMQWAEYVVASGAVLALIASLIGG

SEQ ID NO: 95859 - protein, 110 aa, Setaria italica
  Transcript Sequence Number=SeqID_29885
  Gene Ontology: Mol. function=unfolded protein binding; Cellular component=prefoldin complex; Biological process=protein folding
  Homolog annotation: Hit_ID=B6TVU2; Match level="QueryCoverage=96%, HitCoverage=70%, E-value=2e-48, Identity=90%"; Hit description =Prefoldin subunit 5
  Pfam annotation: Domain name=Prefoldin; Domain location=3-103; Score =73.0; E_value=1.1e-18; Accession=PF02996.9; Description=Prefoldin subunit
HHPALENASSALQDLGLRCAGKKMLVPLTASLYVPGSLDDAEKVLVDVGTGYFIEKTMDQGKEYCERKINLLKSNFDELLEVATKKKAIADEMDLLLRTKLRQASPGPSS

SEQ ID NO: 95860 - protein, 54 aa, Setaria italica
  Transcript Sequence Number=SeqID_29886
  Gene Ontology: Mol. function=zinc ion binding; Cellular component =intracellular
  Homolog annotation: Hit_ID=B6SRW9; Match level="QueryCoverage=81%, HitCoverage=19%, E-value=9e-15, Identity=90%"; Hit description=B-box zinc finger family protein
  Pfam annotation: Domain name=zf-B_box; Domain location=9-51; Score =22.9; E_value=0.00057; Accession=PF00643.16; Description=B-box zinc finger
MGGAGAAGKRGMRCELCGGAAAVHCAADSAFLCLRCDAKVHGANFLASRHTGDR

SEQ ID NO: 95861 - protein, 331 aa, Setaria italica
  Transcript Sequence Number=SeqID_29887
  Gene Ontology: Mol. function=hydrolase activity; Cellular component =membrane; Biological process=metabolic process
  Homolog annotation: Hit_ID=Q5JNL2; Match level="QueryCoverage=96%, HitCoverage=53%, E-value=8e-75, Identity=43%"; Hit description =Haloacid dehalogenase-like hydrolase-like
  Pfam annotation: Domain name=Hydrolase_3; Domain location=103-326; Score=6.9; E_value=2.4e-06; Accession=PF08282.4; Description =haloacid dehalogenase-like hydrolase
YSHSRRQAEERGHTLLDEIRILMVHGLLHLLGFDHELSEEAEVEMEREEEHVLNTLEWKGKGLIKSAYDTATNMEHLQNSVEANNNIEKLHVREETRTKLSHIICDIDGTLVDYDGRLHEESIESLREAIVTGVNVMMVTRKSRASIIRTLKLLDFHDKGDFVSETSPGVFLQGSLVYGRHGQEVYKAELDVDICKEAFLYSLKHKIPVVAYCKEQCLTLFEHPFVNLLHTVHHENKVKVMHSIEDLLEYSSIQKLLLFDSAEEDSSVLRQHCSELTEGKARVLKMQPNMIDIVPLSASKGGGIRILLDHLGITEDCDLDAIGDYARWLSN

SEQ ID NO: 95862 - protein, 71 aa, Setaria italica
  Transcript Sequence Number=SeqID_29888
SSKLNIEENTVIFIIMPPSNSYSSIYTSILFIMNKYPQSRGAIYTHTEQHLAEIHKTQLYKILRRVKIVMN

SEQ ID NO: 95863 - protein, 60 aa, Setaria italica
  misc_feature (57)..(57): Xaa can be any naturally occurring amino acid
  Transcript Sequence Number=SeqID_29889
  Subcellular localization annotation: CTP_CleavageSite=21; ConfidenceScore=5.42e-01
IVTMELMVHFFFLFSNFFSISNSGNGYRLMVLCLFSVTFTSSVPNYRFVWTFFSIHXFPM

SEQ ID NO: 95864 - protein, 97 aa, Setaria italica
  Transcript Sequence Number=SeqID_29890
  Subcellular localization annotation: CTP_CleavageSite=64; ConfidenceScore=5.38e-01
ENFDSITTATLIAKSNPAHQSISLTVPISLSGSQKSIKFLSQNPKHQPPFLSQEKSTRICHQSRAEQRAPFGRPMDAPSPSKMISCHRWSTSMSIPS

SEQ ID NO: 95865 - protein, 66 aa, Setaria italica
  Transcript Sequence Number=SeqID_29891
LPPPRHARRRARRRSEPCALRASPVAPTLPPITTLPPARPPPPAFSPLPGPDEHAARGGKPRPGLG

SEQ ID NO: 95866 - protein, 81 aa, Setaria italica
  Transcript Sequence Number=SeqID_29892
  Homolog annotation: Hit_ID=B6T8W0; Match level="QueryCoverage=100%, HitCoverage=49%, E-value=8e-23, Identity=67%"; Hit description =SAUR20-auxin-responsive SAUR family member
  Pfam annotation: Domain name=Auxin_inducible; Domain location=1-50; Score=66.8; E_value=8e-17; Accession=PF02519.6; Description=Auxin responsive protein
RFVIPMEYLKHRAFAALLREAEEEFGFQQEGVLRIPCEVPVFETILKAVEKNKKDAAFCYCSVEYAADEVGRGTPNNPLCR

SEQ ID NO: 95867 - protein, 769 aa, Setaria italica
  misc_feature (50)..(50): Xaa can be any naturally occurring amino acid
  Transcript Sequence Number=SeqID_29893
  Gene Ontology: Mol. function=phosphoglucan, water dikinase activity; Cellular component=chloroplast; Biological process=phosphorylation
  Homolog annotation: Hit_ID=Q2QTC2; Match level="QueryCoverage=100%, HitCoverage=63%, E-value=0.0, Identity=73%"; Hit description =Phosphoglucan, water dikinase, chloroplastic
  Pfam annotation: Domain name=PPDK_N; Domain location=438-769; Score= -28.7; E_value=2.9e-11; Accession=PF01326.11; Description=Pyruvate phosphate dikinase, PEPpyruvate bi
FYSELKDFFNAGSLLEQVESIKESLSESALEALSSFMKTKKNLDQLEDAXNLDKIGGSQVLLKTLQSLSSLRSFLMKGLESGLRNDAPDTAIAMRQKWRLCEIGLEDYSFVLLSRYINALEALGGSASLAQGLARNTSIWDDALDALAIGINQVSFSGWKPEECIAIGNELLSWKQKGLSETEGSEDGKYIWALRLKATLDRTRRLTEEYSEALLSIFPEKVEVLGKALGIPENSVRTYTEAEIRAGVIFQVSKLCTVLLKATRAVLGSSVWDVLVPGVAHGALIQVERIVPGSLPSSIKEPVVLVVNKADGDEEVKAAGNNIVGVILLQELPHLSHLGVRARQEKVVFVTCEDDETIANVRLLEGKHVRLGASSSNVDLSVVSNDDGSATISSDPSSGGNLFARELPKEFSPPLATDKLLDVSKPKSYTSGVSVMAGVLELSEASVESSGAKAAACGTLSVLASLSNKVYNDQGIPAAFRVPAGAVIPFGSMEDSLKKSGSLESYTNLIEKIEAAQIENGELDSLSSELQAMISLLSPSKEIIESLKNTFDQNARLIVRSTANVEDLAGMSAAGLYESIPNVSLSDPSSFGAAVGQVWASLYTRRAVLSRRAAGVPQRDAKMAILVQEMLQPDLSFVLHTVSPSDHDPKLVEAEVAPGLGETLASGTRGTPWRLSCDKFDGRVTTLAFANFSEEMVVLTSGPADGEVVRLTVDYSKKTLSVDATFRRQFGQRLAAIGQYLEQKFGSAQDVEGCLVGKDIFIVQSRPQP

SEQ ID NO: 95868 - protein, 144 aa, Setaria italica
  misc_feature (29)..(29): Xaa can be any naturally occurring amino acid
  misc_feature (49)..(49): Xaa can be any naturally occurring amino acid
  Transcript Sequence Number=SeqID_29894
  Gene Ontology: Mol. function=protein dimerization activity
  Homolog annotation: Hit_ID=B9SWK8; Match level="QueryCoverage=90%, HitCoverage=18%, E-value=3e-22, Identity=38%"; Hit description =Protein dimerization, putative
QFWQMIDHIWDDYLHSPSPCCWYFLNPAXFYTVRFRNDAEISSGITTCXLRAAKSHYDALLVAEQMDVYLRKSGQFDSDPAIEEAVGTPQDLWWVKHGTGTPALQSFAGLILGQTCYGVSRYNLDRSLSERLHTEKMAYTERGE

SEQ ID NO: 95869 - protein, 155 aa, Setaria italica
  Transcript Sequence Number=SeqID_29895
  Subcellular localization annotation: CTP_CleavageSite=63; ConfidenceScore=5.15e-01
MSSSDQDDAPDGGEDSPLFRRRGSPSSGAGGVADVPVAQSLIKAASNVCFSLFVLAVLVVTVVAVTYQPPDPWLQSSAAITTSLSRVLPNSTFLVPDDSLLPTGEDFNSSSAVPAPAGADANQDDDGRGEEHQDGGEEGRRGGAAADLPALRPPR

SEQ ID NO: 95870 - protein, 58 aa, Setaria italica
  Transcript Sequence Number=SeqID_29896
  Gene Ontology: Cellular component=plasma membrane
  Homolog annotation: Hit_ID=B9RTK7; Match level="QueryCoverage=93%, HitCoverage=11%, E-value=7e-17, Identity=70%"; Hit description=Ice binding protein, putative
  Pfam annotation: Domain name=PH_2; Domain location=1-55; Score=16.4; E_value=2.8e-05; Accession=PF08458.2; Description=Plant pleckstrin homology-like region
AWPGRHLLEGGEHRRYFGLRTAEHRVIEFECGSQREHDMWTKGVARLLAIADARKRAV

SEQ ID NO: 95871 - protein, 190 aa, Setaria italica
  Transcript Sequence Number=SeqID_29897
  Gene Ontology: Cellular component=plasma membrane
  Homolog annotation: Hit_ID=B9RTK7; Match level="QueryCoverage=97%, HitCoverage=35%, E-value=7e-59, Identity=63%"; Hit description=Ice binding protein, putative
  Pfam annotation: Domain name=PH_2; Domain location=77-187; Score =232.1; E_value=1.4e-66; Accession=PF08458.2; Description=Plant pleckstrin homology-like region
TLKARALKEVWNIAAVIPVEKGAVGGGGHHQKHGALPKLQQHRKLESNGSSISDDVSLEEENNFLGICSQELLARGTELLKRTRKGALHWKVVSVYINRMGLVMLKMKSRHVAGTITKKKKSVVIDVCRDVPAWPGRHLLEDGEHRRYFGLRTAEHRVIEFECTSQREYEMWTKGVARLLTIADDRKRLA

SEQ ID NO: 95872 - protein, 65 aa, Setaria italica
  Transcript Sequence Number=SeqID_29898
  Gene Ontology: Mol. function=hydrolase activity; Biological process =lipid catabolic process
  Homolog annotation: Hit_ID=Q9XE79; Match level="QueryCoverage=98%, HitCoverage=14%, E-value=3e-26, Identity=90%"; Hit description =Patatin-like protein
MASGTTATADTTVPQPPPSQGRLITVLSIDGGGIRGLIPATIIACLEAKLQELDGPDARIADYFD

SEQ ID NO: 95873 - protein, 122 aa, Setaria italica
  misc_feature (20)..(20): Xaa can be any naturally occurring amino acid
  Transcript Sequence Number=SeqID_29899
  Homolog annotation: Hit_ID=Q8YNQ5; Match level="QueryCoverage=72%, HitCoverage=89%, E-value=2e-25, Identity=64%"; Hit description =Asl4507 protein
  Subcellular localization annotation: CTP_CleavageSite=70; ConfidenceScore=5.00e-01
MAPRRAAVVRCGLLPVDPWXRPTMDSQSVASQLFAVSLFPYLGFLYFMTRSKTAPGLTLFGFYFLLAFVGATTVPAGIYAKVHYGTSLSNVDWLHGSAESLLTLTNLFIVLGLRGALRKLEE

SEQ ID NO: 95874 - protein, 172 aa, Setaria italica
  Transcript Sequence Number=SeqID_29900
  Homolog annotation: Hit_ID=Q8YNQ5; Match level="QueryCoverage=49%, HitCoverage=92%, E-value=2e-21, Identity=56%"; Hit description =Asl4507 protein
  Subcellular localization annotation: CTP_CleavageSite=43; ConfidenceScore=5.37e-01
MLATACGAPPCPCARSRLLPSASLGIGYGGARVRSTRQMAPRRAAVVRCGLLPVDPWAPTMDSQSVASQLFAVSLFPYLGFLYFMTRSKTAPGLTLFGFYFLLAFVGATTKVHYGTSLSNVDWLHGSAESLLTLTNLFIVLGLRGALRKLEEEDTKESISEASQDSKEKSSV

SEQ ID NO: 95875 - protein, 91 aa, Setaria italica
  Transcript Sequence Number=SeqID_29901
  Subcellular localization annotation: CTP_CleavageSite=28; ConfidenceScore=5.07e-01
MPLASPLLLPGAAASPAAPPWREQVTVRGVAVAAALGALLCVVIHRLNLTVGVIPALNVASGLLAFFLAAAWQAVAGRLGFGRGPPFTRQE

SEQ ID NO: 95876 - protein, 54 aa, Setaria italica
  Transcript Sequence Number=SeqID_29902
  Subcellular localization annotation: CTP_CleavageSite=32; ConfidenceScore=5.55e-01
LPPAPSPSPRPQPRLPSPPMPPRARSRPRLPAAATAMSPGSASHASSARTAAPT

SEQ ID NO: 95877 - protein, 326 aa, Setaria italica
  Transcript Sequence Number=SeqID_29903
SKKNLELESQHSKKANQTQDMEPAGGGNSDAEDLELILRQKALENFRKFRAAAAGKTDTNGATGKEALIDGSQNTGTEIAEVRSSAVNHFQWQGSSLVMKNSAGSPRSEDCGNATSHSWKQEGSAGMSHGAASPGILEAGEIGGATQQKGRTVEATHSNCQFRSPQDGRNSLSVMQRLESTPGSCAGVLGSSAGVSHVNGAPRVRSVVSIPAREGLDGSTYTTPPRPSENSAPVESSSDVGRPLIDINKAERTNGDGRKTSEASASNGSILSPAEGKSQIRTEDKDGAQFQKKTFSRMHDGETVEVSYKVYIPKKTPALARRKLQR

SEQ ID NO: 95878 - protein, 115 aa, Setaria italica
  misc_feature (1)..(8): Xaa can be any naturally occurring amino acid
  Transcript Sequence Number=SeqID_29904
XXXXXXXXVYKAKGSVISPCGLSFFVQYVSAQRTQKSSIDDASDLLAADTSNKLDRSRTHSTSHSSTSDVKITKLNDDVVAHAHMKLRADMLDPLAQLIVRIPFQDASRRGAGRA

SEQ ID NO: 95879 - protein, 130 aa, Setaria italica
  Transcript Sequence Number=SeqID_29905
  Gene Ontology: Mol. function=nucleoside-triphosphatase activity; Cellular component=integral to membrane; Biological process=transport
  Homolog annotation: Hit_ID=Q6ZIV9; Match level="QueryCoverage=100%, HitCoverage=14%, E-value=1e-49, Identity=74%"; Hit description =Putative ABC transporter
RSLAESLSGGLFPSTSSFNFTNYLDALAKIVAGSDTWPWTTQLIEPVFIPGNKLYLVQPQCLSNSSQTVSSNAGPIPLQLNADCIQGLSLWRESASAVNDELFKGYRQKGGGSGEGKTNEFVAGYDFLNT

SEQ ID NO: 95880 - protein, 106 aa, Setaria italica
  Transcript Sequence Number=SeqID_29906
  Gene Ontology: Cellular component=mitochondrial matrix
  Homolog annotation: Hit_ID=Q2RAS2; Match level="QueryCoverage=53%, HitCoverage=27%, E-value=2e-09, Identity=61%"; Hit description =Mitochondrial glycoprotein, expressed
MFLRRLRTSAALRRGAIDGGVLAALRAELAHELPSSAPSVPPPFHCQDAPDFVTVSDAPLAGDLLLRRRADSEEVLVSALLAPLMFEGQEPLPRDLLIKVFVSKLG

SEQ ID NO: 95881 - protein, 138 aa, Setaria italica
  misc_feature (8)..(8): Xaa can be any naturally occurring amino acid
  misc_feature (13)..(13): Xaa can be any naturally occurring amino acid
  misc_feature (42)..(42): Xaa can be any naturally occurring amino acid
  Transcript Sequence Number=SeqID_29907
  Gene Ontology: Cellular component=plasma membrane
  Homolog annotation: Hit_ID=Q7XRE8; Match level="QueryCoverage=96%, HitCoverage=70%, E-value=3e-53, Identity=73%"; Hit description =OSJNBa0006M15.19 protein
  Pfam annotation: Domain name=PLAT; Domain location=1-125; Score=11.7; E_value=0.00099; Accession=PF01477.15; Description=PLATLH2 domain
CVYTVYVXTGSIXKAGTDSVIGLGLRAADGAGFTIPDLAKWXGLMGAGHDYYERGHLNIFSGRGPCLPSPPCGMNLTSDGSGAHHGWYCKSVEVTASGPRAACARAAFGVEQWLATDAPPYQLHAERSVCGKSDAAEE

SEQ ID NO: 95882 - protein, 76 aa, Setaria italica
  Transcript Sequence Number=SeqID_29908
VTIHQERNTFSASDELEVHIIQSARHHFPCHSTTVISNYARMRLHQQQFLFCCVCIQPSIGRRQQVALVRTISSTS

SEQ ID NO: 95883 - protein, 222 aa, Setaria italica
  Transcript Sequence Number=SeqID_29909
  Gene Ontology: Mol. function=glutathione transferase activity; Biological process=response to stress
  Homolog annotation: Hit_ID=Q9FQA3; Match level="QueryCoverage=100%, HitCoverage=100%, E-value=1e-114, Identity=90%"; Hit description =Glutathione S-transferase
  Pfam annotation: Domain name=GST_C; Domain location=102-196; Score =25.6; E_value=0.0002; Accession=PF00043.17; Description=Glutathione S-transferase, C-terminal domain
  Pfam annotation: Domain name=GST_N; Domain location=4-77; Score=82.9; E_value=1.2e-21; Accession=PF02798.12; Description=Glutathione S -transferase, N-terminal domain
  Pfam module annotation: Pfam domain module=GST_C::GST_N; Domain location=102-196::4-77
MAEKGVKVFGMWASPMVIRVEWALRLKGVEYEYVDEDLANKSADLLRYNPVTKKVPVLVHDGKPIAESTIIVEYIDEAWKGGHPIMPADPYERAQARFWARYAEDKCNAALYPIFTATGEEQRKVAQEAQQCLKTLETALEGKKFFGGDAVGYLDIVVGWFAHWLPVVEEVCGVSIVTDEELPLMKAWFDRILAVDVLKAALPDRDRLVAANKARREQLHSA

SEQ ID NO: 95884 - protein, 62 aa, Setaria italica
  misc_feature (18)..(18): Xaa can be any naturally occurring amino acid
  Transcript Sequence Number=SeqID_29910
DTCSCCVSARAEKTCCFXCITAGGSDSLCKNTCCFPCVLSDSVVAKMEEMAALAKMEEAGQA

SEQ ID NO: 95885 - protein, 127 aa, Setaria italica
  Transcript Sequence Number=SeqID_29911
  Gene Ontology: Mol. function=DNA binding; Cellular component =mitochondrion
  Homolog annotation: Hit_ID=B9RNC6; Match level="QueryCoverage=100%, HitCoverage=25%, E-value=1e-23, Identity=46%"; Hit description =Pentatricopeptide repeat-containing protein, putative
  Pfam annotation: Domain name=PPR; Domain location=29-63; Score=20.4; E_value=0.0076; Accession=PF01535.12; Description=PPR repeat
  Pfam annotation: Domain name=PPR; Domain location=64-97; Score=10.3; E_value=0.54; Accession=PF01535.12; Description=PPR repeat
  Pfam module annotation: Pfam domain module=PPR::PPR; Domain location =29-63::64-97
SLYMKLGRHGKVDSLFKEMKVKNVKPDNLTCCILMTSYASSNKIDAIEELLKEMVEKDVALGWSAYSTLASIYANAGLVEKAESALKKLEGLVGVDDGKQPFDFLMSLYASVGNLSEVNRVWDVIKA

SEQ ID NO: 95886 - protein, 272 aa, Setaria italica
  Transcript Sequence Number=SeqID_29912
  Gene Ontology: Biological process=DNA repair
  Homolog annotation: Hit_ID=Q6JDV7; Match level="QueryCoverage=98%, HitCoverage=38%, E-value=4e-22, Identity=33%"; Hit description=DNA -directed polymerase kappa
TTRGYINSKEDILIYATKLLKAEMPLSLRLMGLRMSQLHDEKDDSSTSTQKTLDIFFRSSGNDLNVNGANVQSSTNTSGQDISPISVTTKDEYLVHDAGTSASTDQQDFFVHDESIFIPEQRNLVSYSNEAVLSNPVIDDALGEAKLDDVTPSAKVMNAEKFDDVCQLTSHEATASSSKPGQQLWIDDYVCSICGFELPPGFEEERQEHSDFHLAESLQHEETVDSKRPISNERLAERSCSTTPTPKKKLKSSKEGKHIPIDAFFAKCNKNL

SEQ ID NO: 95887 - protein, 129 aa, Setaria italica
  Transcript Sequence Number=SeqID_29913
  Gene Ontology: Mol. function=DNA ligase (ATP) activity; Cellular component=nucleus; Biological process=response to DNA damage stimulus
  Homolog annotation: Hit_ID=B9EYN2; Match level="QueryCoverage=100%, HitCoverage=8%, E-value=4e-51, Identity=70%"; Hit description=DNA ligase
  Subcellular localization annotation: CTP_CleavageSite=41; ConfidenceScore=5.20e-01
DAFRHAGDFSVAYFLSHFHSDHYGGLAPSWRRGLIFCSAPTARLVSSVLSVPPQLVVALDLGVRVTVDGWGVTAVDANHCPGAVQFLFSSPGPNTERYVHTGDFRYTESMTHDPYLLEFVRADAVFLDT

SEQ ID NO: 95888 - protein, 107 aa, Setaria italica
  Transcript Sequence Number=SeqID_29914
  Subcellular localization annotation: CTP_CleavageSite=70; ConfidenceScore=5.06e-01
AAPCMSRAAVLVLPWMALVVVRGCARLDSVRWSISRRMAGRMGNQAEAGRVKRWPWLIVHRRARVTRSCRGNPPSSHLLSSVHAHAVCGGGEGVVVTGDRRGWVSVP

SEQ ID NO: 95889 - protein, 200 aa, Setaria italica
  Transcript Sequence Number=SeqID_29915
  Homolog annotation: Hit_ID=A5GXS3; Match level="QueryCoverage=100%, HitCoverage=56%, E-value=8e-92, Identity=83%"; Hit description =Faciata 1-like protein (Fragment)
DEEDEDSFVVPDGYLSDNEGIQIESLLDDKDEEAISSPTGQCTEVEEFRSLLRQQKVLNTLTEQALRKSQPLVISNLNHEKAELLTAEDIKGTAKVEQLCLQVLSMRICPGGVIVDVPTIDNSSASAEEINQCNVKNGSPGSASASAIPETDLPEIVQVIRSCREGIYKVVELLQQKFPNVAKSQLNRKLREISDFVDNH

SEQ ID NO: 95890 - protein, 110 aa, Setaria italica
  misc_feature (93)..(93): Xaa can be any naturally occurring amino acid
  Transcript Sequence Number=SeqID_29916
  Gene Ontology: Mol. function=electron carrier activity; Cellular component=extracellular region; Biological process=response to oxidative stress
  Homolog annotation: Hit_ID=B6TFD7; Match level="QueryCoverage=73%, HitCoverage=25%, E-value=2e-30, Identity=80%"; Hit description =Peroxidase 66
MEARGSRERAARLLRLWVVVMAAAAGARAQLQVGFYDMLCPAAEIIVQEEVSKAVSGNPGVAASLVRLHFHDCFVRGCDASVLLDSTPGNQAXRTRPEHEPPGFEVIDSA

SEQ ID NO: 95891 - protein, 70 aa, Setaria italica
  Transcript Sequence Number=SeqID_29917
FLWKTSKGVSFRVKSKMNSPRSGQHRLTTVRVGDPIDIFALCELSWSNIGEADDSNPIWIIVYLWMDIDI

SEQ ID NO: 95892 - protein, 172 aa, Setaria italica
  Transcript Sequence Number=SeqID_29918
  Homolog annotation: Hit_ID=B9RCK4; Match level="QueryCoverage=87%, HitCoverage=22%, E-value=1e-13, Identity=32%"; Hit description =Transcription factor, putative
MGHDHMSRIKMHMAEGSLVDRNRCQQPGCNEVVDGRVMYCKVHSGELLRQQYSHLQNAQGSSGLLVPSVNDSPFKGPVSSAVACTEQEIHIKHEGDDRGKLKDSFGNTQGQTTQLVFRGAGMLCKHENCSKQAQENSIYCKLHSGVSKGCMVRGCTRGAHGGTPLCIGHGGG

SEQ ID NO: 95893 - protein, 169 aa, Setaria italica
  misc_feature (18)..(18): Xaa can be any naturally occurring amino acid
  Transcript Sequence Number=SeqID_29919
  Gene Ontology: Mol. function=hydrolase activity, hydrolyzing O -glycosyl compounds; Cellular component=extracellular region; Biological process=cell wall organization and biogenesis
  Homolog annotation: Hit_ID=B6U0P7; Match level="QueryCoverage=97%, HitCoverage=32%, E-value=8e-79, Identity=87%"; Hit description =Endoglucanase 1
  Pfam annotation: Domain name=Glyco_hydro_9; Domain location=1-169; Score=-119.3; E_value=2.5e-09; Accession=PF00759.11; Description =Glycosyl hydrolase family 9
HGHPPATVYKVDPGTPGXSDVAAETAAALAASSLVFRKSDPAYASRLLARAKRVFEFADKHRGSYSTGLAADVCPYYCSYSGYQDELLWGAAWLHRATKSPSYLSYIQVNGQVLGADESDNTFGWDNKHAGARILISKSFLVQRLGSLHEYKGHADTFICSMVPGTPTD

SEQ ID NO: 95894 - protein, 191 aa, Setaria italica
  misc_feature (17)..(17): Xaa can be any naturally occurring amino acid
  Transcript Sequence Number=SeqID_29920
  Gene Ontology: Mol. function=peptidyl-prolyl cis-trans isomerase activity; Cellular component=chloroplast; Biological process=protein folding
  Homolog annotation: Hit_ID=B6TQ97; Match level="QueryCoverage=92%, HitCoverage=72%, E-value=2e-95, Identity=93%"; Hit description =Peptidyl-prolyl cis-trans isomerase
  Pfam annotation: Domain name=Pro_isomerase; Domain location=27-187; Score=392.6; E_value=6.8e-115; Accession=PF00160.13; Description =Cyclophilin type peptidyl-prolyl cis-tr
RSSRSAVVVRAAAAEGXVELQAKVTNKCFFDVEVGGEPLGRIVIGLFGEVVPMTVENFRALCTGEKGYGYKGCSFHRIIKDFMIQGGDFQENNGTGGRSIYGESFDDENFTLKHVGPGVLSMANAGPDTNGSQFFICTVKTPWLDNRHVVFGHVLEGMDVVKQLESQETSRSDSPKQPCRIVNCGELPLDG

SEQ ID NO: 95895 - protein, 398 aa, Setaria italica
  misc_feature (36)..(36): Xaa can be any naturally occurring amino acid
  Transcript Sequence Number=SeqID_29921
  Gene Ontology: Mol. function=nucleoside-triphosphatase activity; Cellular component=protein complex; Biological process=protein catabolic process
  Homolog annotation: Hit_ID=Q8W3N8; Match level="QueryCoverage=94%, HitCoverage=100%, E-value=0.0, Identity=93%"; Hit description=26S proteasome regulatory particle triple-A ATPase subunit4b (Fragment)
  Pfam annotation: Domain name=AAA; Domain location=174-361; Score =315.5; E_value=1.1e-91; Accession=PF00004.21; Description=ATPase family associated with various cellular activities (AAA)
  Pfam annotation: Domain name=AAA_2; Domain location=170-302; Score= -34.0; E_value=0.0048; Accession=PF07724.6; Description=ATPase family associated with various
  Pfam annotation: Domain name=AAA_3; Domain location=174-305; Score= -18.3; E_value=0.037; Accession=PF07726.3; Description=ATPase family associated with various
  Pfam annotation: Domain name=AAA_5; Domain location=174-308; Score =9.1; E_value=0.00017; Accession=PF07728.6; Description=ATPase family associated with various
  Pfam module annotation: Pfam domain module=AAA::AAA_2::AAA_3::AAA_5; Domain location=174-361::170-302::174-305::174-308
MSEGGEEARRRAAVAEYRKKLLSCRELEARAKTVNXNRKNFGKKLVSRDSDLKALQSVGQIIGEVLRPLDKERFIVKASSGPRYVVACRSKVDKEKLIAGTRVVLDMTTLTIMRTLPREVDPVVYNMLHEDPGNVSYSAVGGLSDQIRELRESIELPLMNPELFLRVGIKPPKGVLLYGPPGTGKTLLARAIASNIDANFLKVVSSAIIDKYIGESARLIREMFNYAQEHQPCIIFMDEIDAIGGRRFSEGTSADREIQRTLMELLNQLDGFDELGKVKVIMATNRPDVLDPALLRPGRLDRKIEIPLPNEQGRMEVLKIHAAGIAKHGEIDYEAVVKLAEGFNGADLRNVCTEAGMAAIRAERDYVIHEDFMKAVRKLNDAKKLESSAHYSADFGKE

SEQ ID NO: 95896 - protein, 64 aa, Setaria italica
  Transcript Sequence Number=SeqID_29922
  Gene Ontology: Mol. function=2 iron, 2 sulfur cluster binding; Cellular component=chloroplast; Biological process=cellular aromatic compound metabolic process
  Homolog annotation: Hit_ID=Q7XB43; Match level="QueryCoverage=82%, HitCoverage=12%, E-value=4e-22, Identity=90%"; Hit description =Choline monooxygenase
PAVPLDAAVTPPSGWYADQDFLRLELDRVFLRGWQAVGHIWQVKNPNDFFTGRCLQFCLHASVV

SEQ ID NO: 95897 - protein, 458 aa, Setaria italica
  Transcript Sequence Number=SeqID_29923
  Gene Ontology: Mol. function=aminoacyl-tRNA ligase activity; Cellular component=cytoplasm; Biological process=tRNA aminoacylation for protein translation
  Homolog annotation: Hit_ID=O82108; Match level="QueryCoverage=96%, HitCoverage=96%, E-value=0.0, Identity=94%"; Hit description=Seryl -tRNA synthetase
  Pfam annotation: Domain name=Seryl_tRNA_N; Domain location=1-114; Score=158.1; E_value=2.7e-44; Accession=PF02403.14; Description =Seryl-tRNA synthetase N-terminal domain
  Pfam annotation: Domain name=tRNA-synt_2b; Domain location=178-352; Score=218.2; E_value=2.1e-62; Accession=PF00587.17; Description=tRNA synthetase class II core domain (G, H, P, S and T)
  Pfam module annotation: Pfam domain module=Seryl_tRNA_N::tRNA-synt _2b; Domain location=1-114::178-352
MLDINLFRTDKGGNPDLIRESQRRRSAAVELVDEVIALDKAWRERQFELDKIRQELNATSKKIGKLKASKQEEEAKKLMESTDEIKKRLAAKEAEVQEAKSTLDAKLTTIGNIVHDSVPVSDDEANNAIVRTWGEKRVEENLKNHVDLCRMLDIVALEKGADVAGGRGYYLKDEGVLLNLALINFGLAFLRKRGFKPMQTPFFMRKETMGKCAQLAQFDEELYKVTGDGEDKYLIATSEQPLCAYHLGDRIYPAELPIKYAGYSTCFRKEAGSHGRDTAGIFRVHQFEKIEQFCITSPNGNDSWDIHEEMMKNSEDFYQEIGLPYQVVSIVSGALNDAAAKKYDLEAWFPASKTFRELVSCSNCTDFQARRLGIGYGQKKNDEQSKQFVHMLNSTLTATERTLCCILENFQKEDGVEVPKALQPYMGGIEFLPFKQPLDVKQAADSKSNKSKSKGNAA

SEQ ID NO: 95898 - protein, 59 aa, Setaria italica
  Transcript Sequence Number=SeqID_29924
ILVCWLFSCCQVVITRLGAVVSHGVGQSGCSGLRMLCWVILACVYREFKLDGNNLDYMR

SEQ ID NO: 95899 - protein, 167 aa, Setaria italica
  misc_feature (8)..(8): Xaa can be any naturally occurring amino acid
  Transcript Sequence Number=SeqID_29925
  Gene Ontology: Mol. function=protein kinase activity; Cellular component=plasma membrane; Biological process=protein amino acid phosphorylation
  Homolog annotation: Hit_ID=B9RWV4; Match level="QueryCoverage=97%, HitCoverage=15%, E-value=4e-43, Identity=55%"; Hit description =Receptor protein kinase, putative
  Pfam annotation: Domain name=LRR_1; Domain location=38-60; Score =15.6; E_value=0.2; Accession=PF00560.25; Description=Leucine Rich Repeat
  Pfam annotation: Domain name=LRR_1; Domain location=62-85; Score=6.1; E_value=20; Accession=PF00560.25; Description=Leucine Rich Repeat
  Pfam module annotation: Pfam domain module=LRR_1::LRR_1; Domain location=38-60::62-85
PRWPIPDXIGNRSSLYLPSLGHNGLTGPIPAGISELKKLEILRLEYNNLSGEIPQQLGALESLLAVNISHNRLVGRLPASGVFQSLDASALEGNLGICSPLVTQPCRMNVPKPLVLDPNEYTHGGGGGDNNLETNGAGAGMPRKRRFLSVSAMVAICAALVIALGVI

SEQ ID NO: 95900 - protein, 155 aa, Setaria italica
  misc_feature (33)..(33): Xaa can be any naturally occurring amino acid
  misc_feature (92)..(92): Xaa can be any naturally occurring amino acid
  misc_feature (140)..(140): Xaa can be any naturally occurring amino acid
  Transcript Sequence Number=SeqID_29926
DALRHEAQGRRQDGGDGDLEVAPHPAPGAAAAXAPVRVQRPAHAEVEARGRVVAVQPPQLPLRLHKAAFPSPHHWRSPEGARRIGKAGGQAXRTIRRSSPPARCRSCMTTTGRTVTRRNCSGSIWTRHSPSPIRWLLLSXSGNMARNTRARSWRY

SEQ ID NO: 95901 - protein, 150 aa, Setaria italica
  misc_feature (35)..(35): Xaa can be any naturally occurring amino acid
  Transcript Sequence Number=SeqID_29927
AQDALRHEAQGRRQDGGDGDLEVAPHPAPGAAAAXAPVRVQRPAHAEVEARGRVVAVQPPQLPLRDSEVEPAGAVPQLHDDHGAHGDEEELQRQHLDPPLPIADPLAPALVGEHGAEHARAVLEVLVEGGPGGFVEGRVGGDARAVGHGR

SEQ ID NO: 95902 - protein, 43 aa, Setaria italica
  Transcript Sequence Number=SeqID_29928
DRWHSARRPHCATFASHQTQSPRSMWQLATRRAAWPLTCNSIL

SEQ ID NO: 95903 - protein, 636 aa, Setaria italica
  Transcript Sequence Number=SeqID_29929
  Gene Ontology: Mol. function=helicase activity; Cellular component =chloroplast
  Homolog annotation: Hit_ID=B9T2W5; Match level="QueryCoverage=98%, HitCoverage=70%, E-value=1e-137, Identity=32%"; Hit description =Pentatricopeptide repeat-containing protein, putative
  Pfam annotation: Domain name=PPR; Domain location=111-145; Score=4.7; E_value=2.4; Accession=PF01535.12; Description=PPR repeat
  Pfam annotation: Domain name=PPR; Domain location=12-46; Score=5.7; E_ value=1.9; Accession=PF01535.12; Description=PPR repeat
  Pfam annotation: Domain name=PPR; Domain location=146-180; Score =16.4; E_value=0.1; Accession=PF01535.12; Description=PPR repeat
  Pfam annotation: Domain name=PPR; Domain location=181-215; Score =26.5; E_value=0.00011; Accession=PF01535.12; Description=PPR repeat
  Pfam annotation: Domain name=PPR; Domain location=216-250; Score=9.0; E_value=0.77; Accession=PF01535.12; Description=PPR repeat
  Pfam annotation: Domain name=PPR; Domain location=289-323; Score =17.7; E_value=0.05; Accession=PF01535.12; Description=PPR repeat
  Pfam annotation: Domain name=PPR; Domain location=324-358; Score=2.2; E_value=4.8; Accession=PF01535.12; Description=PPR repeat
  Pfam annotation: Domain name=PPR; Domain location=359-393; Score =31.6; E_value=3.2e-06; Accession=PF01535.12; Description=PPR repeat
  Pfam annotation: Domain name=PPR; Domain location=394-427; Score=0.8; E_value=7.1; Accession=PF01535.12; Description=PPR repeat
  Pfam annotation: Domain name=PPR; Domain location=428-462; Score =25.6; E_value=0.00021; Accession=PF01535.12; Description=PPR repeat
  Pfam annotation: Domain name=PPR; Domain location=463-497; Score=3.4; E_value=3.5; Accession=PF01535.12; Description=PPR repeat
  Pfam annotation: Domain name=PPR; Domain location=577-611; Score =42.0; E_value=2.3e-09; Accession=PF01535.12; Description=PPR repeat
  Pfam module annotation: Pfam domain module=PPR::PPR::PPR::PPR::PPR::PP R::PPR::PPR::PPR::PPR::PPR::PPR; Domain location=111-145::12-46::146 -180::181-215::216-250::289-323::324-358::359-393::394-427::428 -462::463-497::577-611
DSFARNLAASPVTTCILIKSLCRRARLDDAVALLDTLPFAEASRGPAAGSIITEFCRRRRFAEAAQIVDKFASCDVYGAWIHGLIEAGRLDTTLKFIADKKETEGYIPDGQRYDKLVYRLLRCNRLGEVYDLLVEMMEEGIAPGRSTMNAALCFFCKAGLVEVAMHLYRSRMELGINPNKDVYNNLIRALCRGGETEEACLVLEQAMEGGHFPGRQTFAMFANMLCQEGKLDKVRELLDRALKQEVWPMDSVLAKYLVALCKSGNVEEACEVPQIASSKSHVGLYRYESTYKSLIRALILIKRVDILPRLMLEMQDMGHIPTRSLYQSVVCALCELNKYAEVLELLDSQLQRGELQPLVCYNYFISGAGHAKRADMAREVYNRMEISGIEPSAESNTLLLMSYLRSKRIGDALNFFNLIRGKKPPGTKLYNVFISGLCEAQKPEQAMVFWREARDNGVIPSISCYEHLVLLLCSVRDYDSVIKVIDDFRETGRPVSAFLCNVLLLHTLMGSSLLKALLRSRDKSKPLEVKGEEIQGREAGRLLIGDLITSFARGINNMNDLEHLGEEMEKYFPVDTYTYNMLLRGLSMAGRMDSACNLYERMCRKGYQPNRWTFDIMVHGFCKNGDRNEAERWMDA

SEQ ID NO: 95904 - protein, 112 aa, Setaria italica
  Transcript Sequence Number=SeqID_29930
  Gene Ontology: Mol. function=nucleotide binding; Biological process =defense response
  Homolog annotation: Hit_ID=Q69KF7; Match level="QueryCoverage=94%, HitCoverage=9%, E-value=1e-16, Identity=45%"; Hit description=Pollen signalling protein with adenylyl cyclase activity-like
PTGWPLEDLTSLDALRSLQILRLERVSDSSRVQEAMLETKSHLKELELCCSNDDRQSEVQEEDARTLKDIFDRLSPPHCLKSLKIMSYYGKLFPDWLPNLSNLQSLVLTDCK

SEQ ID NO: 95905 - protein, 102 aa, Setaria italica
  Transcript Sequence Number=SeqID_29931
  Homolog annotation: Hit_ID=Q6YZ25; Match level="QueryCoverage=73%, HitCoverage=14%, E-value=6e-20, Identity=61%"; Hit description =Transducin / WD-40 repeat protein-like
WLLQAYCHWVRNKLTEWLCCTPKLSSRHPTDPRKIYSSSYHGEICLMDVEKESFNTIHLCDSPIFSLCQAPDSHSSLYFAEGNDLKHFDERAGKVSTTWNLH

SEQ ID NO: 95906 - protein, 75 aa, Setaria italica
  Transcript Sequence Number=SeqID_29932
  Gene Ontology: Mol. function=cysteine-type endopeptidase activity; Cellular component=vacuole; Biological process=proteolysis
  Homolog annotation: Hit_ID=B4ESE2; Match level="QueryCoverage=69%, HitCoverage=10%, E-value=3e-22, Identity=88%"; Hit description =Legumain
PQAVACTRCEELIVVSVGAGDEDREQADVCHAYQIMKKGGLKDENIIVFMYDDIASSPDNPRPGVIINHPSGGDV

SEQ ID NO: 95907 - protein, 122 aa, Setaria italica
  Transcript Sequence Number=SeqID_29933
  Homolog annotation: Hit_ID=B9R7W0; Match level="QueryCoverage=70%, HitCoverage=11%, E-value=3e-17, Identity=51%"; Hit description =Pentatricopeptide repeat-containing protein, putative
  Pfam annotation: Domain name=PPR; Domain location=32-66; Score=24.7; E_value=0.00039; Accession=PF01535.12; Description=PPR repeat
KLIDLHAKANHVEGAEIILGKMKEKGVAPDILTSITLVHMYSKAGNLDRAKEAFEFIRNEGFKPDLKLWRRLNSGKVHRPMNVLGSSHHALLSICPYHIRVHFSGGFDIHNVHRAMHIACLS

SEQ ID NO: 95908 - protein, 449 aa, Setaria italica
  Transcript Sequence Number=SeqID_29934
  Gene Ontology: Mol. function=transferase activity; Cellular component= chloroplast
  Homolog annotation: Hit_ID=B9R7W0; Match level="QueryCoverage=97%, HitCoverage=60%, E-value=3e-97, Identity=42%"; Hit description =Pentatricopeptide repeat-containing protein, putative
  Pfam annotation: Domain name=PPR; Domain location=114-148; Score =27.5; E_value=5.5e-05; Accession=PF01535.12; Description=PPR repeat
  Pfam annotation: Domain name=PPR; Domain location=149-183; Score =24.7; E_value=0.00039; Accession=PF01535.12; Description=PPR repeat
  Pfam annotation: Domain name=PPR; Domain location=184-218; Score =21.5; E_value=0.0034; Accession=PF01535.12; Description=PPR repeat
  Pfam annotation: Domain name=PPR; Domain location=219-253; Score =17.1; E_value=0.076; Accession=PF01535.12; Description=PPR repeat
  Pfam annotation: Domain name=PPR; Domain location=254-288; Score =24.9; E_value=0.00034; Accession=PF01535.12; Description=PPR repeat
  Pfam annotation: Domain name=PPR; Domain location=289-323; Score=4.7; E_value=2.5; Accession=PF01535.12; Description=PPR repeat
  Pfam annotation: Domain name=PPR; Domain location=393-427; Score =15.0; E_value=0.15; Accession=PF01535.12; Description=PPR repeat
  Pfam module annotation: Pfam domain module=PPR::PPR::PPR::PPR::PPR::PP R::PPR; Domain location=114-148::149-183::184-218::219-253::254 -288::289-323::393-427
KRKGEVKFTMYGLDMSDPKWAEVAERTAEAEAHFVPQEAKPVEGKAKKAEEQLLRVDPRRGDPVPAMEEWKEDLRPKRVDWMALLERVKARNVELYLKVAEILLAEESFEANIRDYSKLIDLHAKANHVEGAEIILGKMKEKGVAPDILTSITLVHMYSKAGNLDRAKEAFEFIRNEGFKPDLKLFSSMIKCYISHGEPGQADNLLNTMKGMDIKATREMYTDVIRAYAQQGMVAAAQNVHRAMHFAGIESTPELFTMSIEAYGRIGDPENACLVFQHMRRSGHEPDDSSIAGVVAAHMKKNQLDQALLWLLSLEKEGLKPGVKTNLVLLDWLSMLQLVPEAEQLARKIKQLGEEPIEVHVFLADMYAKSRQEEKARRSLKMLEEKKKLLKADQFERIIRGLLDGGFSEEANKYYKMMKSFGFEPSETIEVGVKASLRMRGGLRPTGRH

SEQ ID NO: 95909 - protein, 86 aa, Setaria italica
  Transcript Sequence Number=SeqID_29935
  Gene Ontology: Mol. function=nucleic acid binding; Cellular component= nucleus
  Homolog annotation: Hit_ID=B6SW01; Match level="QueryCoverage=75%, HitCoverage=14%, E-value=4e-21, Identity=76%"; Hit description=Zinc finger CCCH type domain-containing protein ZFN-like 3
  Pfam annotation: Domain name=zf-CCCH; Domain location=21-47; Score =33.3; E_value=9.8e-07; Accession=PF00642.16; Description=Zinc finger C-x8-C-x5-C-x3-H type (and similar)
MLPCFSVLGSTCSTKASLDLQGSQPCSYYAHHGFCKFGPTCKFDHPMGTLNYSPSVSSLTDVPVAPYPPSLPLTPMAPYPSPSDLR

SEQ ID NO: 95910 - protein, 450 aa, Setaria italica
  Transcript Sequence Number=SeqID_29936
  Gene Ontology: Mol. function=nucleic acid binding; Cellular component= nucleus
  Homolog annotation: Hit_ID=B6SW01; Match level="QueryCoverage=96%, HitCoverage=95%, E-value=0.0, Identity=76%"; Hit description=Zinc finger CCCH type domain-containing protein ZFN-like 3
  Pfam annotation: Domain name=zf-CCCH; Domain location=136-162; Score =44.7; E_value=3.7e-10; Accession=PF00642.16; Description=Zinc finger C-x8-C-x5-C-x3-H type (and similar)
  Pfam annotation: Domain name=zf-CCCH; Domain location=290-316; Score =46.3; E_value=1.2e-10; Accession=PF00642.16; Description=Zinc finger C-x8-C-x5-C-x3-H type (and similar)
  Pfam annotation: Domain name=zf-CCCH; Domain location=336-362; Score =34.4; E_value=4.5e-07; Accession=PF00642.16; Description=Zinc finger C-x8-C-x5-C-x3-H type (and similar)
  Pfam annotation: Domain name=zf-CCCH; Domain location=42-68; Score =41.0; E_value=4.6e-09; Accession=PF00642.16; Description=Zinc finger C-x8-C-x5-C-x3-H type (and similar)
  Pfam annotation: Domain name=zf-CCCH; Domain location=92-118; Score =46.1; E_value=1.4e-10; Accession=PF00642.16; Description=Zinc finger C-x8-C-x5-C-x3-H type (and similar)
  Pfam module annotation: Pfam domain module=zf-CCCH::zf-CCCH::zf -CCCH::zf-CCCH::zf-CCCH; Domain location=136-162::290-316::336 -362::42-68::92-118
MEPYGAAKGGGGDAGTGLEESMRRLGLGGGDGDGDAKLPERPGEVDCAYYIRTGSCGYGERCRYNHPRDRDRAAPVNGVGRTAGTVEYPERPGQPLCEYYAKNGTCKFGSNCKFDHPREGGFVPVALNSSGFPIRQGEKECSYYMKTGHCKFGATCKFHHPELGFLSEAPTMYPPVQPSPLSSPHPYPHLANWQMGRPPVVPGSFLPGSYPPMMLPPTLMPMQGWNPYISPMNQVAPAGGQQTVQAGPPYGMSHQGPSSAVTYGSHYAQLYSSTGTSSSNIQEYTLPERPGQPECEHYMKTGTCKYGAACKYHHPQYFSGPKSNCVLSPLGLPLRPGSQPCSYYAHHGFCKFGPTCKFDHPMGTLNYSPSVSSLTDVPVAPYPPSLPLTPMAPYPSPSDLRPQYTLTKDSSANPPAVPGTTYGPVGTISKVYAPHTLIRSPTSAAAGMQA

SEQ ID NO: 95911 - protein, 54 aa, Setaria italica
  Transcript Sequence Number=SeqID_29937
HYIDIVERSTVARKSLVQVYWLALHIILSPFSVSVYLHSDTIDFLSRLSCFSPT

SEQ ID NO: 95912 - protein, 89 aa, Setaria italica
  Transcript Sequence Number=SeqID_29938
  Gene Ontology: Cellular component=integral to membrane
  Homolog annotation: Hit_ID=B6SWG6; Match level="QueryCoverage=96%, HitCoverage=17%, E-value=4e-39, Identity=91%"; Hit description=AAP6
LQPTLVAMLLPFFNAVLGLIGALGFWPLSVYFPVSMHVARLKIRRGEPRWWMLQAMSFVCLLISVAASIGSVQDIVHNLKAAAPFKTSD

SEQ ID NO: 95913 - protein, 116 aa, Setaria italica
  Transcript Sequence Number=SeqID_29939
ALHNCISLFQNLIHSTHGTEAMINSHHSDSLGRSGGDAVAPNEASPDLQFGHCRRASADVKRCRACPSLPSLLHFLVGARAARGWLNPRLGRPDPLVLHTDPCHSACDSGSGGLHW

SEQ ID NO: 95914 - protein, 104 aa, Setaria italica
  Transcript Sequence Number=SeqID_29940
TWAPRRGARARRRPRGGPPRRPGQPRASSCGDARIEASWSCGSRPRGRAEPEALSVMGGDESLEIGQVSHTAAAAAWRPRRRPSPVWVGLGTFASARELPHELT

SEQ ID NO: 95915 - protein, 238 aa, Setaria italica
  Transcript Sequence Number=SeqID_29941
  Gene Ontology: Mol. function=transferase activity, transferring groups other than amino-acyl groups; Biological process=paclitaxel biosynthetic process
  Homolog annotation: Hit_ID=Q9LGF6; Match level="QueryCoverage=99%, HitCoverage=55%, E-value=5e-72, Identity=57%"; Hit description=3'-N -debenzoyltaxol N-benzoyltransferase-like
CPLLGREAIPSPGPGAAVGPLPVPTELRLQYLAMDISTEYIEHFKARFLEQTGHRCSAFEVLIAKAWQSRTRAAGFAPGSPVHVCFAMNARPAVAAMRGRPLPDGFYGNCYYIMRVSAAAEAVADASVYDVVRLIREGKKRLPSEFARWMGGGGGGDPYRITSDYRTLLVSDWSRLGFEEVDYGWGCPVHVVPLTNLDYIATCILVRPSAHKPGARLITQCVAADGVDDFHKGMMRLD

SEQ ID NO: 95916 - protein, 125 aa, Setaria italica
  Transcript Sequence Number=SeqID_29942
  Gene Ontology: Cellular component=nucleus; Biological process=cell division
  Homolog annotation: Hit_ID=Q70AJ3; Match level="QueryCoverage=37%, HitCoverage=35%, E-value=4e-09, Identity=71%"; Hit description =Putative cyclin (Fragment)
MATRNHRAAAAQQPANRGAAVLAGKQKVAAAGRRRALGDIGNVVTDVHDGKIQLPEGINRPITRSFGAQLLKNAALAKQNAVAPPAKPVAARAVPKPARKAPAKPVPRPEQAPKNATSSNENNKP

SEQ ID NO: 95917 - protein, 129 aa, Setaria italica
  Transcript Sequence Number=SeqID_29943
LNTQLWAFREKTEGPSWDHRVGLIQRITMHDMYCMQYGSAISIYIEQKTSEYIFLIPQLGLFFRYIEHSYSSEYFLDISSTPNVPETLQSPDPVSSGHPLKDSVLSAAGVAGMLTLYIRCWSPLAASLA

SEQ ID NO: 95918 - protein, 78 aa, Setaria italica
  Transcript Sequence Number=SeqID_29944
  Subcellular localization annotation: CTP_CleavageSite=65; ConfidenceScore=5.23e-01
SQSQPTQVLVLVRFNYTQCLLNPCDAAPGSNVNHRYFQKSMVTALSTELASNSLCAAASVLCLCKASSKRAPASYIQC

SEQ ID NO: 95919 - protein, 102 aa, Setaria italica
  Transcript Sequence Number=SeqID_29945
RYTICTVCNTVLQFQFYIEQKTSEYIFLIPQLGLFFRYIEHSYSSEYFLDISSTPNVPETLQSPDPVSSGHPLKDSVLSAAGVAGMLTLYIRCWSPLAASLA

SEQ ID NO: 95920 - protein, 79 aa, Setaria italica
  Transcript Sequence Number=SeqID_29946
LRSIKQAYVFQLQTYLRTLHHDSRPSLRWRTAKDICRFVLFIIICPHHQISTQGLQLKQEPRTPGTPRRSHPPTRGSRC

SEQ ID NO: 95921 - protein, 326 aa, Setaria italica
  Transcript Sequence Number=SeqID_29947
MQPPPKKLARVDTLELKAQIVKRLGHQRAELYFRGLRRFLGCQLGKAEFERICVAALGKENIRLHNVLIRSILGNACVSDGPAPSKQAPTGNSQTSTVSNGTLNNGLLPARRVRPLTRRFGDKLSPIGKSPLGHPGAGEFVSTGSKALQEVISVEDGEEVDQARGSPVCVQSQSPIRAPLGIPKAQNSQPSTSCSSDVCYNNGELPDSQWLSKLLEDKLKAQGLSMRKECADALNSGLNMYMRQMLKACLGVAKARGNNVRMRQPNGRTTAAAVSSGRNNGFPTESGGSYQASLLDLWTAVQFNDRLLGYDHALQREKIASHLHNR

SEQ ID NO: 95922 - protein, 152 aa, Setaria italica
  Transcript Sequence Number=SeqID_29948
SYQVSAPDGKPNGTLSFAYAISGGHAGAGARPPPQLYPAPDQDPSFCCAPPPSAAYSAPAVASFAPPSAGYPPPPQPPASAPLYPQLQDLLPPSSYPPHPPPNPQFPSPNSSYPPPPPPAAVNAYPPPPASCTACPAPPPEHTSYPPPSTAA

SEQ ID NO: 95923 - protein, 78 aa, Setaria italica
  misc_feature (24)..(24): Xaa can be any naturally occurring amino acid
  misc_feature (64)..(64): Xaa can be any naturally occurring amino acid
  Transcript Sequence Number=SeqID_29949
  Gene Ontology: Mol. function=aspartic-type endopeptidase activity; Cellular component=chromatin; Biological process=chromatin assembly or disassembly
  Homolog annotation: Hit_ID=Q2QMU2; Match level="QueryCoverage=89%, HitCoverage=18%, E-value=2e-18, Identity=61%"; Hit description =Retrotransposon protein, putative, unclassified
IVMERDKPAHASWLAIETQFLGNXETRALYADAQFRHFVQGNLSIADYCRRFKSMSNALGDLGXPVSDRTLILNVIRG

SEQ ID NO: 95924 - protein, 91 aa, Setaria italica
  misc_feature (43)..(43): Xaa can be any naturally occurring amino acid
  Transcript Sequence Number=SeqID_29950
  Gene Ontology: Cellular component=integral to membrane
  Homolog annotation: Hit_ID=B6TYI0; Match level="QueryCoverage=100%, HitCoverage=20%, E-value=4e-12, Identity=38%"; Hit description =Membrane protein
VVGFAVATVLLFRGYNANEHCSWCRYLSCVPTKRWKCDSSPTXCSTTTVQGGNTLSLVCEGGNGRNRTFLIPGAGGASPDRRDDLCRQRCT

SEQ ID NO: 95925 - protein, 129 aa, Setaria italica
  Transcript Sequence Number=SeqID_29951
  Homolog annotation: Hit_ID=B6UE27; Match level="QueryCoverage=82%, HitCoverage=15%, E-value=1e-23, Identity=54%"; Hit description =Ternary complex factor MIP1
SSQKTSNQTRLVQGKNSNPQQKCEAKKGIQPRSETQNSLKKEILQLEMHLKDQQVVRGALEKALGPDPAPITLQNESPMLKPATQLIREVATLELEIKHLEQYLLTLYRKAFEQQQQQQAPTLQSSDAT

SEQ ID NO: 95926 - protein, 146 aa, Setaria italica
  Transcript Sequence Number=SeqID_29952
  Gene Ontology: Mol. function=metal ion binding
  Homolog annotation: Hit_ID=B6TIB7; Match level="QueryCoverage=100%, HitCoverage=55%, E-value=4e-35, Identity=55%"; Hit description=RING zinc finger protein-like
PRKNYFLLWMVESMNGERAKFHSTNHNEHHSSWHSSAGPSSSHHHRRNAVIRPESSSARDTNVIRNIFHTDNISASLQKLMVCFMQLTAKFPLVILFLLIVLYAVPASATVLLLYFLVTFLFALPSFLILYFAYPSLDWLVREIFS

SEQ ID NO: 95927 - protein, 222 aa, Setaria italica
  misc_feature (187)..(187): Xaa can be any naturally occurring amino acid
  Transcript Sequence Number=SeqID_29953
  Gene Ontology: Mol. function=pyridoxal phosphate binding
  Homolog annotation: Hit_ID=B6T4E6; Match level="QueryCoverage=100%, HitCoverage=68%, E-value=1e-103, Identity=78%"; Hit description=Mo -molybdopterin cofactor sulfurase
  Pfam annotation: Domain name=MOSC; Domain location=73-221; Score =60.1; E_value=8.3e-15; Accession=PF03473.9; Description=MOSC domain
  Pfam annotation: Domain name=MOSC_N; Domain location=1-60; Score= -17.3; E_value=0.0067; Accession=PF03476.8; Description=MOSC N -terminal beta barrel domain
  Pfam module annotation: Pfam domain module=MOSC::MOSC_N; Domain location=73-221::1-60
WQPASHSHMVIRAPGMDPLKIPLAAEHATIDGVAVWEWSGSAYDEGAEAAEWFSSYLGKPSRLVRFKEVSETRPTDPDYAQGYKVMFSDAFPILIASQGSLDALNEILKEPVRMNRFRANLLVDGCHSYSEDLWKTVKINKLTFMGVRLRDCCKVPTVDQETGTPGIEPNETLRTFRSGEVLRPRHXKKRQVYFGQNLVCKESLSANGKGRIIKVGDPVYVL

SEQ ID NO: 95928 - protein, 50 aa, Setaria italica
  Transcript Sequence Number=SeqID_29954
  Gene Ontology: Mol. function=phosphatidylinositol binding; Cellular component=clathrin coat; Biological process=clathrin coat assembly
  Homolog annotation: Hit_ID=B9SP68; Match level="QueryCoverage=98%, HitCoverage=8%, E-value=7e-15, Identity=75%"; Hit description =Clathrin assembly protein, putative
MSALQSWRKAYGALKDSTTVSLANLSSDFKDLDVAIVRATNHVETPPKEP

SEQ ID NO: 95929 - protein, 564 aa, Setaria italica
  Transcript Sequence Number=SeqID_29955
  Gene Ontology: Mol. function=phosphatidylinositol binding; Cellular component=clathrin coat; Biological process=clathrin coat assembly
  Homolog annotation: Hit_ID=B9SP68; Match level="QueryCoverage=100%, HitCoverage=100%, E-value=0.0, Identity=61%"; Hit description =Clathrin assembly protein, putative
  Pfam annotation: Domain name=ANTH; Domain location=29-310; Score =420.7; E_value=2.3e-123; Accession=PF07651.8; Description=ANTH domain
  Pfam annotation: Domain name=ENTH; Domain location=29-157; Score =19.9; E_value=4.9e-07; Accession=PF01417.12; Description=ENTH domain
  Pfam module annotation: Pfam domain module=ANTH::ENTH; Domain location=29-310::29-157
MASMQSWRKAYGAIKDSTTVSLANLNSDFKDLDVAIVKATNHVECPPKERHLRKVVAATSIARPRADVAYCIHALARRLAKTRNWIVALKTLVVIHRLLREGDPTFREELLNFTQRGRILQLSNFKDDSSPIAWDCSAWVRTYGLFLEERLECFRVLKYDVEAERLSKQGQGPEKGHSRTRELDSQDLLEQLPALQQLLYRLVGCRPEGAANNNYLVQYALALVLKESFKIYCAINDGIINLVDKFFEMPRHEALKALEIYRRAGQQAGNLSDFYENCRGLELARNFQFPTLREPPQTFLATMEEYVKEAPRMVPVREPLELPERLLLTYKPEESEEIPEPAPVEEEKAPVEEPEPAPPVTEVVSPPPKTEVPDTGDLLGLNDPSPAGSAIEESNALALAIVPTDGTSTTGNAAFQDKGFDPTGWELALVTAPSNTTSSASSSQLGGGFDKLILDSLYDDGAYRQRQQQQLYGSAVPNPFMTNDPFAMSNQVAPPPSVQMAAMSQQHQQIPTVMQPNPFGPPMQPQMGMGPATNNPFLDAGFGPFPVANNGHQQHNPFGGTQLL

SEQ ID NO: 95930 - protein, 79 aa, Setaria italica
  Transcript Sequence Number=SeqID_29956
  Homolog annotation: Hit_ID=B4FAH2; Match level="QueryCoverage=100%, HitCoverage=25%, E-value=1e-26, Identity=83%"; Hit description=Ap2 domain protein
FEDAPVYATSGFWDIQPDAGFLYAEPSSPEASWNAAASFGPASSGEAPSWAAASPTVQENDYFEDLRDLFPLHPLPSIF

SEQ ID NO: 95931 - protein, 189 aa, Setaria italica
  misc_feature (77)..(77): Xaa can be any naturally occurring amino acid
  misc_feature (84)..(84): Xaa can be any naturally occurring amino acid
  misc_feature (95)..(95): Xaa can be any naturally occurring amino acid
  Transcript Sequence Number=SeqID_29957
  Gene Ontology: Cellular component=Golgi apparatus
  Homolog annotation: Hit_ID=B9SB27; Match level="QueryCoverage=45%, HitCoverage=9%, E-value=1e-15, Identity=50%"; Hit description=Early endosome antigen, putative
VIKQESTEIVLRDIEVEPRTSPRRSNGHNLQYDELVKLNSSLDIESGVLKEIDMKNVDHSSSLTKKEQEKQMECILXSIMKLSXKEFVEIEKKIXQVERTENRSEDLSDHCSHMVRQAVVLTKMGLWYKQMLETRRFELQKAEAKVVILGDKINAHLSLLQKIYLTLDRYSPTLQHHPGVSTVRQCIKC

SEQ ID NO: 95932 - protein, 416 aa, Setaria italica
  Transcript Sequence Number=SeqID_29958
  Gene Ontology: Cellular component=Golgi apparatus
  Homolog annotation: Hit_ID=B9SB27; Match level="QueryCoverage=93%, HitCoverage=55%, E-value=1e-16, Identity=34%"; Hit description=Early endosome antigen, putative
ESALQEKTEELFRFKREKGSHSLKNDLEFEPLRKKIPEIISRMDQIISKNIKVPAICMTHDELDERCRLTSRIDALYYENQHLRGLLADKMKDVKALSSQLSEASTELSLQLSSEEELLRQIDKIRQEYEELRIEGDVRDELYQAVTRQLLDDSKNSMDGAALNFSAKMSSLESVISEKDKELYLYNEENHRLKDKLAELEKGCLTQNHQEDPEVIKQESTEIVLRDIEVEPRTSPRRSNGHNLQYDELVKLNSSLDIESGVLKEIDMKNVDHSSSLTKKEQEKQMECILVSIMKLSKEFVEIEKKLSVERTENRSEDLSDHCSHMVRQAVVLTKIGLWYKQMLETRRFELQKAEAKVVILGDKINAHLSLLQKIYLTLDRYSPTLQHHPGLLDAFLKTCKLVADLRSKHNEGDAT

SEQ ID NO: 95933 - protein, 52 aa, Setaria italica
  Transcript Sequence Number=SeqID_29959
QRLQEYRQERWLWIAVHSFLYNNIKTIVTVFSIVGVLAGLFKTILSVKQPHG

SEQ ID NO: 95934 - protein, 217 aa, Setaria italica
  misc_feature (13)..(13): Xaa can be any naturally occurring amino acid
  Transcript Sequence Number=SeqID_29960
  Gene Ontology: Mol. function=zinc ion binding; Cellular component =intracellular; Biological process=regulation of transcription, DNA -dependent
  Homolog annotation: Hit_ID=B9S617; Match level="QueryCoverage=27%, HitCoverage=7%, E-value=3e-20, Identity=76%"; Hit description =Transcription factor, putative
LPGRTFIHAQERXFDDMHDRPTTPAGMNHIIRERDANGHGQPTNMDPAYPYNLYHRDGPHPNNLHDPSHHGGENDSLSSRKVALPDASTGVDGFKHDSHHPSILKDDPPSLSVGLASNFASQNGPKDHIRIAPAQQQAQMASSSLQKQFYSHPVTGYSEFQAQLRNGRPRMDAKARSQLLPRYWPRITDQELQHLSNDSNSVITPLFEKMLSASDAG

SEQ ID NO: 95935 - protein, 63 aa, Setaria italica
  Transcript Sequence Number=SeqID_29961
  Gene Ontology: Mol. function=zinc ion binding; Cellular component =intracellular; Biological process=regulation of transcription, DNA -dependent
ANATNSSKKAVGNADGPEDMAVDHKVTSSPVKNHIDLNSQPERDDEQSPKSGAAGALSRDNPT

SEQ ID NO: 95936 - protein, 826 aa, Setaria italica
  misc_feature (218)..(218): Xaa can be any naturally occurring amino acid
  Transcript Sequence Number=SeqID_29962
  Gene Ontology: Mol. function=zinc ion binding; Cellular component =intracellular; Biological process=regulation of transcription, DNA -dependent
  Homolog annotation: Hit_ID=B9S617; Match level="QueryCoverage=99%, HitCoverage=87%, E-value=0.0, Identity=46%"; Hit description =Transcription factor, putative
  Pfam annotation: Domain name=B3; Domain location=322-425; Score =101.3; E_value=3.4e-27; Accession=PF02362.13; Description=B3 DNA binding domain
  Pfam annotation: Domain name=zf-CW; Domain location=582-627; Score =79.0; E_value=1.8e-20; Accession=PF07496.7; Description=CW-type Zinc Finger
  Pfam module annotation: Pfam domain module=B3::zf-CW; Domain location= 322-425::582-627
IYADLCGRCYSQFEQGIYCETFHSDEGGWRNCESCGRRVHCGCIVSIHKYQLRDAGGVDCAKCARNTRTAMAPPSPVWASPMHNSQNVADRKDIPVKSWRPPAGQISSQWRQTNLWSVSSIQSDLQQRLAFEFDRPSGSEKLLPGRTFIHAQERKFDDMHDRPTTPAGMNHIIRERDANGHGQPTNMDPAYPYNLYHRDGPHPNNLHDPSHHGGEMIXSYPESGVARCFYTNFNFASQNGPKDHIRIAPAQQQAQMASSSLQKQFYSHPVTGYSEFQAQLRNGRPRMDAKARSQLLPRYWPRITDQELQHLSNDSNSVITPLFEKMLSASDAGRIGRLVLPKKCAEAYFPPISQAEGLPLKVQDASGKEWIFQFRFWPNNNSRMYVLEGVTPCIQSMQLQAGDTVTFSRIDPEGKLIMGFRKATNMSSEQEQTTKPANGAPATSEANGKVSAPDSSPNAAISRQNKVNTETKSSSPVEQAATSKIDKDVSAPKEGPGTASSSPGPVKRKATNLTPKNKRLRMENEESMELKITWEEAQELLRPPPKAPSIVIVDGHEFEEYEEPPILGRKTYFATDQSGSNHQWAQCENCSKWRKLPADALMPSKWTCNDNKWDSERSSCEAAQEISMEELAELIPIKSGPGGAKKPKSKIEGEAIDASDGLDTLANLAILGEGEALPSQPTTKHPRHRPGCSCIVCIQPPSGKGPKHKQTCTCNVCMTVRRRFRTLMLRREKRATTDSPRRKETGQSSQTVTQAGSGLQATSANATNSSKKAVGNADGPEDMAVDHKVTSSPVKNHIDLNSQPERDDEQSPKSGAAGALSRDNPT

SEQ ID NO: 95937 - protein, 770 aa, Setaria italica
  misc_feature (210)..(210): Xaa can be any naturally occurring amino acid
  Transcript Sequence Number=SeqID_29963
  Gene Ontology: Mol. function=DNA binding; Cellular component=nucleus; Biological process=regulation of transcription, DNA-dependent
  Homolog annotation: Hit_ID=Q8S4P4; Match level="QueryCoverage=99%, HitCoverage=85%, E-value=0.0, Identity=84%"; Hit description=Histone- lysine N-methyltransferase EZ3
  Pfam annotation: Domain name=CXC; Domain location=556-596; Score=8.1; E_value=0.001; Accession=PF03638.7; Description=TesminTSO1-like CXC domain
  Pfam annotation: Domain name=SET; Domain location=616-743; Score =159.3; E_value=1.2e-44; Accession=PF00856.20; Description=SET domain
  Pfam module annotation: Pfam domain module=CXC::SET; Domain location =556-596::616-743
GNPSLLSYSDSGGAAQRTVLRFVKLPLIERIPPYTTWIFLDKNQRMADDQSVGRRRIYYDAAGDEALICSDSDEEIPEPEEEKHFFTGGEDQLIWKATQEHGLNREVVNVLSQFIEATPSEIEERSEVLFEKNEKHSGSSDKIQRQLSLGKTMDAILDSFDNLFCRRCLVFDCRLHGCSQNLVFPCEKQPYSFEPDENKKPCGDQCYLRXRREGFQDAHYDDLGGCATYTMESRTASHKVDVNILSESEDSNREEDNIKSMTFVGTSGSKIISSMSAEKSTTPPSADTSETENVSSDLPLSSLGKHKISKHGPRYRERSPGKRQKVFTSDVSFASNILNKLSIPEIRDTRLESRESGGDKLRILDESTKKSSSKDIWGGSTTSTTENVGRDSNNVTSTKNFMEHTLSCWSPLERDLYLKGIEIFGKNSCLIARNLLSGLKTCMEVANYMYNNGATMAKRPSKSTLGDFAETEQDYMEQDMAARTRIYRRRGRNRKLKYTWKSAGHPTVRKRIGDGKQWYTQYNPCGCQQMCGKDCPCVENGTCCEKYCGCSKSCKNKFRGCHCAKSQCRSRQCPCFAASRECDPDVCRNCWVSCGDGSLGEPPARGDGYQCGNMKLLLKQQQRILLGRSDIAGWGAFIKNPVSKNDYLGEYTGELISHKEADKRGKIYDRANSSFLFDLNDQFVLDAYRKGDKLKFANHSSNPNCYAKVMLVAGDHRVGIYAKEHIEASEELFYDYRYGPDQAPAWARRPEGSKKDEASISHHRAHKVAR

SEQ ID NO: 95938 - protein, 64 aa, Setaria italica
  Transcript Sequence Number=SeqID_29964
  Gene Ontology: Mol. function=aminoacyl-tRNA ligase activity; Cellular component=cytoplasm; Biological process=tRNA aminoacylation for protein translation
  Homolog annotation: Hit_ID=O82108; Match level="QueryCoverage=100%, HitCoverage=13%, E-value=2e-09, Identity=56%"; Hit description=Seryl- tRNA synthetase
MIDIKLFRADEDADPDRVLLESQRRRFAPDEDVHEVAALDNAWRKMQYELEKIRAELNATSKAI

SEQ ID NO: 95939 - protein, 61 aa, Setaria italica
  Transcript Sequence Number=SeqID_29965
  Pfam annotation: Domain name=DUF623; Domain location=1-57; Score =104.9; E_value=2.7e-28; Accession=PF04844.5; Description=Protein of unknown function, DUF623
PPRDFRESMVEMIAENKVQTPEDMEELLECYLSLNSREYHGVIMEVFRGIWLEIAEDIVED

SEQ ID NO: 95940 - protein, 40 aa, Setaria italica
  Transcript Sequence Number=SeqID_29966
MNAGMSPRPSTDWGPIIVAVILFVVLSPGLLFQLPARTRV

SEQ ID NO: 95941 - protein, 579 aa, Setaria italica
  Transcript Sequence Number=SeqID_29967
  Gene Ontology: Mol. function=unfolded protein binding; Cellular component=mitochondrion; Biological process=cellular protein metabolic process
  Homolog annotation: Hit_ID=B9SN32; Match level="QueryCoverage=96%, HitCoverage=98%, E-value=0.0, Identity=68%"; Hit description =Chaperonin-60kD, ch60, putative
  Pfam annotation: Domain name=Cpn60_TCP1; Domain location=58-561; Score=564.6; E_value=1.1e-166; Accession=PF00118.16; Description=TCP- 1cpn60 chaperonin family
MYRAATSAISRSSSALRKHLARGGGGEPQRLWARGYAAKEVAFGVGARAAMLQGVNDLADAVKVTMGPKGRTVIIEGSYKGPKITKDGVTVAKSVEFEDSAKNVGANLVKQVAEATNKTAGDGTTCATVLTQAILTEGCKAVAAGVNVMDLRNGINKAINSITSHLKSKAWKINSPEEINQVATISANGEKEIGDLISKAMEKVGKDGVITIVDGKTLDNELEAVQGMKLSRGYISPYFVTDEKTQKCEMENPLILIHDKKISSMNSLLPVLEISIKNRRPLLIVAEDVEGEALSMLVLNKHRAGLKVCAVKAPGFGDNRRHNLDDMAVMTGGEVVSEERGLDLGKIQQQMLGTAKKVTVSLDDTIILDGGGDKKQIEERCQQLRESFETSTAMFEKEKAQERLSKLSGGVAVLKIGGASEAEVGEKKDRVTDALNAAKAAVEEGIVPGGGVALLYATKELDKISTANEDEKIGVQIIKNALKAPLMTIAANAGIDGAIVIGKLSEQDDLSLGYDASRGEYVDMIKAGIIDPVKVIRTALQDAASVSLLMTTTEAAVSELPATKARIASRMPQMGGMDF

SEQ ID NO: 95942 - protein, 48 aa, Setaria italica
  Transcript Sequence Number=SeqID_29968
ILLSVLCFQFNSKEADNSQHEDADNVLTKFTFQSFEKLSLKLRPKPVL

SEQ ID NO: 95943 - protein, 169 aa, Setaria italica
  Transcript Sequence Number=SeqID_29969
  Gene Ontology: Mol. function=ligase activity; Cellular component =chloroplast; Biological process=response to auxin stimulus
  Homolog annotation: Hit_ID=Q6I581; Match level="QueryCoverage=100%, HitCoverage=29%, E-value=5e-74, Identity=76%"; Hit description =Probable indole-3-acetic acid-amido synthetase GH3.5
  Pfam annotation: Domain name=GH3; Domain location=5-169; Score= -333.5; E_value=0.026; Accession=PF03321.5; Description=GH3 auxin -responsive promoter
CSSDEIIDEFELLTRDAGRVQQDTLRKILELNADAEYLNRFNLERRTDSKSFKSCIPLCVHSDIESYIQRIVDGDNSLVLTGKPITSLSVSSGTTQGKPKFLPFNDELLESTIQIFRTSYAFRNRKYPIGNGKALQFVYGSKQVFTQGGILATTATTNLYRSWRFKEAM

SEQ ID NO: 95944 - protein, 349 aa, Setaria italica
  Transcript Sequence Number=SeqID_29970
  Gene Ontology: Mol. function=methyltransferase activity; Cellular component=ribonucleoprotein complex; Biological process=metabolic process
  Homolog annotation: Hit_ID=Q9SNQ2; Match level="QueryCoverage=100%, HitCoverage=91%, E-value=0.0, Identity=86%"; Hit description =Probable protein arginine N-methyltransferase 4.2
  Pfam annotation: Domain name=MTS; Domain location=25-163; Score= -74.7; E_value=0.0038; Accession=PF05175.6; Description =Methyltransferase small domain
  Pfam annotation: Domain name=Methyltransf_11; Domain location=41-140; Score=30.6; E_value=6.3e-06; Accession=PF08241.4; Description =Methyltransferase domain
  Pfam annotation: Domain name=Methyltransf_12; Domain location=41-138; Score=19.8; E_value=0.0084; Accession=PF08242.4; Description =Methyltransferase domain
  Pfam module annotation: Pfam domain module=MTS::Methyltransf _11::Methyltransf_12; Domain location=25-163::41-140::41-138
YFCTYGYLYHQKEMLCDRVRMDAYHSSVFRNAPHFQGKVVLDVGTGSGILAIWSAQAGARKVYAVEATNMAEHARELARANGVADIVEVIQGTVEDIELPEKVDVIISEWMGYFLLRESMFDSVICARDRWLKPDGVMYPSHARMWLAPIRTGLGDKKLEDLDIAMEDWSLFVQDTQAYYGVNMNALTKAYRAEHEKYYLKSSIWNNLHPNQVIGQPAVIKEIDCLTATVDEIREVRAQVTLPISLDGTRLSALAGWFDVHFRGSAQNPAVEEVELNTAPVEHGGTHWGQQVFLLTPHLKVSKGDNVNVSFSMVRSKENHRLMDMEFTYELHEFSGRKHPAVTTKMYLE

SEQ ID NO: 95945 - protein, 87 aa, Setaria italica
  Transcript Sequence Number=SeqID_29971
  Gene Ontology: Mol. function=protein serine/threonine kinase activity; Cellular component=plasma membrane; Biological process =protein amino acid phosphorylation
  Homolog annotation: Hit_ID=Q9LW99; Match level="QueryCoverage=95%, HitCoverage=15%, E-value=4e-26, Identity=68%"; Hit description =Protein kinase MK6
APPMQTSSKAGPWRKMLSSKDVNFVGYTYKNFEIVNDPELPGLVGNTELKKKSNKPKRPTIKSLFETADSEDQTSEGSFLNLLPTQL

SEQ ID NO: 95946 - protein, 377 aa, Setaria italica
  Transcript Sequence Number=SeqID_29972
  Gene Ontology: Mol. function=protein serine/threonine kinase activity; Cellular component=plasma membrane; Biological process =protein amino acid phosphorylation
  Homolog annotation: Hit_ID=Q9LW99; Match level="QueryCoverage=91%, HitCoverage=61%, E-value=1e-161, Identity=77%"; Hit description =Protein kinase MK6
  Pfam annotation: Domain name=Pkinase; Domain location=3-235; Score =79.2; E_value=1.5e-20; Accession=PF00069.17; Description=Protein kinase domain
  Pfam annotation: Domain name=Pkinase_C; Domain location=253-302; Score=55.9; E_value=1.6e-13; Accession=PF00433.16; Description =Protein kinase C terminal domain
  Pfam annotation: Domain name=Pkinase_Tyr; Domain location=1-213; Score=-148.2; E_value=0.00072; Accession=PF07714.9; Description =Protein tyrosine kinase
  Pfam module annotation: Pfam domain module=Pkinase::Pkinase _C::Pkinase_Tyr; Domain location=3-235::253-302::1-213
ILYLIMEVSSLGGDMMTLLMRKDTLTEDESRFYVAETILAIESIHKHSYIHRDIKPDNLLLDRSGHLKLSDFGLCKPLDSSSFPNLSDLDYAVGKSTNPSSDGDKQSSNCTAPRRTQQEQLMHWQKNRRMLAYSTVGTPDYIAPEVLLKKGYGMECDWWSLGAIMYEMLVGYPPFYSEDPMSTCRKIVNWRSHLKFPEEARLSPEAKDLIGKLLCNVDQRLGTKGAHEIKAHPWLGSVEWEKLYQMEAAFIPEVNDELDTQNFEKFEETAPPMQTSSKAGPWRKMLSSKDVNFVGYTYKNFEIVNDPELPGIAELKKKSNKPKRPTIKSLFETADSEDQTSEGSFLNLLPTQLELPESLEPSPHSSISSEDSQARHR

SEQ ID NO: 95947 - protein, 101 aa, Setaria italica
  Transcript Sequence Number=SeqID_29973
RTWINSMAYAHLNFIVWIRQYHFLNSHLHVCASVLTPIKALDSRLPIRPSFYYCAFRYVTYEYFFTSTPARTLFFYCAFRYLFIMSRRNMSSLLHLRRSSI

SEQ ID NO: 95948 - protein, 44 aa, Setaria italica
  Transcript Sequence Number=SeqID_29974
AIFQSNYIHVHKLEYSLQQLRRRKISLLKRPPSNVSSFGISHSI

SEQ ID NO: 95949 - protein, 113 aa, Setaria italica
  Transcript Sequence Number=SeqID_29975
  Gene Ontology: Mol. function=hydrolase activity; Biological process =metabolic process
MDPYKYLKIRFNPDGSLSRYGEAPLLPAAPAGEPVAVAVATEGGEDADQGPRRIVVHSNDVPLSDAAGTGLRLFVPSGGHARLPLVVYFHGGGYVLFRAASEPFHNTCAALAA

SEQ ID NO: 95950 - protein, 43 aa, Setaria italica
  Transcript Sequence Number=SeqID_29976
  Homolog annotation: Hit_ID=B6T2Z5; Match level="QueryCoverage=97%, HitCoverage=18%, E-value=2e-13, Identity=85%"; Hit description =Cyclase/dehydrase
YEIPEILAPVGSALKPFMEGLLLKGLERFAAYAKERNSKIPQP

SEQ ID NO: 95951 - protein, 181 aa, Setaria italica
  Transcript Sequence Number=SeqID_29977
  Gene Ontology: Mol. function=electron carrier activity; Cellular component=chloroplast; Biological process=electron transport chain
  Homolog annotation: Hit_ID=Q0GBX1; Match level="QueryCoverage=52%, HitCoverage=47%, E-value=1e-44, Identity=86%"; Hit description =Putative rubredoxin
  Pfam annotation: Domain name=Rubredoxin; Domain location=85-131; Score=75.9; E_value=1.4e-19; Accession=PF00301.12; Description =Rubredoxin
AAATTLSLIPSSSHHFALHSVDVSKDDKPLDSPPPATTTTTAESAQVDAAGGGAEAAPLETEEDDGLKLDPRRFEEKFAVLNTGIHECRSCGYRYDQASGDPSYPVPPGLPFAQLPDDWRCPTCGAAQSFFESKSVEIAGFAQNQQFGLGGNSLTSGQKGLLIYGSLLLGFLFFISGYFLQ

SEQ ID NO: 95952 - protein, 92 aa, Setaria italica
  Transcript Sequence Number=SeqID_29978
  Gene Ontology: Mol. function=transferase activity; Biological process= glutamine metabolic process
  Homolog annotation: Hit_ID=B9SQW3; Match level="QueryCoverage=95%, HitCoverage=34%, E-value=1e-19, Identity=52%"; Hit description=GMP synthase [glutamine-hydrolyzing] subunit A, putative
VWEVPPGATVLASSEKTRVEVFAVGEHALGIQGHPEYTTDTLHNLIDRLTAQGAIEARAGEDARRTVAETGGPDRAFWTGLCKVFLRGGGSS

SEQ ID NO: 95953 - protein, 121 aa, Setaria italica
  Transcript Sequence Number=SeqID_29979
  Subcellular localization annotation: CTP_CleavageSite=29; ConfidenceScore=5.09e-01
PPVKRPLRSRRHCCGGRTSPGDDAPPSILSQRRPQPSCCSNACWGCRCGRGRGSQEVPQTAGSKVAPRGGGRNSSAGELGAVPWPQLRPYGSARPRLHPGGGREQRRQERERWVEGGDQIF

SEQ ID NO: 95954 - protein, 101 aa, Setaria italica
  misc_feature (6)..(6): Xaa can be any naturally occurring amino acid
  Transcript Sequence Number=SeqID_29980
MRIAGXFPSPCTPLLHYCVDQDQSEGSKLIGDSCIIWNPASGVCLIENLQSAIVLSKRNPMIGACLVPHCQWQPKKCCVLYSYTKDSRFSPGNYNAITTGQ

SEQ ID NO: 95955 - protein, 345 aa, Setaria italica
  Transcript Sequence Number=SeqID_29981
  Gene Ontology: Cellular component=chloroplast envelope
GGGDDELPSGDGGSGEGGDEGGGGSGGGGDEGDGGSGGGGDEGDGGSADGSGDGDDASGNRREALFVLAQLGRKLESLPADLAAAVEGGRVTGDIVRRYVDLEASPLSRWLLQFGGFKERLLADDLFLTKVGIECGIGVFTKSAAEYEKRKENFVKELDFVLANVIMAIVADFMLAWLPAPTVSLRPPLAMNSGAISKFFYNCPDNAFQVALAGRSYTLLQRAGAIVRNGAKLFAVGTSASLIGTTATNALIKARQAVSSDSAGEVKEAKNIPIVETSIAYGVYMSISSNLRYQIVAGVIEQRLLEPLLHRHKLALTAMSFAVRTGNTFLGSCLWVDYARLIGIQ

SEQ ID NO: 95956 - protein, 160 aa, Setaria italica
  Transcript Sequence Number=SeqID_29982
  Homolog annotation: Hit_ID=Q5N7R8; Match level="QueryCoverage=50%, HitCoverage=17%, E-value=3e-16, Identity=56%"; Hit description =Myosin heavy chain-like
SVGRLGPQAWVQALKAGEKELEARAEAAERVTAEMRAREAEAAAAAESAAGEQKALEQELYDLNAAAEAESAVGEQKALEQELYDLNAAAERDGLLCAYPRRRSSRVSATRRRARARRSSVSSAAGIRNPRSPSFTIKRKKKVMPSLFKLIKQRKEKRAS

SEQ ID NO: 95957 - protein, 95 aa, Setaria italica
  misc_feature (53)..(53): Xaa can be any naturally occurring amino acid
  Transcript Sequence Number=SeqID_29983
  Gene Ontology: Mol. function=metal ion binding
  Homolog annotation: Hit_ID=B9RE37; Match level="QueryCoverage=100%, HitCoverage=32%, E-value=2e-16, Identity=38%"; Hit description=X -linked inhibitor of apoptosis protein, xiap, putative
LAATSLMLLKLCGGAVTLGWWDLFINFGISQGFAFMVCTRWSNPMVGRHSILXIGGPVLIIPIIVFQVLLCMRLEGTPSNAHFIPMRAIFLPIIL

SEQ ID NO: 95958 - protein, 116 aa, Setaria italica
  misc_feature (107)..(107): Xaa can be any naturally occurring amino acid
  Transcript Sequence Number=SeqID_29984
  Gene Ontology: Mol. function=metal ion binding
  Homolog annotation: Hit_ID=B9RE37; Match level="QueryCoverage=96%, HitCoverage=38%, E-value=2e-21, Identity=40%"; Hit description=X -linked inhibitor of apoptosis protein, xiap, putative
  Pfam annotation: Domain name=Tmemb_185A; Domain location=1-115; Score= -37.3; E_value=0.00034; Accession=PF10269.1; Description =Transmembrane Fragile-X-F protein
QLHRMCGALMPGHGETITDEAIWERLPYFWVAISMVFLLAATSLMLLKLCVTLGWWDLFINFGISQGFAFMVCTRWSNPMDIGGPVLIIPIIVFQVLLCMRLEGTPXSNAHFIPMR

SEQ ID NO: 95959 - protein, 92 aa, Setaria italica
  Transcript Sequence Number=SeqID_29985
  Gene Ontology: Mol. function=metal ion binding
  Homolog annotation: Hit_ID=B9RE37; Match level="QueryCoverage=96%, HitCoverage=32%, E-value=8e-14, Identity=35%"; Hit description=X -linked inhibitor of apoptosis protein, xiap, putative
YFWVAISMVFLLAATSLMLLKLCGGAVTLGWWDLFINFGISQGFAFMVCTRWSNPMDIGGPVLIIPIIVFQVLLCMRLEGTPSNALFYPNAS

SEQ ID NO: 95960 - protein, 114 aa, Setaria italica
  misc_feature (8)..(8): Xaa can be any naturally occurring amino acid
  Transcript Sequence Number=SeqID_29986
  Gene Ontology: Mol. function=carbonate dehydratase activity; Cellular component=extracellular region; Biological process=one-carbon compound metabolic process
  Homolog annotation: Hit_ID=B6SUT0; Match level="QueryCoverage=97%, HitCoverage=36%, E-value=2e-52, Identity=87%"; Hit description =Carbonic anhydrase
RFGRPDPXLWQIQDKLAALYAEGCDAEKGAPVAAGVVSLWPLRLHSHAYYRYVGSFTTPPCTENVVWSILTQVREMTVDQAAALMAPLEQEYRHNNRPTQPMNGRVVQVYRFMP

SEQ ID NO: 95961 - protein, 172 aa, Setaria italica
  Transcript Sequence Number=SeqID_29987
  Gene Ontology: Mol. function=sequence-specific DNA binding; Cellular component=nucleus; Biological process=regulation of transcription, DNA-dependent
  Homolog annotation: Hit_ID=Q8H6W1; Match level="QueryCoverage=98%, HitCoverage=37%, E-value=1e-41, Identity=52%"; Hit description=WRKY transcription factor
  Pfam annotation: Domain name=WRKY; Domain location=1-44; Score=21.2; E_value=2.1e-06; Accession=PF03106.7; Description=WRKY DNA -binding domain
PKIPRKLLQIVHTLGCSVRKHVERASHDLKSVITTYEGKHNHEVPAARNSGQAGSSSANAPSASQGSSSHRRQEPAQASFAHFGASAPFGSFVLPPSSQLGPATGNFRFGMVPPGMAIPMPSLGSLAPTKMVGNSSAMQGYPGLMMPVEPKAEPAPPVYQQMMSRPPFGHQM

SEQ ID NO: 95962 - protein, 74 aa, Setaria italica
  Transcript Sequence Number=SeqID_29988
  Pfam annotation: Domain name=Vps51; Domain location=8-73; Score=45.9; E_value=1.5e-10; Accession=PF08700.3; Description=Vps51Vps67
MPAAAVPGGGGAADAEELFRTKRIPEIRAAEGATRREISAKEEELRQLVGRSYRDLLDSADSILLIKQSSDSIS

SEQ ID NO: 95963 - protein, 135 aa, Setaria italica
  misc_feature (10)..(10): Xaa can be any naturally occurring amino acid
  Transcript Sequence Number=SeqID_29989
  Gene Ontology: Mol. function=structural constituent of ribosome; Cellular component=intracellular; Biological process=translation
  Homolog annotation: Hit_ID=B6TN36; Match level="QueryCoverage=93%, HitCoverage=52%, E-value=3e-60, Identity=88%"; Hit description=5S rRNA binding protein
SNAVVHSGTXLPIKVHRDESTLNIGNLVMVQADEGTMLKVNLPVEFKGESACPGLKKGGFLQKIRTSLVYLCPAEHIPPKIEVDLANLDVGDRVLMHNIPVHPSLKLLSKNETMPVCKILASKPVESETMQDLKS

SEQ ID NO: 95964 - protein, 78 aa, Setaria italica
  Transcript Sequence Number=SeqID_29990
  Gene Ontology: Mol. function=transferase activity, transferring glycosyl groups; Biological process=metabolic process
  Homolog annotation: Hit_ID=Q9M9E7; Match level="QueryCoverage=52%, HitCoverage=8%, E-value=2e-14, Identity=80%"; Hit description=F3F9.19
MASSEPQPKPAKPHVLLIPYPAQGHVNPFLKLAKALHARGFHVTFVHTEYNHGRLLRARGAAAFDAGDEGFRFETIPG

SEQ ID NO: 95965 - protein, 223 aa, Setaria italica
  Transcript Sequence Number=SeqID_29991
  Gene Ontology: Cellular component=mitochondrion
  Homolog annotation: Hit_ID=B9RP84; Match level="QueryCoverage=100%, HitCoverage=74%, E-value=9e-58, Identity=31%"; Hit description =Pentatricopeptide repeat-containing protein, putative
  Pfam annotation: Domain name=PPR; Domain location=110-144; Score =46.3; E_value=1.2e-10; Accession=PF01535.12; Description=PPR repeat
  Pfam annotation: Domain name=PPR; Domain location=145-179; Score =49.0; E_value=1.8e-11; Accession=PF01535.12; Description=PPR repeat
  Pfam annotation: Domain name=PPR; Domain location=180-214; Score =41.3; E_value=3.7e-09; Accession=PF01535.12; Description=PPR repeat
  Pfam annotation: Domain name=PPR; Domain location=40-74; Score=42.0; E_value=2.4e-09; Accession=PF01535.12; Description=PPR repeat
  Pfam annotation: Domain name=PPR; Domain location=5-39; Score=48.3; E_ value=2.9e-11; Accession=PF01535.12; Description=PPR repeat
  Pfam annotation: Domain name=PPR; Domain location=75-109; Score=34.5; E_value=4.3e-07; Accession=PF01535.12; Description=PPR repeat
  Pfam module annotation: Pfam domain module=PPR::PPR::PPR::PPR::PPR::PP R; Domain location=110-144::145-179::180-214::40-74::5-39::75-109
KPSIVTYHSLLLGYCEKGCMDEALKLYSEMPGKGFTPNEVTYTTLMKGYIKKNAFDKAYSLLDEMHQNGVSCNDFTYNILINGLCMADRVCEVDEMLKRFISEGFVPSTMTYNSIINGFVKAGMMGSAFAMYQQMCEKGITPNIITYTSFIDGYCRTGCCDLAVKLLNDMRHKGIRPDIAAYNAFINGFCKQGNMSHALQFFVLLLKDGLKPDVTVYNCFITG

SEQ ID NO: 95966 - protein, 59 aa, Setaria italica
  Transcript Sequence Number=SeqID_29992
IIISFLVIYLINVNHHKVPLIRVILEAYIFLPLWNLQSFNLPAAAADKKKSFISVMGIL

SEQ ID NO: 95967 - protein, 223 aa, Setaria italica
  misc_feature (38)..(38): Xaa can be any naturally occurring amino acid
  Transcript Sequence Number=SeqID_29993
  Gene Ontology: Mol. function=catalytic activity; Biological process =cellular metabolic process
  Homolog annotation: Hit_ID=Q5VNM2; Match level="QueryCoverage=79%, HitCoverage=79%, E-value=2e-85, Identity=84%"; Hit description =Cinnamoyl CoA reductase-like
  Subcellular localization annotation: CTP_CleavageSite=49; ConfidenceScore=5.06e-01
ESLHRAFDGCAGVFHTSAFVDPGGMSGYTKHMATVRSXAAERVIEACVRTESVRKCVFTSSLLACVWRQNYPHDRRFPTIIDENCWSDESFCRDNKLWFALGKTAAEKAAWRAARGRDLKLVTICPALVTGPGFRRRNSTASIAYLKGARAMLSDGLLATANVETVAEAHVRAYEAMGDNTAGGRYICYDHVVRRPEEFTELERQLAMPGGAAAAAAAAQGAG

SEQ ID NO: 95968 - protein, 79 aa, Setaria italica
  Transcript Sequence Number=SeqID_29994
RRRLDKIVRGGVHCTRRARAQRRRRRGRWRRELGDRAWRGVAGAAMATAAPHAVAHAMRLQSCCLLAATTSTAGHCSRV

SEQ ID NO: 95969 - protein, 80 aa, Setaria italica
  Transcript Sequence Number=SeqID_29995
GVASTWAWWTCCARAEASSAAWETEAGPWPRNRLPRTWISPWNWEAAASAAGPSPAQPREKLVSVCVCKQRCSRAGSRLA

SEQ ID NO: 95970 - protein, 63 aa, Setaria italica
  Transcript Sequence Number=SeqID_29996
PLTFTYHHWLWTAYFRWPTGHSLPFCSCGCVLHEKPCGIFVLPVPDGDLPTPILILCLFACCN

SEQ ID NO: 95971 - protein, 91 aa, Setaria italica
  Transcript Sequence Number=SeqID_29997
  Gene Ontology: Cellular component=endoplasmic reticulum
  Homolog annotation: Hit_ID=B6TG01; Match level="QueryCoverage=87%, HitCoverage=31%, E-value=5e-22, Identity=60%"; Hit description =Reticulon
  Pfam annotation: Domain name=Reticulon; Domain location=1-84; Score= -35.8; E_value=0.03; Accession=PF02453.9; Description=Reticulon
NIRRTLLDVPEVQISEELAVNIALALRADINKALVLLRELALGHDLMKFLGVIVALWIVSEIGELCDLLRLMYIVVLILHTGSSDLIFNLF

SEQ ID NO: 95972 - protein, 240 aa, Setaria italica
  Transcript Sequence Number=SeqID_29998
  Gene Ontology: Cellular component=endoplasmic reticulum
  Homolog annotation: Hit_ID=B6TG01; Match level="QueryCoverage=92%, HitCoverage=87%, E-value=2e-85, Identity=68%"; Hit description =Reticulon
  Pfam annotation: Domain name=Reticulon; Domain location=54-216; Score= 193.6; E_value=5.5e-55; Accession=PF02453.9; Description=Reticulon
MAGSAEEAPAAASPVASPRDGVTEETASPAARSRGFWLLGEDKSVHKALGGGKTADVLLWKDTKTSAAVVGGATILWLLFEVVEYHLLTLASHVMIATLTILFLWSNATVFIKKSPPDVPEVQISEELAVNIALALRADINKALVLLRELALGHDLMKFLGVIVALWIVSEIGELCDLLRLMYIVVLILHTVPILYHKYQDQVDDFAAKAHAELCKQYKVLDAKVLSKIPRAPPKDKKEN

SEQ ID NO: 95973 - protein, 125 aa, Setaria italica
  Transcript Sequence Number=SeqID_29999
  Gene Ontology: Mol. function=hydrolase activity, acting on ester bonds; Cellular component=vacuole; Biological process=lipid metabolic process
  Homolog annotation: Hit_ID=B6TY85; Match level="QueryCoverage=99%, HitCoverage=32%, E-value=2e-54, Identity=80%"; Hit description=Alpha- L-fucosidase 2
FNLTVPMPFASNSLKVQLRWFKDFMKSSFGTDEEIRKKLQSSLVLVGEIGGNDYNYEFFANKPMTEVEKLIPGVIKTIIDAAKEVLDMGAGKVIIPGNFPIGCVPGYLAMNAGTSEPADYDAYGS

SEQ ID NO: 95974 - protein, 82 aa, Setaria italica
  misc_feature (62)..(62): Xaa can be any naturally occurring amino acid
  Transcript Sequence Number=SeqID_30000
  Gene Ontology: Mol. function=histone deacetylase activity; Cellular component=nucleus
TRCKNEEEPAETEATDLDVNSVAAEHSRGNGPVADGVGSSKQTLANSPNDASPMAVDEPGAXKVETESSNKLQDQPTMQQKP

SEQ ID NO: 95975 - protein, 344 aa, Setaria italica
  Transcript Sequence Number=SeqID_30001
  Gene Ontology: Mol. function=histone deacetylase activity; Cellular component=nucleus; Biological process=histone deacetylation
  Homolog annotation: Hit_ID=Q0Z9W2; Match level="QueryCoverage=100%, HitCoverage=66%, E-value=1e-140, Identity=78%"; Hit description =Histone deacetylase HDAC3
  Pfam annotation: Domain name=Hist_deacetyl; Domain location=1-158; Score=42.1; E_value=1.2e-11; Accession=PF00850.11; Description =Histone deacetylase family
LLKYHQRVLYVDIDIHHGDGVEEAFYTTDRVMTVSFHKFGDYFPGTGDIRDVGHSKGKYYSLNVPLDDGIDDESYQSLFKPIMGKVMEVFNPGAVVLQCGADSLSGDRLGCFNLSIKGHAECVRFMRSFNVPLLLLGGGGYTIRNVARCWCYETGVALGHELTDKMPPNEYYEYFGPDYTLHVAPSNMENKNTRHQLDDIRSKLLDNLSKLRHAPSVQFQERPPEAELPEQDEDKENPDERRDADSDVEMNDAKPLEDSGRRSNIQGVRMKKEPAETEATDLDVNSVAAEHSRGNGPVADGVGSSKQTLPNDASPMAVDEPGAQKVETESSNKLQDQPTMQQKP

SEQ ID NO: 95976 - protein, 49 aa, Setaria italica
  Transcript Sequence Number=SeqID_30002
  Gene Ontology: Mol. function=3'-5'-exoribonuclease activity; Biological process=RNA processing
MSAQAGTGTYSPAAAAGDKRRERREELRRHLAEDADWPRADGRSFHDCR

SEQ ID NO: 95977 - protein, 512 aa, Setaria italica
  Transcript Sequence Number=SeqID_30003
  Gene Ontology: Mol. function=carotene 7,8-desaturase activity; Cellular component=chromoplast; Biological process=carotenoid biosynthetic process
  Homolog annotation: Hit_ID=Q9ZTP4; Match level="QueryCoverage=99%, HitCoverage=88%, E-value=0.0, Identity=97%"; Hit description=Zeta -carotene desaturase, chloroplastic/chromoplastic
  Pfam annotation: Domain name=Amino_oxidase; Domain location=16-481; Score=317.1; E_value=3.6e-92; Accession=PF01593.16; Description =Flavin containing amine oxidoreductase
  Pfam annotation: Domain name=DAO; Domain location=8-479; Score=-47.3; E_value=0.014; Accession=PF01266.16; Description=FAD dependent oxidoreductase
  Pfam annotation: Domain name=Pyr_redox_2; Domain location=8-295; Score=-65.9; E_value=0.081; Accession=PF07992.6; Description =Pyridine nucleotide-disulphide oxidore
  Pfam module annotation: Pfam domain module=Amino_oxidase::DAO::Pyr _redox_2; Domain location=16-481::8-479::8-295
NKGDQKLKVAIIGAGLAGMSTAVELLDQGHEVDLYESRPFIGGKVGSFVDRQGNHIEMGLHVFFGCYSNLFRLMKKVGADNNLLVKEHTHTFVNKGGTIGELDFRFPVGAPLHGIQAFLRTNQLKVYDKARNAVALALSPVVRALVDPDGALQQVRDLDDVSFSDWFMSKGGTRESITRMWDPVAYALGFIDCDNISARCMLTIFTLFATKTEASLLRMLKGSPDVYLSGPIKKYITDRGGRFHLRWGCREVLYEKSPDGETYVKGLLLTKATSREIIKADAYVAACDVPGIKRLLPPEWREWEMFDNIYKLDGVPVVTVQLRYNGWVTELQDLEKSRQLEKAVGLDNLLYTADADFSCFSDLALSSPADYYIEGQGSLIQAVLTPGDPYMPLPNEEIISKVQKQVVELFPSARGLEVTWSSVVKIGQSLYREAPGNDPFRPDQKTPVKNFFLSGSYTKQDYIDSMEGATLSGRRTAAYICGAGEQLLALRKKLVIDDSEKALGNVQVLQTS

SEQ ID NO: 95978 - protein, 78 aa, Setaria italica
  Transcript Sequence Number=SeqID_30004
SSSSLLLLRYPPEALAAARFPAAARTAAPPAPRPIPHHRPNPSGARRPASAIDAGAAGRNKAEPDRTGCAAECLLMQC

SEQ ID NO: 95979 - protein, 328 aa, Setaria italica
  Transcript Sequence Number=SeqID_30005
  Gene Ontology: Mol. function=molecular_function; Cellular component =cellular_component; Biological process=biological_process
  Homolog annotation: Hit_ID=B6SY13; Match level="QueryCoverage=99%, HitCoverage=81%, E-value=1e-161, Identity=86%"; Hit description =Guanine nucleotide-binding protein beta subunit-like protein 1
  Pfam annotation: Domain name=WD40; Domain location=196-234; Score =7.7; E_value=4.9; Accession=PF00400.24; Description=WD domain, G -beta repeat
  Pfam annotation: Domain name=WD40; Domain location=242-280; Score =12.9; E_value=1.2; Accession=PF00400.24; Description=WD domain, G -beta repeat
  Pfam annotation: Domain name=WD40; Domain location=284-322; Score =35.7; E_value=1.8e-07; Accession=PF00400.24; Description=WD domain, G-beta repeat
  Pfam module annotation: Pfam domain module=WD40::WD40::WD40; Domain location=196-234::242-280::284-322
AHAGTAGVYSVAAGAGLGNKIISQGRDGTCKCWVIEEAGLSRRPILTVKTSTYHFCKMSLVKSPSFTHSGRSGSNCPTSDVEPQRVAIEENAESHVVNPTEGPQEHGEGITSSGRNMMAIAGQESSQVELWDITSSRKIINLPQSSNANTKDHPTKQKGLCMAVQAFIPYESAGYVNILSSYEDGSTLWWDVRKPGLPLSSVKYHSESALSIAIDGPCNGGISGGADDKVVIFTLDHSKGAFTLRKEIELERPGIASTAIRPDNKIAATAGWDHRIRVYNYNKGNALAVLKYHSDSCNAVTFSSDCKLMASCSTDTTVALWELYPPKS

SEQ ID NO: 95980 - protein, 60 aa, Setaria italica
  Transcript Sequence Number=SeqID_30006
FSVLCILKRINKSALYLAPTLQKDGALVPSKEDKVAQIPMPNLQLMIYDQWKRIDNWRYS

SEQ ID NO: 95981 - protein, 156 aa, Setaria italica
  Transcript Sequence Number=SeqID_30007
  Gene Ontology: Mol. function=electron carrier activity; Biological process=oxidation reduction
  Homolog annotation: Hit_ID=Q2MIZ8; Match level="QueryCoverage=88%, HitCoverage=25%, E-value=4e-51, Identity=65%"; Hit description =Cytochrome P450 monooxygenase CYP711A12
VTTSYKTTFLIYFYAPFWSVRKVPGPPTRFPLGHLHLLAKNGPDVFRAIAKEYGPIFRFHMGRQPLVIVANAELCKEVGIKKFKDIRNRSTPPPTVGSLHQDALFLTRDSTWSAMRNTVVPLYQPARLAGLIPVMQSYVDALVANIAGCPDQDCIP

SEQ ID NO: 95982 - protein, 72 aa, Setaria italica
  Transcript Sequence Number=SeqID_30008
SLRPRIYVPSIIIYISMHASMHGLIKVIYAAVVINSELDHGHWKLAGTFLWHSLTSTSMAMGEHEVDVEHLG

SEQ ID NO: 95983 - protein, 72 aa, Setaria italica
  Transcript Sequence Number=SeqID_30009
  Gene Ontology: Mol. function=structural constituent of ribosome; Cellular component=ribonucleoprotein complex; Biological process =translation
  Homolog annotation: Hit_ID=Q0ITS8; Match level="QueryCoverage=44%, HitCoverage=14%, E-value=2e-11, Identity=100%"; Hit description=60S ribosomal protein L10-1
MAKNHRIVALLLVAATLVAQAAACPSCPTPKPPPLAAAVAMGRRPARCYRQIKNKPYPKSRYCRGVPDPKIR

SEQ ID NO: 95984 - protein, 72 aa, Setaria italica
  misc_feature (34)..(34): Xaa can be any naturally occurring amino acid
  misc_feature (48)..(48): Xaa can be any naturally occurring amino acid
  Transcript Sequence Number=SeqID_30010
  Gene Ontology: Mol. function=structural constituent of ribosome; Cellular component=ribonucleoprotein complex; Biological process =translation
  Homolog annotation: Hit_ID=Q0ITS8; Match level="QueryCoverage=97%, HitCoverage=30%, E-value=5e-25, Identity=85%"; Hit description=60S ribosomal protein L10-1
  Pfam annotation: Domain name=Ribosomal_L16; Domain location=1-71; Score=-50.0; E_value=0.03; Accession=PF00252.10; Description =Ribosomal protein L16
GNILLLPAHKVNVSSEALEAARIACNKYMTKSAXGKDAFHLRVRVHPXFHVLRINKMLSCAGADRLQTGMRG

SEQ ID NO: 95985 - protein, 29 aa, Setaria italica
  misc_feature (20)..(20): Xaa can be any naturally occurring amino acid
  Transcript Sequence Number=SeqID_30011
MSCFQGLLFCPEAASLLLHXNFCIYHITP

SEQ ID NO: 95986 - protein, 55 aa, Setaria italica
  misc_feature (23)..(23): Xaa can be any naturally occurring amino acid
  Transcript Sequence Number=SeqID_30012
  Gene Ontology: Mol. function=structural constituent of ribosome; Cellular component=ribonucleoprotein complex; Biological process =translation
  Homolog annotation: Hit_ID=Q0ITS8; Match level="QueryCoverage=96%, HitCoverage=23%, E-value=8e-22, Identity=92%"; Hit description=60S ribosomal protein L10-1
PGPARCYRQIKNKPYPKSRYCRXVVPDPKIRIYDVGMKRKGVDEFPFCVHLVSWE

SEQ ID NO: 95987 - protein, 58 aa, Setaria italica
  Transcript Sequence Number=SeqID_30013
  Gene Ontology: Mol. function=nutrient reservoir activity; Biological process=lipid transport
  Homolog annotation: Hit_ID=Q7XLD7; Match level="QueryCoverage=77%, HitCoverage=29%, E-value=3e-15, Identity=93%"; Hit description =OSJNBa0070C17.11 protein
CSGGTCPSASTASGKCPLNTLKLLACVDALNGLVHAVVGAKASEKCCPLLSGVADLDA

SEQ ID NO: 95988 - protein, 82 aa, Setaria italica
  Transcript Sequence Number=SeqID_30014
  Homolog annotation: Hit_ID=Q6PWU0; Match level="QueryCoverage=93%, HitCoverage=21%, E-value=1e-28, Identity=70%"; Hit description =SF21C1 protein
VSPLCKAPSWSEWFYNKVMSNLLYYYGMCNVVKDILLQRYFGKGVRGCSTEPESDIVQACRSFLDQRQGMNVWRFIRLSMSM

SEQ ID NO: 95989 - protein, 97 aa, Setaria italica
  Transcript Sequence Number=SeqID_30015
MAKNHRIVALLLVAAATATPMGTGGAERWGPRGQVILSLLLVFVVVSDLCWSSVSCCCPSVFFDRKLVRRVCRQSYPHLQTSHRTGRWIGCWTASIH

SEQ ID NO: 95990 - protein, 37 aa, Setaria italica
  Transcript Sequence Number=SeqID_30016
  Gene Ontology: Cellular component=ribonucleoprotein complex
  Homolog annotation: Hit_ID=Q9SIK2; Match level="QueryCoverage=100%, HitCoverage=34%, E-value=4e-10, Identity=83%"; Hit description=40S ribosomal protein S25-2
  Pfam annotation: Domain name=Ribosomal_S25; Domain location=1-35; Score=-16.6; E_value=0.0026; Accession=PF03297.7; Description=S25 ribosomal protein
INGSLARRAIKDLMARGLIRMVAQHSSQQIYTGATNT

SEQ ID NO: 95991 - protein, 91 aa, Setaria italica
  misc_feature (32)..(32): Xaa can be any naturally occurring amino acid
  Transcript Sequence Number=SeqID_30017
  Gene Ontology: Mol. function=structural constituent of ribosome; Cellular component=ribonucleoprotein complex; Biological process =translation
  Homolog annotation: Hit_ID=P45633; Match level="QueryCoverage=100%, HitCoverage=40%, E-value=3e-43, Identity=95%"; Hit description=60S ribosomal protein L10
  Pfam annotation: Domain name=Ribosomal_L16; Domain location=1-87; Score=19.9; E_value=3.3e-07; Accession=PF00252.10; Description =Ribosomal protein L16
KDAFHLRVRVHPFHVLRINKMLSCAGADRLQXLGMRGAFGKPQGTCARVDIGQVLLSVRCKDSNAAHASEALRRAKFKFPGRQKIIESRKW

SEQ ID NO: 95992 - protein, 85 aa, Setaria italica
  Transcript Sequence Number=SeqID_30018
  Homolog annotation: Hit_ID=Q2XP03; Match level="QueryCoverage=98%, HitCoverage=28%, E-value=9e-31, Identity=66%"; Hit description =SF21D2 splice variant protein (Fragment)
VLILALCKAPSWSEWFYNKVMSNLLYYYGMCNVVKDILLQRYFGKGVRGCSTEPESDIVQACRSFLDQRQGMNVWRFIQTINERK

SEQ ID NO: 95993 - protein, 119 aa, Setaria italica
  misc_feature (15)..(15): Xaa can be any naturally occurring amino acid
  misc_feature (63)..(63): Xaa can be any naturally occurring amino acid
  Transcript Sequence Number=SeqID_30019
  Gene Ontology: Mol. function=structural constituent of ribosome; Cellular component=ribonucleoprotein complex; Biological process =translation
  Homolog annotation: Hit_ID=P45633; Match level="QueryCoverage=100%, HitCoverage=53%, E-value=5e-57, Identity=94%"; Hit description=60S ribosomal protein L10
  Pfam annotation: Domain name=Ribosomal_L16; Domain location=1-65; Score=-54.8; E_value=0.066; Accession=PF00252.10; Description =Ribosomal protein L16
SCAGADRLQTGMRGXAFGKPQGTCARVDIGQVLLSVRCKDSNAAHASEALRRAKFKFPGRQKXIIESRKWGFTKFSRADYLKYKSEGRIMPDGVNAKLLGNHGRLEKRAPGKAFLEAVA

SEQ ID NO: 95994 - protein, 76 aa, Setaria italica
  Transcript Sequence Number=SeqID_30020
FIISSTTLKSDSIVLYPCCSCLVTMADLRSALLGRLSLRLSHKLPRLLQRECDSRLFCFSLSYFALWNMNSKCLCG

SEQ ID NO: 95995 - protein, 117 aa, Setaria italica
  Transcript Sequence Number=SeqID_30021
  Subcellular localization annotation: CTP_CleavageSite=44; ConfidenceScore=5.33e-01
MDPRPPSGFSNCKSYPNGPPGMPNPVNFHQPQFPQHVSFSHPSYAMSVPHQQFSQQHLYPPNIQYVVVQPQYAPFSLHQPPPQPAGAMSAPPPPTTGTMPLPALPLQPPPAGVVPFM

SEQ ID NO: 95996 - protein, 61 aa, Setaria italica
  Transcript Sequence Number=SeqID_30022
SRALEAGGHVLVALGVGQDGQAAACATIKAKVLNVNLVLPIAIEVLVNECHKNVPASFQCP

SEQ ID NO: 95997 - protein, 49 aa, Setaria italica
  Transcript Sequence Number=SeqID_30023
  Gene Ontology: Mol. function=structural constituent of ribosome; Cellular component=intracellular; Biological process=translation
  Homolog annotation: Hit_ID=Q0ITS8; Match level="QueryCoverage=67%, HitCoverage=14%, E-value=2e-12, Identity=100%"; Hit description=60S ribosomal protein L10-1
CSLLKTRLYVFEFFSGPARCYRQIKNKPYPKSRYCRGVPDPKIRIYDVG

SEQ ID NO: 95998 - protein, 171 aa, Setaria italica
  misc_feature (57)..(57): Xaa can be any naturally occurring amino acid
  misc_feature (68)..(68): Xaa can be any naturally occurring amino acid
  Transcript Sequence Number=SeqID_30024
  Gene Ontology: Mol. function=structural constituent of ribosome; Cellular component=ribonucleoprotein complex; Biological process =translation
  Homolog annotation: Hit_ID=P45633; Match level="QueryCoverage=97%, HitCoverage=74%, E-value=2e-84, Identity=93%"; Hit description=60S ribosomal protein L10
  Pfam annotation: Domain name=Ribosomal_L16; Domain location=1-118; Score=95.8; E_value=1.5e-25; Accession=PF00252.10; Description =Ribosomal protein L16
SSLGSKENFSSEALEAARIACNKYMTKSAGKDAFHLRVRVHPFHVLRINKMLSCAGXADRLQTGMRGXAFGKPQGTCARVDIGQVLLSVRCKDSNAAHASEALRRAKFKFPGRQKIIESRKWGFTKFSRADYLKYKSEGRIMPDGVNAKLLGNHGRLEKRAPGKAFLEAVA

SEQ ID NO: 95999 - protein, 159 aa, Setaria italica
  Transcript Sequence Number=SeqID_30025
  Gene Ontology: Mol. function=structural constituent of ribosome; Cellular component=ribonucleoprotein complex; Biological process =translation
  Homolog annotation: Hit_ID=P45633; Match level="QueryCoverage=100%, HitCoverage=71%, E-value=1e-82, Identity=94%"; Hit description=60S ribosomal protein L10
  Pfam annotation: Domain name=Ribosomal_L16; Domain location=1-105; Score=91.6; E_value=2.8e-24; Accession=PF00252.10; Description =Ribosomal protein L16
EALEAARIACNKYMTKSAGKDAFHLRVRVHPFHVLRINKMLSCAGADRLQTGMRGAFGKPQGTCARVDIGQVLLSVRCKDSNAAHASEALRRAKFKFPGRQKIIESRKWGFSPKFSRADYLKYKSEGRIMPDGVNAKLLGNHGRLEKRAPGKAFLEAVA

SEQ ID NO: 96000 - protein, 222 aa, Setaria italica
  Transcript Sequence Number=SeqID_30026
  Homolog annotation: Hit_ID=B6UC77; Match level="QueryCoverage=66%, HitCoverage=70%, E-value=4e-47, Identity=66%"; Hit description =Dirigent-like protein pDIR3
  Pfam annotation: Domain name=Dirigent; Domain location=42-206; Score =77.5; E_value=4.8e-20; Accession=PF03018.6; Description=Dirigent -like protein
MKLLLLSPTIINPGYIPATSISQTHHNGQLCKAAASARLLLLVAVIVLLLPSADARRRPVHLRLYMHDIIGGPEQTAIHLIRNAGPPHKSLKGAYFGDTMAIDDLVTDGPGIDSGSVGRAQGTYMLSSQHEEVLVAAVTVALTDGPYSGSTFVIAGRVGIYDDKSELAIVGGTGQLRRAAGYVLWRMAKVVSEVYIVVELIVHMSVPANAAAPSNGSSLAIE

SEQ ID NO: 96001 - protein, 348 aa, Setaria italica
  Transcript Sequence Number=SeqID_30027
  Homolog annotation: Hit_ID=B6TFK0; Match level="QueryCoverage=94%, HitCoverage=95%, E-value=1e-150, Identity=75%"; Hit description =Pollen-specific protein SF21
  Pfam annotation: Domain name=Abhydrolase_1; Domain location=76-297; Score=16.6; E_value=0.00026; Accession=PF00561.12; Description =alphabeta hydrolase fold
  Pfam annotation: Domain name=Ndr; Domain location=22-306; Score =511.2; E_value=1.4e-150; Accession=PF03096.6; Description=Ndr family
  Pfam module annotation: Pfam domain module=Abhydrolase_1::Ndr; Domain location=76-297::22-306
MGDSGGSVVSVDVERISFGGKEHHIQTNHGSVSVAIYGDHDKPALITYPDIALNHMSCFQGLLFCPEAASLLLHNFCIYHISPPGHELGAAPILPSTPVASVDDLADQVADVLDFFGLDSVMCLGVTAGAYILTLFATKYRERVLGLILVSPLCKAPSWSEWFYNKVMSNLLYYYGMCNVVKDILLQRYFGKGVRGCSTEPESDIVQACRSFLDQRQGMNVWRFIQTINERKDLTENLKQLQCRTLIFVGENSQFHAEAVHMTAKLDSRYSALVEVQACGSVVTEEQPHAMLIPMEYFLMGYGLYRPSQINCSPRSPLNPFCISPELLSPESMGLKLKPIKTRANQKA

SEQ ID NO: 96002 - protein, 224 aa, Setaria italica
  Transcript Sequence Number=SeqID_30028
  Gene Ontology: Mol. function=structural constituent of ribosome; Cellular component=ribonucleoprotein complex; Biological process =translation
  Homolog annotation: Hit_ID=Q0ITS8; Match level="QueryCoverage=100%, HitCoverage=100%, E-value=1e-118, Identity=91%"; Hit description=60S ribosomal protein L10-1
  Pfam annotation: Domain name=Ribosomal_L16; Domain location=5-167; Score=218.2; E_value=2.1e-62; Accession=PF00252.10; Description =Ribosomal protein L16
MGRRPARCYRQIKNKPYPKSRYCRGVPDPKIRIYDVGMKRKGVDEFPFCVHLVSWEKENVSSEALEAARIACNKYMTKSAGKDAFHLRVRVHPFHVLRINKMLSCAGADRLQTGMRGAFGKPQGTCARVAIGQVLLSVRCKESNANHAEEALRRAKFKFPGRQKIIRSRKWGFTKFTRAEYLKYKSEGRIAPDGVNAKLYGVHGPLSKRAPGKAFLAENIQVSA

SEQ ID NO: 96003 - protein, 220 aa, Setaria italica
  Transcript Sequence Number=SeqID_30029
  Gene Ontology: Mol. function=structural constituent of ribosome; Cellular component=ribonucleoprotein complex; Biological process =translation
  Homolog annotation: Hit_ID=P45633; Match level="QueryCoverage=100%, HitCoverage=100%, E-value=1e-122, Identity=95%"; Hit description=60S ribosomal protein L10
  Pfam annotation: Domain name=Ribosomal_L16; Domain location=5-167; Score=217.2; E_value=4.3e-62; Accession=PF00252.10; Description =Ribosomal protein L16
MGRRPARCYRQIKNKPYPKSRYCRGVPDPKIRIYDVGMKRKGVDEFPYCVHLVSWEKENVSSEALEAARIACNKYMTKSAGKDAFHLRVRVHPFHVLRINKMLSCAGADRLQTGMRGAFGKPQGTCARVDIGQVLLSVRCKDSNAAHASEALRRAKFKFPGRQKIIESRKWGFTKFSRADYLRYKSEGRIMPDGVNAKLLGNHGRLEKRAPGKAFLEAVA

SEQ ID NO: 96004 - protein, 108 aa, Setaria italica
  Transcript Sequence Number=SeqID_30030
  Gene Ontology: Mol. function=protein binding; Cellular component =ribonucleoprotein complex; Biological process=embryonic development ending in birth or egg hatching
  Homolog annotation: Hit_ID=Q9SIK2; Match level="QueryCoverage=68%, HitCoverage=68%, E-value=1e-30, Identity=83%"; Hit description=40S ribosomal protein S25-2
  Pfam annotation: Domain name=Ribosomal_S25; Domain location=2-106; Score=221.7; E_value=2e-63; Accession=PF03297.7; Description=S25 ribosomal protein
  Subcellular localization annotation: CTP_CleavageSite=15; ConfidenceScore=5.21e-01
TARSSTAATSPSSKPAKSGGGKQKKKKWSKGKQKEKVNNSVLFDQATYDKLLTEAPKYKQITPSVLSERLRINGSLARRAIKDLMARGLIRMVAQHSSQQIYTRATNT

SEQ ID NO: 96005 - protein, 222 aa, Setaria italica
  Transcript Sequence Number=SeqID_30031
  Gene Ontology: Mol. function=structural constituent of ribosome; Cellular component=ribonucleoprotein complex; Biological process =translation
  Homolog annotation: Hit_ID=P45633; Match level="QueryCoverage=100%, HitCoverage=100%, E-value=1e-118, Identity=94%"; Hit description=60S ribosomal protein L10
  Pfam annotation: Domain name=Ribosomal_L16; Domain location=5-169; Score=189.3; E_value=1.1e-53; Accession=PF00252.10; Description =Ribosomal protein L16
MGRRPARCYRQIKNKPYPKSRYCRGVPDPKIRIYDVGMKRKGVDEFPYCVHLVSWEKENVSSEALEAARIACNKYMTKSAGKDAFHLRVRVHPFHVLRINKMLSCAGADRLQTGMRGAFGKPQGTCRLRVGTIGQVLLSVRCKDSNAAHASEALRRAKFKFPGRQKIIESRKWGFTKFSRADYLKYKSEGRIMPDGVNAKLLGNHGRLEKRAPGKAFLEAVA

SEQ ID NO: 96006 - protein, 131 aa, Setaria italica
  Transcript Sequence Number=SeqID_30032
  Subcellular localization annotation: CTP_CleavageSite=28; ConfidenceScore=5.32e-01
LGHLFHEVTPTATLLTSLPFSSSVLGFSTRTVWGRASDCAGRAEPPELLFLTGLTQRHVGHPTVEAPGGYARVVRQCPHDRWPIWFAADLVEFTLPQCGQRMLAAPRLYTSMVKQPPQTSSDISDPDGLAA

SEQ ID NO: 96007 - protein, 71 aa, Setaria italica
  Transcript Sequence Number=SeqID_30033
  Gene Ontology: Cellular component=integral to membrane; Biological process=nodulation
  Homolog annotation: Hit_ID=B6SGD1; Match level="QueryCoverage=98%, HitCoverage=60%, E-value=3e-19, Identity=70%"; Hit description=Early nodulin 93
  Pfam annotation: Domain name=ENOD93; Domain location=11-71; Score =105.5; E_value=1.8e-28; Accession=PF03386.6; Description=Early nodulin 93 ENOD93 protein
MSTVSHASLDQKLALAKRCSREATLAGAKAAAVATIASAVPTLASVRMLPWAKANINPTGQALIISTVAGM

SEQ ID NO: 96008 - protein, 100 aa, Setaria italica
  Transcript Sequence Number=SeqID_30034
  Gene Ontology: Mol. function=aspartic-type endopeptidase activity; Biological process=DNA integration
  Homolog annotation: Hit_ID=B6SXJ1; Match level="QueryCoverage=99%, HitCoverage=18%, E-value=7e-43, Identity=80%"; Hit description =Flavonoid 3-monooxygenase
MEAIVKETMRLHPVAPLMSPRLSREDVSMGRYDIPAGTRVLINVWAIGRDPAVWEAPMEFRPERFVGSGVDVKGQDFELLPFGSGRRMCPGIGLGLRMVH

SEQ ID NO: 96009 - protein, 67 aa, Setaria italica
  Transcript Sequence Number=SeqID_30035
  Gene Ontology: Cellular component=chloroplast
  Homolog annotation: Hit_ID=Q2RBL5; Match level="QueryCoverage=100%, HitCoverage=55%, E-value=1e-28, Identity=92%"; Hit description =Macrophage migration inhibitory factor family protein, expressed
  Pfam annotation: Domain name=MIF; Domain location=2-67; Score=-28.2; E_value=0.023; Accession=PF01187.10; Description=Macrophage migration inhibitory factor (MIF)
MPCLNVSTNVNLEGVDTSAILAEASKAVANIIGKPEAYVMVVLKGSVPMAFGGTQEPAAYGELVSIG

SEQ ID NO: 96010 - protein, 115 aa, Setaria italica
  Transcript Sequence Number=SeqID_30036
  Gene Ontology: Cellular component=chloroplast
  Homolog annotation: Hit_ID=B3TLP2; Match level="QueryCoverage=100%, HitCoverage=100%, E-value=6e-51, Identity=81%"; Hit description =Light-inducible protein ATLS1
  Pfam annotation: Domain name=MIF; Domain location=2-115; Score=76.5; E_value=9.3e-20; Accession=PF01187.10; Description=Macrophage migration inhibitory factor (MIF)
MPCLNVSTNVNLEGVDTSAILAEASKVVADIIGKPEAYVMVVLKGSVPMAFGGTQEPAAYGELVSIGGLNPGVNKKLSAGIASILESKLSIPKSRFYLKFHDSKGSDFGWNGSTF

SEQ ID NO: 96011 - protein, 376 aa, Setaria italica
  misc_feature (28)..(28): Xaa can be any naturally occurring amino acid
  Transcript Sequence Number=SeqID_30037
  Homolog annotation: Hit_ID=Q84ZW7; Match level="QueryCoverage=69%, HitCoverage=58%, E-value=3e-19, Identity=29%"; Hit description =Putative drought-induced protein
ISKPNEDDSGGNITSLPKANGSARGPRXSNSGSLLKSSPNIHRLQASSDDWEHASGTNKLISAGGSGNPKRTKSTHSLSPPTQWGGQRPQKISRSARKSNLVPIITTDGAPVPGSLDSPVNEDSAGLPRRASVNGIQQTKRGDHGLSTGSEGDEPVVAEKKLRDRSKRAGELDDGHGSGFQKIAMLGHPSKRNKLSADEDIGDAARRQGRVGRGFTPTRPGTPVSMDKLENAPTTKQRSVRTVSERNESKSGRPMMKKMSERKGNARPRHANNSVQSDSPVQSEDDHEELLAAANAALRSACASPFWRQVEPFFAFLTAEDMAYLSQQINLSDDSSSSRSVEGDEGQKYKGGLEYISQPSTPATSNKDDHTALPNG

SEQ ID NO: 96012 - protein, 76 aa, Setaria italica
  Transcript Sequence Number=SeqID_30038
MLARAFGVVGKAWKRTRHISIQASISPRRCSHMSPQLCHLHSRLAQPENFPEEQNALQNNSGGAPPMLNYIYEQNR

SEQ ID NO: 96013 - protein, 115 aa, Setaria italica
  misc_feature (24)..(24): Xaa can be any naturally occurring amino acid
  Transcript Sequence Number=SeqID_30039
  Gene Ontology: Mol. function=methyltransferase activity; Cellular component=nucleus; Biological process=chromatin modification
  Homolog annotation: Hit_ID=B9RII0; Match level="QueryCoverage=100%, HitCoverage=11%, E-value=3e-50, Identity=80%"; Hit description =Trithorax, putative
  Pfam annotation: Domain name=SET; Domain location=1-97; Score=74.5; E_ value=3.8e-19; Accession=PF00856.20; Description=SET domain
EYRGEQVRRSVADLREARYHREKXDCYLFKISEDVVIDATEKGNIARLINHSCMPNCYARIMSVSDDRNQIILIAKRDVSAGEELTYDYLFDPDESEDCKVPCLCRAPNCRGYMN

SEQ ID NO: 96014 - protein, 151 aa, Setaria italica
  Transcript Sequence Number=SeqID_30040
  Gene Ontology: Mol. function=DNA binding; Cellular component=nucleus; Biological process=regulation of transcription, DNA-dependent
  Homolog annotation: Hit_ID=B6SIN5; Match level="QueryCoverage=57%, HitCoverage=26%, E-value=1e-31, Identity=80%"; Hit description=TCP -domain protein
  Pfam annotation: Domain name=TCP; Domain location=57-150; Score =144.3; E_value=3.8e-40; Accession=PF03634.5; Description=TCP family transcription factor
PKDYQHQQPAQHQEQQQHHHLQIQIHQPQQQDGGGGGKEQQQLLQVAAPAAERRVALAPKRSSNKDRHTKVDGRGRRIRMPALCAARIFQLTRELGHKSDGETVQWLLQQAEPAIIAATGTGTIPASALASVAPSLPSPNSGLARPHHHHP

SEQ ID NO: 96015 - protein, 64 aa, Setaria italica
  Transcript Sequence Number=SeqID_30041
HRLKIMKLLPIRAGKQIMELAFYIQMKFALVSARQLANAVRIHLVHQLQQSDRAEKCCTIAQYL

SEQ ID NO: 96016 - protein, 62 aa, Setaria italica
  Transcript Sequence Number=SeqID_30042
  Gene Ontology: Mol. function=actin binding; Cellular component =cytoskeleton; Biological process=cytoskeleton organization and biogenesis
  Homolog annotation: Hit_ID=B9SI12; Match level="QueryCoverage=98%, HitCoverage=6%, E-value=1e-14, Identity=60%"; Hit description=Villin 1-4, putative
MKGVDDAFLGVGDKPGLDIWCIVGSGLVPVAKPQHGKFYSRNCYIILNTTELKTGVRIHDVH

SEQ ID NO: 96017 - protein, 115 aa, Setaria italica
  Transcript Sequence Number=SeqID_30043
  Pfam annotation: Domain name=DUF588; Domain location=4-115; Score= -33.0; E_value=0.043; Accession=PF04535.4; Description=Domain of unknown function (DUF588)
SGEVGASEAVSLVFRIATVGLSLASAIMTAASTQCVYRDDGVPAGTVSYGDYASFKYSALADLLSAVLQGVAIYLEATRKDRAARAVELIDKLVQALTSSSAALLLAVDDITSCG

SEQ ID NO: 96018 - protein, 107 aa, Setaria italica
  Transcript Sequence Number=SeqID_30044
ASEVPYRLQMFKIRMVYASDVRKEDYEVADERIKPVVSEANEKALPDLLSDPPQLEDVLGKPEAELCPLWIKKFNRELMQTLSYSEHETFDHPVACLLVVSSMDKEP

SEQ ID NO: 96019 - protein, 173 aa, Setaria italica
  misc_feature (15)..(15): Xaa can be any naturally occurring amino acid
  misc_feature (43)..(43): Xaa can be any naturally occurring amino acid
  misc_feature (148)..(148): Xaa can be any naturally occurring amino acid
  Transcript Sequence Number=SeqID_30045
  Gene Ontology: Mol. function=protein binding
  Pfam annotation: Domain name=LRR_1; Domain location=102-128; Score =8.0; E_value=8.9; Accession=PF00560.25; Description=Leucine Rich Repeat
  Pfam annotation: Domain name=LRR_1; Domain location=138-160; Score =7.1; E_value=13; Accession=PF00560.25; Description=Leucine Rich Repeat
  Pfam annotation: Domain name=LRR_1; Domain location=79-100; Score =13.7; E_value=0.71; Accession=PF00560.25; Description=Leucine Rich Repeat
  Pfam module annotation: Pfam domain module=LRR_1::LRR_1::LRR_1; Domain location=102-128::138-160::79-100
LVAECHTTEEVFLCXGNHPGLERMRWISHLGDQGWHVSREWLXRQGASGPTTLIIRHCPQQSRLFMKLQSNHFLAKLSCLHVLDLSYTPLESLPPSIRCLQKLQLLSLRGCYNLTSPFSFPDTEITLLENNNNKKLSSLYYFDLSYSXISNFQGDFFHNMPNLKELLLVKCSN

SEQ ID NO: 96020 - protein, 86 aa, Setaria italica
  Transcript Sequence Number=SeqID_30046
  Gene Ontology: Mol. function=catalytic activity; Cellular component =cytoplasm; Biological process=polyamine biosynthetic process
  Homolog annotation: Hit_ID=B4G076; Match level="QueryCoverage=74%, HitCoverage=15%, E-value=2e-25, Identity=85%"; Hit description =Ornithine decarboxylase
SCIDVYRGAIELSRAAFDAANALGMPPMRILDIGGGFMAGSTFDDAAAVINDALAQHFGDLPCVEVIGEPGRYFAETVFTLAVRVI

SEQ ID NO: 96021 - protein, 66 aa, Setaria italica
  Transcript Sequence Number=SeqID_30047
MAPKAEKKPAAKKPAEEEPAAEKAPAGKKPKAEKRLPAGKSSAGKDGEGKKGKKKAKKSVETYKIY

SEQ ID NO: 96022 - protein, 65 aa, Setaria italica
  misc_feature (7)..(7): Xaa can be any naturally occurring amino acid
  Transcript Sequence Number=SeqID_30048
  Gene Ontology: Mol. function=electron carrier activity; Cellular component=integral to membrane; Biological process=oxidation reduction
  Homolog annotation: Hit_ID=B6UA52; Match level="QueryCoverage=100%, HitCoverage=11%, E-value=1e-25, Identity=78%"; Hit description =Cytochrome P450 CYP71C36
IGRDARXWGDDAEEFIPERFIGDASAAHVSFKGNDFQFLPFGSGRRMCAGMNFGMAAVELMLANF

SEQ ID NO: 96023 - protein, 51 aa, Setaria italica
  Transcript Sequence Number=SeqID_30049
AGTQQEFETQHHYHKSKLESNFGINRSGIHTAKGIKYIAALINAKPVSLRH

SEQ ID NO: 96024 - protein, 102 aa, Setaria italica
  Transcript Sequence Number=SeqID_30050
  Gene Ontology: Mol. function=hydrolase activity; Biological process =metabolic process
  Homolog annotation: Hit_ID=B6TRC0; Match level="QueryCoverage=100%, HitCoverage=31%, E-value=9e-32, Identity=67%"; Hit description =Gibberellin receptor GID1L2
  Pfam annotation: Domain name=Abhydrolase_3; Domain location=1-102; Score=-25.2; E_value=7.1e-06; Accession=PF07859.5; Description =alphabeta hydrolase fold
RAVVVSVEYRLAPEHPIPAAYEDSWRALGWVASHASGGAGEEPWLADHADFSRLCLAGESAGANIAHHMAMRARAEGLPGSARISGVVLVHPYFLSDARVAS

SEQ ID NO: 96025 - protein, 102 aa, Setaria italica
  Transcript Sequence Number=SeqID_30051
  Gene Ontology: Mol. function=ATP-dependent helicase activity; Biological process=DNA recombination
  Homolog annotation: Hit_ID=Q5WN04; Match level="QueryCoverage=78%, HitCoverage=9%, E-value=2e-18, Identity=57%"; Hit description =Putative DNA helicase
HEIDPDSESSSYDSLNDSASDYEDANIGSASCGNKNVGKSKTGMTLVKENTENELDLYPGTDDFDVSCGEFLEGLQPESSAFPAHSNETSLSGCLDQGPTIV

SEQ ID NO: 96026 - protein, 105 aa, Setaria italica
  misc_feature (84)..(84): Xaa can be any naturally occurring amino acid
  Transcript Sequence Number=SeqID_30052
  Gene Ontology: Mol. function=metal ion binding; Cellular component =intracellular
  Homolog annotation: Hit_ID=B9SYJ0; Match level="QueryCoverage=59%, HitCoverage=6%, E-value=2e-15, Identity=58%"; Hit description=Brca1 associated ring domain, putative
LMESMKSASSCPVCKVPFRRREIRPAPHMDNLVSVFKSMEVAAGTSIVATPLAPSPKVADGSQCGGNSGSKPKSSRKKKVASKXEKHTSKAAAASASCPTTKPSI

SEQ ID NO: 96027 - protein, 56 aa, Setaria italica
  Transcript Sequence Number=SeqID_30053
  Homolog annotation: Hit_ID=B9T5X6; Match level="QueryCoverage=100%, HitCoverage=12%, E-value=2e-16, Identity=64%"; Hit description =ATATH9, putative
LFPCRWLVDEVRESAPKELDYLNEAKNSEKCLDNFRRLSPHIAGSIYAPKVYWNLS

SEQ ID NO: 96028 - protein, 475 aa, Setaria italica
  misc_feature (100)..(100): Xaa can be any naturally occurring amino acid
  Transcript Sequence Number=SeqID_30054
  Gene Ontology: Mol. function=protein kinase activity; Cellular component=extracellular region; Biological process=protein amino acid phosphorylation
  Homolog annotation: Hit_ID=B9T5X6; Match level="QueryCoverage=99%, HitCoverage=87%, E-value=0.0, Identity=67%"; Hit description=ATATH9, putative
  Pfam annotation: Domain name=ABC1; Domain location=84-205; Score =176.5; E_value=7.7e-50; Accession=PF03109.8; Description=ABC1 family
KWSLFGLEPGTPAWQSAKHDAHLRSANRLQELCFRNGGIYIKLGQHIAQLEYVVPEEYVQTMRESMLKKCPVSSYEEVRGVFAKDLGESPETFFAEFDPXPLASASLAQVHAARTHDGQKVAVKVQHDHLTDTSVVDIATVDLLVNALHYIFPTFDYRWLVDEVRESAPKELDFLNEAKNSEKCLDNFRRLSPHIAGSIYAPKVYWNLSTSRILTMEFMDAKEVTDVHGIKEIGIHPSDVSNLVSKAFAEMIFKHGFVHCDPHAANMMVRPMPQDSRKFFGWKQPQLVLLDHGLYKELDYTTRISYASLWKALVFADAKAIKENSIKLGAGEDLHALFAGVLTMRPWQRVIDPSPDHLVLDGKTTDYSELQNYASLYFSEISELLRRLPRVILLMLKTNDCLRAVNHALVGGTSLESFMIIGRVSSEAVLDAKKMSRRSFLDRLMIWLEEAILEARFFSLKLMLCFMQLRKLLPS

SEQ ID NO: 96029 - protein, 50 aa, Setaria italica
  Transcript Sequence Number=SeqID_30055
YAQMKAVVAAVLPRFRVEVDAGAVVRPKLSIILHMKDGLKVRVHKREEIA

SEQ ID NO: 96030 - protein, 83 aa, Setaria italica
  misc_feature (72)..(72): Xaa can be any naturally occurring amino acid
  Transcript Sequence Number=SeqID_30056
  Gene Ontology: Mol. function=protein binding
MGSDAEPAKGLLPYLQRADELQKHEPLVAYYCRLYAMEKGLRIPQKERTKTTNSILISLMNQLEKDKKTLTXLGPDDNLHLGG

SEQ ID NO: 96031 - protein, 43 aa, Setaria italica
  Transcript Sequence Number=SeqID_30057
MEAQDDCKWRQIPAFGDWNLWDDMPVTQYFQAGPFFFTALVDK

SEQ ID NO: 96032 - protein, 88 aa, Setaria italica
  Transcript Sequence Number=SeqID_30058
TRLELNLGVRCRQVMSKSAKYLELFIRGPDDRGADRNACPPTLPPDLAAMAPSTGPSASTPAASVTIASFPSFTPRPSPPNGTFSSPA

SEQ ID NO: 96033 - protein, 86 aa, Setaria italica
  Transcript Sequence Number=SeqID_30059
MLRLLMQNVCTVYVVHGRRTNIYVNPPVAPPLGGYGYGGYGSPFFGGYGWSPFTFFAPGPSVAVGVGGGFDTLVLFLVLGAVVGAI

SEQ ID NO: 96034 - protein, 184 aa, Setaria italica
  Transcript Sequence Number=SeqID_30060
MALAPASLQCFLTGRPVCSATLPKLARRPSRISCKAAGDEKVPLGGDGLGVKLGKLAMVTLAAGVLALGPVDGAMAAKSGGRVGGQAFRSAPRSSGPRINNSRTNIYVNPPVAPPLGGYGYGGYGSPFFGGYGWSPFTFFAPGPSVAVGVGGGFDTLVLFLVLGAVVGAIRRFLNRNNDDYDDY

SEQ ID NO: 96035 - protein, 52 aa, Setaria italica
  Transcript Sequence Number=SeqID_30061
  Gene Ontology: Mol. function=protein kinase activity
  Homolog annotation: Hit_ID=B6SWV2; Match level="QueryCoverage=94%, HitCoverage=7%, E-value=4e-15, Identity=77%"; Hit description =Receptor kinase
VADRGHHGDMLRLTEIALLCAAVDPDRRPKVQDVVRMIDEIAASDGPELAGR

SEQ ID NO: 96036 - protein, 91 aa, Setaria italica
  Transcript Sequence Number=SeqID_30062
PPSPAVGWEVEGQTERAISSLLVAATINALLRPLTRSPSSPDVGTPPRPSPLAARWLAPAEHPGRRRPLPALVPALSTTAVPPAGCVFEFD

SEQ ID NO: 96037 - protein, 663 aa, Setaria italica
  Transcript Sequence Number=SeqID_30063
  Gene Ontology: Mol. function=ubiquitin-protein ligase activity; Biological process=sperm individualization
  Homolog annotation: Hit_ID=B9SIX2; Match level="QueryCoverage=99%, HitCoverage=14%, E-value=0.0, Identity=61%"; Hit description =Ubiquitin-protein ligase, putative
FNPLVDHYLAVSGYEDCQVLTLNSRGEVTDRLAIELALQGAYIRRVEWVPGSQVQLMVVTNLFVKIYDLSQDNISPMHYFTVADDIIVDATLVPSSMGKLVLLVLSEGGLLYRLNVTLEGDVGAKILAETVLVKDAVSMHKGLSLYFSSTYRLLFVSHQDGTTFMGCLNADSSSITELSYICEEDHDGKSKPAGLYRWRELLAGSGILTCLSKSKSNAPFAVSLGPHELVAQNMRHSIGTNSSVVGVAAYKPLSKDKTHCLILYDDGSLHIYSHTPNGGESSTILAAEQTKKLGSSILSSRAYTGIKPEFPLDFFEKTTCITSDVKYNSETTKSGDSESIKQRLTSDDGYLESLTSAGFKVTISNPNPDIVMVGCRIHVGNTSASNIPSEITIFHRVIKLDEGMRSWYDIPFTTAESLLADEEFTISVGRTFDGSSIPRIDSIEVYGRAKDEFGWKEKMDAALDMEALGGSSTGGRSGKRPQIVQAAPIQEQVLADALRILSRIYLLCPPSCFTDMADAGMELNNLKCRALLETIFQSDREPLLHSAACCVLQAVFPKKDMYYHVKDMMRLLGVIKSLPAITSRIGVGGAASSWVIKEFIAQIHTVSKVALHRKSNLASFLETHGTELVDGLMQVFWGILDLDRPDTQTINSLVVPCVEFIYS

SEQ ID NO: 96038 - protein, 125 aa, Setaria italica
  Transcript Sequence Number=SeqID_30064
  Gene Ontology: Mol. function=aspartic-type endopeptidase activity; Cellular component=chromatin; Biological process=RNA-dependent DNA replication
  Homolog annotation: Hit_ID=Q8SA93; Match level="QueryCoverage=94%, HitCoverage=4%, E-value=4e-19, Identity=36%"; Hit description =Putative polyprotein
VLWRWDASGVYSTRSAYRAFFCGATKFAAAKLIWKSWAPMKVKIFIWLAVKERLWTADRRHRHRLQGNAECTFCEQELETTVHLLAACPYTKEVWHIVSTVLHIQNTTSLSETSLTDYWCISGEP

SEQ ID NO: 96039 - protein, 101 aa, Setaria italica
  Transcript Sequence Number=SeqID_30065
CQGTLVQLKRVRSLRDPATNSLSKYASPSDHMIWETASSNGVTLELGRSVHHQLVEEDEDLGAEATMGSERSFRAPNARTASYRKTSAVKIRGLNPPRNKL

SEQ ID NO: 96040 - protein, 62 aa, Setaria italica
  Transcript Sequence Number=SeqID_30066
FNQLSNRASTKTGSIYLALSHKLQTVLRELKLDLNYGQKLITLASHIATQYNGYNAISLLVL

SEQ ID NO: 96041 - protein, 117 aa, Setaria italica
  Transcript Sequence Number=SeqID_30067
  Subcellular localization annotation: CTP_CleavageSite=57; ConfidenceScore=5.62e-01
RRPTTHPSSHHRHHGTPPHHSKLPVSHRLPPPPRRRLAGGENPAPSPRVPGTLAPTRTRARGPRRHEEAAAAAERGGGTRRGRRRPVLHVRSWEPARRRRRRRLRTRSAREPAPMAA

SEQ ID NO: 96042 - protein, 88 aa, Setaria italica
  Transcript Sequence Number=SeqID_30068
  Gene Ontology: Mol. function=protein serine/threonine kinase activity; Biological process=protein amino acid phosphorylation
  Homolog annotation: Hit_ID=B8K1X4; Match level="QueryCoverage=98%, HitCoverage=11%, E-value=1e-36, Identity=88%"; Hit description =Putative ethylene constitutive triple response protein
ERRALDLVRALGVTLDLVRRLAVLVSDHMGGALRSEDGDLYMRWKAVSKQLRKRQKCIVVPIGGLSIGFCRHRAILFKELADFIGLPS

SEQ ID NO: 96043 - protein, 54 aa, Setaria italica
  Transcript Sequence Number=SeqID_30069
LKLLALHKRVCVDLKKGTTLHLKRRNYFTQKVYTKLKLLVPYEKQVDTKEFVFT

SEQ ID NO: 96044 - protein, 86 aa, Setaria italica
  Transcript Sequence Number=SeqID_30070
  Gene Ontology: Mol. function=nucleotide binding; Biological process =defense response
  Homolog annotation: Hit_ID=Q2R1F8; Match level="QueryCoverage=74%, HitCoverage=5%, E-value=3e-15, Identity=60%"; Hit description=NB-ARC domain containing protein, expressed
GVKELEDGDGCPAGASAPRDIISPPPQLIGTTEPVGLEDAKNELKPWFMEVGRQSTHGQPKFIAIVGFGGLGKTTLAMALYREFGE

SEQ ID NO: 96045 - protein, 42 aa, Setaria italica
  Transcript Sequence Number=SeqID_30071
LGYCKERWLQVGVESVNLTGRKCICLFQFMPGLNPLSYTVCR

SEQ ID NO: 96046 - protein, 114 aa, Setaria italica
  Transcript Sequence Number=SeqID_30072
  Gene Ontology: Mol. function=oxidoreductase activity, acting on single donors with incorporation of molecular oxygen, incorporation of two atoms of oxygen; Biological process=fatty acid biosynthetic process
  Homolog annotation: Hit_ID=A1XCI3; Match level="QueryCoverage=100%, HitCoverage=12%, E-value=1e-59, Identity=95%"; Hit description =Lipoxygenase
  Pfam annotation: Domain name=PLAT; Domain location=1-96; Score=64.3; E_value=4.5e-16; Accession=PF01477.15; Description=PLATLH2 domain
STETDPRKGGPKKSKRSALVGWFEKKDVKAERVVYTAEFTVDASFGEPGAVTVLNRHQREFFIESIVVEGFPTGPAHFTCNSWVQPTRVDRNPRVFFTNKPYLPAETPPGLQEL

SEQ ID NO: 96047 - protein, 80 aa, Setaria italica
  Transcript Sequence Number=SeqID_30073
  Subcellular localization annotation: CTP_CleavageSite=52; ConfidenceScore=5.45e-01
YLALALPAAAAQFPASAYEAYGSSGVNVDFTMGTSSHSGSNTSSGVMWGATVGAMGQQDSSSNKQGNTYGSNIPYAAAAM

SEQ ID NO: 96048 - protein, 287 aa, Setaria italica
  Transcript Sequence Number=SeqID_30074
LPAGDGDPAPLNRRLLAVHATGDDPFSPASALDLPWLRKLAKNGVASRRNASLPAAHLEELCSELDVAVGTDDAAADKKSAGDRRPARTVSDIGEVIGREDRARHNQSAPPRLYRSASHRLLRAPSYPAQSGVRSAGRTSPEIIAEEDEKSCKSNAAVEADIEQIKTTVQSLQTELTKLRESTLSVGDAQSRLLTEICSKLDGAMPRQESLQGSHGSSPVLLTPAIREASSSSKEQSYEPQSELLMNHFIEVCGLTFAATIVKPLIKVAASMSLLRCLLILILAVAI

SEQ ID NO: 96049 - protein, 143 aa, Setaria italica
  misc_feature (127)..(127): Xaa can be any naturally occurring amino acid
  Transcript Sequence Number=SeqID_30075
  Gene Ontology: Mol. function=catalytic activity; Cellular component =integral to membrane; Biological process=sphingolipid metabolic process
  Homolog annotation: Hit_ID=UPI0000F32E3A; Match level="QueryCoverage =87%, HitCoverage=12%, E-value=2e-22, Identity=43%"; Hit description =Non-lysosomal glucosylceramidase (EC 3.2.1.45) (NLGase) (Glucosylceramidase 2) ...
  Homolog annotation: Hit description=(Beta-glucocerebrosidase 2) (Beta- glucosidase 2).
SNPFLCRTGSISRGFRGEFKHWQITPGYCEMSPVMANQFSIFVARGGNKKYASVLAPGQLDGLKKSSDDGISSWDWKLKGDRSTYHALFPRAWTVYDGEPDPELKVSCRQISPFIPHNYQESSLPTXVFVYTLVNTGKERAKS

SEQ ID NO: 96050 - protein, 65 aa, Setaria italica
  Transcript Sequence Number=SeqID_30076
RWLAGPPQRRADFRALPGQPSGEAAAVVLGSRGVLLPIVIKGRPQLGLKHQFIASIVSFNLSPGF

SEQ ID NO: 96051 - protein, 130 aa, Setaria italica
  misc_feature (31)..(31): Xaa can be any naturally occurring amino acid
  Transcript Sequence Number=SeqID_30077
  Gene Ontology: Mol. function=protein kinase activity; Biological process=protein amino acid phosphorylation
  Homolog annotation: Hit_ID=B6SXV9; Match level="QueryCoverage=90%, HitCoverage=16%, E-value=2e-59, Identity=91%"; Hit description =Ubiquinone biosynthesis protein ubiB
ATLYSHGSDGDNFDGNTSIMVPKVYWNYTRXTILTLEWIDGIKLTDAERISKANLNRKRMIDEGLYCSLRQLLEEGFFHADPHPGNLVATEGGSLAYFDFGMMGDIPRHYRVGLIQMVHVTVFFTCSAFS

SEQ ID NO: 96052 - protein, 252 aa, Setaria italica
  misc_feature (6)..(6): Xaa can be any naturally occurring amino acid
  Transcript Sequence Number=SeqID_30078
  Gene Ontology: Mol. function=protein kinase activity; Biological process=protein amino acid phosphorylation
  Homolog annotation: Hit_ID=B6SXV9; Match level="QueryCoverage=91%, HitCoverage=32%, E-value=1e-130, Identity=96%"; Hit description =Ubiquinone biosynthesis protein ubiB
VYWNYXRKTILTLEWIDGIKLTDAERISKANLNRKRMIDEGLYCSLRQLLEEGFFHADPHPGNLVATEGGSLAYFDFGMMGDIPRHYRVGLIQMLVHYVNRDSLGLANDFHSLGFVPEGTDLHAVADALRFSFGDARRQSNDFQGLMNHLYDVMYEFNFSLPPDYALVIRALGSLEGTAKALDPDFKVIESAYPFVIGRLLADPSPDMRKILRELLICDDGSIRWNRLERLIAAISAQSAESSNGSGAGSGE

SEQ ID NO: 96053 - protein, 105 aa, Setaria italica
  Transcript Sequence Number=SeqID_30079
  Homolog annotation: Hit_ID=Q9LPL1; Match level="QueryCoverage=92%, HitCoverage=50%, E-value=2e-16, Identity=40%"; Hit description =F24J8.9 protein
  Pfam annotation: Domain name=MtN3_slv; Domain location=7-93; Score =90.0; E_value=8.1e-24; Accession=PF03083.8; Description=MtN3saliva family
  Subcellular localization annotation: CTP_CleavageSite=18; ConfidenceScore=5.32e-01
THHIRNIFVGSIGVLSAMLMYSSPLVAVNQVVRTRSVEFMPFYLSLFSFLTSLIWMVYGLLGRDPYITSPNCVGCATGILQLVVYCIYRSKDRPKTQNNMENDME

SEQ ID NO: 96054 - protein, 158 aa, Setaria italica
  Transcript Sequence Number=SeqID_30080
  Gene Ontology: Mol. function=protein serine/threonine kinase activity; Cellular component=cytoplasm; Biological process=vesicle -mediated transport
  Homolog annotation: Hit_ID=B9REY5; Match level="QueryCoverage=98%, HitCoverage=27%, E-value=4e-52, Identity=62%"; Hit description =Copine, putative
RIVQPLIFRIYDVDTKYHQTSVKLLKLDQQDFLGEACCNLSEIVTKFNHSLTLNLRSDCGHGLHGTMTVHAEESDSSRMAVEMTLHCLNLENKDVLSKSDPFLRISKLVETAGPIPICKTEVVINNLNPVWRPITLTSQQYGSKDNPLLVELFVFESR

SEQ ID NO: 96055 - protein, 229 aa, Setaria italica
  Transcript Sequence Number=SeqID_30081
  Gene Ontology: Biological process=pollen maturation
  Homolog annotation: Hit_ID=Q7XKT6; Match level="QueryCoverage=99%, HitCoverage=21%, E-value=5e-99, Identity=78%"; Hit description =OSJNBa0022H21.21 protein
  Pfam annotation: Domain name=GRAM; Domain location=22-88; Score=83.9; E_value=5.6e-22; Accession=PF02893.12; Description=GRAM domain
YLSKMEKEVGKKLHVRSPHRNSTFQKLFSLPHEEFLIADYACSLKRKLPLQGRLFVSARIVGFYANLFGHKTKFFFLWEDVEEIEVLQPSFTTVGTPSLLFTLKSGRGLDAKSGAKSQDKEGRLKFQFHSFASFSKASKTIIGLWKTKSSAIEQRAKMEEDQEEDVSSVDLDDVHAVLSIGDVPLSKEYTLEHPIDADLLMGVFDGGPLETRTMSRVGCLDYSATPWEA

SEQ ID NO: 96056 - protein, 175 aa, Setaria italica
  Transcript Sequence Number=SeqID_30082
  Gene Ontology: Biological process=pollen maturation
  Homolog annotation: Hit_ID=Q7XKT6; Match level="QueryCoverage=94%, HitCoverage=16%, E-value=1e-73, Identity=75%"; Hit description =OSJNBa0022H21.21 protein
RLLVLSVRILDDVHAVLSIGDVPLSKEYTLEHPIDADLLMGVFDGGPLETRTMSRVGCLDYSATPWEAARPGVVERHVSYKFNRYMSIFGGEVVSTQLKFPAEDGCGWAIHDVVTLHNVPFGDYFRVHLRYNVQSVTSEAPSSRCEILVGIEWLKSSKFQKRIARNICEKLAHRA

SEQ ID NO: 96057 - protein, 94 aa, Setaria italica
  misc_feature (39)..(39): Xaa can be any naturally occurring amino acid
  Transcript Sequence Number=SeqID_30083
RTPSIQPLPDELQLVAEVRSPHNHIRVADVSPRAAGHPXAGARLLLLDGPGNIHSLSFPRRAHHCPLTATYFDAFTTLPPLLPRPSLAVLGFGA

SEQ ID NO: 96058 - protein, 94 aa, Setaria italica
  Transcript Sequence Number=SeqID_30084
GALYRLLPGRAGGDGKATGARVRGRNRCVGRPNWKARDCAAVRLRLLRLGGGGGVRWAEAGSCYLSRLVAAAASLGAGALALPRRGRGRGGQSA

SEQ ID NO: 96059 - protein, 72 aa, Setaria italica
  Transcript Sequence Number=SeqID_30085
  Gene Ontology: Mol. function=isoleucine-tRNA ligase activity; Cellular component=cytoplasm
MDAASCCRVFSSQRCRFPLRRLAAPPWSHPLCTESSGGLAAASISKRRSRGPVMAAKKAEQGAKQEDGKYKH

SEQ ID NO: 96060 - protein, 79 aa, Setaria italica
  misc_feature (1)..(1): Xaa can be any naturally occurring amino acid
  Transcript Sequence Number=SeqID_30086
XFAYREDECLFVFVVCPKQRRPVRQFAPLSISLQSRAAGRRPARLVAAAAAAPTPKAIASKRRAPRQPRAGQCILLLRR

SEQ ID NO: 96061 - protein, 189 aa, Setaria italica
  misc_feature (169)..(169): Xaa can be any naturally occurring amino acid
  Transcript Sequence Number=SeqID_30087
  Gene Ontology: Mol. function=catalytic activity; Cellular component =chloroplast; Biological process=metabolic process
  Homolog annotation: Hit_ID=Q5DQ95; Match level="QueryCoverage=64%, HitCoverage=30%, E-value=9e-38, Identity=64%"; Hit description=4 -amino-4-deoxychorismate lyase
  Subcellular localization annotation: CTP_CleavageSite=57; ConfidenceScore=5.87e-01
MAHFPATPSAAAATGHRVSPSPRSSASLPRRTTLLPSIGAAGGPPSRSWRGAAAAVRAATGSDNKAASAGTIINPNDVPVLSFSEVAERLGTFQASGARNQNYMAMYSSIFGGITTDPSAMVIPIDDHMVHRGHGVFDTAAIMDGHLYELEQHLDRFLRSALMAKIPLXFWSLNMRSMLIQTVSVSNCT

SEQ ID NO: 96062 - protein, 107 aa, Setaria italica
  Transcript Sequence Number=SeqID_30088
  Gene Ontology: Mol. function=protein-L-isoaspartate (D-aspartate) O -methyltransferase activity; Cellular component=cytoplasm; Biological process=protein modification process
  Homolog annotation: Hit_ID=B4FN58; Match level="QueryCoverage=100%, HitCoverage=46%, E-value=2e-52, Identity=93%"; Hit description =Protein-L-isoaspartate O-methyltransferase
  Pfam annotation: Domain name=PCMT; Domain location=1-102; Score=36.7; E_value=2.8e-11; Accession=PF01135.11; Description=Protein-L -isoaspartate(D-aspartate) O-methyltransferase (PCMT)
SIENIKKSAAAPQLNDGSLSIHIADGREGWPELAPYDAIHVGAAAPQIPEALIEQLKPGGRMVIPVGTVFQELKVVDKKLDGTVSIRDETSVRYVPLTSKEAQLHAN

SEQ ID NO: 96063 - protein, 350 aa, Setaria italica
  misc_feature (6)..(6): Xaa can be any naturally occurring amino acid
  Transcript Sequence Number=SeqID_30089
  Gene Ontology: Mol. function=protein tyrosine kinase activity; Cellular component=integral to membrane; Biological process =regulation of transcription, DNA-dependent
  Homolog annotation: Hit_ID=B9RW50; Match level="QueryCoverage=91%, HitCoverage=45%, E-value=1e-94, Identity=55%"; Hit description=Lrr receptor-linked protein kinase, putative
  Pfam annotation: Domain name=Pkinase; Domain location=69-338; Score =24.4; E_value=6e-10; Accession=PF00069.17; Description=Protein kinase domain
  Pfam annotation: Domain name=Pkinase_Tyr; Domain location=69-338; Score=1.3; E_value=8.2e-14; Accession=PF07714.9; Description=Protein tyrosine kinase
  Pfam module annotation: Pfam domain module=Pkinase::Pkinase_Tyr; Domain location=69-338::69-338
  Subcellular localization annotation: CTP_CleavageSite=71; ConfidenceScore=5.82e-01
PPPPPXPPPLPPTPSPPSPPPVEKVTVNPIVRPEKRVSTPPRTGPSTSATSFSVASLQQYTNSFEEQNLIRESRLGKVYLAELPEGKLLEVMKIDNANGRIPVDDFLELVARISDIRHPNILELVGYCAEYEQRLLVYNHFSRKTLHDVLHEREDQDDALSWNARLQVALHAAKALEYLHDTCEPPVVHQNFEPANVLLDNRCSVRVAECGLAELMLSGSVIQLSGRMRALLNYEAPEIHESGPFTDRSDVYSFGVVMLELLTGRRPYDSSRPRAEQHLVRWAGSQLHDIESISKMVDPAIRGECSEIQLSRFAYIISQCIQTEPECRPAMSAIVQYLARIVDATGEDLE

SEQ ID NO: 96064 - protein, 403 aa, Setaria italica
  Transcript Sequence Number=SeqID_30090
  Gene Ontology: Cellular component=chloroplast envelope
  Homolog annotation: Hit_ID=Q94F64; Match level="QueryCoverage=47%, HitCoverage=42%, E-value=7e-41, Identity=43%"; Hit description=CDPK adapter protein 1
MSYSKPGHASGRDAVFWSDKMNEYLIDSLLHQQSIGNRGEARFFSVAYDSIVTGVGERFGVAIDRNNIKNRLKYIKESFYECRNILSEDTRIKWCPESRRFNADPNVWRELIQRKPEAKKWMTKTIDHYDRLMELFGKEREKCLVVESSKDTPKKKARTEPPKQQRLQRTPLNGHSVAESSNKLSQKRESSDKLSQKKESADKMANKSEIPDEAITNVEVDLSELCRTENGIVAIPVRANTYGKGLPYAPDNWPCSGDIWYWKVGNRASGAGHWADRYLTPPSRFREATRKRVGFASRIQVEEFIKREFPDVDPSTFFSMFIWKIPAEGHRIQKGTQQVRLHEPEPVMADPVFPCKARNNLCNLEREGFIESAPAQACNICCTVPGFCRECCCILCNRTIDYS

SEQ ID NO: 96065 - protein, 361 aa, Setaria italica
  misc_feature (25)..(25): Xaa can be any naturally occurring amino acid
  Transcript Sequence Number=SeqID_30091
  Gene Ontology: Mol. function=zinc ion binding
  Homolog annotation: Hit_ID=B9RTQ4; Match level="QueryCoverage=90%, HitCoverage=63%, E-value=2e-76, Identity=45%"; Hit description =Protein binding protein, putative
  Pfam annotation: Domain name=zf-C3HC4; Domain location=67-113; Score =2.3; E_value=0.055; Accession=PF00097.17; Description=Zinc finger, C3HC4 type (RING finger)
YQNNQFTRPKFRGVRLNYLCNLERXGFIESAPAQACNICCTVPGFCRECCCILCNRTIDYSFGSYSCIKCEAVVEENYICGHVAHLDCALRCYMAGTVGGTIGLDVQYYCRRCDNKTNLMMHVEKLMETCQSLESRDDIERILNMGLCLLRGSRQMRAKGLENHMGSAMAKLKCGVDLVEVWKVENNEGGATLCAGENSPHTSGVTVLGTRQVSEVGMLTEHPDLIDPNDLGIAVENLPVYNPGDPNTISAKFEDEIDLALQELKKSQEAEYRVAEQRLYSQKDRILSLYRQLEYERAQLSDPMPLSDTSQYGVLLANVLSRVHQSKCEEEKFKCMLKVAGGFGKAPESVTKEFFGLPADK

SEQ ID NO: 96066 - protein, 110 aa, Setaria italica
  misc_feature (98)..(98): Xaa can be any naturally occurring amino acid
  Transcript Sequence Number=SeqID_30092
  Homolog annotation: Hit_ID=Q01K95; Match level="QueryCoverage=100%, HitCoverage=4%, E-value=5e-41, Identity=76%"; Hit description =OSIGBa0148A10.3 protein
EENKPQLCTKEKGRVEIIRLLRVLYDIKSRQQNNSQLRESRELVFLLLSIYDATLSETDLEILHLMNEIESTECRTITEVDHLWGSAALKFREELKLXFSKSDTQNIENA

SEQ ID NO: 96067 - protein, 125 aa, Setaria italica
  Transcript Sequence Number=SeqID_30093
MKSLGLPVATAHSYFLFKSKEEEVLLASVNLVASTLFCCLTYEELVLPDQEINLALLGIFFSGEVCIDISCIKFFTWVCRDISCTEFRCGVYQDRRKLSGRRSRGGGCTRLRGLADEEDAEGDDG

SEQ ID NO: 96068 - protein, 225 aa, Setaria italica
  Transcript Sequence Number=SeqID_30094
  Gene Ontology: Mol. function=protein serine/threonine kinase activity; Biological process=protein amino acid phosphorylation
  Homolog annotation: Hit_ID=Q9M575; Match level="QueryCoverage=98%, HitCoverage=33%, E-value=4e-66, Identity=59%"; Hit description =Receptor-like protein kinase
  Pfam annotation: Domain name=Pkinase_Tyr; Domain location=140-225; Score=-170.2; E_value=0.021; Accession=PF07714.9; Description =Protein tyrosine kinase
ENASFEDVVRFMRNGFAVRFPYTHNLPKLTNRDISFAKLYRIFREDRNNYHRIFYLLWIDFYVWYGMLHVSKGIALALLIVKLIAVLCRFVLAPLAVLIFLAHKYLKTRITIDAVEKFLRMQQMIGPTRYTYTNITAITSHFREELGRGGYGSVYKGVVLPGDVHVAVKMLSNSKCNGEEFISEVSTIGRIHHVNVVRLVGFCSEELRGALVYEYMPNGSLDKYI

SEQ ID NO: 96069 - protein, 50 aa, Setaria italica
  Transcript Sequence Number=SeqID_30095
LRFPQACYELICIFLLSCYKRTPGHVYTQIYFLELGFLWFMIPVSLINTI

SEQ ID NO: 96070 - protein, 118 aa, Setaria italica
  Transcript Sequence Number=SeqID_30096
  Gene Ontology: Mol. function=mismatched DNA binding; Biological process=mismatch repair
  Homolog annotation: Hit_ID=Q9XGD0; Match level="QueryCoverage=93%, HitCoverage=9%, E-value=6e-44, Identity=77%"; Hit description=MUS2 protein
NDVNGEKELTFLYRLASGACPESYGLQVATMAGIPKSIVDKASVAGQAMRLKIAGNFKSSEERAAFSTQHEEWLRTAMSVIVKDGHLDEDIMDTLFCVCQELKFHFRKARRASTATDH

SEQ ID NO: 96071 - protein, 332 aa, Setaria italica
  Transcript Sequence Number=SeqID_30097
LKSKLTFDRLQQELGRYDCVLYEMVMSRDNLNNPKGPMAAKKMKSSRRGFSILGFIQKQMARILSLDYQLDCLDYGNEKWQHADLDYETFKQLQSERGESILTFAVDMTLKSTKALVQPTNMPDGLDFWRSKLLWASRVLPMPLVGLLVITGLCLPVENQDGFPELEALSKLDFGAALKIFLAKQLTSEFTAVTSPVEEKSVIIGERNRVATEKIKEAINRGYKRIAVLYGGGHMPDLGRRLGEELDMVPADVQWVTAWSIRSRELESKSLPFLKTLAEASGWPLNRYETLALLIFSSVLAVDLWFWELFFGTAVNWASLAGSWIDQLDGSF

SEQ ID NO: 96072 - protein, 110 aa, Setaria italica
  misc_feature (12)..(12): Xaa can be any naturally occurring amino acid
  Transcript Sequence Number=SeqID_30098
  Homolog annotation: Hit_ID=Q259W3; Match level="QueryCoverage=99%, HitCoverage=26%, E-value=3e-56, Identity=96%"; Hit description =B0811B10.15 protein
YAASDVYGDKAXPTEVYDSNENKWSVHQMMPAANLCSSKMAFCDSRLYLETLSPLGLMMYRVDAGRWEHIPAKFPRSLLDGYLVAGARTRLFLVGRIGLYSTLQSMRIWE

SEQ ID NO: 96073 - protein, 41 aa, Setaria italica
  misc_feature (22)..(22): Xaa can be any naturally occurring amino acid
  Transcript Sequence Number=SeqID_30099
  Homolog annotation: Hit_ID=A2Q1S1; Match level="QueryCoverage=100%, HitCoverage=52%, E-value=4e-13, Identity=80%"; Hit description=WD40 -like
MLRLRAFRPTSDKVVKIQLHPXHPWLVTADANDRVSVWDWE

SEQ ID NO: 96074 - protein, 226 aa, Setaria italica
  Transcript Sequence Number=SeqID_30100
HNAAGAASRCTRAAARRLSSSAAEAEAVAASPAAVGARRKPSLDEGDWSYHPEWWGEEDGPGEGAQTVFRRHSECGNGVVSVSAYPAFRPATEHWPAKERWLQERNARLYPESAGADQFKILGYQWRVMRFNDHTRQSTAKVMTCYRTSGQRSLFLMQQPHVLAVPYVKSMVSAGLTTLPCSAYDLPEAASGQDNMKILCIGHGGGSLPLFLASKFRGASVHIVEI

SEQ ID NO: 96075 - protein, 85 aa, Setaria italica
  misc_feature (68)..(68): Xaa can be any naturally occurring amino acid
  misc_feature (81)..(81): Xaa can be any naturally occurring amino acid
  Transcript Sequence Number=SeqID_30101
TGFNTYPGCQHRLHRHSTRPKILLRHSFSSFGLNIVINTHWIRSFHLCSRHHQQQQHHHHQQQQQQHXHQQQQHSSNSSTXQQQQ

SEQ ID NO: 96076 - protein, 65 aa, Setaria italica
  misc_feature (41)..(41): Xaa can be any naturally occurring amino acid
  Transcript Sequence Number=SeqID_30102
IATILPFHLCSRHHQQQQHHHHQQQQQQHHHQQQQHQQHSXHHHQQQQHHQQHQQHHQRTISSSS

SEQ ID NO: 96077 - protein, 60 aa, Setaria italica
  Transcript Sequence Number=SeqID_30103
NISKKKVVFQFCKINNSVWVEMNAEPVSSTTHSHTIKRLNILCCLQSSYEDGFSGKPLNT

SEQ ID NO: 96078 - protein, 133 aa, Setaria italica
  Transcript Sequence Number=SeqID_30104
  Gene Ontology: Mol. function=DNA binding; Cellular component =cytoplasm; Biological process=protein import into nucleus
  Homolog annotation: Hit_ID=B9RSV1; Match level="QueryCoverage=93%, HitCoverage=7%, E-value=6e-56, Identity=80%"; Hit description=80 kD MCM3-associated protein, putative
DDHRRKGVFFLTEKEFRGYYALLKLDKHPGHKVEPAELSLDLAKMSREIRGSPEILFAREIARACRMGNFIAFFRLSRKATYLQACLMHAHFAKLRRQALASLHSGLQSEQGIPISQVVEWLAMEVSVFLLAQ

SEQ ID NO: 96079 - protein, 53 aa, Setaria italica
  Transcript Sequence Number=SeqID_30105
  Gene Ontology: Mol. function=6-phosphogluconolactonase activity; Cellular component=chloroplast; Biological process=carbohydrate metabolic process
  Homolog annotation: Hit_ID=B4FKI4; Match level="QueryCoverage=88%, HitCoverage=16%, E-value=8e-20, Identity=95%"; Hit description=6 -phosphogluconolactonase
KRKLCEAPYSKTLDWSKWYIFWAEERAVAKNHAESNYKLAKEEFLSKVCQLKI

SEQ ID NO: 96080 - protein, 276 aa, Setaria italica
  Transcript Sequence Number=SeqID_30106
  Gene Ontology: Mol. function=6-phosphogluconolactonase activity; Cellular component=chloroplast; Biological process=carbohydrate metabolic process
  Homolog annotation: Hit_ID=B4FKI4; Match level="QueryCoverage=99%, HitCoverage=98%, E-value=1e-139, Identity=84%"; Hit description=6 -phosphogluconolactonase
  Pfam annotation: Domain name=Glucosamine_iso; Domain location=30-268; Score=-74.3; E_value=0.0034; Accession=PF01182.12; Description =Glucosamine-6-phosphate isomerases6-phosphogluconolactonase
MEREIMTSYETKKNCEIRVFESSDEMATDLAEFISQVSEISVKERGYFAIALCGGPLIRHMRKLCEAPYNKTLDWSKWYIFWAEERAVAKNHAESNYKLAKEGFLSKVPILNGHVYSINDNATVEQAATDYEFVIRQLVKVRTVGVSESNDCPKFDLILLNIGPDGHVASLFPNHPALELKDDWVTYITDSPEPPPERITFTLPVINSALNIAIVATGEDKEKAVSFAISDCNESLGATSVPATMVQPTDGKLVWFLDEAAASSLEAGNDAYEHQY

SEQ ID NO: 96081 - protein, 1089 aa, Setaria italica
  misc_feature (226)..(226): Xaa can be any naturally occurring amino acid
  misc_feature (1074)..(1074): Xaa can be any naturally occurring amino acid
  Transcript Sequence Number=SeqID_30107
  Gene Ontology: Mol. function=DNA binding; Cellular component =cytoplasm; Biological process=protein import into nucleus
  Homolog annotation: Hit_ID=Q9M8I9; Match level="QueryCoverage=92%, HitCoverage=58%, E-value=1e-158, Identity=35%"; Hit description =F28L1.23 protein
  Pfam annotation: Domain name=SAC3_GANP; Domain location=3-153; Score=- 2.3; E_value=0.0011; Accession=PF03399.8; Description=SAC3GANP family
KGEGFSEGFDAHLNIEQMNKTSVELFQMYDDHRRKGVFFSTEKEFRGYYALLKLDKHPGYKVEPAELSLDLAKMSREIRGSPEILFAREVARACRIGNFIAFFRLSRKATYLQACLMHAHFAKLRRQALASLHSGLQSGQGIPISQVVEWLAMEDEDIESLLEYHGFGLRQYEELYLVKEGPFLNSESDFPSGCSQLVHSKKSQRVIVDVSSGPVCAPMSKKILLXSYSSRLATGKRDLFPSLHAPVVPHDGRRDPSSLFSGSVSTTPGRQISSMFPNPFSPKAANKLFSPTRPSPLIPNAGREDSVSSFPTAASPQSSKREIFSKTPKVASPKPEGKPKLTDDLTAEDQDSGLAGSPKKVEMQTEILWSQANTENNNALAEPIVSHSLADSVSLDYSNMLGDEDEVRVDMDEGTPDHEVLVIEPGSPIGSPSSDRNEYEDHNISSSTVDDWLPIVTSPKKQISGEKLKAILRKWSQRAADKRFLREQKNALAVEALCSLSLGPPVHNTTMVPKLAVEELDIGHAFKERQARQQRSWSRLNVSELSGPILLETNPDARCLCWKLLVLVPPGAMESQTNNFASKWLLRKLMGSGNGDSGLVVSSAGLSIWTEWMSFPNTCCLSVVRASDQQVIGNDIANSTSCIAFVVSEGISWEMQKARLNSLLASIPAQSNLPLLILSGDKYHEGYDYASQYITDRLGLSGLHGGQIASSLVIFLVEHMEDYANGFFDDDKLREGLKWLIRSLPRQPDVTLVKTHELLLNYLSAQLELFNTRVAPGAGPGDCISAFNNAVDQVVEEVMAAAHTNTNRWPALEIDLLERTSNERIYAEVFLPSIGWSSPLRIQPLVAAINACKIPEFSYDLSWLNQGSHMGKQTQDQKKFLQECLARYLTESTRLLDETQVATEVNIMVQKYVGLELRDSYYYLVPRWVTIFRRIYNWRLAKLSTGEFSEAYVLSQHLYQTPAAANSNGATATQGRTARSNTCNEASILEDHSTMPAVSTGLSLDEIIEISCDLDAVDVQPVSQQPRPPTQIHEEPHAPADTDVEMNTVHGVSGELYIPRRVGLGELVPLGGDXKLARLLEQCTKLQDR

SEQ ID NO: 96082 - protein, 197 aa, Setaria italica
  misc_feature (69)..(69): Xaa can be any naturally occurring amino acid
  Transcript Sequence Number=SeqID_30108
  Gene Ontology: Mol. function=6-phosphogluconolactonase activity; Cellular component=cytoplasm; Biological process=carbohydrate metabolic process
  Homolog annotation: Hit_ID=B9RSV1; Match level="QueryCoverage=70%, HitCoverage=8%, E-value=3e-68, Identity=84%"; Hit description=80 kD MCM3-associated protein, putative
  Pfam annotation: Domain name=SAC3_GANP; Domain location=6-195; Score=- 5.7; E_value=0.0018; Accession=PF03399.8; Description=SAC3GANP family
KRKLCEAPYSKTLDWSKWYIFWAEERAVAKNHAESNYKLAKEEFLSKIRLHIIAMHELCEYNRGEGFSXGFDAHLNIGQMNKTSVELFQMYDDHRRKGVFFLTEKEFRGYYALLKLDKHPGHKVEPAELSLDLAKMSREIRGSPEILFAREIARACRMGNFIAFFRLSRKATYLQACLMHAHFAKEASTRFIVTVVS

SEQ ID NO: 96083 - protein, 1124 aa, Setaria italica
  misc_feature (44)..(44): Xaa can be any naturally occurring amino acid
  misc_feature (263)..(263): Xaa can be any naturally occurring amino acid
  misc_feature (785)..(785): Xaa can be any naturally occurring amino acid
  misc_feature (841)..(841): Xaa can be any naturally occurring amino acid
  misc_feature (946)..(946): Xaa can be any naturally occurring amino acid
  misc_feature (1001)..(1001): Xaa can be any naturally occurring amino acid
  misc_feature (1097)..(1097): Xaa can be any naturally occurring amino acid
  Transcript Sequence Number=SeqID_30109
  Gene Ontology: Mol. function=DNA binding; Cellular component =cytoplasm; Biological process=protein import into nucleus
  Homolog annotation: Hit_ID=B9RSV1; Match level="QueryCoverage=98%, HitCoverage=65%, E-value=1e-104, Identity=45%"; Hit description=80 kD MCM3-associated protein, putative
  Pfam annotation: Domain name=SAC3_GANP; Domain location=16-190; Score= 8.9; E_value=0.0002; Accession=PF03399.8; Description=SAC3GANP family
CCIGTCLFWSISSWNLSFLSEQIRLHIIAMHELCEYNRGEGFSXGFDAHLNIGQMNKTSVELFQMYDDHRRKGVFFLTEKEFRGYYALLKLDKHPGHKVEPAELSLDLAKMSREIRGSPEILFAREIARACRMGNFIAFFRLSRKATYLQACLMHAHFAKLRRQALASLHSGLQSEQGIPISQVVEWLAMEDKDIESLLEYHGFGLRQYEELYLVKEGPFLNSESDFPSGCCQLVHSKKSQRVIVDVSSGPVCAPMSKKNNFXSYSSRLAGKRDLFPSLHAPVVPHDGRRDPSSLFSGPVSTTPGRQISSMFPNPFSPKAANKLFSPTRPSPLIPNAGREASVSSFPTAASPQSSKREIFSKTPKVASLKPEGKPKLTDLTAEDQDSGLAGSPKKVEMQTEILWSQANTENNNALAEPIVSHSLADSISLDYSNMLGDEDKVRVDMDEGTPDHEVLVIEPGSPIGSSSSDRNEYEDHNISSSRVDDWLPIVTSPKKQISGEKLKAILRKWSKRAADKRFLREQKNALAVEALCSLSLGPPVHNTTLVPKLAVEELDIGHAFKERQARQQRSWSRLNVSELSGPILLETNPDARCLCWKLLVLVPPGAMESQNNNFASKWLLRKLMGSGNGDSGLVVSSAGLSIWTEWMSFPNTCCLSVVRASDQQVIGNDIANSTSCIAFLVSEGISWETQKARLNSLLASIPAQSNLPLLILSGNKYHEGYDYASQYITDRLGLSGLHGGRIASSLVIFLVEHMEDYANGFFDDDKLREGLKWLIRSLPRQPDXTLVKTHELLLNYLSAQLELFNTHVAAGAGPGDCISAFNNTVDQVVEEVMAAAHTNXNQWPALEIDLLERTSNERIYAEVFLPSIGWSSPLRIQPLVAAINACKIPEFSYDLSWLNQGSHMGKQTQDQKKFLQECLARYLTESTRLDETQVAIEVNIMVQKXGLELRDSYCYLFPRWVTIFRLAKLSTGEFSEAYVLSQHLYQTPFFFFFLRQLTLXRTARSNTCDEASILEDHSTMPAVSTGFSLDEIIEISCDLDAVYVQPVSQQPRPPTQIHEEPHAPADTDVEMNTVHGGSGELYIPRRVGLGELVPLXGDDMLARLLEQCTKLQDRIDDTLSIYF

SEQ ID NO: 96084 - protein, 60 aa, Setaria italica
  Transcript Sequence Number=SeqID_30110
HPLSEETMRGRRCALQREWGARRRPVEELGAWGGGMDAWRWFERSRRGARAEAGRCRAGA

SEQ ID NO: 96085 - protein, 71 aa, Setaria italica
  Transcript Sequence Number=SeqID_30111
  Gene Ontology: Mol. function=protein serine/threonine kinase activity
MADIALGSVGKIVEIALKIKEAVETVKQNEKECHEIQRCVARISALLRKLDETTETMKDEVMRDALEDLAE

SEQ ID NO: 96086 - protein, 120 aa, Setaria italica
  misc_feature (3)..(3): Xaa can be any naturally occurring amino acid
  misc_feature (6)..(6): Xaa can be any naturally occurring amino acid
  Transcript Sequence Number=SeqID_30112
LGXLRXLLTDVPPQPNSPPDNVFNLDRRSRGQGEVEPPEKKKKEADAELRREAKLERPSLALLSSLKGCPSKKGVETRERKPNESSDDPAPTTIGDPSEDPSEACVSSLTPEKGPRDETR

SEQ ID NO: 96087 - protein, 262 aa, Setaria italica
  Transcript Sequence Number=SeqID_30113
FPFAVQTRCPPILPAFSALLKDGLDCASVERNIVLFKEFGSRNTESVAELFVSLISKLLSAESLWEHGLCASNFEASWISKTWKKGVGNLSVEDFLDRSQNFARSVGKVQMQKICKCLRQCALNLLDFMRGKVNTQKLKTLLFGRLSPDELVSKPRLKHGKRKKKRELFPQGGYAFQKRAKHGGDAATSSDLLPAPASDKVFPPARHDRSPIQQSSIHHFVPVIPWPRIIPSGFGYGSSLEFPSIASPHPGKGILGRPPSNP

SEQ ID NO: 96088 - protein, 224 aa, Setaria italica
  misc_feature (19)..(19): Xaa can be any naturally occurring amino acid
  misc_feature (94)..(94): Xaa can be any naturally occurring amino acid
  Transcript Sequence Number=SeqID_30114
  Gene Ontology: Mol. function=nucleotidyltransferase activity; Cellular component=intracellular
  Homolog annotation: Hit_ID=B9SDZ7; Match level="QueryCoverage=89%, HitCoverage=43%, E-value=1e-22, Identity=33%"; Hit description=Zinc finger protein, putative
NRVYQVVEPFGSFTMDLFXTPRSDLDLSVNFSANTDDRYTRKQKISVIRKFSKVLYSHQRNGIFCGVLPVVSARVPILKVIDCGTGIECDISVXNKDGMTRSMIFKFVSLLDERFQILSYLVKFWAKVHDLNSPRALTMSSMSIISLVAFHLQTRCPPILPAFSALLKDGLDCASVERNIVLFKEFGSRNTESVAELFVSLISKVSNYKVHLLLMFEVEITFRN

SEQ ID NO: 96089 - protein, 49 aa, Setaria italica
  Transcript Sequence Number=SeqID_30115
VPDDASMRLLEIEMGVGAQRSKHNTYQVNCELYSEKSYTVNISCCIIHW

SEQ ID NO: 96090 - protein, 82 aa, Setaria italica
  Transcript Sequence Number=SeqID_30116
  Gene Ontology: Mol. function=drug transporter activity; Cellular component=membrane; Biological process=multidrug transport
  Homolog annotation: Hit_ID=B9RKN7; Match level="QueryCoverage=100%, HitCoverage=11%, E-value=7e-23, Identity=62%"; Hit description =Multidrug resistance pump, putative
PALTAFCNSGNVEKAFEVEAHMLECGITPEEAELKMLLRVSVVGRRGDKVYYLLHKFRAAVRQVSLSTAQLFEAWFRSPTAS

SEQ ID NO: 96091 - protein, 490 aa, Setaria italica
  Transcript Sequence Number=SeqID_30117
  Homolog annotation: Hit_ID=Q9M9X3; Match level="QueryCoverage=25%, HitCoverage=6%, E-value=2e-10, Identity=43%"; Hit description =F18C1.5 protein
MLMNLWQGRENVKNPVPAPTGDAPQVKSQTSLDDNLHAKPENTRQPKADLDDDQEIEIVFDEESGSDDKLPFPQPDDSLQSPPVIIGENSPGPIVEETENQENERIPFSQRVTSLQKDDESPGVDISSQTAMLSEANDPLERKYLVPSPEKNSFRDRVSPSSLSGRSSAQAPHQQSSRSRYEKRSPQKFSETSVSSGSRGHEHRHSNNHPPLPPMPPPISSMPTQNPDLVNRQSSSYGSRDRPTSNASGYPTQSFDASMPSAFTGLQGQTQYMLTGAGGSSTNDLPNADAKLLWNTFPVNRIPLETFSSGLSARPMPPPQPYSAVATQHATMSSSSPATLYNQGSVVQPSPTASIDSNLGLNSASGSMLASNLLPSFASQFLMARPSMPASFFGTPLPQVQLSSALPQNISNSQPSVSSVQPRPPPPPPPPQQPHPSQTLQQLGAIQLPQQDQPLSYPQSAILPQVPLQFSNQLPIPQLQLYHQSQQESM

SEQ ID NO: 96092 - protein, 253 aa, Setaria italica
  Transcript Sequence Number=SeqID_30118
  Gene Ontology: Mol. function=voltage-gated chloride channel activity; Cellular component=integral to membrane; Biological process=chloride transport
  Homolog annotation: Hit_ID=B9ST82; Match level="QueryCoverage=93%, HitCoverage=30%, E-value=8e-86, Identity=69%"; Hit description =Voltage-gated clc-type chloride channel, putative
  Pfam annotation: Domain name=CBS; Domain location=71-238; Score=15.0; E_value=0.0046; Accession=PF00571.20; Description=CBS domain
PGIWLLTQLAAAKVVATALCKGSGLVGGLYAPSLMIGAAVGAVFGGSAAYLINSAIPGNAAVAQPQAYALVGMAATLASVCSVPLTSVLLLFELTKDYRILLPLMGAVGLAIWVPSVVNQPNDSEPSGFRTPRRGYSSISSEDRNGSSKRADGADDLELSIIQSDVNNYGTYNEEMLLDDLKVSQAMSRIYVKVLPSATVTEAFQLLHDNQQNCALVVDTEDFLEGIITLGDIRRMGFELHGESFIDGDSPQD

SEQ ID NO: 96093 - protein, 110 aa, Setaria italica
  misc_feature (90)..(90): Xaa can be any naturally occurring amino acid
  Transcript Sequence Number=SeqID_30119
  Gene Ontology: Mol. function=acyltransferase activity; Cellular component=integral to membrane; Biological process=metabolic process
  Homolog annotation: Hit_ID=B6SRR0; Match level="QueryCoverage=81%, HitCoverage=17%, E-value=5e-25, Identity=67%"; Hit description =Glycerol-3-phosphate acyltransferase 8
  Pfam annotation: Domain name=Acyltransferase; Domain location=2-109; Score=2.5; E_value=0.00061; Accession=PF01553.13; Description =Acyltransferase
  Subcellular localization annotation: CTP_CleavageSite=61; ConfidenceScore=5.05e-01
INLTVRGTPPPAPRPGSPGSLLVCNHRTALDPIIISIALGRPVTCVTYSVSRLSTAISPIRAVALTRDRAADAARIAELLEEGDVVVCPXEGTTCREPALLRFSALFAEL

SEQ ID NO: 96094 - protein, 45 aa, Setaria italica
  Transcript Sequence Number=SeqID_30120
SYMAVWNIPFRCCSSFWPRTDRIRYGKDIYSSSSPLDVAWAGAIV

SEQ ID NO: 96095 - protein, 69 aa, Setaria italica
  Transcript Sequence Number=SeqID_30121
MVVALGPGRFYGSSLPRPRFFPGDRVDPPVSVTDPLLAWAQEAHWSMGGLGVKRLHLQGRIEGSIDKLR

SEQ ID NO: 96096 - protein, 118 aa, Setaria italica
  Transcript Sequence Number=SeqID_30122
  Gene Ontology: Mol. function=ATPase activity, coupled to transmembrane movement of substances; Cellular component=integral to membrane
  Homolog annotation: Hit_ID=Q8RY46; Match level="QueryCoverage=100%, HitCoverage=16%, E-value=2e-26, Identity=54%"; Hit description=ABC transporter B family member 26, chloroplastic
IERLRNVLPGGSWWRLEDGDEAGDGGGRAEGSGTTALSALSRMWGLVAADRWVIYAGFVSLVGAALAEIAIPHLLAASIFSAQNGGAVFFRNAKLLVVLCLISGVFSGVRSCCFGVAN

SEQ ID NO: 96097 - protein, 219 aa, Setaria italica
  Transcript Sequence Number=SeqID_30123
  Gene Ontology: Mol. function=sterol 14-demethylase activity; Cellular component=integral to membrane; Biological process=steroid biosynthetic process
  Homolog annotation: Hit_ID=P93846; Match level="QueryCoverage=100%, HitCoverage=44%, E-value=3e-89, Identity=72%"; Hit description =Obtusifoliol 14-alpha demethylase
RRDRARARLGEIFSTIIKSRKASGRSEEEDMLQFLIDSKYKDGRNTTEEEITGLLITTVFGGFQTSSIASTWTGAYLLQLKQFFATAVEEQIQVMKRHGDRTDYDVVSEMHFLYRCIKEALRLQPPIPMLLRQSHCDFTVTTKEGKEFDIPKGHMVASPLAFANRLPHIYSNPDSYDPDRFAPGREEDKAAGAFSYTSFGGGRHGCHGEAFAFLEIKTI

SEQ ID NO: 96098 - protein, 54 aa, Setaria italica
  misc_feature (49)..(49): Xaa can be any naturally occurring amino acid
  Transcript Sequence Number=SeqID_30124
MAVGTTAVKLHLSSAAAAARRPSLLHLAAVAALCSLSYLFGIWHHGGFXAARAS

SEQ ID NO: 96099 - protein, 101 aa, Setaria italica
  misc_feature (72)..(72): Xaa can be any naturally occurring amino acid
  misc_feature (82)..(82): Xaa can be any naturally occurring amino acid
  Transcript Sequence Number=SeqID_30125
  Subcellular localization annotation: CTP_CleavageSite=28; ConfidenceScore=5.46e-01
KGKNWLRLPPALPSPTAAHLLPCASEPRASIASPPSTSSPTRPAAAPWPPVLLSPATPPLPRHPHIPPPPLXPCPPLTTPIXPPPLLTLPIRPPPPPPPPP

SEQ ID NO: 96100 - protein, 196 aa, Setaria italica
  Transcript Sequence Number=SeqID_30126
  Gene Ontology: Mol. function=transferase activity, transferring glycosyl groups; Biological process=metabolic process
  Homolog annotation: Hit_ID=Q8LKT6; Match level="QueryCoverage=100%, HitCoverage=42%, E-value=9e-97, Identity=86%"; Hit description =Putative glucosyl transferase
FEVAKKFGIRVVSFWPAATACLALMLKIPKLIEDGLIDDKGLPRRQETFQLAPGMPPLHTSHLSWNNAGAPEGQHIIFDLVTRNNKLNGLAEMTVGNSFHEAEAGASKLFPNVLPIGPLFADREFRKPVGNFLPEDERCIKWLDAQPDGSVVYVAFGSMAIFDPRQFEELAEGLELTGRPFLWIVRPDFTPGLSKA

SEQ ID NO: 96101 - protein, 143 aa, Setaria italica
  Transcript Sequence Number=SeqID_30127
  Gene Ontology: Cellular component=integral to membrane
VAFASLYLVYVLAVAFTPEHWTRRQDEEEDHGPAAASSELHSVIETKFYTDQEARDLLLADTAAPLLQYYAGDNISGGGNNKSTFWTVMRVLALPLTLPRRLTIPDASKERWSKTTAVTAATLAPIFLAFLCSHRATGSPFPA

SEQ ID NO: 96102 - protein, 75 aa, Setaria italica
  misc_feature (12)..(12): Xaa can be any naturally occurring amino acid
  Transcript Sequence Number=SeqID_30128
  Gene Ontology: Mol. function=histone deacetylase activity; Cellular component=nucleus; Biological process=regulation of transcription, DNA-dependent
  Homolog annotation: Hit_ID=Q01L68; Match level="QueryCoverage=88%, HitCoverage=15%, E-value=3e-28, Identity=87%"; Hit description =H0321H01.12 protein
KFVKKFNIPLLXVTGGGGYTKENVARCWAVETGAFLDTELPNEIPNNDYIEYFAPDYTLKVPNLNMVKKTSAHMA

SEQ ID NO: 96103 - protein, 430 aa, Setaria italica
  Transcript Sequence Number=SeqID_30129
  Gene Ontology: Mol. function=histone deacetylase activity; Cellular component=nucleus; Biological process=regulation of transcription, DNA-dependent
  Homolog annotation: Hit_ID=Q01L68; Match level="QueryCoverage=95%, HitCoverage=95%, E-value=0.0, Identity=92%"; Hit description =H0321H01.12 protein
  Pfam annotation: Domain name=Hist_deacetyl; Domain location=24-317; Score=358.5; E_value=1.2e-104; Accession=PF00850.11; Description =Histone deacetylase family
MLEKDRISYFYDGDVGNVYFGPNHPMKPHRLCMTHHLVLSYGLHKKMEIYRPHKAYPVELAQFHSADYVEFLHRITPDTQDLYGSELTRYNLGEDCPVFDNLFEFCQIYAGGTLDAARRLNHKTCDIAINWAGGLHHAKKCEASGFCYINDLVLGILELLKYHARVLYIDIDVHHGDGVEEAFYFTDRVMTVSFHKYGDLFFPGTGDIKDIGEREGKYYAINIPLKDGIDDTSFTRLFKTIIAKVVETYLPGAIVLQCGADSLARDRLGCFNLSIEGHAECVKFVKKFNIPLLVTGGGGYTKENVARCWAVETGVLLDTELPNEIPNNDYIEYFAPDYTLKVPNLNMDNLNSKTYLSSIKVQVMESLRSIQHAPGVQMQEVPPDFYIPDFDEDELDPDERVDQHIQDKQIHRDDEYYEGDNDNDHDDGTR

SEQ ID NO: 96104 - protein, 69 aa, Setaria italica
  Transcript Sequence Number=SeqID_30130
  Subcellular localization annotation: CTP_CleavageSite=46; ConfidenceScore=5.41e-01
SVTWHGMSTSTSMRDMIRTDTETNQSETHPPPRSQTLLRSTAQQSTASSVPSPPSPGAVLPLHFTPQSP

SEQ ID NO: 96105 - protein, 83 aa, Setaria italica
  misc_feature (7)..(7): Xaa can be any naturally occurring amino acid
  Transcript Sequence Number=SeqID_30131
  Gene Ontology: Mol. function=hydrolase activity, hydrolyzing O -glycosyl compounds; Cellular component=extracellular region; Biological process=carbohydrate metabolic process
  Homolog annotation: Hit_ID=Q0J930; Match level="QueryCoverage=100%, HitCoverage=13%, E-value=3e-32, Identity=77%"; Hit description =Endoglucanase 13
SYMVGYXGSYFPTHVHHRGASIPSVHGEKATVGCMDGFDKYYNSKGADPNVLNGAIVGGPDGNDGFVDDRCNYQSAEPTISGN

SEQ ID NO: 96106 - protein, 136 aa, Setaria italica
  Transcript Sequence Number=SeqID_30132
  Gene Ontology: Mol. function=phosphoinositide binding; Biological process=cell communication
RPEIGPPPPAAAGGGALAQQGSSPGSPAAPPRPDHNQVGIFDDNDLFDDMVQEMEQILLNSGEPHENGSFTDNRRSNARQAHHFRDGSTTASTSGTDDAYVYPLPQYPSRIDWVEVVGAKQRTGDVSFGERMVGVK

SEQ ID NO: 96107 - protein, 69 aa, Setaria italica
  Transcript Sequence Number=SeqID_30133
CWIPDPEAPEGDYLEFSEGSSEFEEIFELVPCEANPSDSANFLSEQEAPQESTEEEAPQESTEEEAPKP

SEQ ID NO: 96108 - protein, 107 aa, Setaria italica
  Transcript Sequence Number=SeqID_30134
  Subcellular localization annotation: CTP_CleavageSite=42; ConfidenceScore=5.93e-01
EFSPTSRASPAAAYASPWRPMLRPSSSSTKRTNGTAVISRFSCAHRSAFQALFPRSIPAMSPACALPPMEPFCAAPPLCAWTAAEVNFANGTYELHLAPEEEAAADL

SEQ ID NO: 96109 - protein, 68 aa, Setaria italica
  Transcript Sequence Number=SeqID_30135
VIHYLTTGDFISHELILRCSTVIKCIHNRELRRSGSILHPAGEHHDHQHYTTVQVVLTTSRLVKSMIR

SEQ ID NO: 96110 - protein, 54 aa, Setaria italica
  Transcript Sequence Number=SeqID_30136
NSHGDQARRGVPCGVHPWVRVVVFLIIDFANREVVRYDRNSRIMLVIGVLSCRM

SEQ ID NO: 96111 - protein, 107 aa, Setaria italica
  Transcript Sequence Number=SeqID_30137
VIVGLQLYHERSCRVLCLKSCISNSCIRFIVDTEAPEAEFLEISEEPPEFEEIIELIPCEAGPSGNANIFTDQGKPRCIYAYLFWSYYFMCTTIGYFFMNALSLGVD

SEQ ID NO: 96112 - protein, 67 aa, Setaria italica
  Transcript Sequence Number=SeqID_30138
YLLLLLLSAHHLEWLGNNLTQIKDKTKVSLVVSFSAKVVSAKYTKGYHMHPKKAIILVSRVRLAEYP

SEQ ID NO: 96113 - protein, 72 aa, Setaria italica
  Transcript Sequence Number=SeqID_30139
GGGPETLGYCYESHNTLRRSFIMFISTRTVYVLSPRTLSNTALLSLLQTMSCINSYLLYVCKNVIFVDVVPK

SEQ ID NO: 96114 - protein, 66 aa, Setaria italica
  Transcript Sequence Number=SeqID_30140
TWPLPFYDHTCYHMRPQGNSVQETVERSAHIPVQSGTRLPHPILGLKLVPSTLDHEHHHISTLVQF

SEQ ID NO: 96115 - protein, 61 aa, Setaria italica
  Transcript Sequence Number=SeqID_30141
LKWNLELNLADGTYELHPTPEGAVAELQPIGAEPEQAEDPFATSPREETQQGPIEEEAPKN

SEQ ID NO: 96116 - protein, 82 aa, Setaria italica
  Transcript Sequence Number=SeqID_30142
  Subcellular localization annotation: CTP_CleavageSite=32; ConfidenceScore=5.20e-01
GIMRLIRYPSSSVLPPRWVPAGFLKTTTKSPLSTKYSASLTRLADINIFDTLYDSFMVYWLTHILQKELTISETLVLTFILD

SEQ ID NO: 96117 - protein, 128 aa, Setaria italica
  Transcript Sequence Number=SeqID_30143
FDYEINIRVLQDFRKTTEGKTLAEATSWSDIPGEASRDITDPSPRRPRRDPTRPSNPEGAGAAKSQQEKGREQQLHLESNTRLVFVRRHSLGEYFPSRHLLSPSIFEIGPPYTIFGFGSIITSFTLFI

SEQ ID NO: 96118 - protein, 54 aa, Setaria italica
  Transcript Sequence Number=SeqID_30144
IPMSNFGYSTLKAKMIIHVNQGNGLRFWKCGQKLKMVVLFAKLMWLRTVRCLNL

SEQ ID NO: 96119 - protein, 100 aa, Setaria italica
  Transcript Sequence Number=SeqID_30145
  Subcellular localization annotation: CTP_CleavageSite=70; ConfidenceScore=5.07e-01
TSIVSKQFMTSININTMHGEPNLTTSAHHEGSLPLSAVPINSHTRVGPTSLGTRLHRPGLGRCMTALVTTCGRKGTPFQRQWDDPLTSRFNQVLGFPIPY

SEQ ID NO: 96120 - protein, 71 aa, Setaria italica
  Transcript Sequence Number=SeqID_30146
SSAFINEKLRRSRSYYILQESTLITSYIRLSRSYVMTFRLANPMIGNKTTQTQGRTPTWDPTSGPIYCLSR

SEQ ID NO: 96121 - protein, 89 aa, Setaria italica
  Transcript Sequence Number=SeqID_30147
SHDIRAPQRVASFVSRPHRSLRHVSGPTAFGMQCSIIPASAVLRPHLHPHDAPREQHSKDSRRVCHTPVQSGTRLPYPILGMRLVLSNT

SEQ ID NO: 96122 - protein, 131 aa, Setaria italica
  Transcript Sequence Number=SeqID_30148
  Subcellular localization annotation: CTP_CleavageSite=58; ConfidenceScore=5.69e-01
LSSTFPKIFCRRNPPRLVHLRPIPCSHGASSTSRFHFATSRPCSLTGRRPPRELLCRRAATRGDLPGVRLLLSLDLLGVPLAQDTLDKPREGHDDGTEPEDGVWWSYPEDGTTKQVPRWEMLTKRVSSNKH

SEQ ID NO: 96123 - protein, 130 aa, Setaria italica
  Transcript Sequence Number=SeqID_30149
  Subcellular localization annotation: CTP_CleavageSite=23; ConfidenceScore=5.38e-01
PSFIRQRNPSNSYHLPSIPLTQSCATSPATPSAPPLPQSPTESTGIEVSPKLQKLFHRHRRPHMVSHAPALLVPDQQLKWNLDTLDKPREGRDDGTEPEDGVWWSYPEDGRTKQVLRWEMLAKRVSSNKH

SEQ ID NO: 96124 - protein, 103 aa, Setaria italica
  Transcript Sequence Number=SeqID_30150
RLEIMLRGLAITLGVSELVLGLLWHGLDSGVVQIRCGFFFWCQVQLVRAVSKVHFYTKCKCNKFNLPCFHMQDAKHELVLKCKLHYDNIHLNKVLNFHLFFLL

SEQ ID NO: 96125 - protein, 103 aa, Setaria italica
  Transcript Sequence Number=SeqID_30151
AFWQRRYQPRTPKSYHVLPRKIIIIMVSRVRLAEYTVQRVIPCGYLFRSIAGVHRGGSPETLGYCYESHNTLRRSFIMLISTRTVYVLSPRTLSNTALLSLLI

SEQ ID NO: 96126 - protein, 121 aa, Setaria italica
  Transcript Sequence Number=SeqID_30152
DTLVLRCFLLDGSLLGFLICKNVSIARWSGFTRDQLNNFLKLWRFFRDFQKFCFWSLSIFTRGGSKRVFGLLGLGSDGLQLSYGSFWRRVKLVSPVSEVQLWNPPLESNTRLVFVRRHSLG

SEQ ID NO: 96127 - protein, 144 aa, Setaria italica
  Transcript Sequence Number=SeqID_30153
  Gene Ontology: Cellular component=photosystem I reaction center; Biological process=photosynthesis
  Homolog annotation: Hit_ID=O65101; Match level="QueryCoverage=87%, HitCoverage=87%, E-value=4e-30, Identity=58%"; Hit description =Photosystem I reaction center subunit VI, chloroplastic
  Pfam annotation: Domain name=PSI_PsaH; Domain location=5-144; Score =330.2; E_value=4.2e-96; Accession=PF03244.6; Description=Photosystem I reaction centre subunit VI
  Subcellular localization annotation: CTP_CleavageSite=44; ConfidenceScore=5.48e-01
MASLAAVSVQPVAVKGLGGSSISGRRLAVRPAPRAACRSARRPRAAVVAKYGDKSVYFDLDDIGNTTGQWDLYGSDAPSPYNPLQSKFFETFAGPFTKRGLLLKFLLLGGGSLLAYVSASASPDLLPIKKGPQQPPVPGPRGKI

SEQ ID NO: 96128 - protein, 242 aa, Setaria italica
  Transcript Sequence Number=SeqID_30154
  Gene Ontology: Mol. function=metal ion binding
  Homolog annotation: Hit_ID=B6STH0; Match level="QueryCoverage=100%, HitCoverage=100%, E-value=1e-101, Identity=69%"; Hit description=RNA- binding protein
  Pfam annotation: Domain name=zf-C3HC4; Domain location=146-183; Score= 24.8; E_value=0.00015; Accession=PF00097.17; Description=Zinc finger, C3HC4 type (RING finger)
MGRSFRDSLKVLEADIQHANSLASEFRREYDGACLQMRMAYCPAAHFFLFLVQWTDCSLAGALGLLRILIYKVYADGTTTMSTHERKASIREFYAVIFPSLMQLHEGINEVEDKKQKAICIERYRKRDEDPKMVISEIDDNIEEECGICMETNTKVVLPTCSHAMCIKCYRDWRSRSQSCPFCRDSLKRVNSADLWIYTDDRDIVDMATVRRENLRRLFMYIDKLPTVIPESVLDIYDSHVK

SEQ ID NO: 96129 - protein, 100 aa, Setaria italica
  Transcript Sequence Number=SeqID_30155
  Gene Ontology: Mol. function=nucleotide binding; Biological process =defense response
  Homolog annotation: Hit_ID=Q5QLX2; Match level="QueryCoverage=74%, HitCoverage=8%, E-value=8e-15, Identity=55%"; Hit description=Blight resistance protein RGA1-like protein
ARKLLDLLWSPAAAAPRGERFTFSADLQRLERLLRRIQATLDDVGEREIQESYVKLWIEELTVLARDAEDVLDDYRYEMLRRRAQELQGSIAAAAASSSS

SEQ ID NO: 96130 - protein, 106 aa, Setaria italica
  Transcript Sequence Number=SeqID_30156
  Subcellular localization annotation: CTP_CleavageSite=77; ConfidenceScore=5.00e-01
PLFYRRTSDLGRRPPSPLCLPGMLLHSRRPSILDPAAAKSSAVVQAMVVPVAHSAPLDRSRVRNFDGALAAQIHLMSCAPGPPPSFYGATRRVALPDGGPSTRRTG

SEQ ID NO: 96131 - protein, 194 aa, Setaria italica
  Transcript Sequence Number=SeqID_30157
TAGQALQSSFFSTPPLPCDLSELPVVYKEEVADPAASKPKVRQRSQRRKDSKLKTEEQRSGINTESPNKEEDKVIDRANSGHESDGAANAAANASSRVQEPLDVTINVATYSYSTVPGRFSVSPDQVLLPQEASPAAPQDQQQLPAAKASHRSGSDDDHENRKQIRALDDDNDAADGAGEPPSGSGNEGVALNG

SEQ ID NO: 96132 - protein, 310 aa, Setaria italica
  misc_feature (20)..(20): Xaa can be any naturally occurring amino acid
  Transcript Sequence Number=SeqID_30158
  Gene Ontology: Mol. function=metal ion binding; Cellular component =cytoplasm; Biological process=protein amino acid methylation
  Homolog annotation: Hit_ID=B6U5U6; Match level="QueryCoverage=100%, HitCoverage=63%, E-value=1e-114, Identity=68%"; Hit description =Protein binding protein
LTKYEEEELAFSEQEKTRNXKRIQETIEETFRRQSEAIGKKRSTAKATATAFARKYRRNMQTRGRGRTVTPDIAPTGSDDEDIQEENANEVTKEPSSADDHSPDLRQRRCRKRSASQASPARTIGSSDQSVEENEVVGGKEILATSPLRGEMLAWGKNGTRSQNRHGSASSNGRIGRSGRIAKLVDHLRTTDEMDKEFHLYLVLLPINGQSTPNLEKPYLSCRPTLSIQHLVKLIAPQLSRKDEELEMYIRMDRHNGSVGSKASSTGEAEPRPFDGLERLRGDKLLSDLHPSFASSNGDLELLYALKSGE

SEQ ID NO: 96133 - protein, 61 aa, Setaria italica
  Transcript Sequence Number=SeqID_30159
  Subcellular localization annotation: CTP_CleavageSite=52; ConfidenceScore=5.46e-01
ITWVPRAGAAAASPSCRCAASRAISARRRAANSGHLLSRPPLLMAAGCCYATAALASSLAP

SEQ ID NO: 96134 - protein, 118 aa, Setaria italica
  Transcript Sequence Number=SeqID_30160
  Gene Ontology: Mol. function=transcription regulator activity; Cellular component=nucleus; Biological process=regulation of transcription
YFIIFDHTDEKGRIMYHPALVNKLNPTNIDAFPCRGQVVCRSLHQDDGNLEQHASSFKEDTEEIDALLSSDEDSDEDDVMSTGRSPDPLEIGPCESSSPPRFKKMKHFPGNWSIFNGS

SEQ ID NO: 96135 - protein, 121 aa, Setaria italica
  misc_feature (22)..(22): Xaa can be any naturally occurring amino acid
  misc_feature (42)..(42): Xaa can be any naturally occurring amino acid
  misc_feature (72)..(72): Xaa can be any naturally occurring amino acid
  Transcript Sequence Number=SeqID_30161
  Gene Ontology: Mol. function=RNA-directed DNA polymerase activity; Cellular component=chromatin; Biological process=RNA-dependent DNA replication
  Homolog annotation: Hit_ID=Q9SLQ0; Match level="QueryCoverage=81%, HitCoverage=6%, E-value=3e-14, Identity=44%"; Hit description=Gag -pol polyprotein (Fragment)
VSKHVTQARFVPSYHIRNFLHXAATIEIGYQKFKTAKEYHRXLQVGMPQCGLEKNDEVIVGRFNGGLSHEIXGHFILEIVQSSHSFHLICKVGREVHRRQAKDLVAPRLPIILYWFKVQFV

SEQ ID NO: 96136 - protein, 73 aa, Setaria italica
  Transcript Sequence Number=SeqID_30162
TLLFYSDQVIAIIMDCFRYKSYTALTDFHPGMDTRQSSELRGDILVLAARKIQLSTDTVLQPLHLPDLQFLPQ

SEQ ID NO: 96137 - protein, 111 aa, Setaria italica
  Transcript Sequence Number=SeqID_30163
PCNSDRIHALVSSDREKQARLEYGGKTLVLHEVVTGIQGPADHELDGVIDLSEVAMFEEDEHDYPDWTHSLFNDDDNYINDDEGDEGHDGVLDVLDEPSVIDVIRSNRGGR

SEQ ID NO: 96138 - protein, 105 aa, Setaria italica
  Transcript Sequence Number=SeqID_30164
  Gene Ontology: Mol. function=binding
TNKRKQKKYNTNTMALDCLHRLVKFYLNVYADYQPRNHVWDCLDSVTSQLLTVLKKGLLTQDVQHDKLVEFCVTLAQSNLDFAMNHMILELLKPDSLSEAKVVGS

SEQ ID NO: 96139 - protein, 117 aa, Setaria italica
  Transcript Sequence Number=SeqID_30165
  Gene Ontology: Mol. function=hydrolase activity, hydrolyzing O -glycosyl compounds; Cellular component=vacuole; Biological process =carbohydrate metabolic process
  Homolog annotation: Hit_ID=B9SAQ6; Match level="QueryCoverage=98%, HitCoverage=23%, E-value=7e-45, Identity=75%"; Hit description=Beta -glucosidase, putative
  Pfam annotation: Domain name=Glyco_hydro_1; Domain location=1-117; Score=-303.5; E_value=0.0021; Accession=PF00232.10; Description =Glycosyl hydrolase family 1
RDDFPGGFVFGAGTSAYQWEGAAAEDGRGASVWDTFAHAGHYSGDGDVAANGYHKYKEDVKLMKETGLDAYRFSISWPRLIPNGRGEVNPQGLEYYNNLISELLDHGIEPHAYPFFK

SEQ ID NO: 96140 - protein, 189 aa, Setaria italica
  misc_feature (164)..(164): Xaa can be any naturally occurring amino acid
  Transcript Sequence Number=SeqID_30166
  Gene Ontology: Mol. function=hydrolase activity, hydrolyzing O -glycosyl compounds; Cellular component=vacuole; Biological process =carbohydrate metabolic process
  Homolog annotation: Hit_ID=B9SAQ1; Match level="QueryCoverage=92%, HitCoverage=35%, E-value=5e-55, Identity=56%"; Hit description=Beta -glucosidase, putative
  Pfam annotation: Domain name=Glyco_hydro_1; Domain location=2-189; Score=-183.2; E_value=1.9e-09; Accession=PF00232.10; Description =Glycosyl hydrolase family 1
LLSLSSDDFTAYSDVCFREFGDRVTNWTTLNEPNAFALLGYDIGVAPPGRCSEPFGNCPNGNSVTEPYIVAHHSLLAHSSAVSLYRQMYQEKQHGVIGMNIFIYDFVPLTNSTEDITATERAKAFYTGWFLDPLYHGDYPDIMKKIAGSKLPKFSNSQSEQLIXSVDFLGVNYYSIMYVKDDPHAAPSN

SEQ ID NO: 96141 - protein, 268 aa, Setaria italica
  misc_feature (53)..(53): Xaa can be any naturally occurring amino acid
  misc_feature (67)..(67): Xaa can be any naturally occurring amino acid
  Transcript Sequence Number=SeqID_30167
  Gene Ontology: Mol. function=hydrolase activity, hydrolyzing O -glycosyl compounds; Cellular component=vacuole; Biological process =carbohydrate metabolic process
  Homolog annotation: Hit_ID=B9SAQ6; Match level="QueryCoverage=97%, HitCoverage=57%, E-value=7e-80, Identity=52%"; Hit description=Beta -glucosidase, putative
  Pfam annotation: Domain name=Glyco_hydro_1; Domain location=2-268; Score=54.8; E_value=2.2e-21; Accession=PF00232.10; Description =Glycosyl hydrolase family 1
IGHYSGDGDVAANGYHKYEDGRGEVNPQGLEYYNNLISELLDHGIEPHATLFXYDLPQALEDEYNGXLGPQIIDDFTAYSDVCFREFGDRVTNWTTLNEPNAFALLGYDIGVAPPGRCSEPFGNCPNGNSVTEPYIVAHHSLLAHSSAVSLYRQMYQQHGVIGMNIFIYDFVPLTNSTEDITATERAKAFYTGWFLDPLYHGDYPDIMKKIAGSKLPKFSNSQSEQLINSVDFLGVNYYSIMYVKDDPHAAPSNERDFLADYYYCLKL

SEQ ID NO: 96142 - protein, 69 aa, Setaria italica
  Transcript Sequence Number=SeqID_30168
LPFNRLILLSMTWSSRNQMAAKPVGFELTAEVAACSTARGLKEGRQPGVYLAQGPVTWATWEAHNCPTL

SEQ ID NO: 96143 - protein, 136 aa, Setaria italica
  Transcript Sequence Number=SeqID_30169
  Gene Ontology: Mol. function=protein serine/threonine kinase activity; Biological process=protein amino acid phosphorylation
  Homolog annotation: Hit_ID=Q6H464; Match level="QueryCoverage=100%, HitCoverage=19%, E-value=9e-63, Identity=83%"; Hit description =Putative wall-associated kinase 4
  Pfam annotation: Domain name=Pkinase; Domain location=1-136; Score= -90.3; E_value=0.0041; Accession=PF00069.17; Description=Protein kinase domain
  Pfam annotation: Domain name=Pkinase_Tyr; Domain location=1-135; Score=-110.2; E_value=2.1e-06; Accession=PF07714.9; Description =Protein tyrosine kinase
  Pfam module annotation: Pfam domain module=Pkinase::Pkinase_Tyr; Domain location=1-136::1-135
IDQFVNEVNILSQIIHRNVVKLFGCCLESEVPLLVYEFISNGTLHDLLHGNLSAKCWLTWEDRIRIALEAAGALAYLHSSAAMPIFHRDVKSTNILLDDAFTTKVSDFGASRSISIDQSRVVTAVQGTFGYLDPEY

SEQ ID NO: 96144 - protein, 78 aa, Setaria italica
  Transcript Sequence Number=SeqID_30170
  Gene Ontology: Mol. function=ribonucleoside-diphosphate reductase activity; Cellular component=ribonucleoside-diphosphate reductase complex; Biological process=response to cadmium ion
  Homolog annotation: Hit_ID=Q9SJ20; Match level="QueryCoverage=98%, HitCoverage=9%, E-value=1e-31, Identity=77%"; Hit description =Ribonucleoside-diphosphate reductase large subunit
TFILLGMPFDSPEAQQLNKDIFETIYYHALKASAELAAKEGPYETYAGSPVSKGILQPDMWNVIPSDRWNWSAMREMI

SEQ ID NO: 96145 - protein, 137 aa, Setaria italica
  Transcript Sequence Number=SeqID_30171
  Subcellular localization annotation: CTP_CleavageSite=24; ConfidenceScore=5.52e-01
VPGPLINSALFFQICSVLCCALLCFAARRNSSRPSSYLPLGFFQFLASSWVPLGKNLSVSSSQVTHASSPESNLAAQSFLIWSVRNFHFPREKICSFQKLNLNPLRILCLVHFQWRESLFLNPVAVVAALEAESVPA

SEQ ID NO: 96146 - protein, 489 aa, Setaria italica
  misc_feature (33)..(33): Xaa can be any naturally occurring amino acid
  misc_feature (65)..(65): Xaa can be any naturally occurring amino acid
  Transcript Sequence Number=SeqID_30172
  Gene Ontology: Mol. function=protein binding; Cellular component =endosome membrane
  Homolog annotation: Hit_ID=B6SVL3; Match level="QueryCoverage=99%, HitCoverage=98%, E-value=0.0, Identity=63%"; Hit description=Kelch motif family protein
  Pfam annotation: Domain name=Kelch_1; Domain location=37-82; Score =25.5; E_value=0.00022; Accession=PF01344.17; Description=Kelch motif
  Pfam annotation: Domain name=Kelch_1; Domain location=87-132; Score =38.0; E_value=3.7e-08; Accession=PF01344.17; Description=Kelch motif
  Pfam annotation: Domain name=Kelch_2; Domain location=137-188; Score =7.2; E_value=4.8; Accession=PF07646.7; Description=Kelch motif
  Pfam annotation: Domain name=Kelch_2; Domain location=37-82; Score =24.6; E_value=0.00041; Accession=PF07646.7; Description=Kelch motif
  Pfam annotation: Domain name=Kelch_2; Domain location=87-132; Score =31.2; E_value=4.2e-06; Accession=PF07646.7; Description=Kelch motif
  Pfam module annotation: Pfam domain module=Kelch_1::Kelch_1::Kelch _2::Kelch_2::Kelch_2; Domain location=37-82::87-132::137-188::37 -82::87-132
SAGAAGGGEHLSDVHVLDVPTMTWSTPEVKGDXAPAPRDSHGAVAVGGRLFVYGGDCGDRYHSVXRLLDVDTMAWSRFPVKGASPGVRAGHASISVGSKVYIIGGVGDKQYYSDVWVLDVANRSWSQLEICGQQPQGRFSHTAVVMNTDIAIYGGCGEDERPLNELLILQLGSEHPNGRYNISMCKVLSNHWSQEKRKFLRSETQKDASVSNGEMVQKPREAEIEQRNPFLRGLENGHAKRRKTGEARPNEPESEQEEHSLSLSQHSSPSQSDQEQNGAHKLSASPNTSISALQPFTRLNANGTLRAPGPGGANGTLRAPGPGGVSSRPLKTDQFLRTIAPHRQEVQFLSSDHKPQPRPPGPPLIGAEVHGTIDGAFDSGYLMTAVVNGQLFRGVLFAPGPGVTAPRPAVHHQILTSSAVPPQQRPLLAHAIPVHARPVPQATGFVLPDCAHHARQGGFPAKAVKSEPERGNSDLHDVVLTLGGPGGGK

SEQ ID NO: 96147 - protein, 280 aa, Setaria italica
  Transcript Sequence Number=SeqID_30173
  Gene Ontology: Mol. function=metal ion binding; Cellular component =endosome membrane
  Homolog annotation: Hit_ID=B6SVL3; Match level="QueryCoverage=76%, HitCoverage=50%, E-value=1e-101, Identity=56%"; Hit description =Kelch motif family protein
  Pfam annotation: Domain name=Kelch_1; Domain location=121-169; Score =14.6; E_value=0.06; Accession=PF01344.17; Description=Kelch motif
  Pfam annotation: Domain name=Kelch_1; Domain location=175-220; Score =39.9; E_value=1e-08; Accession=PF01344.17; Description=Kelch motif
  Pfam annotation: Domain name=Kelch_1; Domain location=21-66; Score =37.7; E_value=4.5e-08; Accession=PF01344.17; Description=Kelch motif
  Pfam annotation: Domain name=Kelch_1; Domain location=71-116; Score =29.8; E_value=1.1e-05; Accession=PF01344.17; Description=Kelch motif
  Pfam annotation: Domain name=Kelch_2; Domain location=121-169; Score =30.7; E_value=6e-06; Accession=PF07646.7; Description=Kelch motif
  Pfam annotation: Domain name=Kelch_2; Domain location=175-220; Score =23.6; E_value=0.00081; Accession=PF07646.7; Description=Kelch motif
  Pfam annotation: Domain name=Kelch_2; Domain location=21-66; Score =25.0; E_value=0.00031; Accession=PF07646.7; Description=Kelch motif
  Pfam annotation: Domain name=Kelch_2; Domain location=71-116; Score =34.2; E_value=5.2e-07; Accession=PF07646.7; Description=Kelch motif
  Pfam module annotation: Pfam domain module=Kelch_1::Kelch_1::Kelch _1::Kelch_1::Kelch_2::Kelch_2::Kelch_2::Kelch_2; Domain location=121 -169::175-220::21-66::71-116::121-169::175-220::21-66::71-116
MERRRKAMWLYPKVVGFNPPERWGHSACFFEGVVYVFGGCCGGLHFSDVLTLNVETMAWSSMATTGQRPGTRDSHGAALVGHRMLVFGGTNGGKKVNDLHVLDLRTGEWTRPQCKGAPPSPRESHTVTVVGGDRLVVFGGSGEGEGNYLSDVHVLDVPTMTWSTPEVKGDYAPAPRDSHGAVAVGGRLFVYGGDCGDRYHGEVDVLDVDTMAWSSVSDTSLSCMVAWLKCDSAARCTCFRCRLIAIIFRFPNVMVTCWIRISRKIPGVYSSSMLTSTMHV

SEQ ID NO: 96148 - protein, 114 aa, Setaria italica
  Transcript Sequence Number=SeqID_30174
  Gene Ontology: Mol. function=DNA topoisomerase (ATP-hydrolyzing) activity; Cellular component=chromosome; Biological process=DNA topological change
  Homolog annotation: Hit_ID=Q6Z8D9; Match level="QueryCoverage=79%, HitCoverage=5%, E-value=6e-32, Identity=76%"; Hit description=DNA topoisomerase 2
PQFPHPRSPPHPETLAQAHDLRVLRGAAMTGPLHSSSGHNAAAGGGGGGKTIEEMYQKKTQLEHILLRPDTYIGSVEKHTQTLWVYEGGAMVNRAVTYVPGLYKIFDEILVNAA

SEQ ID NO: 96149 - protein, 63 aa, Setaria italica
  Transcript Sequence Number=SeqID_30175
FRFQLGCSCNGYGMHGGPSPPRPRRPEGSKFDDAGPRYTHGYQGGGRGGVRFREGSPPYGRGG

SEQ ID NO: 96150 - protein, 363 aa, Setaria italica
  Transcript Sequence Number=SeqID_30176
  Gene Ontology: Mol. function=zinc ion binding; Cellular component =intracellular
  Homolog annotation: Hit_ID=B6SKP3; Match level="QueryCoverage=80%, HitCoverage=60%, E-value=4e-85, Identity=64%"; Hit description=Zn -finger, RanBP-type, containing protein
  Pfam annotation: Domain name=zf-RanBP; Domain location=126-157; Score= 29.8; E_value=1.1e-05; Accession=PF00641.10; Description=Zn-finger in Ran binding protein and others
PGSPPPERRRPGRPPLQRRRFSPPPRFQPLRQPRFHDEQQGYGMHGGPSPPRPRRPEGSKFDDAGPRYTHGYQGGGRGGVRFREGSPPYGRGGRSYGRGYGAPPGKDFINIDGEYVHRNDPNLSPREGDWICQNPNCGNLNFARRTHCNNCNKFRYSAREAYEPRRSPPRGYPSPPPRGPPRMVGPPGDRAPPREMARYRSPPHGWGAGESRGYAARSPPERPVRFTDASPKERMGFRGERDLRDRAKFEWSATDDYGRRERPHDGYIDRSRRRSGSPRANWGNDLRDRSRSPPRNRLMKSSFTGRGRPDNYAADPYASRGRPNSMEAGHGRGHGYRPGGGPYPGEGRGDRRPAPRGRNEDNY

SEQ ID NO: 96151 - protein, 89 aa, Setaria italica
  misc_feature (11)..(11): Xaa can be any naturally occurring amino acid
  Transcript Sequence Number=SeqID_30177
  Subcellular localization annotation: CTP_CleavageSite=42; ConfidenceScore=5.20e-01
DAFSLLPSTAXCRSNRLPLKHRRGEPPELPRSQSTDWRCSIRSRSLGAFVQVALSRWSLPMETPEQLCLVRRPSAVAVSGGTISTARSG

SEQ ID NO: 96152 - protein, 72 aa, Setaria italica
  Transcript Sequence Number=SeqID_30178
  Gene Ontology: Mol. function=nucleic acid binding
  Pfam annotation: Domain name=RRM_1; Domain location=11-70; Score =34.8; E_value=3.4e-07; Accession=PF00076.14; Description=RNA recognition motif. (a.k.a. RRM, RBD, o
MEQTDLEPRKLFVGGLPRWGVTPERMRSHFARYGHVVDALVMLCPDGMGRGFGFVEFQDEVAALRALDVRER

SEQ ID NO: 96153 - protein, 95 aa, Setaria italica
  Transcript Sequence Number=SeqID_30179
  Gene Ontology: Mol. function=catalytic activity; Cellular component =anchored to membrane; Biological process=oxidation reduction
  Homolog annotation: Hit_ID=C3TX91; Match level="QueryCoverage=100%, HitCoverage=13%, E-value=2e-27, Identity=61%"; Hit description =Hedgehog-interacting-like protein
  Subcellular localization annotation: CTP_CleavageSite=51; ConfidenceScore=5.35e-01
LCNYSSSASSAQSKDSTQDYCKLVWETCKNVTIVNSPFQPPLQGSARLPSSSSKLTDVWRSENDFCTSIGGSSRDQSLCFNGNAVFFNTTEPLPT

SEQ ID NO: 96154 - protein, 91 aa, Setaria italica
  Transcript Sequence Number=SeqID_30180
GGGHGWCTGAPNPRCQSKIENEIYTAHYTWQSSFTAITLSAPGSWMFWPPAQNQEQAEETTACCDLTTDDRMGNTREGRGDLILKTYMPRR

SEQ ID NO: 96155 - protein, 52 aa, Setaria italica
  Transcript Sequence Number=SeqID_30181
  Gene Ontology: Mol. function=protein disulfide oxidoreductase activity; Cellular component=cytoplasm; Biological process=electron transport chain
  Homolog annotation: Hit_ID=Q2QP86; Match level="QueryCoverage=100%, HitCoverage=50%, E-value=3e-19, Identity=88%"; Hit description =Glutaredoxin-C15
MERELARRLGRAPPVPAVFVGGKLVGSTDTIMSLHLAGKLVPMLKAAGAIWL

SEQ ID NO: 96156 - protein, 49 aa, Setaria italica
  Transcript Sequence Number=SeqID_30182
  Gene Ontology: Mol. function=protein disulfide oxidoreductase activity; Cellular component=cytoplasm; Biological process=electron transport chain
  Homolog annotation: Hit_ID=Q2QP86; Match level="QueryCoverage=93%, HitCoverage=44%, E-value=3e-14, Identity=80%"; Hit description =Glutaredoxin-C15
MAERVSRLSTEKAVVIFTTSQCPMCHTVSSLFSELGVCAAVHELDKAPA

SEQ ID NO: 96157 - protein, 104 aa, Setaria italica
  Transcript Sequence Number=SeqID_30183
  Gene Ontology: Mol. function=protein disulfide oxidoreductase activity; Cellular component=cytoplasm; Biological process=electron transport chain
  Homolog annotation: Hit_ID=Q2QP86; Match level="QueryCoverage=98%, HitCoverage=99%, E-value=7e-43, Identity=84%"; Hit description =Glutaredoxin-C15
  Pfam annotation: Domain name=Glutaredoxin; Domain location=14-77; Score=68.6; E_value=2.3e-17; Accession=PF00462.16; Description =Glutaredoxin
MAERVSRLSTEKAVVIFTRSQCPMCHTVLSLFSELGVCAAVHELDKDPRGREMERELARRLGRVPPVPAVFIGGKLVGSTDRVMSLHLAGNLVPMLKGAGAIWL

SEQ ID NO: 96158 - protein, 52 aa, Setaria italica
  Transcript Sequence Number=SeqID_30184
AKVKLVLESGEGRELRERAAELKKEAEAAMEDGGSSRMAFLQFLSDVKNLRG

SEQ ID NO: 96159 - protein, 128 aa, Setaria italica
  Transcript Sequence Number=SeqID_30185
  Subcellular localization annotation: CTP_CleavageSite=28; ConfidenceScore=5.48e-01
GRGTTPTAAGPPPPPSPGAACHRSRSCRRAAPAPEEASRGSQGQLRTSSRRPVGGDERASYGRWRQDAGRPDDDGANAKKDMPRAAAAAVTMQERRSLPSSVREEGPGSERLQVAISEAATCPGWDKA

SEQ ID NO: 96160 - protein, 119 aa, Setaria italica
  Transcript Sequence Number=SeqID_30186
  Gene Ontology: Mol. function=electron carrier activity; Cellular component=extracellular region; Biological process=response to oxidative stress
  Homolog annotation: Hit_ID=Q6T1C8; Match level="QueryCoverage=98%, HitCoverage=35%, E-value=5e-35, Identity=60%"; Hit description =Peroxidase
  Pfam annotation: Domain name=peroxidase; Domain location=1-115; Score= -34.7; E_value=3.2e-07; Accession=PF00141.15; Description=Peroxidase
STLIAAFSSKGLSAQDMTALSGAHTVGFAQCQVYRDRIYKDNNINQQFAKLRQSDCPATQGINDTVLAPLDVATQLTFDNAYYGDLLKNKGLLHSDQELYNGGSQDALVKKYGSNSAAF

SEQ ID NO: 96161 - protein, 75 aa, Setaria italica
  Transcript Sequence Number=SeqID_30187
  Gene Ontology: Mol. function=protein serine/threonine kinase activity; Biological process=protein amino acid phosphorylation
  Homolog annotation: Hit_ID=B6SWP8; Match level="QueryCoverage=100%, HitCoverage=10%, E-value=2e-30, Identity=88%"; Hit description =Carbohydrate binding protein
  Subcellular localization annotation: CTP_CleavageSite=68; ConfidenceScore=5.32e-01
GSLRLLGDAHLKNGTIRLSRDMPVPTSGAGRALYASAVPVRAGFSTQFAFTVATLNPSSVGGGLAFVVAADDSTV

SEQ ID NO: 96162 - protein, 58 aa, Setaria italica
  Transcript Sequence Number=SeqID_30188
  Gene Ontology: Mol. function=protein binding; Biological process=RNA metabolic process
  Homolog annotation: Hit_ID=Q9AWB3; Match level="QueryCoverage=100%, HitCoverage=6%, E-value=2e-27, Identity=91%"; Hit description =Nuclear cap-binding protein CBP80
MSAGWRTLLLRIGDRCPEYGGSADHKEHIETCYGVLSREYEHSRDAIFEFLLQCAEQL

SEQ ID NO: 96163 - protein, 72 aa, Setaria italica
  Transcript Sequence Number=SeqID_30189
  Gene Ontology: Mol. function=hydrolase activity, hydrolyzing O -glycosyl compounds; Biological process=carbohydrate metabolic process
  Homolog annotation: Hit_ID=B4FSU9; Match level="QueryCoverage=69%, HitCoverage=8%, E-value=6e-19, Identity=92%"; Hit description =Hydrolase, hydrolyzing O-glycosyl compounds
SPGAPGRTPTTGTSTCSHLLEAGVDNVVGMSLRNELRGPRQNANDWYKYMQLGAEAVHGANPRVLVILSGLR

SEQ ID NO: 96164 - protein, 55 aa, Setaria italica
  Transcript Sequence Number=SeqID_30190
  Gene Ontology: Mol. function=hydrolase activity, hydrolyzing O -glycosyl compounds; Biological process=carbohydrate metabolic process
  Homolog annotation: Hit_ID=B4FSU9; Match level="QueryCoverage=94%, HitCoverage=9%, E-value=4e-17, Identity=76%"; Hit description =Hydrolase, hydrolyzing O-glycosyl compounds
RTDNGFFGDADFDPDVWVEGLRRMAAMFAGEENVVGMSLRNELRGPRQNTADWYR

SEQ ID NO: 96165 - protein, 294 aa, Setaria italica
  misc_feature (170)..(170): Xaa can be any naturally occurring amino acid
  Transcript Sequence Number=SeqID_30191
  Gene Ontology: Mol. function=hydrolase activity, hydrolyzing O -glycosyl compounds; Biological process=carbohydrate metabolic process
  Homolog annotation: Hit_ID=B4FSU9; Match level="QueryCoverage=100%, HitCoverage=51%, E-value=1e-126, Identity=76%"; Hit description =Hydrolase, hydrolyzing O-glycosyl compounds
  Pfam annotation: Domain name=Cellulase; Domain location=4-246; Score=- 16.4; E_value=1.5e-05; Accession=PF00150.10; Description=Cellulase (glycosyl hydrolase family
QRLNLTESLAGIRANNPDFVDLKLIDALKAVVSSLGKHDVMVILDNHLSKPGWCCSNTDGNGFFGDTYFDPDVWVAGLKKMAAMFAGVDNVVGMSLRNELRGPRQNANDWYKYMQRGAEAVHAANPRVLVILSGLNNDNDLAFLNWRPVHLTFSNKVAFEVHWYSFSNSXSGGSGNANQACARITAGVARRALYLLDKGWPVILSEFGVDNRGGNTNDNRYYGCAAAAAADLDMDWALWALQGSYYLREGVRDLDEVYGVLDRAWSGPRNASALSRVQALQRPLRGPGLDQVPP

SEQ ID NO: 96166 - protein, 45 aa, Setaria italica
  Transcript Sequence Number=SeqID_30192
KSEKILDLITHLTKMTKEMNLPAKALNRFIVTQITDDGVDGVSRG

SEQ ID NO: 96167 - protein, 115 aa, Setaria italica
  misc_feature (34)..(34): Xaa can be any naturally occurring amino acid
  misc_feature (56)..(56): Xaa can be any naturally occurring amino acid
  Transcript Sequence Number=SeqID_30193
  Gene Ontology: Mol. function=4 iron, 4 sulfur cluster binding; Cellular component=intracellular; Biological process=base-excision repair
  Homolog annotation: Hit_ID=B6TQ62; Match level="QueryCoverage=74%, HitCoverage=19%, E-value=3e-29, Identity=71%"; Hit description=A/G -specific adenine DNA glycosylase
LPAYARSGGWESTHGWRTQLLRWYDVHWRDLPWXRASGGEMLEVMLQQMRVPVVCXVGYYDRWMARWPTVRILAAATQEEMNEMWAGLGYYWRARFLLEGGELGKNLTIQLRFGP

SEQ ID NO: 96168 - protein, 170 aa, Setaria italica
  Transcript Sequence Number=SeqID_30194
  Pfam annotation: Domain name=INCENP_ARK-bind; Domain location=104 -162; Score=5.5; E_value=0.066; Accession=PF03941.7; Description =Inner centromere protein, ARK binding region
KRKCIEEDSKTTEAAYGKRHANSEKDAHPKASDNKELQKNLAESVKGQVKPDDMASLGDKATKGNNEKVVVADERPGSFGSQSQENIPKSLEEPYLMTPYKDSDDEDDDFELKEESRRRRKLIPSWARGEKLEKILLSNYALDHREIFARKCSSNLSEICPVHIPQRSFR

SEQ ID NO: 96169 - protein, 111 aa, Setaria italica
  Transcript Sequence Number=SeqID_30195
  Gene Ontology: Mol. function=protein serine/threonine kinase activity; Cellular component=plasma membrane; Biological process =protein amino acid phosphorylation
  Homolog annotation: Hit_ID=C5IYF1; Match level="QueryCoverage=84%, HitCoverage=18%, E-value=2e-22, Identity=54%"; Hit description =Putative serine-threonine protein kinase
  Pfam annotation: Domain name=LRR_1; Domain location=13-36; Score=0.3; E_value=2.6e+02; Accession=PF00560.25; Description=Leucine Rich Repeat
  Pfam annotation: Domain name=LRR_1; Domain location=38-60; Score =11.8; E_value=1.7; Accession=PF00560.25; Description=Leucine Rich Repeat
  Pfam annotation: Domain name=LRR_1; Domain location=62-85; Score=9.9; E_value=3.9; Accession=PF00560.25; Description=Leucine Rich Repeat
  Pfam annotation: Domain name=LRR_1; Domain location=86-109; Score =11.0; E_value=2.3; Accession=PF00560.25; Description=Leucine Rich Repeat
  Pfam module annotation: Pfam domain module=LRR_1::LRR_1::LRR_1::LRR _1; Domain location=13-36::38-60::62-85::86-109
VPRRPPCPRSSPGSRSLTLAYNAFAPAPVPAEFAKLTNLTYLWMDKMNLTGEIPEAFSNLTELTVFSLASNALTGSIPAWVLQHAKLQNLYLFDNSLSGELPRSVTAVNLI

SEQ ID NO: 96170 - protein, 593 aa, Setaria italica
  Transcript Sequence Number=SeqID_30196
  Gene Ontology: Mol. function=amino acid transmembrane transporter activity; Cellular component=integral to membrane; Biological process=amino acid transport
  Homolog annotation: Hit_ID=B6U1T8; Match level="QueryCoverage=100%, HitCoverage=93%, E-value=0.0, Identity=91%"; Hit description=High -affinity cationic amino acid transporter 1
  Pfam annotation: Domain name=AA_permease; Domain location=7-414; Score=55.0; E_value=3e-13; Accession=PF00324.13; Description=Amino acid permease
  Pfam annotation: Domain name=BCCT; Domain location=203-506; Score= -437.8; E_value=0.027; Accession=PF02028.9; Description=BCCT family transporter
  Pfam annotation: Domain name=Spore_permease; Domain location=2-356; Score=-176.4; E_value=0.1; Accession=PF03845.5; Description=Spore germination protein
  Pfam module annotation: Pfam domain module=AA_permease::BCCT::Spore _permease; Domain location=7-414::203-506::2-356
KELNVPELVAIGVGSTVGAGVYVLVGTVAREHAGPALTISFLIAGIAAALSAFCYAELASRCPSAGSAYHYSYICVGEGVAWLIGWALVLEYTIGGSAVARGISPNLALFFGGPDSLPWLLARHQLPWFDIIVDPCAAALVFVVTVLLCVGIKESSFAQGVVTVLNACVMIFVIIAGSYIGFQIGWVGYKVSDGYFPYGVNGMLAGSATVFFAFIGFDTVASTAEEVKNPQRDLPLGIGVALAICCALYMAVSIVIVGLVPYFAMDPDTPISSAFAKHGMQWAMYVVTSGAVLALCSTLMGSLLPQPRILMAMARDGLLPSFFSDVNKQTQVPVKSTIVTGICAAALAFAMDVSQLAGMVSVGTLLAFTIVAVSILILRYVPPDEVPLPPSMQESFRLNQECDEEKDRDLLGDGNCNTSQTNDVIVLVESMKDPLIEKRQHKGKMDETKRRKIAAFSIGSVCVGVLILTSSASVTWLPFLPICIGCIIGVVLLFAGLGMLSWIDQDDGRHSFGHSGGFTCPFVPVLPVMCILINTYLLINLGGGTWMRVGIWLLMGVLVYIFYGRTHSSLTDVVYIPVAQADEIYRSSSGYVS

SEQ ID NO: 96171 - protein, 145 aa, Setaria italica
  Transcript Sequence Number=SeqID_30197
  Gene Ontology: Cellular component=membrane
  Homolog annotation: Hit_ID=B6T7V1; Match level="QueryCoverage=95%, HitCoverage=37%, E-value=5e-18, Identity=42%"; Hit description =Integral membrane protein DUF6 containing protein
MAGGGPWLERYGPSVGMVLVQLFYALVDVALKTASRVGMRPIVFVTYRQGIAAATLLLASFAARGCTLRPMAVGARAFGLIFAASLATATGQYFYLEGLLLASPSMARATTNLAPGITFAIAAVIGLEKVDIRNLRNVAKIVGTA

SEQ ID NO: 96172 - protein, 333 aa, Setaria italica
  misc_feature (76)..(76): Xaa can be any naturally occurring amino acid
  misc_feature (86)..(86): Xaa can be any naturally occurring amino acid
  Transcript Sequence Number=SeqID_30198
  Gene Ontology: Mol. function=GTP binding; Cellular component =intracellular
  Homolog annotation: Hit_ID=B6TY99; Match level="QueryCoverage=99%, HitCoverage=89%, E-value=1e-151, Identity=81%"; Hit description =GTPase family protein
  Pfam annotation: Domain name=MMR_HSR1; Domain location=98-233; Score =44.5; E_value=4.2e-10; Accession=PF01926.15; Description=GTPase of unknown function
IRDRLKLADLVIEVRDARIPLSSANEDLQPVLSAKRRILALSKKDLANPNIMNRWLNHFESCKKDCISINAHSSSXVNQLLGLAEXELKEAILKEPTLLIMVVGVPNVGKSALINSIHRIANSRFPVNDKIKRATVGPLPGVTQDIAGYKIASQPSIYVLDTPGVLVPSIPDMETGLKLALTGAVKDSVVGEERIAKYLLSILNIRKTPLHWERLLHRREELHEEICSLNENDSRDSLRRRRVNNSDAVYVQDLVMEVQRTLCSTFLDFTGNTEEESELESLIDMQLMALRKVFRIPHKPFDETQGPTSKKLLTLFRSGKLGPFILDDLPDEQ

SEQ ID NO: 96173 - protein, 159 aa, Setaria italica
  Transcript Sequence Number=SeqID_30199
  Gene Ontology: Mol. function=protein binding; Cellular component =endoplasmic reticulum membrane; Biological process=vesicle-mediated transport
  Homolog annotation: Hit_ID=B9SRV9; Match level="QueryCoverage=100%, HitCoverage=61%, E-value=2e-44, Identity=54%"; Hit description=Golgi membrane protein sb140, putative
  Pfam annotation: Domain name=Yip1; Domain location=1-142; Score=89.8; E_value=9.3e-24; Accession=PF04893.9; Description=Yip1 domain
IWRKTISILHPLRSADPSLHADADLSGPFLFLLSFGLFQLLAGKFHFGIVLGWVTVASLFLYFVFSMLSGGRRGDLDLYRCVSLVGYCMLPMVIFSAVSLFLPRGGGLIFGVGMAFVLWSTRVCTRLLAELASSGDEHRGLIAYACWLVYMLFSLLVIF

SEQ ID NO: 96174 - protein, 79 aa, Setaria italica
  Transcript Sequence Number=SeqID_30200
  Gene Ontology: Mol. function=transferase activity
  Homolog annotation: Hit_ID=Q5ZCH7; Match level="QueryCoverage=98%, HitCoverage=14%, E-value=2e-36, Identity=91%"; Hit description=O -acetyltransferase-like
RYIWIIGMIYAYFHPNVERWMEKLEESETKVRLSIKGTIVTLSVMAGYLWYEYIYKLDKVTYNKYHPYTSWIPITAYIC

SEQ ID NO: 96175 - protein, 71 aa, Setaria italica
  Transcript Sequence Number=SeqID_30201
LSLALFWFIFIFATGQTYFQNLSTKANLIRPLLIKPNQIGFGRQVPEPLWMVRAMAEFGIVLVYFMFVRSQ

SEQ ID NO: 96176 - protein, 113 aa, Setaria italica
  misc_feature (42)..(42): Xaa can be any naturally occurring amino acid
  Transcript Sequence Number=SeqID_30202
  Gene Ontology: Mol. function=transferase activity
  Homolog annotation: Hit_ID=Q5ZCH7; Match level="QueryCoverage=98%, HitCoverage=20%, E-value=5e-53, Identity=87%"; Hit description=O -acetyltransferase-like
  Pfam annotation: Domain name=Cas1p; Domain location=1-84; Score= -47.7; E_value=4.6e-06; Accession=PF07779.4; Description=Cas1p-like protein
GALGLFNKYNEIPSVMAIKIACCFLSVILIWEIPGVFELLWXPFTFLLGYKDPSPAKAHLPLLHEWHFRSGLDRYIWIIGMIYAYFHPNVERWMEKLEESETKVRFINQGNQS

SEQ ID NO: 96177 - protein, 68 aa, Setaria italica
  Transcript Sequence Number=SeqID_30203
  Gene Ontology: Mol. function=transferase activity
  Homolog annotation: Hit_ID=Q5ZCH7; Match level="QueryCoverage=98%, HitCoverage=12%, E-value=3e-26, Identity=85%"; Hit description=O -acetyltransferase-like
DYPMLNFMLTTAIYLLLSYRVFEITNVLKGAFIPSRDNNRLYQNFVAGIAISVCLYFCSLILLKIPVV

SEQ ID NO: 96178 - protein, 124 aa, Setaria italica
  Transcript Sequence Number=SeqID_30204
  Gene Ontology: Mol. function=transferase activity
  Homolog annotation: Hit_ID=Q5ZCH7; Match level="QueryCoverage=99%, HitCoverage=22%, E-value=2e-57, Identity=86%"; Hit description=O -acetyltransferase-like
AYICLRNCTQQLRSASLALFAWLGKITLETYISQIHIWLRSSMPNGQPKWLLCFIPDYPMLNFMLTTAIYLLLSYRVFEITNVLKGAFIPSRDNNRLYQNFVAGIAISVCLYFCSLILLKIPVV

SEQ ID NO: 96179 - protein, 349 aa, Setaria italica
  Transcript Sequence Number=SeqID_30205
  Gene Ontology: Mol. function=transferase activity; Cellular component= integral to membrane; Biological process=oxidation reduction
  Homolog annotation: Hit_ID=Q5ZCH7; Match level="QueryCoverage=100%, HitCoverage=64%, E-value=1e-178, Identity=86%"; Hit description=O -acetyltransferase-like
  Pfam annotation: Domain name=Cas1p; Domain location=113-349; Score =554.7; E_value=1.1e-163; Accession=PF07779.4; Description=Cas1p-like protein
MEVFGPVTPGQVSFLLGLFPVLIAWIYSEILEYRKSSSHGKVHSDANLDNGTIKEEDKTVLLEGGQLKSPSTKFRNLSTKANLIRFITMDESFLLEHRAVLRAMAEFGIVLVYFYICDRTNIFPESKKSYNRDLFLFLYILLIIASALTSLKKHHEKSAFTGKSILYLNRHQTEEWKGWMQVLFLMYHYFAASEIYNAIRVFIACYVWMTGFGNFSYYYIKKDFSIARFAQMMWRLNFFVAFCCIVLDNDLMLYYICPMHTLFTLMVYGALGLFNKYNEIPSVMAIKIACCFLSVILIWEIPGVFELLWAPFTFLLGYKDPSPAKAHLPLLHEWHFRSGLDRYIWIIGM

SEQ ID NO: 96180 - protein, 75 aa, Setaria italica
  Transcript Sequence Number=SeqID_30206
VLLISIRRFDVIWIKLFLRIQTTPDTNIHGARKLYQSGGRARCVVIVTCNFSAHTTTKSRGADQDATTSLQLIVP

SEQ ID NO: 96181 - protein, 903 aa, Setaria italica
  Transcript Sequence Number=SeqID_30207
  Gene Ontology: Mol. function=acid-amino acid ligase activity; Cellular component=intracellular; Biological process=ubiquitin -dependent protein catabolic process
  Homolog annotation: Hit_ID=B9S9V5; Match level="QueryCoverage=100%, HitCoverage=25%, E-value=1e-130, Identity=38%"; Hit description=E3 ubiquitin protein ligase upl2, putative
LRRDTEISQSRSCDQGAGHSGLLHHIFYLLLPLTSVKTADVSDDWTGKLSERASCFLVALCCRSAEGRRRVISEIVKAFNYFIDSASSTSRGSLIPDRKVLAFSELVNSILSRNSQSNLPVLGCSPDIAKPMVDGGMVQSLSGFLKVIDLDHPDATKVVNLILKALDSLTRTAYASDQVLKSDRYTKNRLPGSHEQTHEADDTVVHEQSTDNRHHHTDDTIQSTSQQAQELSHVDRDNNENHVQPSEQEMGVDLVDNNSSGNPPMHGVEFMRDETIEGNVMATSTDVGLPFPVQHQVDDEMGEEDEDIGEEGEDEDEDEDDEEIADEGAGLMSIADTDIEDQENNAIGEEYNDDLMDEEDDDFLENRVIEVRWRESLTGMDHHLRFSRGRADSSGFIDISSESFHGVGTEDSFNLHRSFGLERRRQSGSRSLLDRPRSDGNAFLHPLLVRPAQSREGTGSAWPSGGTTSSRDFHTLSFGNSDIPLYMLDAGFPPETAPPVFGERVVSTAPPPLIDFSLGGDSLRIRRGPGDNPWTDDGQPQAGNHAAAVAQAVEDQFVSQLTAVSNSNNTPLVQPEQNGNDVNAHLQSPDTGTIATNSLAQPVGGHQQVHTVNQEPAPADGLCPTNVQVNQQSVGSVHDNRVEEAVQQTAADDPMPQSDEMLSIADTQLGDCPERDSLSGNQSCDHIMHNEIEAPQQAQLSNDPREAPSDLESSCHALVTSASAAPELSDAHVDSAALNADVDMNSVDIADNEVGNSAPGSDGNGLSSRRHEEAHQEPQTEQPNANNEASSANEIDPTFLEALPEDLRAEVLASQQNRSAPAASYTPPAAEEIDPEFLAALPPDIQAEVLAQQRAQRIAHSQPVGQPVDMDNASIIATFPPDLREEVLLTSSEAVSCSCPFPF

SEQ ID NO: 96182 - protein, 79 aa, Setaria italica
  Transcript Sequence Number=SeqID_30208
  Gene Ontology: Mol. function=protein serine/threonine kinase activity; Biological process=protein amino acid phosphorylation
  Homolog annotation: Hit_ID=Q7XUH4; Match level="QueryCoverage=100%, HitCoverage=7%, E-value=1e-22, Identity=72%"; Hit description =OSJNBa0020J04.8 protein
  Pfam annotation: Domain name=LRR_1; Domain location=2-24; Score=8.1; E_value=8.5; Accession=PF00560.25; Description=Leucine Rich Repeat
  Pfam annotation: Domain name=LRR_1; Domain location=26-48; Score =12.2; E_value=1.4; Accession=PF00560.25; Description=Leucine Rich Repeat
  Pfam annotation: Domain name=LRR_1; Domain location=50-72; Score=7.8; E_value=10; Accession=PF00560.25; Description=Leucine Rich Repeat
  Pfam module annotation: Pfam domain module=LRR_1::LRR_1::LRR_1; Domain location=2-24::26-48::50-72
RDLQVVDLGGNKLAGAFPTWLTGAGGLTLLDLSGNAFIGELPPAVGQLTALLELRLGGNAFTGAVPAEIGRCGALQVLD

SEQ ID NO: 96183 - protein, 194 aa, Setaria italica
  misc_feature (83)..(83): Xaa can be any naturally occurring amino acid
  Transcript Sequence Number=SeqID_30209
  Gene Ontology: Mol. function=transferase activity
  Homolog annotation: Hit_ID=B6SKF9; Match level="QueryCoverage=100%, HitCoverage=39%, E-value=1e-80, Identity=78%"; Hit description =Glycosyltransferase
RALRRAFGLEREAASRGGATGAGKPRLLIISRRGSRRFLNEREMARAGAEAGFEVRVAEPDQHTDMAGFARLVNSADVMVGVXHGAGLTNMVFLPRGAVLIQVVPFGGLEWLTSVTFKEPAADMEVSYMDYEVKLEESSLIDQYPRNHQVLTDPYAVHKQGWDALKAAYLDKQNIRMDLDRFKSALREAMSRLP

SEQ ID NO: 96184 - protein, 486 aa, Setaria italica
  Transcript Sequence Number=SeqID_30210
  Gene Ontology: Mol. function=aspartic-type endopeptidase activity; Biological process=proteolysis
  Homolog annotation: Hit_ID=B9R734; Match level="QueryCoverage=99%, HitCoverage=77%, E-value=1e-174, Identity=59%"; Hit description =Aspartic proteinase nepenthesin-1, putative
  Pfam annotation: Domain name=Asp; Domain location=1-283; Score= -114.1; E_value=8.2e-07; Accession=PF00026.15; Description=Eukaryotic aspartyl protease
DCTCDNDKNQCTYERQYAEMSSSSGVLGEDIVSFGRESELKPQRAVFGCENSETGDLFSQHADGIMGLGRGQLSIMDQLVEKGVISDSFSLCYGGMDVGGGAMVLGGLPSPSDMVFSRSDPLRSPYYNIELKEIHVAGKALRVDPKVFDSKHGTVLDSGTTYAYLPEQAFVAFKDAVTSKVHSLKKIRGPDPTYKDICFAGAGRNVSKLHEAFPNVDMVFGNGQKLSLTPENYLFRHSKVDGAYCLGVFQNGKDPTTLLGGIIVRNTLVTYDRHNQKIGFWKTNCSELWERLHIGGASSPGPSSDTGSQADMSPAPAPNGLPEFDVGLITVDMSINVTYPNLKPHLHELAELIAKELEIDSRQVRVMDVTSQGNSTLIRWGIFPAGPDNAMSNATAMVIISRLTQHHVQLPENLGSYQLLEWNVQPLSRRSWFQEHVVSILLGILLVVLVTLSAFLVVLVWRKKFGGQTAYRPVDSVAPEQELQPL

SEQ ID NO: 96185 - protein, 55 aa, Setaria italica
  Transcript Sequence Number=SeqID_30211
  Homolog annotation: Hit_ID=B6SSA9; Match level="QueryCoverage=100%, HitCoverage=17%, E-value=2e-10, Identity=64%"; Hit description=LysM domain containing protein
MGISHPLSDDYDALLSPERTPPSSPPPPPPGHHCLEHEVSRMDTLAGIAIKYGVE

SEQ ID NO: 96186 - protein, 78 aa, Setaria italica
  Transcript Sequence Number=SeqID_30212
  Gene Ontology: Mol. function=binding; Cellular component=integral to membrane; Biological process=transport
MSSTRRASKAAKSTINYHRLSLDEHQLFEPDALITKDRDANHQPRQSPQLRRTYTDRRLTTPQFVSALTGIWNLVGQS

SEQ ID NO: 96187 - protein, 107 aa, Setaria italica
  Transcript Sequence Number=SeqID_30213
  Gene Ontology: Mol. function=ATPase activity, coupled to transmembrane movement of ions, phosphorylative mechanism; Cellular component=membrane; Biological process=transport
  Homolog annotation: Hit_ID=B9HKJ9; Match level="QueryCoverage=97%, HitCoverage=8%, E-value=1e-26, Identity=50%"; Hit description =Aminophospholipid ATPase
LDVIRWNWITHVAIWGSIVATWICVMIIDSIPIMPGFWAIYKVMGTGLFWALLLAVTVVGMIPHFAAKAFSEYFTPSDIQIAREMEKSQDTHDATHPEVQMSSVSRA

SEQ ID NO: 96188 - protein, 60 aa, Setaria italica
  Transcript Sequence Number=SeqID_30214
VVILYKVARDAPPRVHQLFVSHTSNTPSTRTQDVGYYSPKARICLNPAPLCYHSSYWSYD

SEQ ID NO: 96189 - protein, 211 aa, Setaria italica
  Transcript Sequence Number=SeqID_30215
  Gene Ontology: Mol. function=drug transporter activity; Cellular component=membrane; Biological process=multidrug transport
  Homolog annotation: Hit_ID=Q10A00; Match level="QueryCoverage=93%, HitCoverage=40%, E-value=4e-63, Identity=65%"; Hit description=MATE efflux family protein, expressed
  Pfam annotation: Domain name=MatE; Domain location=8-148; Score=94.8; E_value=3e-25; Accession=PF01554.10; Description=MatE
LAGLLATPIVLTAVLSICLHTITITFASMVPIGLGAALSTRVSNEHGAGRPHVAHLATQVVMFLAFSVCVSEGILMVLARNLLGYAYSNDEDVAKYAARVMPVLAVCILFDGLQTVLSGVVRGCGRQKLGAVINLVAYYVAGIPAAFFFAFVCHLGGMGLWFGLLCGLVVQMLLLLSISICTNWNGEVLRAKDGVFSSNLLVDTWQNMKCQ

SEQ ID NO: 96190 - protein, 60 aa, Setaria italica
  Transcript Sequence Number=SeqID_30216
  Gene Ontology: Cellular component=membrane
KEAEAMEIPVAIKGVDGNGRIVDIVELDEVQLEKAQANTKAAVAVTVSVEEARVQGKDEA

SEQ ID NO: 96191 - protein, 359 aa, Setaria italica
  Transcript Sequence Number=SeqID_30217
  Gene Ontology: Mol. function=catalytic activity
  Homolog annotation: Hit_ID=Q8H4C0; Match level="QueryCoverage=85%, HitCoverage=83%, E-value=1e-124, Identity=68%"; Hit description =Alpha-rhamnosidase-like protein
  Pfam annotation: Domain name=BNR; Domain location=150-161; Score=9.4; E_value=8.4; Accession=PF02012.12; Description=BNRAsp-box repeat
  Pfam annotation: Domain name=BNR; Domain location=202-213; Score=9.0; E_value=9.4; Accession=PF02012.12; Description=BNRAsp-box repeat
  Pfam annotation: Domain name=BNR; Domain location=255-266; Score=4.1; E_value=40; Accession=PF02012.12; Description=BNRAsp-box repeat
  Pfam annotation: Domain name=BNR; Domain location=304-315; Score=9.1; E_value=9.1; Accession=PF02012.12; Description=BNRAsp-box repeat
  Pfam module annotation: Pfam domain module=BNR::BNR::BNR::BNR; Domain location=150-161::202-213::255-266::304-315
  Subcellular localization annotation: CTP_CleavageSite=66; ConfidenceScore=5.03e-01
DTTLTQENRNLSSERATNLSNSKPGQQIEHGTHNMNTSSTNATSSWSIVKEEFTFPAAGRSFNNCHASTIVEIEKDNFLVSYFGGSIEGAPDVKIWTQRYSDGYWHPPVVADEENATAMWNPVLFQLPSRELLLFYKIGEHPQNWSGAMKRSLNGGMSWSEREQLPPGILGPIKNKPFLLDDGRLLCGSSVESWNSWGAWLEVTDDAGWTWRKYGPIFVESEKLGVIQPVPYQTTNGTIRMLLRSYQTIGRVCIADSSDGGLTWGYARKTELPNPNSGIDGIKMKDGRVALAYNTESRGILKVAVSLDDGISWGEVLTLENTEGVEFSYPAVIQTMDELVHVTYTYNRTQIKHVVLRPS

SEQ ID NO: 96192 - protein, 235 aa, Setaria italica
  misc_feature (14)..(14): Xaa can be any naturally occurring amino acid
  misc_feature (216)..(216): Xaa can be any naturally occurring amino acid
  Transcript Sequence Number=SeqID_30218
  Gene Ontology: Mol. function=protein serine/threonine kinase activity; Cellular component=integral to membrane; Biological process=protein amino acid phosphorylation
  Homolog annotation: Hit_ID=Q654Z3; Match level="QueryCoverage=99%, HitCoverage=42%, E-value=5e-92, Identity=69%"; Hit description =Receptor protein kinase-like
  Pfam annotation: Domain name=Pkinase; Domain location=6-234; Score =130.8; E_value=4.4e-36; Accession=PF00069.17; Description=Protein kinase domain
  Pfam annotation: Domain name=Pkinase_Tyr; Domain location=6-234; Score=16.7; E_value=7.8e-15; Accession=PF07714.9; Description =Protein tyrosine kinase
  Pfam module annotation: Pfam domain module=Pkinase::Pkinase_Tyr; Domain location=6-234::6-234
YATENFSENRNVGXGGFATVYKGQLPDGFMIAVKRMDEYATVFDFSSEFLLARLQHSNLVRLLGWCIHEKERILVYDFMPKGNLHRFIFDKRNGSLLDWSKRLNIIKGLAAGLVYLHKQSMLWIVHRDLKPQNILLDHDMNPKITDFGSARTLSSDTAEERTSRVVGTSGYKAPEYTSRGIYSLKTDVFSFGVMALVIISGRKNTILEQQGDSVGXLVRDAWQLWNDGRLHELVD

SEQ ID NO: 96193 - protein, 70 aa, Setaria italica
  Transcript Sequence Number=SeqID_30219
  Subcellular localization annotation: CTP_CleavageSite=51; ConfidenceScore=5.31e-01
GGGGERLRAVGYYSRKSPGLADFLHSSPRSFPSRGRRPSRRRLPPVIVRFTADLIWKSPHFFNAIEEREL

SEQ ID NO: 96194 - protein, 111 aa, Setaria italica
  Transcript Sequence Number=SeqID_30220
  Subcellular localization annotation: CTP_CleavageSite=84; ConfidenceScore=5.70e-01
YSDTPPHREPLRTRTNPLGLSAPLPTASTPPTPPRSSAPVTSASRSPSRRFPLSPARAPRPPDQASGGPFRSHFRRRRRSRRAVGELGECFTAIVDGRGFPRPPGNFVQAP

SEQ ID NO: 96195 - protein, 452 aa, Setaria italica
  misc_feature (282)..(282): Xaa can be any naturally occurring amino acid
  Transcript Sequence Number=SeqID_30221
  Gene Ontology: Cellular component=nuclear chromosome
  Homolog annotation: Hit_ID=B9RBL8; Match level="QueryCoverage=71%, HitCoverage=41%, E-value=1e-22, Identity=27%"; Hit description =Sister chromatid cohesion 1 protein, putative
  Pfam annotation: Domain name=Rad21_Rec8; Domain location=389-443; Score=64.8; E_value=3.2e-16; Accession=PF04824.8; Description =Conserved region of Rad21  Rec8 like protein
VNMDETNGGSACSMAPIPPQESQEGQNSENIENMTCGSLSENNPSIEASGNNSLLEKSNTIPPPSAEFPEHDAGEHESPEAPVLSCETGAENELSPSTPEPLPEGVPGPSSSSRFRVRTPAKTEKSQATRKRRVLYNKEDYIPTEREGRRRVRRRLTWPLCDEGTVLPNMIMRAAIEDASDLVQQRRKAPHTHLDTWKVAKVGSLPYTFMDPLIPYKTSTPLACVAAPEAPESLWEGSVKARRRLSYEHTESVHSCKDTGSTERESILDASRKRKLDEGTDXEASVGCHTENGPVQDGVCECNEDTAKEKGPRVEGDEPSSEILPKKGLHESENQISLHNDSLNAALDNIDEDIPNEEPTRDEGLLNSTRTRKIANCLHKLFLDQKSKEGTNTLSLNQVLEGAKRRTAATLFYETLILKSRELVQVNQEQPYADIILSATPQLEAEVQRCGN

SEQ ID NO: 96196 - protein, 83 aa, Setaria italica
  Transcript Sequence Number=SeqID_30222
NNIQVMCATMQMWKNHQSDLRNNKMQFERFIYAARHVYLFCQIRFPQILSTTMLLSSNQARFSPPDARSLTIHGLDSALCYLY

SEQ ID NO: 96197 - protein, 235 aa, Setaria italica
  Transcript Sequence Number=SeqID_30223
  Gene Ontology: Mol. function=DNA binding
  Homolog annotation: Hit_ID=B6TDT9; Match level="QueryCoverage=100%, HitCoverage=86%, E-value=2e-84, Identity=68%"; Hit description =Transcription factor GT-3b
EADAARRSAKTMWEAVAARLRERGYRRTADQCKCKWKNLVNRYKGKETSDPENGRQCPFFEELHAVFTERARNMQRQLLESESGASVKRKLKRPSGDRSSGESGDDDDGGEESEDEKPIHSRKRKADDKKQQSQRMLEKSRTGVSNIHELLQDFLAQQQRIDIQWQEMMEKRANERVVFEQEWRQSMQKLEHERLMLEHSWIQREEQRRMREEARADKRDALLTTLLNKLLQEDL

SEQ ID NO: 96198 - protein, 75 aa, Setaria italica
  Transcript Sequence Number=SeqID_30224
  Subcellular localization annotation: CTP_CleavageSite=59; ConfidenceScore=5.12e-01
MGRWWSPASAAVEPRSVQLLLLGVALVAASFYAGTLFGSSASPALILPPSRPRSPDSSRSKDAGAFTNRVSLTYR

SEQ ID NO: 96199 - protein, 393 aa, Setaria italica
  misc_feature (31)..(31): Xaa can be any naturally occurring amino acid
  Transcript Sequence Number=SeqID_30225
  Gene Ontology: Mol. function=aspartic-type endopeptidase activity; Cellular component=chromatin; Biological process=DNA integration
  Homolog annotation: Hit_ID=Q2QW16; Match level="QueryCoverage=96%, HitCoverage=21%, E-value=1e-153, Identity=64%"; Hit description =Retrotransposon protein, putative, unclassified
  Pfam annotation: Domain name=rve; Domain location=200-361; Score =188.2; E_value=2.4e-53; Accession=PF00665.18; Description=Integrase core domain
VLKGFTFSLFVCWYLDSGATHHMTGRRELFXRLNTDVRGTVRFGDASKVDIKGIGSIAFEGRTGEHRVLQGVYYIPALKNSIISLGQLDETGSKVEIYHGVLRIWEHTGRLIAKVKRGANRLYTLQLQAAQPLCLAARRGDVAWQWHERMGHLNFDALRRLGKEEMARGVPVIDHVEQVCDTCVTTKMRRRPFPAATQYRAKQPLELVHGDLCGPVTPATPGGNRYFLLLVDDASRFMWAALIPSKDAAAEAIKRIKLSAEAESGQKIRVLRTDNGGEFTVADFATYCAEQGIKRHFSAPHSPQQNGVVERRNQSVVAMARALLKQRGLPARFWGEAVMTAVHILNRSPTRALKGITPYEAWHGRSPTLGHMKVFGCVAYTRKLSQLRKLDDR

SEQ ID NO: 96200 - protein, 78 aa, Setaria italica
  Transcript Sequence Number=SeqID_30226
TRASGGGGGGGHGGRRLQRRHGHGAWRGTTGGGLAGARRRDLPRRATQWSWGSTKLLCDPVTLNDGQRVKNVQQSKMY

SEQ ID NO: 96201 - protein, 118 aa, Setaria italica
  Transcript Sequence Number=SeqID_30227
  Gene Ontology: Mol. function=transferase activity; Biological process= biosynthetic process
  Homolog annotation: Hit_ID=B6T775; Match level="QueryCoverage=98%, HitCoverage=27%, E-value=3e-50, Identity=83%"; Hit description =Glycosyl transferase, group 1
RAFLQEFSGADDVVLYLLISAYHSDTNFIGQIRRFVKESSINEPVEGWAEIRVIDVHVPQSALPSLYKAADAFVLPTRGEGWGRPVVEAMAMALPVIVTNWSGPTEYLTEEKWVPILL

SEQ ID NO: 96202 - protein, 60 aa, Setaria italica
  Transcript Sequence Number=SeqID_30228
VMRPGQQQAATSWKSSSVLFIYRKIFCNSSVALLLYNISWSSDSQTPQERILIQIKIVAN

SEQ ID NO: 96203 - protein, 236 aa, Setaria italica
  Transcript Sequence Number=SeqID_30229
  Gene Ontology: Mol. function=hydrolase activity, acting on glycosyl bonds; Cellular component=vacuole; Biological process=cell wall organization and biogenesis
  Homolog annotation: Hit_ID=B6U0W6; Match level="QueryCoverage=100%, HitCoverage=49%, E-value=1e-125, Identity=92%"; Hit description =Polygalacturonase
  Pfam annotation: Domain name=Glyco_hydro_28; Domain location=13-234; Score=-110.2; E_value=0.0013; Accession=PF00295.9; Description =Glycosyl hydrolases family 28
TGSFGLISHLTLSLDKDAVIIGSLDSSDWPVVDPLPSYGRGRELPGKRHQSLIFGSHLTDVIITGANGTIDGQGATWWGWFHNHTLNYTRPHLVELMYSTNVVISNLTFKNSPFWNIHPVYCSQVLVQHVTILAPLNSPNTDGIDPDSSTNVCINHCYVRNGDDVIVIKSGWDEYGISLAQPSSNISISNITGETRGGAGIAFGSEMSGGISEVRAEGLRIVNSLHGIRIKTAPGR

SEQ ID NO: 96204 - protein, 477 aa, Setaria italica
  misc_feature (468)..(468): Xaa can be any naturally occurring amino acid
  Transcript Sequence Number=SeqID_30230
  Gene Ontology: Mol. function=hydrolase activity, acting on glycosyl bonds; Cellular component=vacuole; Biological process=cell wall organization and biogenesis
  Homolog annotation: Hit_ID=B6U0W6; Match level="QueryCoverage=100%, HitCoverage=100%, E-value=0.0, Identity=88%"; Hit description =Polygalacturonase
  Pfam annotation: Domain name=Glyco_hydro_28; Domain location=75-429; Score=48.8; E_value=1.6e-11; Accession=PF00295.9; Description =Glycosyl hydrolases family 28
MRRSASLFQVLLVFTTVVETQWSTVSGIYCKEMSPNVYRPHSVTITEFGAVGDGVTLNTKAFQNAIFYLNSFADKGGAQLFVPAGKWLTGSFGLISHLTLSLDKDAVIIGSLDSSDWPVVDPLPSYGRGRELPGKRHQSLIFGSHLTDVIITGANGTIDGQGATWWGWFHNHTLNYTRPHLVELMYSTNVVISNLTFKNSPFWNIHPVYCSQVLVQHVTILAPLNSPNTDGIDPDSSTNVCINHCYVRNGDDVIVIKSGWDEYGISLAQPSSNISISNITGETRGGAGIAFGSEMSGGISEVRAEGLRIVNSLHGIRIKTAPGRGGYVKNVYIADVSMENVSMAIRITGNYGEHPDDKYDRNALPMISNITIKDVVGINIGVAGILEGIQGDNFSSICLSNVSLSVQSLHPWNCSLIEGYSNSVIPESCEQLRSNCRQTPVCYDGSTSSAMRVQAPRHKSSTSQFLSXFSEVGFILV

SEQ ID NO: 96205 - protein, 139 aa, Setaria italica
  misc_feature (133)..(133): Xaa can be any naturally occurring amino acid
  Transcript Sequence Number=SeqID_30231
  Gene Ontology: Cellular component=extracellular region; Biological process=plant-type cell wall organization and biogenesis
  Homolog annotation: Hit_ID=Q6QFA5; Match level="QueryCoverage=85%, HitCoverage=48%, E-value=7e-47, Identity=76%"; Hit description =Expansin EXPA8
  Pfam annotation: Domain name=DPBB_1; Domain location=58-139; Score =127.3; E_value=4.9e-35; Accession=PF03330.10; Description=Rare lipoprotein A (RlpA)-like double
MESLGLLVLALAAVLKLAGADSWNSGRATFYGGMDASGTMGGACGYGNLYSTGYGTNTAALSTALFNNGRSCGACFEIRCSGSGSCLSGSALVTATNFCPPNYALPNNDGGWCNPPQSHFDLAEPVFTKIAPXSAGVVP

SEQ ID NO: 96206 - protein, 102 aa, Setaria italica
  Transcript Sequence Number=SeqID_30232
  Pfam annotation: Domain name=DUF588; Domain location=3-84; Score= -13.6; E_value=0.0019; Accession=PF04535.4; Description=Domain of unknown function (DUF588)
GLLAFVYTTLQLLRHGVRLSGGQDLQPKTGLIVDFAGDQVTAYLMMSALSAAIPITNRMREGADNVFTDSSAASISMAFFAFVCLALSALISGFKLAKQTYI

SEQ ID NO: 96207 - protein, 57 aa, Setaria italica
  Transcript Sequence Number=SeqID_30233
LLPAPLSALLGLCSLWSEIFSRVWFIEDHSSQPPIETGVLPLLSSRASAYNSDLSST

SEQ ID NO: 96208 - protein, 181 aa, Setaria italica
  Transcript Sequence Number=SeqID_30234
  Gene Ontology: Mol. function=sequence-specific DNA binding; Cellular component=nucleus; Biological process=regulation of transcription, DNA-dependent
  Homolog annotation: Hit_ID=Q0J6N4; Match level="QueryCoverage=100%, HitCoverage=47%, E-value=4e-91, Identity=92%"; Hit description =Homeobox protein knotted-1-like 13
  Pfam annotation: Domain name=ELK; Domain location=161-181; Score =19.1; E_value=0.018; Accession=PF03789.5; Description=ELK domain
  Pfam annotation: Domain name=KNOX1; Domain location=1-39; Score=52.0; E_value=2.3e-12; Accession=PF03790.5; Description=KNOX1 domain
  Pfam annotation: Domain name=KNOX2; Domain location=48-104; Score =94.8; E_value=2.9e-25; Accession=PF03791.5; Description=KNOX2 domain
  Pfam module annotation: Pfam domain module=ELK::KNOX1::KNOX2; Domain location=161-181::1-39::48-104
VLAHPLYEQLLSAHVACLRIATPVDQLPRIDAQLAQSQGVVVKYSGLATAAAGDDGRELDQFMTHYVLLLCSFKEQLQQHVRVHAMEAVMACWELEQNLQSLTGASPGEGTGATMSDGEDDQADSEGNIYDPGLDSPDTMGFGPLVPTESERSLMERVRQELKHELKQGYKEKLIDIREEI

SEQ ID NO: 96209 - protein, 86 aa, Setaria italica
  Transcript Sequence Number=SeqID_30235
  Subcellular localization annotation: CTP_CleavageSite=88; ConfidenceScore=5.08e-01
ERRSTGAGIEFHRPTHLSVTPFPFTSTYIALHNSPGLLSLVRSTVLLIIGVVQGTQQLSSSSSSFPPSLSTKPRRRSRVQPEKERV

SEQ ID NO: 96210 - protein, 118 aa, Setaria italica
  Transcript Sequence Number=SeqID_30236
  Gene Ontology: Mol. function=ATP-dependent helicase activity
  Homolog annotation: Hit_ID=B6TU64; Match level="QueryCoverage=100%, HitCoverage=22%, E-value=3e-44, Identity=74%"; Hit description=ATP -dependent RNA helicase
KAQHLSSSLKLENCTVTDGSHGNSFTICSSVGLMNLHIKDRENLVMTDIEGFDIVLVVDLPPSVDEYSGILTGVARQTIGGEVHSVFCNTDAPVAKPLAELLANCSQVVPEFLKKLES

SEQ ID NO: 96211 - protein, 110 aa, Setaria italica
  Transcript Sequence Number=SeqID_30237
  Subcellular localization annotation: CTP_CleavageSite=19; ConfidenceScore=5.22e-01
SSPTPNCNLDASLLPNPSRGHTRRPPRHRPRKGGPIPPPDSFFTRKKELERGGQAGMEEGGGAAAEEARAVEEFRQALAARDLLPPKFDDEYTMRRFLKARGFDIDKTID

SEQ ID NO: 96212 - protein, 105 aa, Setaria italica
  Transcript Sequence Number=SeqID_30238
  Gene Ontology: Mol. function=transferase activity, transferring glycosyl groups; Cellular component=integral to membrane
  Homolog annotation: Hit_ID=B6SS28; Match level="QueryCoverage=100%, HitCoverage=17%, E-value=4e-32, Identity=60%"; Hit description =Xyloglucan galactosyltransferase KATAMARI 1
VPFYAGFDIVQHLWGVNSTAKEKDALSLDLVEWLTRRPEWRAMGGRDHFFLSGRTAYDHQRQPESDSEWGSKLLHLPAVQNMTVLFVEKLPWTDFDFAIPYPTYF

SEQ ID NO: 96213 - protein, 270 aa, Setaria italica
  misc_feature (12)..(12): Xaa can be any naturally occurring amino acid
  Transcript Sequence Number=SeqID_30239
MLSSEHPSGPSXCSSKSAGLGVSADPATSAAGEPASQDPRDLVQPYPKFSIRDYVFASRSKGVKRSWPFHPHSLQLCLKRGVKDPLPPFEPPDLIRSQPLSTFTDVEQSAACSEAIASVSLVKTRDAGSSNEDTSDINFQSCQPVDESFGPSPYTSPEDGKSGIDQVGSTNGSDHTDEAVPIDLQDNSSTKASRTEVAVPSWRLRNLGSSCEPSEKKCKFVVKLGTPTDIRRTEDIASNSSSVSDPMASKTCPVCKVFASTSNTTLNAHI

SEQ ID NO: 96214 - protein, 81 aa, Setaria italica
  Transcript Sequence Number=SeqID_30240
DFFYPFSLLLRGCFKRGIENSKSNKNIASRKCLNKSLTCNSDPLLPPLPCLRLLKSGEDGPSIGQGRTHVHLYFFLQKINK

SEQ ID NO: 96215 - protein, 37 aa, Setaria italica
  Transcript Sequence Number=SeqID_30241
APTSYILKEKYIYILKEKIYIRVKNKKKEKEKLQNRL

SEQ ID NO: 96216 - protein, 58 aa, Setaria italica
  Transcript Sequence Number=SeqID_30242
  Gene Ontology: Mol. function=DNA binding
PAAVEQKPQLNSPAMTIAFHQNDQSLAANDFCKDGYWDEIARFMEVNDPTVFYDCRYA

SEQ ID NO: 96217 - protein, 75 aa, Setaria italica
  Transcript Sequence Number=SeqID_30243
STEGVCFEHACTKCARNLPRSPARTAISASDQLDSSWMICTSDEYVPVISSSEPSARIAAMAAASAARAGRPNTL

SEQ ID NO: 96218 - protein, 213 aa, Setaria italica
  Transcript Sequence Number=SeqID_30244
  Gene Ontology: Mol. function=protein binding; Cellular component =intracellular; Biological process=reproduction
  Homolog annotation: Hit_ID=B9S411; Match level="QueryCoverage=85%, HitCoverage=52%, E-value=2e-53, Identity=58%"; Hit description=WD -repeat protein, putative
  Pfam annotation: Domain name=WD40; Domain location=112-151; Score =48.3; E_value=2.9e-11; Accession=PF00400.24; Description=WD domain, G-beta repeat
  Pfam annotation: Domain name=WD40; Domain location=14-52; Score=29.1; E_value=1.8e-05; Accession=PF00400.24; Description=WD domain, G-beta repeat
  Pfam annotation: Domain name=WD40; Domain location=155-193; Score =44.7; E_value=3.6e-10; Accession=PF00400.24; Description=WD domain, G-beta repeat
  Pfam annotation: Domain name=WD40; Domain location=56-94; Score=46.7; E_value=8.9e-11; Accession=PF00400.24; Description=WD domain, G-beta repeat
  Pfam module annotation: Pfam domain module=WD40::WD40::WD40::WD40; Domain location=112-151::14-52::155-193::56-94
  Subcellular localization annotation: CTP_CleavageSite=18; ConfidenceScore=5.51e-01
MSQQPAPPPPYRPYRQVRAATPHSRAVSCVRFSPCGRLLATASLDGTVALLSPSSLAVIAVLRGHTDGVSDLSWSTESYYLCTASDDRTLRVWDIRSVLAGGAQGAADPGADRCVRVLKGHTNFVFSANFNPQTSSQIASGGFDCTVRIWDVKSGRCNRAIDAHSEPVTSVHFIRDGSIIVSGSHDGSCKIWDAKTGACLKTVIRRLSKSRPF

SEQ ID NO: 96219 - protein, 123 aa, Setaria italica
  Transcript Sequence Number=SeqID_30245
  Subcellular localization annotation: CTP_CleavageSite=56; ConfidenceScore=5.22e-01
TLGSVGVHVVPCAANATTTTERVTSRLSRLSLVHVHVPAFQCTDRGPPKPLTSGLRPAEKGLVYKQRNYSPAPFQIPALYTGLKQILTSSSNHVRNLFNHRLTNLLKVSASIFKTRVRVIQTR

SEQ ID NO: 96220 - protein, 119 aa, Setaria italica
  Transcript Sequence Number=SeqID_30246
  Gene Ontology: Mol. function=nucleic acid binding; Cellular component= nucleus; Biological process=DNA replication
  Homolog annotation: Hit_ID=B3VTC8; Match level="QueryCoverage=99%, HitCoverage=12%, E-value=2e-29, Identity=53%"; Hit description =Replication protein A1-like protein
QLSLNDHTQNQRFVVTATSDASGPSGNTYGNSILHSTPMHMDRSHIARNDAPLCITPIDALNPYQARWKIKARVTAKADLKRFTNSKGAGKVFSFDLLDAQGGEVRAICFNLQADQYLT

SEQ ID NO: 96221 - protein, 406 aa, Setaria italica
  Transcript Sequence Number=SeqID_30247
  Homolog annotation: Hit_ID=B6TYD4; Match level="QueryCoverage=99%, HitCoverage=98%, E-value=1e-162, Identity=73%"; Hit description=F -box domain containing protein
  Pfam annotation: Domain name=F-box; Domain location=25-73; Score =23.0; E_value=0.0012; Accession=PF00646.25; Description=F-box domain
LAGSRRWRCDLGGDDRWLSGAAGDDHFDRLPDALLLVIFNRIGDVKALGRCSIVSRRFHELIPLVDSVLVRVDCVIPDEPPSSSSPSAPSSPTASVRARGVFSQIARIVLGGIVKPIQALGQILSPANSASGFSASSASSSSSFSPSSTSYSPLPPGDVSHHSPSEVLRSFKELRHLRIELPSGELGTDDGVMLKWKADFGSTLGSCVILGASSASPSSAGSDGTSTAPSVDSGRSEPDECDDSGSIPESFYTNGGLRLRVVWTISSLIAAAGRHYLLQPIVADHTTLESLDLTDADGQGVLTMDKCQLQELRVRPVSASAASHRTLMPELSMWLWYAPCIELPGGLVLNGATLVAIKPSEEATKDMVGNGASVATWVLDAFEEPYRTAARMLLKRRTYTLEMNSF

SEQ ID NO: 96222 - protein, 148 aa, Setaria italica
  Transcript Sequence Number=SeqID_30248
  Subcellular localization annotation: CTP_CleavageSite=17; ConfidenceScore=5.13e-01
RPPRGPPATCSSRPYPACSPAAQAPPTSRLLPIVPSICGLGRGVDAGGACAGSIQVEDGRWRARGSQGGRASRYTGNLGEAGGDFGVIFAISLGNLVIERTKIGREQRGAGIFGSVSSDLLERAGFWGSLGGAVPLATRSPAKCRKGA

SEQ ID NO: 96223 - protein, 77 aa, Setaria italica
  Transcript Sequence Number=SeqID_30249
  Subcellular localization annotation: CTP_CleavageSite=22; ConfidenceScore=5.30e-01
MPPKRKSPAAAAPAAGSPRKTRSMAAAGKRGAAASPAKAVTAKKKEEEAGVAEPKGRKRAKKDEAVTAVAEPKGRKR

SEQ ID NO: 96224 - protein, 82 aa, Setaria italica
  Transcript Sequence Number=SeqID_30250
  Subcellular localization annotation: CTP_CleavageSite=51; ConfidenceScore=5.66e-01
GGLDAQIASASPRLRLASAAGNGVPRLSVTSARPTARGSRRNARPRALSVRCEQGAKCRYTIAMLSDPSAALSVVFDKDGVL

SEQ ID NO: 96225 - protein, 117 aa, Setaria italica
  Transcript Sequence Number=SeqID_30251
  Gene Ontology: Mol. function=phosphoprotein phosphatase activity; Cellular component=cytoplasm; Biological process=negative regulation of tyrosine phosphorylation of Stat3 protein
  Homolog annotation: Hit_ID=A3C4N5; Match level="QueryCoverage=83%, HitCoverage=31%, E-value=3e-44, Identity=87%"; Hit description =Serine/threonine-protein phosphatase PP2A-4 catalytic subunit
MEDSAGSRGGGGCGGLDAQIEQLMECRPLPETEVRALCEKAKEILMDESNVQPVKSPVTICGDIHGQFHDLVELFRIGGKCPDTNYLFMGDYVDRGYYSVETVTVRPSLIVAFVFLP

SEQ ID NO: 96226 - protein, 67 aa, Setaria italica
  Transcript Sequence Number=SeqID_30252
VLITEVVSTPIQNETKGRTQATYAKTEAPSLLRTNGGANLPPDSYVSLGGRLIAPLAATNGDQLSRY

SEQ ID NO: 96227 - protein, 124 aa, Setaria italica
  misc_feature (62)..(62): Xaa can be any naturally occurring amino acid
  Transcript Sequence Number=SeqID_30253
  Gene Ontology: Mol. function=phosphogluconate dehydrogenase (decarboxylating) activity; Cellular component=chloroplast; Biological process=pentose-phosphate shunt
  Homolog annotation: Hit_ID=B9SF02; Match level="QueryCoverage=67%, HitCoverage=29%, E-value=9e-25, Identity=69%"; Hit description=3 -hydroxyisobutyrate dehydrogenase, putative
CLFTFVVCKLTDHNYVSWCSMMNSLSEGLSLADKSGLSPQALLDVLGLLPITPNWFKLKGPXMLQGSYNPAFPLKHQQKDMRLALALGDENAVSMPVSAAANEVRHTSLSTCATPHKQGLSEGT

SEQ ID NO: 96228 - protein, 125 aa, Setaria italica
  Transcript Sequence Number=SeqID_30254
  Homolog annotation: Hit_ID=B9HS51; Match level="QueryCoverage=73%, HitCoverage=62%, E-value=3e-19, Identity=52%"; Hit description =Stress-enhanced protein 1
  Subcellular localization annotation: CTP_CleavageSite=50; ConfidenceScore=5.61e-01
MAHPLLSSASPRLRLASAAGNGVPRLSVTSARPTARGSRRNARPRALSVRCEQGAKGGGGGGLDVWLSRGAMLGFVGVVAVELTTGKGVLQNVGLTAPLPTVALGLTGVVGIFTAFVIFQSGSQD

SEQ ID NO: 96229 - protein, 180 aa, Setaria italica
  Transcript Sequence Number=SeqID_30255
  Gene Ontology: Mol. function=phosphoprotein phosphatase activity; Cellular component=cytoplasm; Biological process=negative regulation of mitotic cell cycle
  Homolog annotation: Hit_ID=A3C4N5; Match level="QueryCoverage=84%, HitCoverage=48%, E-value=3e-87, Identity=99%"; Hit description =Serine/threonine-protein phosphatase PP2A-4 catalytic subunit
FIHVCEWSSGSWRLVLTDTGEKVVAPCILVESEIFCLHGGLSPSIENLDSVRSLDRVQEVPHEGPMCDLLWSDPDDRCGWGISPRGAGYTFGQDISEQFNHTNNLKLVARAHQLVMEGYNWAHEQKVVTIFSAPNYCYRCGNMASILEVDDCRNHTFIQFEPAPRRGEPDVTRRTPDYFL

SEQ ID NO: 96230 - protein, 294 aa, Setaria italica
  Transcript Sequence Number=SeqID_30256
  Gene Ontology: Mol. function=phosphoprotein phosphatase activity; Cellular component=cytoplasm; Biological process=negative regulation of tyrosine phosphorylation of Stat3 protein
  Homolog annotation: Hit_ID=A3C4N5; Match level="QueryCoverage=96%, HitCoverage=90%, E-value=1e-167, Identity=98%"; Hit description =Serine/threonine-protein phosphatase PP2A-4 catalytic subunit
  Pfam annotation: Domain name=Metallophos; Domain location=35-230; Score=141.7; E_value=2.3e-39; Accession=PF00149.20; Description =Calcineurin-like phosphoesterase
GKLDRPEYPETEVRALCEKAKEILMDESNVQPVKSPVTICGDIHGQFHDLVELFRIGGKCPDTNYLFMGDYVDRGYYSVETVTLLVALKVRYPQRITILRGNHESRQITQVYGFYDECLRKYGSANVWKIFTDLFDYFPLTALVESEIFCLHGGLSPSIENLDSVRSLDRVQEVPHEGPMCDLLWSDPDDRCGWGISPRGAGYTFGQDISEQFNHTNNLKLVARAHQLVMEGYNWAHEQKVVTIFSAPNYCYRCGNMASILEVDDCRNHTFIQFEPAPRRGEPDVTRRTPDYFL

SEQ ID NO: 96231 - protein, 294 aa, Setaria italica
  Transcript Sequence Number=SeqID_30257
  Gene Ontology: Mol. function=phosphogluconate dehydrogenase (decarboxylating) activity; Cellular component=chloroplast; Biological process=valine metabolic process
  Homolog annotation: Hit_ID=B1Q3F6; Match level="QueryCoverage=96%, HitCoverage=98%, E-value=1e-121, Identity=77%"; Hit description =Succinic semialdehyde reductase isofom1
  Pfam annotation: Domain name=CRM1_C; Domain location=83-247; Score= -256.4; E_value=0.085; Accession=PF08767.3; Description=CRM1 C terminal
  Pfam annotation: Domain name=F420_oxidored; Domain location=2-171; Score=-52.0; E_value=0.025; Accession=PF03807.9; Description=NADP oxidoreductase coenzyme F420-dependent
  Pfam annotation: Domain name=NAD_binding_2; Domain location=1-162; Score=206.6; E_value=6.5e-59; Accession=PF03446.7; Description=NAD binding domain of 6-phosphogluconate dehydrogenase
  Pfam module annotation: Pfam domain module=CRM1_C::F420_oxidored::NAD_ binding_2; Domain location=83-247::2-171::1-162
MEVGFLGLGIMGKAMATNLLRHGYRVTVWNRTLAKCQELVALGATVGETPAAVVAKCRYTIAMLSDPSAALSVVFDKDGVLEQIGDGKGYIDMSTVDAATSSKISEAVKQKGGAFVEAPVSGSKKPAEDGQLVILAAGDKTLYDEIVPAFDVLGKKSFFLGEIGNGAKMKLVVNMVMGSMMNSLSEGLSLADKSGLSPQALLDVLDLGAIANPMFKLKGPAMLQGSYNPAFPLKHQQKDMRLALALGDENAVSMPVSAAANEAFKKARSLGLGDLDFSAVYEVVKGGAGGSGQA

SEQ ID NO: 96232 - protein, 90 aa, Setaria italica
  misc_feature (4)..(4): Xaa can be any naturally occurring amino acid
  Transcript Sequence Number=SeqID_30258
FFFXFFFFVSHAYALIVLIECSSNRITTSLLCDIVSSTNYFRALTKIPSYPCTCQPLQLRLWGNSTRLTDSLPIDRTVSTTDSSFRTNVN

SEQ ID NO: 96233 - protein, 279 aa, Setaria italica
  misc_feature (38)..(38): Xaa can be any naturally occurring amino acid
  Transcript Sequence Number=SeqID_30259
  Gene Ontology: Mol. function=protein serine/threonine kinase activity; Biological process=protein amino acid phosphorylation
  Homolog annotation: Hit_ID=B6SYF0; Match level="QueryCoverage=95%, HitCoverage=71%, E-value=1e-106, Identity=69%"; Hit description =Serine/threonine-protein kinase receptor
  Pfam annotation: Domain name=Pkinase; Domain location=47-275; Score =111.8; E_value=2.2e-30; Accession=PF00069.17; Description=Protein kinase domain
  Pfam annotation: Domain name=Pkinase_Tyr; Domain location=47-279; Score=64.3; E_value=5.3e-18; Accession=PF07714.9; Description =Protein tyrosine kinase
  Pfam module annotation: Pfam domain module=Pkinase::Pkinase_Tyr; Domain location=47-275::47-279
MSCFSIFCKKRRTTRQPSSNHNEDVPGGPSIKKYTYKXELVRATGNFNKSNKIGEGGFGSVYKGQLKNGTIIAVKVLSSESRQGVREFQNELVAISDISHDNLVKLYGYCAEGDQRILVYNHLENNSLSQTLLGSNHSNIQFNWKTRVNICLGIARGLAYLHHGVNPHIVHRDIKASNILLDRDLTPKISDFGLAKLLPPNATHVSTRVAGTLYYLAPLYFIRGQVTRKSDVYSFGVLLLEIVSGRSNSDTRLAYEDQILLEKVRGNARLHLTYLSIVA

SEQ ID NO: 96234 - protein, 93 aa, Setaria italica
  Transcript Sequence Number=SeqID_30260
  Subcellular localization annotation: CTP_CleavageSite=23; ConfidenceScore=5.02e-01
PSSLRMRGSLGSVLPHGRATSTEASYPWRVQGVFFSMGTSTDERLCSRVHGGDPSFPWAHHGGECSSPCLPRLEIDCQTVRCVPDLHAVAANK

SEQ ID NO: 96235 - protein, 85 aa, Setaria italica
  Transcript Sequence Number=SeqID_30261
  Gene Ontology: Mol. function=binding
  Homolog annotation: Hit_ID=Q2RAU4; Match level="QueryCoverage=95%, HitCoverage=4%, E-value=3e-30, Identity=71%"; Hit description=HEAT repeat family protein, expressed
IFLKEQSEVRFSSIRWATALYDTQHCPSRYICMTGASDVKLDIREMALAGLNLLNDGRQPSAGSVDFNYPDVTEMINYICHQRPQ

SEQ ID NO: 96236 - protein, 371 aa, Setaria italica
  Transcript Sequence Number=SeqID_30262
  Gene Ontology: Mol. function=binding; Cellular component=cytoplasmic membrane-bounded vesicle; Biological process=ER-associated protein catabolic process
  Homolog annotation: Hit_ID=Q2RAU4; Match level="QueryCoverage=99%, HitCoverage=20%, E-value=1e-171, Identity=78%"; Hit description=HEAT repeat family protein, expressed
AMNFAPEIVYSLYLSAASDSQESVSKKGEELLKRKASAVNLEDPNLVKKLFTLFNGTVGAENIAAELKVSPAHASLRMRLMSVFCRSIAAANAFPHTLQCIFGCIYGSGTTSRLKQLGMEFTVWVFKHAVTDQLKLIGPVILSGILRSLDGSSTTETDSTGRDTKIFAYQAIGLLASRMPNLFSDKTDMAIRLFTALRLEDQSLRLTIQEAATSLATAYKGASMRVLKDLEVLLLENCEAEQSEVRFSAIRWATALYDTQHCPSRYICMTGASDVKLDIREMALAGLNLLNDGRQPSAGSVDFNYPDVTEMINYICHQRPQLLDSDEQRNGKLLFPTKTFLSMIKFLMKCFEASDSPDLVQEDSSHSPVAN

SEQ ID NO: 96237 - protein, 77 aa, Setaria italica
  Transcript Sequence Number=SeqID_30263
SGCPKIIQQSISSRMVLTQLLKASRSAHALLLPLNYILMGVDTSKVPQFCGYHQQIIDSNMCSSKCHVSTLSIVLFF

SEQ ID NO: 96238 - protein, 140 aa, Setaria italica
  Transcript Sequence Number=SeqID_30264
  Gene Ontology: Mol. function=extracellular-glutamate-gated ion channel activity; Cellular component=integral to membrane; Biological process=G-protein coupled receptor protein signaling pathway
  Homolog annotation: Hit_ID=Q69L09; Match level="QueryCoverage=97%, HitCoverage=14%, E-value=2e-62, Identity=81%"; Hit description =Putative Avr9/Cf-9 rapidly elicited protein 141
  Subcellular localization annotation: CTP_CleavageSite=37; ConfidenceScore=5.57e-01
FATSFVSDLGNKTQVPVISFTATSPSISSGSLPYFVRATLNDSAQVNTIASLIKAYGWRQVVPIYEDTEYGKGIIPYLIDALQEIDVRIPYRSVIPLSASSEQITLELYKLMTMQTRVFLVHMSSALASKLFTKAKEVGM

SEQ ID NO: 96239 - protein, 142 aa, Setaria italica
  Transcript Sequence Number=SeqID_30265
  Gene Ontology: Mol. function=oxidoreductase activity; Cellular component=mitochondrial matrix; Biological process=cell redox homeostasis
  Homolog annotation: Hit_ID=Q9SDD6; Match level="QueryCoverage=79%, HitCoverage=57%, E-value=3e-58, Identity=94%"; Hit description =Peroxiredoxin-2F, mitochondrial
  Pfam annotation: Domain name=AhpC-TSA; Domain location=33-142; Score=- 19.5; E_value=0.033; Accession=PF00578.13; Description=AhpCTSA family
  Pfam annotation: Domain name=Redoxin; Domain location=28-142; Score =13.9; E_value=0.00044; Accession=PF08534.2; Description=Redoxin
  Pfam module annotation: Pfam domain module=AhpC-TSA::Redoxin; Domain location=33-142::28-142
MASALARRARGSAAAAAALWGAARGFASVGSDIVSAAPGVSLQKARSWDEGVATKFSTTPLKDIFYGKKVVIFGLPGAYTGVCSQAHVPSYKNNIDKLKAKGIDSVICVAVNDPYVLNGWAEKLQANDAIEFYGDFDGSFHK

SEQ ID NO: 96240 - protein, 203 aa, Setaria italica
  misc_feature (38)..(38): Xaa can be any naturally occurring amino acid
  Transcript Sequence Number=SeqID_30266
  Gene Ontology: Mol. function=oxidoreductase activity; Cellular component=mitochondrial matrix; Biological process=cell redox homeostasis
  Homolog annotation: Hit_ID=B4FSM5; Match level="QueryCoverage=99%, HitCoverage=94%, E-value=2e-81, Identity=79%"; Hit description =Peroxiredoxin-5
  Pfam annotation: Domain name=AhpC-TSA; Domain location=53-182; Score =12.3; E_value=8.3e-05; Accession=PF00578.13; Description=AhpCTSA family
  Pfam annotation: Domain name=Redoxin; Domain location=55-203; Score =144.5; E_value=3.4e-40; Accession=PF08534.2; Description=Redoxin
  Pfam module annotation: Pfam domain module=AhpC-TSA::Redoxin; Domain location=53-182::55-203
  Subcellular localization annotation: CTP_CleavageSite=43; ConfidenceScore=5.25e-01
RNSMASALWGGGKGSSLRWGPDIVSAAPGVSLQKARSXTRNVSNELRTKRRYLGNEGTYVEPKFSTTPLKDIFYGKKVVIFGLPGAYTGVCSQAHVPSYKNNIDKLKAKGIDSVICVAVNDPYVLNGWAEKLQANDAIEFYGDFDGSFHKSLDLEIDLSAALLGRRSHRWSAFVDNGKIKSFNVEEAPSDFKVSSAEVILDQI

SEQ ID NO: 96241 - protein, 87 aa, Setaria italica
  Transcript Sequence Number=SeqID_30267
RFFPHYQHATAHTCSGEGEPPIQSLANPNHFAEFEHRLPRRWPLAPRFVHSEQPESVLAAPRSRLLLIPWIILLKAATFSVLLEGAR

SEQ ID NO: 96242 - protein, 93 aa, Setaria italica
  misc_feature (57)..(57): Xaa can be any naturally occurring amino acid
  misc_feature (77)..(77): Xaa can be any naturally occurring amino acid
  Transcript Sequence Number=SeqID_30268
  Gene Ontology: Cellular component=mitochondrion
  Homolog annotation: Hit_ID=B9REE0; Match level="QueryCoverage=92%, HitCoverage=13%, E-value=1e-13, Identity=42%"; Hit description =Pentatricopeptide repeat-containing protein, putative
RRIGSVADAERVLETMSAIGVSPDVESFGSLAFLYAWRGVPSRVDELDTLLDALGFXRKVFFKNLVSGYLKSKSFEXVSSLILRAVKELRVAD

SEQ ID NO: 96243 - protein, 72 aa, Setaria italica
  Transcript Sequence Number=SeqID_30269
HGRMILGILHCLDVTLVIHSTLGPLLYHFNDNLLSIVHACSHDTATSTIFSVPALDMTPKLLQERGLLSLLG

SEQ ID NO: 96244 - protein, 97 aa, Setaria italica
  Transcript Sequence Number=SeqID_30270
  Subcellular localization annotation: CTP_CleavageSite=55; ConfidenceScore=5.80e-01
AYKAPPPPRASAPPPPPPPPTPSPPPDPSASARRDGTNGGRCVLHAARRRRRSLRQAQIRRPSGGEEERARGRGGEGRSGLGARQAGGSQRRCSEGG

SEQ ID NO: 96245 - protein, 47 aa, Setaria italica
  misc_feature (9)..(9): Xaa can be any naturally occurring amino acid
  Transcript Sequence Number=SeqID_30271
  Gene Ontology: Mol. function=catalytic activity; Cellular component =chloroplast; Biological process=metabolic process
  Homolog annotation: Hit_ID=O24458; Match level="QueryCoverage=91%, HitCoverage=10%, E-value=4e-15, Identity=83%"; Hit description =Pyruvate dehydrogenase E1 beta subunit
NFTWDYLDXPIMCLSSQDVPTPYASTLEDATVVQPAQIVAAVEQICQ

SEQ ID NO: 96246 - protein, 404 aa, Setaria italica
  Transcript Sequence Number=SeqID_30272
  Gene Ontology: Mol. function=catalytic activity; Cellular component =chloroplast; Biological process=metabolic process
  Homolog annotation: Hit_ID=B9S0Z5; Match level="QueryCoverage=80%, HitCoverage=79%, E-value=1e-168, Identity=87%"; Hit description =Pyruvate dehydrogenase, putative
  Pfam annotation: Domain name=Transket_pyr; Domain location=82-260; Score=242.1; E_value=1.3e-69; Accession=PF02779.16; Description =Transketolase, pyrimidine binding dom
  Pfam annotation: Domain name=Transketolase_C; Domain location=273 -395; Score=163.9; E_value=4.8e-46; Accession=PF02780.12; Description= Transketolase, C-terminal domain
  Pfam module annotation: Pfam domain module=Transket_pyr::Transketolase _C; Domain location=82-260::273-395
  Subcellular localization annotation: CTP_CleavageSite=44; ConfidenceScore=5.76e-01
LKFVSFVSFLFTFLSSNFLGPGAVASAKPRSAAPAAARRSVRVAAAAKGGAGSARGRLVARNAVAAKADEAAAEAGSKSGGHELLMFEALREALIEEMNLDPTVCVMGEDVGHYGGSYKVTKGLAEMFGDLRVLDTPIAENSFTGMGVGAAMKGLRPVVEGMNMGFLLLAYNQISNNCGMLHYTSGGQFKIPVVIRGPGGVGRQLGAEHSQRLESYFQSIPGLQMVACSTPYNAKGLMKAAIRSENPVVLFEHVLLYNLKEKIPDEEYICCLEEAEMVRPGEHVTILTYSRMRYHVMQAAKTLVNKGYDPEVIDIRSLKPFDLHTIGNSIKKTHRVLIVEECMRTGGIGASLRSAIIDNFWDYLDAPIMCLSSQDVPTPYAATLEDATVVQPAQIVAAVEQICQ

SEQ ID NO: 96247 - protein, 117 aa, Setaria italica
  Transcript Sequence Number=SeqID_30273
  Gene Ontology: Mol. function=hydrolase activity, hydrolyzing O -glycosyl compounds; Cellular component=cell wall; Biological process= carbohydrate metabolic process
  Homolog annotation: Hit_ID=A1E368; Match level="QueryCoverage=84%, HitCoverage=36%, E-value=4e-23, Identity=50%"; Hit description =Xyloglucan endotransglycosylase
SPISLLSINTIELLGRFLVDDTPIRAYKNDRARGVPFPTWQSMRAEGSLWNAEEWATQGGRVKTDWAQAPFYAYYRNFRVTPCVPSPGVAWCGDEPPESTWFDQRLDAAALQRVQGE

SEQ ID NO: 96248 - protein, 279 aa, Setaria italica
  Transcript Sequence Number=SeqID_30274
  Homolog annotation: Hit_ID=A6MZX6; Match level="QueryCoverage=15%, HitCoverage=100%, E-value=7e-11, Identity=86%"; Hit description =Ccdc49 protein (Fragment)
SSDSDNDEKQRRRQDVSEDDEPRRRRHDDDEPRRKRHDDDEPRRRHDDNEPRRRRQSDDEPRRRRQSDDEPRRRQEDLEPRRRRQDDEEPRGRWHDDHPRYDRLDADDRKRRQHSPPDRHHAYSKYDGPDPRPKRMEDGNKTGNSNSEHHSRAVQGSGEQTRQESEHGRNNGPPFNRRRGGVHHMSEEERLARLRQMQADAEVHEEQRWKRLKKAADDDAKEAATVSANQFKGKNFLEEEKKSIFGTEKGGSATIEESIRRRAFYSQGGRDAEGNAFRR

SEQ ID NO: 96249 - protein, 368 aa, Setaria italica
  Transcript Sequence Number=SeqID_30275
  Gene Ontology: Mol. function=phosphoprotein binding; Cellular component=chloroplast
  Homolog annotation: Hit_ID=Q155V6; Match level="QueryCoverage=74%, HitCoverage=100%, E-value=1e-83, Identity=65%"; Hit description =Myosin heavy chain 2 (Fragment)
LRRLSQERDRSWQSELEALQKQHAADSAALAAAMGEPHRLRVQLAAAARADHRQDVVEALATIDELRVKLKASEEAEAQARAMHEECKQQLEASRATIDSLLTDGSKLMDSFSLVVKELEESRAKAKALEEEIAEASSRAASERCNCSGSEAAELRSELEAAEARYQEEKILSTVETQCAYELMDQIKTESDLRHGKLAAALESAKSEVIFLKASLFDKESELRRALDANQKLQAEARADTSADALKEQLQGALQENGQLKQELRQYESEKGSATARTPEADAAEAAKKGEMETELRRLRVQAEQWRKAAETAMALLTVGKGGNGKVVERSESWEGGKYAGLCEDLEDDAAARKNGNVLRRISGMWKK

SEQ ID NO: 96250 - protein, 160 aa, Setaria italica
  Transcript Sequence Number=SeqID_30276
  Gene Ontology: Mol. function=electron carrier activity; Biological process=oxidation reduction
  Homolog annotation: Hit_ID=Q8VYA9; Match level="QueryCoverage=88%, HitCoverage=28%, E-value=8e-49, Identity=67%"; Hit description =Cytochrome P450 monooxygenase CYP92A1
RAASGAGRVVRLRGYLQMMTLGVISRMVLGMKYIQEEAAAEDGSPPRMTPAEFREMVDELFALNGVFNIGDFVPWLDLQGYVGRMKRASSMFDQFLNHILDEHNQRRRLEGEGFVVRDMVDVLLQLADDPNLEVQLSRDNVKALTQVIRTRYFFLILMIS

SEQ ID NO: 96251 - protein, 73 aa, Setaria italica
  Transcript Sequence Number=SeqID_30277
SGIRRNEFAKRPSRLLSSMNLSCMSYQVAWQNANVSCTVSLYSHCTSDYSVDSQNPGHLHKHRRQQTRGSALP

SEQ ID NO: 96252 - protein, 170 aa, Setaria italica
  Transcript Sequence Number=SeqID_30278
  Gene Ontology: Mol. function=transferase activity, transferring glycosyl groups; Biological process=metabolic process
  Homolog annotation: Hit_ID=Q7XHS0; Match level="QueryCoverage=99%, HitCoverage=34%, E-value=1e-35, Identity=52%"; Hit description =Putative glucosyltransferase-2
PELYKSLAAGATGPYRALLAPSSIGTSLAAGAGVDLTGGFPPVTCLVADGLLPWAIDVAEELRVPAIVFRTASAGSFLAFLSAPKLFELGELPFPAGSDLDEPVSGVPGMESFLRRRDLPGHCRRNDTDDVSPALRALAKLSADASKARALILNTTATLERSALAHIAPR

SEQ ID NO: 96253 - protein, 258 aa, Setaria italica
  Transcript Sequence Number=SeqID_30279
  Gene Ontology: Mol. function=RNA splicing factor activity, transesterification mechanism; Cellular component=spliceosome; Biological process=nuclear mRNA splicing, via spliceosome
  Homolog annotation: Hit_ID=B6TLH1; Match level="QueryCoverage=99%, HitCoverage=84%, E-value=1e-143, Identity=94%"; Hit description =Mitogen-activated protein kinase organizer 1
  Pfam annotation: Domain name=WD40; Domain location=13-51; Score=45.4; E_value=2.2e-10; Accession=PF00400.24; Description=WD domain, G-beta repeat
  Pfam annotation: Domain name=WD40; Domain location=141-177; Score =11.7; E_value=1.6; Accession=PF00400.24; Description=WD domain, G -beta repeat
  Pfam annotation: Domain name=WD40; Domain location=181-217; Score =13.0; E_value=1.2; Accession=PF00400.24; Description=WD domain, G -beta repeat
  Pfam annotation: Domain name=WD40; Domain location=55-93; Score=25.8; E_value=0.00018; Accession=PF00400.24; Description=WD domain, G-beta repeat
  Pfam annotation: Domain name=WD40; Domain location=97-135; Score =35.3; E_value=2.4e-07; Accession=PF00400.24; Description=WD domain, G-beta repeat
  Pfam module annotation: Pfam domain module=WD40::WD40::WD40::WD40::WD4 0; Domain location=13-51::141-177::181-217::55-93::97-135
MSSSGTAAQHLPRTEARSLSGHEGAVLAVRFNRDGNYCLSCGKDRTLRLWNPHTGAHVKTYKSHAREVRDVHSSSDNAKLVSCGADRQIFYWDVASGRVIRKFRGHNSEVNSVKFNEYNAVVVSAGYDRTVRAFDCRSQSSDPIQTIDTFQDSVMSVNLTKTEIIAGSVDGTVRTFDIRMGRETVDNLGHPVNCITLSNDGNCYLANCLDSTVRLLDKSSGELLQEYKGHACKSFKMDCCLTNDDAFVVGGSEDGYVS

SEQ ID NO: 96254 - protein, 68 aa, Setaria italica
  Transcript Sequence Number=SeqID_30280
VFDCLCCLMCCVFCTYALGHSGAFFPAFAFMSQVHTKYCVRLDHMMFSVCTWTKAHRSFWKYPKPFDL

SEQ ID NO: 96255 - protein, 83 aa, Setaria italica
  Transcript Sequence Number=SeqID_30281
PLSQLLQVHTAFLRELEMRYRAGRGGNGPSLSPPAPAPVSAPILPFRPARSNREPASKERQEDGADEDEGMGGMRCDAEERSI

SEQ ID NO: 96256 - protein, 160 aa, Setaria italica
  misc_feature (12)..(12): Xaa can be any naturally occurring amino acid
  misc_feature (125)..(125): Xaa can be any naturally occurring amino acid
  Transcript Sequence Number=SeqID_30282
  Gene Ontology: Mol. function=helicase activity; Cellular component =chloroplast
  Homolog annotation: Hit_ID=B9SMY0; Match level="QueryCoverage=99%, HitCoverage=73%, E-value=2e-26, Identity=31%"; Hit description =Pentatricopeptide repeat-containing protein, putative
  Pfam annotation: Domain name=PPR; Domain location=24-58; Score=34.4; E_value=4.5e-07; Accession=PF01535.12; Description=PPR repeat
  Pfam annotation: Domain name=PPR; Domain location=59-93; Score=50.3; E_value=7.4e-12; Accession=PF01535.12; Description=PPR repeat
  Pfam annotation: Domain name=PPR; Domain location=94-128; Score=33.0; E_value=1.2e-06; Accession=PF01535.12; Description=PPR repeat
  Pfam module annotation: Pfam domain module=PPR::PPR::PPR; Domain location=24-58::59-93::94-128
YGHLDQAIDVLXMMVSEKCFPDIVTYNTLLNAISKRGMVEEALGIFHSIRENGCQVVRITYNTLIDALAKKGEVINAMTLFDEMIGDGISPDDVTYGSLVMGFCKKNMAKEALEFLNQMLALGFXRFKATTFSMMIQALCRECKAEAAAEILRVMVSKNI

SEQ ID NO: 96257 - protein, 153 aa, Setaria italica
  misc_feature (14)..(14): Xaa can be any naturally occurring amino acid
  misc_feature (140)..(140): Xaa can be any naturally occurring amino acid
  Transcript Sequence Number=SeqID_30283
  Gene Ontology: Mol. function=helicase activity; Cellular component =mitochondrion
  Homolog annotation: Hit_ID=B9SMY0; Match level="QueryCoverage=96%, HitCoverage=61%, E-value=8e-18, Identity=31%"; Hit description =Pentatricopeptide repeat-containing protein, putative
  Pfam annotation: Domain name=PPR; Domain location=114-148; Score=1.0; E_value=6.7; Accession=PF01535.12; Description=PPR repeat
  Pfam annotation: Domain name=PPR; Domain location=44-78; Score=36.8; E_value=8.4e-08; Accession=PF01535.12; Description=PPR repeat
  Pfam annotation: Domain name=PPR; Domain location=79-113; Score=18.8; E_value=0.023; Accession=PF01535.12; Description=PPR repeat
  Pfam annotation: Domain name=PPR; Domain location=9-43; Score=43.0; E_ value=1.2e-09; Accession=PF01535.12; Description=PPR repeat
  Pfam module annotation: Pfam domain module=PPR::PPR::PPR::PPR; Domain location=114-148::44-78::79-113::9-43
RNGCQVVRITYNTXIDCLAKKGEVINAMTLFDEMIGAGISPDDVTYGSLVMGFCKKNMAKEALEFLNQMLALGFEVKATTFSMMIQALCRECKAEAAAEILRVMVSKNINHRSAFYLSIVTRVAKSGRVKEAQMLHQELXSARSLKKILNLFK

SEQ ID NO: 96258 - protein, 97 aa, Setaria italica
  Transcript Sequence Number=SeqID_30284
  Gene Ontology: Mol. function=oxidoreductase activity; Cellular component=membrane; Biological process=oxidation reduction
  Homolog annotation: Hit_ID=B6TBV5; Match level="QueryCoverage=80%, HitCoverage=21%, E-value=8e-12, Identity=45%"; Hit description =Leucoanthocyanidin dioxygenase
MAEIFDKMKVEFVDQDECVQVVADNIRGTGEVPERYVRSEIMSDPAIDDAKGYNLPVIDMSRLLNPEFSEEETAKLGSACEHWGFFQVCVLSDYSTF

SEQ ID NO: 96259 - protein, 107 aa, Setaria italica
  Transcript Sequence Number=SeqID_30285
RGTSYWRTLVILVVGRWGEVHSLLKNTQTERLPCFLNEMGQGMPACLSKKKIASVVWVLHLNSAEAYWYRQEIYNSEWYVPDVVVMLAPTKFNLDIYITVLLLFLHT

SEQ ID NO: 96260 - protein, 148 aa, Setaria italica
  Transcript Sequence Number=SeqID_30286
  Subcellular localization annotation: CTP_CleavageSite=37; ConfidenceScore=5.08e-01
HYTHSLLASGVSPPSILSLNFQRAYMIFTILNCRFLACTSKPQHYLDVRPTQQKQFFFRQTGRHALPHFIKKTRQTFSLSIFRRECTSPTGQQRESPASSSSWCLFIAAQHQFKALQNRENTDLSSLACARFLVMEDDSEFPLHYPHL

SEQ ID NO: 96261 - protein, 58 aa, Setaria italica
  Transcript Sequence Number=SeqID_30287
YKLSHLRNSLTYYSLVPSLRHNNSLVNLLDKQPHKPSTSKMRISKSRPQPPEEGGDVR

SEQ ID NO: 96262 - protein, 100 aa, Setaria italica
  Transcript Sequence Number=SeqID_30288
MPAMDGDDLTSQVNWVAWHLTQQLEEAAATEQHRIMVNTHPVSRVSRVPDHLRVHNRDAYTPGLVAIGPLHSKDAERRLRPGNQLKRTYLNSLISRGHPD

SEQ ID NO: 96263 - protein, 86 aa, Setaria italica
  Transcript Sequence Number=SeqID_30289
  Gene Ontology: Mol. function=transferase activity, transferring glycosyl groups; Biological process=metabolic process
  Homolog annotation: Hit_ID=C4MF39; Match level="QueryCoverage=98%, HitCoverage=18%, E-value=3e-21, Identity=58%"; Hit description=UDP -glycosyltransferase UGT709A10
HPFLLTVAKGIADCGRARALVLNTAASLEGPALAHISRHMRDVFAIGPLHAMPSSAAPAAAAGSLWREDDGCVAWLDGHADRSVVY

SEQ ID NO: 96264 - protein, 80 aa, Setaria italica
  Transcript Sequence Number=SeqID_30290
GQDKDKLQNKLNAMRRAFQSWKDMQAQSGLGRDKETGSVAADSSFWDDNEGETSSAKLPPFLDELYMLYGRDTQDKGTLL

SEQ ID NO: 96265 - protein, 106 aa, Setaria italica
  Transcript Sequence Number=SeqID_30291
SSSILSFVQKKDHRSCLLHDHQQLVILQLLLRAGRGSPGGAQARGACDELPAEERQKRGRVDCATDILDPHARGDEKGLGKSICRSTSPSILEFHKMILYCTPSVL

SEQ ID NO: 96266 - protein, 162 aa, Setaria italica
  Transcript Sequence Number=SeqID_30292
  Gene Ontology: Mol. function=ubiquitin-protein ligase activity; Cellular component=ubiquitin ligase complex; Biological process =ubiquitin-dependent protein catabolic process
  Homolog annotation: Hit_ID=C3SA81; Match level="QueryCoverage=93%, HitCoverage=14%, E-value=2e-43, Identity=57%"; Hit description=Beta -catenin repeat family protein
  Pfam annotation: Domain name=Arm; Domain location=19-59; Score=28.0; E_value=3.8e-05; Accession=PF00514.15; Description=Armadillobeta -catenin-like repeat
KKSSNHQVNVCLVHRGVCSPATTFCLLEAGAVEGLLGCLENDNIRVVEAALGALCTLLDERVDVEKSVAALSELNAATHVLGGLRQHRQNVLWQKCFCLVEKLLEHGDDRCVREVTGDRMLPTALVSAFHRGDASTKQAAESILRRLHKMPDYSATYVSMEF

SEQ ID NO: 96267 - protein, 115 aa, Setaria italica
  Transcript Sequence Number=SeqID_30293
  Gene Ontology: Mol. function=oxidoreductase activity
  Homolog annotation: Hit_ID=B6ST46; Match level="QueryCoverage=100%, HitCoverage=23%, E-value=2e-49, Identity=83%"; Hit description =Oxidoreductase
AAVPCSGATGAGQGYIWMSHRKPGSDMWELAMRSKQLWEELAAEVDGQGGGGARERLGWMRTGSLLVGRTSEELATLQERTNALSQAGIHAEFLSASTLHSLEPALSVGKDGGAL

SEQ ID NO: 96268 - protein, 70 aa, Setaria italica
  Transcript Sequence Number=SeqID_30294
  Gene Ontology: Mol. function=oxidoreductase activity; Biological process=oxidation reduction
  Homolog annotation: Hit_ID=Q69W96; Match level="QueryCoverage=87%, HitCoverage=20%, E-value=2e-17, Identity=68%"; Hit description =Putative sex determination protein tasselseed 2
RMHPGVADEQLKRMVETGMSELRGAVLELEDVARAAVYLASDEAKFVTGHNLVIDGGFTAGKRIGVPAAR

SEQ ID NO: 96269 - protein, 55 aa, Setaria italica
  Transcript Sequence Number=SeqID_30295
MGPTTRTQFVYNRRRRRRSGGRRAVEEASDEEEQRQDTSSSSSDDEGDEEEEAEA

SEQ ID NO: 96270 - protein, 82 aa, Setaria italica
  Transcript Sequence Number=SeqID_30296
  Gene Ontology: Mol. function=heat shock protein binding; Biological process=response to stress
  Homolog annotation: Hit_ID=Q1EPG9; Match level="QueryCoverage=75%, HitCoverage=5%, E-value=9e-14, Identity=56%"; Hit description=Heat shock protein DnaJ N-terminal domain-containing protein
NMHQQQQQQASNPAGTQTTFWTLCPSCGMRYQYYRSILKKALRCQNCLKPFVAHDLKEQAIPSGANQRSAGVWKNAGAPQNF

SEQ ID NO: 96271 - protein, 69 aa, Setaria italica
  Transcript Sequence Number=SeqID_30297
ERYPDRVAVAVFASAAMPALGKPMTFVLEEFSQETGPDFYMDCTYGASSNPQYPVETLLLGPEYLAKRL

SEQ ID NO: 96272 - protein, 42 aa, Setaria italica
  Transcript Sequence Number=SeqID_30298
KKAGQRASVAELLEHPFVAERDAAGAQQALAALVAEAEQGDL

SEQ ID NO: 96273 - protein, 179 aa, Setaria italica
  misc_feature (34)..(34): Xaa can be any naturally occurring amino acid
  misc_feature (160)..(160): Xaa can be any naturally occurring amino acid
  Transcript Sequence Number=SeqID_30299
  Gene Ontology: Cellular component=integral to membrane
  Homolog annotation: Hit_ID=Q53LH2; Match level="QueryCoverage=100%, HitCoverage=36%, E-value=3e-58, Identity=60%"; Hit description=Amino acid carrier, putative, expressed
QKGNDDPCHASASPYIAIFGVMQIVFTRLADPVXWTKVWWLSVVAAIMSFSYSTIGVSLGVAEIAANGRLRGSLAGVIGAGARVTLMQKVWRSLQAFGNIAFAYGFSIILLEIQDTIKLPPPSEAKVMKKATAVSVVVTTVIYLLCGCVGYAAFGRTAPXNMLTGFGFYEPFWLLDVAN

SEQ ID NO: 96274 - protein, 66 aa, Setaria italica
  Transcript Sequence Number=SeqID_30300
PTSGPLVHRLPRCHARRALQVLPCELYCWSTASFWRVNPLGIQVRRHSLPIHIYLAASFSPISRLL

SEQ ID NO: 96275 - protein, 71 aa, Setaria italica
  Transcript Sequence Number=SeqID_30301
IGGDFNRDLLKPPFESAALAVVVGGAPDAAAVATGGNPVAGGAPGAGGLLGPRAPATSVLPTLSAYPACAW

SEQ ID NO: 96276 - protein, 318 aa, Setaria italica
  Transcript Sequence Number=SeqID_30302
  Gene Ontology: Mol. function=nucleotide binding; Cellular component =membrane; Biological process=defense response
  Homolog annotation: Hit_ID=Q6ZBT0; Match level="QueryCoverage=87%, HitCoverage=27%, E-value=5e-53, Identity=40%"; Hit description =Putative RGH1A
  Pfam annotation: Domain name=NACHT; Domain location=104-260; Score= -27.3; E_value=0.01; Accession=PF05729.4; Description=NACHT domain
  Pfam annotation: Domain name=NB-ARC; Domain location=84-316; Score =61.0; E_value=4.5e-15; Accession=PF00931.14; Description=NB-ARC domain
  Pfam module annotation: Pfam domain module=NACHT::NB-ARC; Domain location=104-260::84-316
RVDGGAPPATGVRAWFRRVWDKFTALPARHTIAGELQGLKERVLEISDQRKRYSLGGMVGTPAQAPLDPRLSALFVDTNSLVGFGEKVEDVSRLVMDAGRTELKIVSIVGMAGSGKTTLANAVYRRLQAQTQDNFNCSAFVSIGPKLDMVSKTVRNMLSQFGDRHRGGQDINQLITSVREILTNKRYLIVVDDLWSSEQWATIKCCFPENGLGSRIITTTRNGALPTDGYSCPSKFVHEISPLSDTDAKQLFLKKAFSNGNVCPPHLEDVFNQVMRRCCGLPLAVVTVAAKLAHKHSRDEWEKLGLNLLYSSHSDGSD

SEQ ID NO: 96277 - protein, 113 aa, Setaria italica
  Transcript Sequence Number=SeqID_30303
  Homolog annotation: Hit_ID=B6TS57; Match level="QueryCoverage=100%, HitCoverage=100%, E-value=1e-22, Identity=56%"; Hit description =Auxin-inducible protein
MASRSGAMDGVGTSRQRRNPVLVRPNAAKRHLQQRQQEADLNDRKVIASTYFSIGAFLVLACLTVSLLILPLVLPPLPPPPSLLLWLPVCLLILLIVLAFMPTDVRSMASSYL

SEQ ID NO: 96278 - protein, 132 aa, Setaria italica
  Transcript Sequence Number=SeqID_30304
IACHRLRKNFTFNPELGIAPLRQYCSSAWKPLCSFQEHALLFFPQPRKISTAQPTTPRDFKPRTLHPSHQDQSAAGTGTTGRGVGSRGGSGDGEVDISLRDADSRTLSGDAARSCCCCCCPGGWMGMETVRA

SEQ ID NO: 96279 - protein, 50 aa, Setaria italica
  Transcript Sequence Number=SeqID_30305
SIAVVSALSDALAWALASASCTSSFLIYFSASSALWMHFHSLLACHIGHL

SEQ ID NO: 96280 - protein, 52 aa, Setaria italica
  Transcript Sequence Number=SeqID_30306
SKERNSMEQGRKVSEHATPLARNFSSIGKDVESGNEPLGEAEATAEMKSERT

SEQ ID NO: 96281 - protein, 341 aa, Setaria italica
  misc_feature (222)..(222): Xaa can be any naturally occurring amino acid
  Transcript Sequence Number=SeqID_30307
  Gene Ontology: Mol. function=nucleoside-triphosphatase activity; Biological process=spermatid development
  Homolog annotation: Hit_ID=B9RXE9; Match level="QueryCoverage=90%, HitCoverage=54%, E-value=1e-119, Identity=66%"; Hit description=26S protease regulatory subunit, putative
  Pfam annotation: Domain name=AAA; Domain location=111-291; Score =205.7; E_value=1.2e-58; Accession=PF00004.21; Description=ATPase family associated with various cellular activities (AAA)
  Pfam annotation: Domain name=AAA_2; Domain location=108-236; Score= -48.8; E_value=0.065; Accession=PF07724.6; Description=ATPase family associated with various
  Pfam annotation: Domain name=AAA_3; Domain location=111-235; Score= -22.2; E_value=0.1; Accession=PF07726.3; Description=ATPase family associated with various
  Pfam annotation: Domain name=AAA_5; Domain location=111-241; Score =15.4; E_value=5e-05; Accession=PF07728.6; Description=ATPase family associated with various
  Pfam module annotation: Pfam domain module=AAA::AAA_2::AAA_3::AAA_5; Domain location=111-291::108-236::111-235::111-241
  Subcellular localization annotation: CTP_CleavageSite=43; ConfidenceScore=5.07e-01
LKVAGEKDVKGSSGKGNKNTPRKGNGQRSKHVPSMEKVVSAIEAMGVRVYGFDETSSVPMDGTVIWENLAGYEPQKREIEDTILLALQSPEVYDDIARGTRCKFETNRPRAVLFEGPPGTGKTSSARVIAKQAGVPLLYVPLEVVMSKYYGESERLLGSVFSLANDLPDGGIIFLDEVDSFAMARDSEMHEATRRILSVILRQIDGFEQDRRVVVIAAQTRXEDLDPALISRFDSIICFGLPDQQTRMEIAAQYAKHLSKSELVQFSLATEGMSGRDIRDACQQAERHWASKLIRGQVPKDEKGEPSLPPIAEYVSCAEQRRKSLPDRTRWTSRSPALKLA

SEQ ID NO: 96282 - protein, 352 aa, Setaria italica
  Transcript Sequence Number=SeqID_30308
  Gene Ontology: Mol. function=protein serine/threonine phosphatase activity; Cellular component=protein serine/threonine phosphatase complex; Biological process=protein amino acid dephosphorylation
  Homolog annotation: Hit_ID=Q6AUQ4; Match level="QueryCoverage=93%, HitCoverage=86%, E-value=1e-164, Identity=84%"; Hit description =Probable protein phosphatase 2C 47
  Pfam annotation: Domain name=PP2C; Domain location=43-307; Score =255.7; E_value=1.1e-73; Accession=PF00481.13; Description=Protein phosphatase 2C
AVAAPAEVEVEVEVAVEVSRMGLEQPEAAPSVSVEMLQFVPNIRSGSFSDIGPRRYMEDEHIRIDDLSAHLGSLLVCPLPSAFYGVFDGHGGPDAAAYMKRHAMRFLFEDSEFPQASRVDEMYLQSVENSVRRAFLQADLALADDLDISRSSGTTALAALVFGRQLLVANAGDCRAVLCRKGIAMEMSRDHRANYIEECERVAASGGFIEDGYLNGVLSVTRALGDWDMKTPDASASPLIAEPEFRQATLTEEDEFLIMGCDGIWDVMTSQHAVSLVRRGLRQHDDPARCARELVMEAKRLETADNLTVIVVCFVSELGAQQQEQLVRPRSCKSLSTEALCNLRSWLETDHR

SEQ ID NO: 96283 - protein, 166 aa, Setaria italica
  Transcript Sequence Number=SeqID_30309
  Gene Ontology: Mol. function=two-component response regulator activity; Cellular component=nucleus; Biological process=two -component signal transduction system (phosphorelay)
  Homolog annotation: Hit_ID=Q94LW1; Match level="QueryCoverage=96%, HitCoverage=25%, E-value=1e-86, Identity=94%"; Hit description =Response regulator 9
  Pfam annotation: Domain name=Response_reg; Domain location=28-139; Score=101.6; E_value=2.7e-27; Accession=PF00072.16; Description =Response regulator receiver domain
MTVEEVKLQAKANGGHGAKDQFPVGMRVLAVDDDPTCLKVLENLLLRCQYHVTTTGQAATALKLLREKKDQFDLVISDVHMPDMDGFKLLELVGLEMDLPVIMLSANGETQTVMKGITHGACDYLLKPVRIEQLRTIWQHVVRRKSSDAKNHGNDNDDSDKSCSWL

SEQ ID NO: 96284 - protein, 78 aa, Setaria italica
  Transcript Sequence Number=SeqID_30310
  Gene Ontology: Cellular component=integral to membrane
  Homolog annotation: Hit_ID=Q9M9K7; Match level="QueryCoverage=65%, HitCoverage=13%, E-value=1e-16, Identity=74%"; Hit description =F10A16.24 protein
AAALVCAAAATVVALVHIYRHLLHYAEPIYQRFIVRMIFMVPVYAVMSFLSLILPENAIYFNSIREIYDAWVIYNFLS

SEQ ID NO: 96285 - protein, 71 aa, Setaria italica
  misc_feature (69)..(69): Xaa can be any naturally occurring amino acid
  Transcript Sequence Number=SeqID_30311
EDWERKGDRRERIGWKFILKKLSTGKIISLSYMHQLIELKKYELIGKCDISLVFQPSLTHSICAQHLSXEG

SEQ ID NO: 96286 - protein, 132 aa, Setaria italica
  misc_feature (82)..(82): Xaa can be any naturally occurring amino acid
  Transcript Sequence Number=SeqID_30312
  Gene Ontology: Mol. function=catalytic activity; Biological process =guanosine tetraphosphate metabolic process
  Homolog annotation: Hit_ID=Q0WUY0; Match level="QueryCoverage=98%, HitCoverage=14%, E-value=1e-52, Identity=78%"; Hit description=RSH1
  Pfam annotation: Domain name=TGS; Domain location=42-100; Score=55.1; E_value=2.8e-13; Accession=PF02824.13; Description=TGS domain
QGFALRIGWLNAIREWQEEFVGNMSSREFVDTITRDLLGSRVFVFTPKGEIKNLPKGATVVDYAYLIHTEIGNKMVAAKVSXKKNGNTLLMMDYIIVFICSFAGEIQKLSSKYAFQRHQQWLQHAKTRSARH

SEQ ID NO: 96287 - protein, 116 aa, Setaria italica
  Transcript Sequence Number=SeqID_30313
  Gene Ontology: Mol. function=catalytic activity; Biological process =guanosine tetraphosphate metabolic process
ASRSTQCIYFLFQKLSSKYAFQRHQQWLQHAKTRSARHKIMKVCPTIILKIIFLHYQMIAVMNLFLIQFLKEQAALSAAEITAEAVNNFVADIEDESDSELSIPKQPRRKIVNSNW

SEQ ID NO: 96288 - protein, 186 aa, Setaria italica
  misc_feature (78)..(78): Xaa can be any naturally occurring amino acid
  Transcript Sequence Number=SeqID_30314
  Gene Ontology: Mol. function=catalytic activity; Biological process =guanosine tetraphosphate metabolic process
  Homolog annotation: Hit_ID=Q84LE7; Match level="QueryCoverage=69%, HitCoverage=14%, E-value=7e-58, Identity=82%"; Hit description=RelA -SpoT like protein RSH1
  Pfam annotation: Domain name=TGS; Domain location=69-128; Score=92.2; E_value=1.8e-24; Accession=PF02824.13; Description=TGS domain
RGVVSGPVRPGISSGRNSKGKVICLNNTGFALRIGWLNAIREWQEEFVGNMSSREFVDTITRDLLGSRVFVFTPKGEXKNLPKGATVVDYAYLIHTEIGNKMVAAKVNGNLVSPIHVLANAEVVEIITYDVSIPFIDHTVSFCSTLFTIFAMSRYTHTRCNFGFVKLLQCLHAYWSLYALKFVFLI

SEQ ID NO: 96289 - protein, 81 aa, Setaria italica
  Transcript Sequence Number=SeqID_30315
  Gene Ontology: Mol. function=catalytic activity; Biological process =guanosine tetraphosphate metabolic process
  Homolog annotation: Hit_ID=B9SAV1; Match level="QueryCoverage=62%, HitCoverage=5%, E-value=3e-15, Identity=70%"; Hit description =Guanosine-3',5'-bis(Diphosphate) 3'-pyrophosphohydrolase, putative
RLSVVVHPFSVNTGYAKPLDRAAFCSCVAEVNKRRGMGVVLFHFEGSYENVVSACSSVDMILGVLGWSVGCSWCPLGVLEC

SEQ ID NO: 96290 - protein, 684 aa, Setaria italica
  Transcript Sequence Number=SeqID_30316
  Gene Ontology: Mol. function=catalytic activity; Biological process =guanosine tetraphosphate metabolic process
  Homolog annotation: Hit_ID=B9SAV1; Match level="QueryCoverage=92%, HitCoverage=71%, E-value=0.0, Identity=71%"; Hit description =Guanosine-3',5'-bis(Diphosphate) 3'-pyrophosphohydrolase, putative
  Pfam annotation: Domain name=HD; Domain location=126-233; Score=52.5; E_value=1.6e-12; Accession=PF01966.14; Description=HD domain
  Pfam annotation: Domain name=RelA_SpoT; Domain location=330-453; Score=111.8; E_value=2.3e-30; Accession=PF04607.9; Description =Region found in RelA  SpoT proteins
  Pfam annotation: Domain name=TGS; Domain location=520-579; Score =90.8; E_value=4.8e-24; Accession=PF02824.13; Description=TGS domain
  Pfam module annotation: Pfam domain module=HD::RelA_SpoT::TGS; Domain location=126-233::330-453::520-579
TAQCSSCGHTEAGGGWRRRGRSRRSNNSLPHITLDEDINKGRFGYGPSPAYSESFFRPWSTSVNPTWRTYCYSSSESFFISPETLWEDLKPVVSYLQPEELNFVHDALKLAYEAHSGQKRRSGEPFIIHPVEVARILGEHELDWESIAAGLLHDTVEDTDVVTFERIENEFGPTVRRIVEGETKVSKLGKLQCKSEGSSKQDLKAEDLRQMFLAMTEEVRVIIVKLADRLHNMRTLTHMPQHKQYAIAMETLQVFAPLAKLLGMYRIKSELEYLSFMYVNPIGFAELRKRVEDLYKAHEQELEEANRILRQKIGEDQFLDLVSVETEVRSVYKELYSIYKTTLKSKSSINEVNQVAQLRIIIKPKSCNGVGPLCTAQQICYHVLGLVHGIWTPIPQAVKDYIATPKPNGYQSLHTTVIPFLNESMFHLEVQIRTEDMDLIAERGIAAHYSGRGVVSGPVRPGISSGRNSKGKVICLNNTGFALRIGWLNAIREWQEEFVGNMSSREFVDTITRDLLGSRVFVFTPKGEIKNLRTGATVVDYAYLIHTEIGNKMVAAKVNGNLVSPIHVLANAEVVEIITYDKLSSKYAFQRHQQWLQHAKTRSARHKIMKFLKEQAALSAAEITAEAVNNFVADIEDESDSELSIPSTKKEDSKFNWEKILNSDKLSFVNKSSDGFLPVNNVHL

SEQ ID NO: 96291 - protein, 236 aa, Setaria italica
  misc_feature (34)..(34): Xaa can be any naturally occurring amino acid
  Transcript Sequence Number=SeqID_30317
  Gene Ontology: Mol. function=catalytic activity; Biological process =guanosine tetraphosphate metabolic process
  Homolog annotation: Hit_ID=B9SAV1; Match level="QueryCoverage=88%, HitCoverage=23%, E-value=4e-47, Identity=46%"; Hit description =Guanosine-3',5'-bis(Diphosphate) 3'-pyrophosphohydrolase, putative
KFIVNFFKGSLSLVPFLVLSCKFTCAEAVNNFVXADIEDESDSELSIPSTKKEDSKFNWEKILNSDKLSFVNKSSDGFLPVNNVHPKVNGKQNKTVKELGIKINGHSTIRGDSFSELMRPGNSTCKDVFPGLDHWKSGKISGWHNTEGSSIQWLCIACVDRKGMMAEVTSALTACGITICSCVAEVNKRRGMGVVLFHFEGSYENVVSACSSVDMILGVLGWSVGCSWCPLGVLEC

SEQ ID NO: 96292 - protein, 42 aa, Setaria italica
  Transcript Sequence Number=SeqID_30318
  Homolog annotation: Hit_ID=B6T2W4; Match level="QueryCoverage=76%, HitCoverage=24%, E-value=4e-10, Identity=96%"; Hit description =Photosystem II reaction center W protein
AWGSANNLLGWILLGVFGLIWSLYTVYTSDLDEDEESGGLSL

SEQ ID NO: 96293 - protein, 90 aa, Setaria italica
  Transcript Sequence Number=SeqID_30319
  Homolog annotation: Hit_ID=B6T2W4; Match level="QueryCoverage=60%, HitCoverage=41%, E-value=4e-09, Identity=62%"; Hit description =Photosystem II reaction center W protein
  Pfam annotation: Domain name=PsbW; Domain location=1-90; Score=72.6; E_value=1.4e-18; Accession=PF07123.4; Description=Photosystem II reaction centre W protein, PsbW
  Subcellular localization annotation: CTP_CleavageSite=27; ConfidenceScore=5.16e-01
SKDGRNAAAVSAKGAGASLLAAAGAVTASAGPALALVDERMSTEGTGLSLGLSNNLLGWILLGVFGLIWSLYTVYTSDLDEDEESGGLSL

SEQ ID NO: 96294 - protein, 84 aa, Setaria italica
  Transcript Sequence Number=SeqID_30320
TCSAAGIAAVLLAPVLFMPLFSAGFHNVQNQDNFIVAMYGCFNRLRDAPRVFDEIRKERRRARGAWPRRPVAARRAIASGRRRC

SEQ ID NO: 96295 - protein, 90 aa, Setaria italica
  Transcript Sequence Number=SeqID_30321
  Gene Ontology: Cellular component=integral to membrane
  Subcellular localization annotation: CTP_CleavageSite=28; ConfidenceScore=5.42e-01
SNSVRFTQPDREAMMFRSQPIPGPPPARLASRSGRARRTAPMNWDRRYDSFKTWSGKLERQITHLAGGPDGLNVRGRRGRQRCHRRQPPP

SEQ ID NO: 96296 - protein, 353 aa, Setaria italica
  Transcript Sequence Number=SeqID_30322
  Gene Ontology: Mol. function=inositol or phosphatidylinositol phosphatase activity; Biological process=abscisic acid mediated signaling
  Homolog annotation: Hit_ID=Q94G04; Match level="QueryCoverage=91%, HitCoverage=90%, E-value=1e-148, Identity=81%"; Hit description =Diphosphonucleotide phosphatase 1
  Pfam annotation: Domain name=Inositol_P; Domain location=70-346; Score=209.5; E_value=9.1e-60; Accession=PF00459.17; Description =Inositol monophosphatase family
  Subcellular localization annotation: CTP_CleavageSite=27; ConfidenceScore=5.26e-01
GASSSSASPPRLRSRSHRASPRVLPVRSMASGNPYAAELAAAKKAVTLAARLCKTVQQDIVHSGIQSKADKSPVTVADYGSQILVSLALTMEVSGPFSLVAEEDSEELRKDGAEEILEEITDLVNETIVDDGSYNISFSKEGILSAIDDGKSEGGSSGRHWVLDPIDGTKGFLRGDQYAIALALLDEGKIVLGVLACPNLPLSSISNPNGSSSGNQVGALFSATIGCGAEVESLDGSPPQKIGVCSIDNPVNASFFESYESAHSMHDLTSSIAEKLGVLAPPVRIDSQAKYGALARGDGAIYLRFPHKGYREKIWDHAAGSIVVTEAGGIVTDAAGNDLDFSQGRFLDLDIFF

SEQ ID NO: 96297 - protein, 174 aa, Setaria italica
  misc_feature (8)..(8): Xaa can be any naturally occurring amino acid
  misc_feature (75)..(75): Xaa can be any naturally occurring amino acid
  Transcript Sequence Number=SeqID_30323
  Gene Ontology: Mol. function=protein serine/threonine kinase activity; Cellular component=plasma membrane; Biological process =protein amino acid phosphorylation
  Homolog annotation: Hit_ID=C4P7U9; Match level="QueryCoverage=100%, HitCoverage=35%, E-value=2e-80, Identity=86%"; Hit description=CBL -interacting protein kinase 29
  Pfam annotation: Domain name=Pkinase; Domain location=11-170; Score =65.7; E_value=1.7e-16; Accession=PF00069.17; Description=Protein kinase domain
  Pfam annotation: Domain name=Pkinase_Tyr; Domain location=11-169; Score=-85.6; E_value=4.9e-08; Accession=PF07714.9; Description =Protein tyrosine kinase
  Pfam module annotation: Pfam domain module=Pkinase::Pkinase_Tyr; Domain location=11-170::11-169
MDGRRTIXGRYEIGKQLGQGTFAKVFYARNLTTNKDKVIKMINKDKVMKVGLMEQIKREISIMRLVKHPNVLQLXFEVMASKSKIYFVLEYAKGGELFNKIAKGGKLSEDAARKYFHQLISAVDYCHSRGVYHRDLKPENLLLDENENLKVSDFGLSALTESKRQDGLLHTTCG

SEQ ID NO: 96298 - protein, 168 aa, Setaria italica
  Transcript Sequence Number=SeqID_30324
  Gene Ontology: Mol. function=signal transducer activity; Cellular component=plasma membrane
  Homolog annotation: Hit_ID=B9RMQ6; Match level="QueryCoverage=94%, HitCoverage=40%, E-value=1e-53, Identity=62%"; Hit description =Signal transducer, putative
  Pfam annotation: Domain name=RGS; Domain location=10-127; Score=38.3; E_value=3e-08; Accession=PF00615.11; Description=Regulator of G protein signaling domain
CHFIFDSNQPLDKLLEDKRFRMSFMSFADSCLAGESVHFYEEVYDLKKIHLDDSIRRIYMARHIIEKYIDAGAEMEINISHRTRQEILGTPDLTHPNLFDSAVSEILQLIKMNLAKDYWSSLHFAKLKEDIERGPNGPELMPLDYSPRVTFVRCTDDPFYEEHAATCN

SEQ ID NO: 96299 - protein, 61 aa, Setaria italica
  Transcript Sequence Number=SeqID_30325
CTHRRFDLHLHAHVPSHVWPILRTCYLIPYVPPERDPLRPGACATTAPAASAMHDAVVAAV

SEQ ID NO: 96300 - protein, 288 aa, Setaria italica
  misc_feature (108)..(108): Xaa can be any naturally occurring amino acid
  Transcript Sequence Number=SeqID_30326
ELDIEDTQHLLGVESVDHSAFLEKSPFQNIQHKLHDCTGSPFVTPLVLRDDMQTPGTVYTSHRGASMSGKRVQTRKQFIYPVLRPIENRVKQMELAEDSSPLLSSNPXKKRNLEEDHVMKPKQTSSNSVAKSGLSKTPPISRQVKEALSPEELLDGGELSKTKSDERNAALSLSHWVKSSSKDVENQGDVKVVAGDQSYDECSFPAERPVFMASDFNWDIENPTPKLHKTFNGNGIPNTTTRYKEDRRVSWHTTPFEERLLKVLSDEKHCAPRKVFRGKLFHQEEKAE

SEQ ID NO: 96301 - protein, 100 aa, Setaria italica
  Transcript Sequence Number=SeqID_30327
  Homolog annotation: Hit_ID=B9T609; Match level="QueryCoverage=100%, HitCoverage=13%, E-value=2e-25, Identity=53%"; Hit description=RNA binding protein, putative
LKNARETRRKKLGLKILNHLFKRVRRGEEFEFDFRIENEARRVFKDWAEGAVAEYFKSQEHCQYWHRLLASGDFLSLTRVRDQLPPALVDSYDKFQETLD

SEQ ID NO: 96302 - protein, 99 aa, Setaria italica
  Transcript Sequence Number=SeqID_30328
  Gene Ontology: Mol. function=ubiquitin-protein ligase activity; Cellular component=ubiquitin ligase complex; Biological process =ubiquitin-dependent protein catabolic process
  Homolog annotation: Hit_ID=Q84VE7; Match level="QueryCoverage=57%, HitCoverage=7%, E-value=4e-12, Identity=68%"; Hit description=Arm repeat protein
  Subcellular localization annotation: CTP_CleavageSite=58; ConfidenceScore=5.90e-01
MANPRTVLTSAPSPPGCSSSSSSSSSSSSSSAFAPPAPPSPSDGELLRSLHRLARDLSAAAETPAPFLRAALASITRRSKLLAAAFDDLVMCAAAGDLP

SEQ ID NO: 96303 - protein, 56 aa, Setaria italica
  Transcript Sequence Number=SeqID_30329
RQIKYSSTLYGIPGYMKTTVCDTFALFTSIVFIQGNYEKAYSKFKASISKKMIQSQ

SEQ ID NO: 96304 - protein, 92 aa, Setaria italica
  Transcript Sequence Number=SeqID_30330
  Gene Ontology: Mol. function=ATPase activity, coupled to transmembrane movement of ions, phosphorylative mechanism; Cellular component=integral to membrane; Biological process=phospholipid transport
  Homolog annotation: Hit_ID=B9RL26; Match level="QueryCoverage=94%, HitCoverage=7%, E-value=4e-29, Identity=66%"; Hit description =Phospholipid-transporting atpase, putative
ASQREREVGDEESRGVVVGEPSPEFAGNAIRTAKYSLLTFLPRNLFEQFRRLSYVYFLAITVLNQLPQVAVFGRGASVLPLAFVLFVTAVKD

SEQ ID NO: 96305 - protein, 193 aa, Setaria italica
  misc_feature (8)..(8): Xaa can be any naturally occurring amino acid
  Transcript Sequence Number=SeqID_30331
  Gene Ontology: Mol. function=nucleic acid binding; Cellular component= contractile ring; Biological process=protein amino acid autophosphorylation
  Homolog annotation: Hit_ID=Q0DYP5; Match level="QueryCoverage=93%, HitCoverage=41%, E-value=2e-55, Identity=57%"; Hit description=Zinc finger CCCH domain-containing protein 17
  Pfam annotation: Domain name=WD40; Domain location=143-179; Score =2.5; E_value=20; Accession=PF00400.24; Description=WD domain, G-beta repeat
  Pfam annotation: Domain name=WD40; Domain location=15-51; Score=42.0; E_value=2.3e-09; Accession=PF00400.24; Description=WD domain, G-beta repeat
  Pfam annotation: Domain name=WD40; Domain location=55-91; Score=34.5; E_value=4.1e-07; Accession=PF00400.24; Description=WD domain, G-beta repeat
  Pfam module annotation: Pfam domain module=WD40::WD40::WD40; Domain location=143-179::15-51::55-91
GRIIAWKXPSKESNIEPVAILSGHQRAVISLSISATRLYSGSLDKTIRVWDLMTMQCLQTLSEHKAAVTSVLCWEDKLLSCSLDRTVKVWTLSESGNLQVRYTYAEEHGLRTLFGMHRVGKTPVLLCSLHNRNRIRLLDLPSFQEVGTLFSNKEVRTIELADGGPLFTGDCSGELKVWRWAPQDQEAAPAAQA

SEQ ID NO: 96306 - protein, 67 aa, Setaria italica
  Transcript Sequence Number=SeqID_30332
  Subcellular localization annotation: CTP_CleavageSite=49; ConfidenceScore=5.08e-01
IINSAISIVLTHQHLRKLKSSFLKFNANFNMPCKRKVCDIFSWIYVGITVSEFVQIDNSLRDLVSCQ

SEQ ID NO: 96307 - protein, 457 aa, Setaria italica
  misc_feature (126)..(126): Xaa can be any naturally occurring amino acid
  Transcript Sequence Number=SeqID_30333
  Gene Ontology: Mol. function=translation initiation factor activity; Cellular component=cytoplasm; Biological process=translational initiation
  Homolog annotation: Hit_ID=B9RJ84; Match level="QueryCoverage=35%, HitCoverage=33%, E-value=1e-37, Identity=45%"; Hit description =Translation initiation factor if-3, putative
  Pfam annotation: Domain name=IF3_C; Domain location=104-188; Score= -6.6; E_value=0.0007; Accession=PF00707.14; Description=Translation initiation factor IF-3, C-terminal domain
  Pfam annotation: Domain name=IF3_N; Domain location=19-87; Score =80.6; E_value=5.6e-21; Accession=PF05198.8; Description=Translation initiation factor IF-3, N-terminal domain
  Pfam module annotation: Pfam domain module=IF3_C::IF3_N; Domain location=104-188::19-87
APPGTQANRKGGKEDDDDKAGLRINNAITRTIVRLVSDDGHNVVPRHEALQIAARKDMDLVEVDRKANPPVCKIMDFHKEKYKKETKEKERLKTKSAIVLRGGENKEVRFKGKTELKDLAVKGKHXAITRLMERGYRVKCMAMPSGNEGEDLGAPLSRLLGLIQDVCIVESGPHLDSKHAYVIVRHVKFATKKGGKKASKAMEDAGKGTHSTAPVAGNDSEDETIECGGEAVEKTATHHSSDSPIQKEGQDRRFKRELNRSKPDPGANREKLHNANAGGSRMNPGQWGPQASERRLGDVNPGMERPENSMQDQKPGETNRYAARKQPMRGDNNRGFNQGRPVQDGRSENAGRYENQRPPLEQQHNRPLPRFNQGGLPQDPRNDRRGHFASNNNNQRQPAGGGGLSSDPNQTSKSFGIFSSTPKPASSDMRKTDGAGTASKPGNTDSPKSFGIFSSRK

SEQ ID NO: 96308 - protein, 50 aa, Setaria italica
  Transcript Sequence Number=SeqID_30334
QDVSDAVALAMAEGGDRDGRKWREFLTDDAVQKRFAGDFVRQLKELVRAA

SEQ ID NO: 96309 - protein, 104 aa, Setaria italica
  misc_feature (72)..(72): Xaa can be any naturally occurring amino acid
  misc_feature (77)..(77): Xaa can be any naturally occurring amino acid
  Transcript Sequence Number=SeqID_30335
TKNDDAARILYFTVKVDQTDAEAAVLGVDMESKKILGVAPFFSRYEVINFNYVHTRLSRHFPISRCTGDSEXVSKGXSTKMKVKAREHHDIASPSSATDSLALD

SEQ ID NO: 96310 - protein, 474 aa, Setaria italica
  Transcript Sequence Number=SeqID_30336
  Gene Ontology: Mol. function=protein serine/threonine kinase activity; Biological process=protein amino acid phosphorylation
  Homolog annotation: Hit_ID=Q7F9F9; Match level="QueryCoverage=88%, HitCoverage=90%, E-value=5e-22, Identity=29%"; Hit description =OSJNBa0023J03.13 protein
  Pfam annotation: Domain name=DUF1618; Domain location=243-381; Score=- 40.6; E_value=0.068; Accession=PF07762.6; Description=Protein of unknown function (DUF1618)
MATDLVSLASLNMPRSIQGARSMATDHVSPASLQMPAAIHGAAEESNLSWMLLEVCAYIDKVENATTAISKTSDNKHIQITFCPRPPPFLSRCCIHSPDGAYMHRNPHIVAVEDDLALIRVDVSACALDQDYYVYQASDKSGKPSLTLLPPTPQYRCFLPKDIGMLRRPGKEYIVAGFRFLPLAHPWGGLTLCVYDSKRADWKLYALSLSLQGRQEYGDKSFLHKNCKVVTIGGDAAGTMAFVDLWRGMLFCDVLRLEHEAARQAQSETIPVLGYVSLPDELRRTAKLKSDARLYRDIAFLDGHLKCVDLASRSLWIRPATTSGVWSQQYKITSFKEIEVNNPRTNLFPGQRGVYRQSFRNLLVCQPVVGLQDDDAARILYFTVKVDQTDAEAAVLGVDMESKKILGVAPFFSRYEVINFNYVHTRLSRHFPISRCTGDSETVSKGCSTKMKVKAREHHDSESVAEDGDAMALD

SEQ ID NO: 96311 - protein, 139 aa, Setaria italica
  Transcript Sequence Number=SeqID_30337
  Gene Ontology: Mol. function=electron carrier activity; Cellular component=extracellular region; Biological process=response to oxidative stress
  Homolog annotation: Hit_ID=Q5U1J1; Match level="QueryCoverage=69%, HitCoverage=27%, E-value=4e-29, Identity=65%"; Hit description=Class III peroxidase 102
PFLAVSALLLLLFATSVAANGYGGGDGASSGPKGNGEQEGVYHIPAYEKPVKGLDAGFYRKSCPEMEGIVQKAVRKAIRDDYTLAASLIRLFFHDFAVQGVDASVLIDEPKKSEKYAEASRTLRGFDLIEKIKEGDGIQ

SEQ ID NO: 96312 - protein, 89 aa, Setaria italica
  Transcript Sequence Number=SeqID_30338
  Gene Ontology: Mol. function=transporter activity; Cellular component= membrane; Biological process=oligopeptide transport
  Homolog annotation: Hit_ID=B6ST62; Match level="QueryCoverage=100%, HitCoverage=18%, E-value=2e-33, Identity=78%"; Hit description=POT family protein
RRLIAPKPEDRLVVKLLPIWLTSIVFAVIFSQVSTLFTKQVSTLDRRLGTGTGLAVPPAALQCLSNLTFIVMLPLYDRVIVPLARRLTG

SEQ ID NO: 96313 - protein, 52 aa, Setaria italica
  Transcript Sequence Number=SeqID_30339
  Gene Ontology: Mol. function=carbohydrate binding; Biological process= carbohydrate metabolic process
  Homolog annotation: Hit_ID=Q7XSR8; Match level="QueryCoverage=94%, HitCoverage=15%, E-value=2e-19, Identity=91%"; Hit description =OSJNBa0041A02.19 protein
KHMLCVEPAAVEKLITLKPGEEWKGRMELSAVPSSYCSGQLDPEKVLQGLEF

SEQ ID NO: 96314 - protein, 147 aa, Setaria italica
  Transcript Sequence Number=SeqID_30340
  Subcellular localization annotation: CTP_CleavageSite=44; ConfidenceScore=5.37e-01
MKCWCVHAARGGAMATPLSSPFAPTTILRSPLRHRALLLPFPPRAASSGEDTAEAVADQEGPATTKTATADDDFEERVLRIKSRVGPKKRGARKKKAGASAPANAVTLPPVPLREPRSALGAPVEFGFTAYSERLNGALAALGLDTQ

SEQ ID NO: 96315 - protein, 80 aa, Setaria italica
  Transcript Sequence Number=SeqID_30341
  Gene Ontology: Mol. function=translation initiation factor activity
  Homolog annotation: Hit_ID=B9T3Y3; Match level="QueryCoverage=95%, HitCoverage=35%, E-value=5e-11, Identity=46%"; Hit description=GTP binding protein, putative
DDTATVVRYRMDDGRIATARGACRIVDGATGLAVAEVKRKTTAAGVALGADVLTLAVEPGVDRSIIMGLVLVHGLINRAM

SEQ ID NO: 96316 - protein, 51 aa, Setaria italica
  Transcript Sequence Number=SeqID_30342
VHHCNSITHYSFTYITAVLTHQFYCTSLKTYMDGSDVTNKNPVQKQQAREI

SEQ ID NO: 96317 - protein, 403 aa, Setaria italica
  misc_feature (12)..(12): Xaa can be any naturally occurring amino acid
  misc_feature (277)..(277): Xaa can be any naturally occurring amino acid
  Transcript Sequence Number=SeqID_30343
  Gene Ontology: Mol. function=metal ion binding
  Homolog annotation: Hit_ID=Q9SG87; Match level="QueryCoverage=54%, HitCoverage=31%, E-value=4e-44, Identity=46%"; Hit description =Putative RING zinc finger protein
ELSGNKSKLEYXIFEEIGINNSAVSVLSLDPTAESNWTTVTFGIWPYPSNFTISPTELSILRSSLVSLVIHQSILHLTPSLFGNSSSFEILRFPGGITIIPPQTAFVPQKPDGLFNFSLNFPIDVVQDKLSELKAQMKSGLFLNEHEILYVTLTNLYGSTVAPPTIVQTSVLLAVGADNKPPSLQRLKQLAQTLRNSSSGNLGLNHTVFGRVKQISLSSYLQHSLNNSGNAHSPSPAPQPYNQPPSIHQDHIDHHHHHHHHHHHHHHDHSHQSLQHXAPAPAPLHGAPTFLSCGSTCTRRKEHSTAKHHSPSIRDPLLRHIVPAASPNSYGASGPYADPPSFHPRISSSPLPAVVFPAMPPSMRTLKPPNKFSSISPATSISFAPRLSSHWWVIASLLYWPLL

SEQ ID NO: 96318 - protein, 406 aa, Setaria italica
  Transcript Sequence Number=SeqID_30344
  Homolog annotation: Hit_ID=Q01K78; Match level="QueryCoverage=99%, HitCoverage=63%, E-value=1e-152, Identity=66%"; Hit description =H0525C06.6 protein
  Pfam annotation: Domain name=DDT; Domain location=61-121; Score=33.8; E_value=7.1e-07; Accession=PF02791.9; Description=DDT domain
ERKRRKENGTYEDGRKKMKKDEGDAHVPIKYPIDDLLVRPNADDPALSKRPPLATDFRVPRGCVGDLLMVWDFCSSFGRVLNLSPFPLTDMENAICHKESNVLLVEIHAAMFHLLIKDKGDYFSVLQHKKRKLKVSLVTWAEYLCDFLEMTKIEELSSNIATVRRGYYGLIDTDMKLKILRELVEEAIKTSAIREILIERVDQKQALNATKRESTRKDKEEQNLNTEIAMNNEENQTDAVQDGNESVDEPARGKEEKDKSNVSRSKTEGKRHLVWHLETEIEKLSIRSSPLGKDRHYNRYWFFRREGRLFVESADSREWGYYSTKEELDALMGSLNVKGIRERALKRQLEKYYNKISNTLEKRTKEIVNKMLLEEGVLRRSTRVRAQPKDNPSMAFLKYVNKWKDN

SEQ ID NO: 96319 - protein, 103 aa, Setaria italica
  Transcript Sequence Number=SeqID_30345
  Gene Ontology: Mol. function=electron carrier activity; Biological process=oxidation reduction
  Homolog annotation: Hit_ID=B9ICY3; Match level="QueryCoverage=85%, HitCoverage=17%, E-value=2e-17, Identity=40%"; Hit description =Cytochrome P450
MEVASWFLGFLGRYPELMVSLACFLLLFHRLNRRDGLPTNWPVIGALPAITINAGRVHEWVTEFLCAAGLSYVIEGPWGSPVDVVVTADPANVAHVFTTNFAN

SEQ ID NO: 96320 - protein, 311 aa, Setaria italica
  Transcript Sequence Number=SeqID_30346
  Homolog annotation: Hit_ID=Q8LNH1; Match level="QueryCoverage=100%, HitCoverage=82%, E-value=3e-89, Identity=57%"; Hit description=CBS domain-containing protein, putative, expressed
  Pfam annotation: Domain name=CBS; Domain location=113-307; Score =10.6; E_value=0.011; Accession=PF00571.20; Description=CBS domain
ADLLCFLCTEPEALARPAAALAKPVSALLPKDGGGEVRRVDPRSSILEALDAILSGAQVLAVPLRAGGRKKQLIGGAAAADFCWLTQEDLVRYFLNSIGLFYHAAARSVSSLGLVRTDFLSVRPGESALSAAPLIRHAVATETAVAVVTEDGHLVGEISPALLAACDETAAAAIATLSVADLMAYIDYFGSPPEHILRAVKAGLKDKGLDAMLDLIEDETLSSFSSLSASSSSDEETGRPLLRRPSSGSYGRRSAEEPVVCSPASSLVAVMVQALAHRVSYVWVLEEEDDCRLAGIVTFADVLRVFREQLQ

SEQ ID NO: 96321 - protein, 106 aa, Setaria italica
  misc_feature (99)..(99): Xaa can be any naturally occurring amino acid
  Transcript Sequence Number=SeqID_30347
  Gene Ontology: Mol. function=protein binding; Cellular component =extracellular space
  Homolog annotation: Hit_ID=B6TNG4; Match level="QueryCoverage=100%, HitCoverage=100%, E-value=3e-39, Identity=71%"; Hit description =Pollen-specific protein like
  Pfam annotation: Domain name=Rep_fac-A_3; Domain location=1-105; Score=119.9; E_value=8.3e-33; Accession=PF08661.3; Description =Replication factor A protein 3
MDTSSPAAIVNGEILNKFVGRRVRTVVQVQRNEGGMVFGQSTDGHQLTIKSAMDIPVSHFMEVYGIAEHNQTIRAEVCTDFGPNFDAKAFDGLCKLANXQFKHLFL

SEQ ID NO: 96322 - protein, 470 aa, Setaria italica
  Transcript Sequence Number=SeqID_30348
  Gene Ontology: Mol. function=ATPase activity, coupled to transmembrane movement of substances; Cellular component=integral to membrane; Biological process=transport
  Homolog annotation: Hit_ID=O23998; Match level="QueryCoverage=100%, HitCoverage=78%, E-value=0.0, Identity=68%"; Hit description=P -glycoprotein homologue
  Pfam annotation: Domain name=ABC_tran; Domain location=129-313; Score= 208.6; E_value=1.6e-59; Accession=PF00005.19; Description=ABC transporter
QGIAKGLAVGFTGLSFAIWAFLAWYGGRLVMHHQASGGRIYAAGISFVLGGLSLGMALPELKHFTEASVAATRILDRINRVPQINADDPKGLVLDQIRGELQFESVRFVYPSRPNMPVLKDFNLQIPAGQTIALVGSSGSGKSTAIALVQRFYDASEGTVKIDGFDIKELQLKWIRSKMGLVSQDHALFGTSIKENILFGKPDATMDEVYAAAMTANAHNFIRGLPEEYETKIGERGALLSGGQKQRIAIARAIIKNPAILLLDEATSALDSESEKLVQHALDQASMGRTTLVVAHKLSTVKNADQIAVVDGGAIAEIGTHDELINKGGTYSRLVKLQKMVSYIDQENEQFRASSVARTSTSRHSVSRASPMPLTPAVLKEISSDVSPPAPSFSRLLAMNAPEWRQAVIGSLSALVYGSLQPIYAITIGGMIAAFFVQDHNEMNAIIRRYALIFCSLSMVSIVVNLLQHY

SEQ ID NO: 96323 - protein, 30 aa, Setaria italica
  Transcript Sequence Number=SeqID_30349
MGAVTSTVAARFAFFPPSPPSYGVEQPSPP

SEQ ID NO: 96324 - protein, 135 aa, Setaria italica
  Transcript Sequence Number=SeqID_30350
  Gene Ontology: Mol. function=electron carrier activity; Cellular component=integral to membrane; Biological process=oxidation reduction
  Homolog annotation: Hit_ID=B6TYK2; Match level="QueryCoverage=100%, HitCoverage=27%, E-value=1e-62, Identity=88%"; Hit description =Cytochrome P450 CYP90A22v2
RTPNPEPFIDERVARHGSGVFTTHVFGERTVFSADPAFNRLLLAAEGRAVDCSYPSSITTLLGPHSLLLTRGPAHKRLHSLTLTRLGRPASPPLLAHIDRLILATMRDWEPAATVRLLDEAKKITFNLTVKQLVS

SEQ ID NO: 96325 - protein, 292 aa, Setaria italica
  misc_feature (292)..(292): Xaa can be any naturally occurring amino acid
  Transcript Sequence Number=SeqID_30351
  Gene Ontology: Mol. function=peptidase activity
  Homolog annotation: Hit_ID=B9TA47; Match level="QueryCoverage=97%, HitCoverage=76%, E-value=1e-100, Identity=62%"; Hit description =Protein bem46, putative
  Pfam annotation: Domain name=Peptidase_S9; Domain location=8-181; Score=-72.4; E_value=0.03; Accession=PF00326.13; Description=Prolyl oligopeptidase family
MYELFLELSTHLNVNLMGYDYSGYGQSSGKPSEQNTYADIEAVYRCLIETYGASEENIILYGQSVGSGPTLDLASRLSHLRAVVLHSPISSGLRVMYPVKHTYWFDIYKNIDKIPLVKCPVLVIHGTADEVVDCSHGRTLWELSKVKYEPLWVKGGNHCNLELYPEYIKHLKKFVTAIEKSPPVKDESLESSGPSDPSETGSEGTESSRRSTDIRDKPRSSIDHRPSTDRREKPRGSIDRRDKSRKSVDQLDKPRASMDQPDRPRKSIDRFGGMMRSVKLCNIDCFTAASGX

SEQ ID NO: 96326 - protein, 42 aa, Setaria italica
  Transcript Sequence Number=SeqID_30352
VNPWLSVENFEVPTLLAMTWQFSSFAKHDYSFERKLSTIIAL

SEQ ID NO: 96327 - protein, 371 aa, Setaria italica
  misc_feature (219)..(219): Xaa can be any naturally occurring amino acid
  misc_feature (358)..(358): Xaa can be any naturally occurring amino acid
  Transcript Sequence Number=SeqID_30353
  Gene Ontology: Mol. function=ATP binding; Biological process=apoptosis
  Homolog annotation: Hit_ID=Q5JMA3; Match level="QueryCoverage=99%, HitCoverage=65%, E-value=1e-91, Identity=48%"; Hit description =Fusarium resistance protein I2C-5-like
  Pfam annotation: Domain name=NB-ARC; Domain location=73-347; Score= -44.4; E_value=1.5e-06; Accession=PF00931.14; Description=NB-ARC domain
SKFSSAKRFCFSNRRIGAIFQGHGVEDVQKMLGNMHSIIDDMAEFIIFLKSYPPIIREPYSKYLFMEKCMFGRQAEMEKIIRFLLQPEPPGANSLQVLPIIGPPRVGKSTLVEHVCYDERVHNHFSSIILCSGDPSAPEGSDVVKKQSHGSHGRSLIVMELAEDLVLGDRQWRKLYSSSHMPLGSKVIITSRTEDIAKLGTTGAIRLKYLTQEAYWYFXKVMAFGSTDPEVDPELASIAMEIAAELDGSFLGGNVISGILRANQHAQFWRKILKLQRDYVQWHLLLFGEHPHTLLQKKQTAYVWSLSNNSLRFKVLCFKTHSPLIDVPKTTLYEFQARNPEVHRELEVLVWKSRIGFXHSYTMRCELEASQ

SEQ ID NO: 96328 - protein, 91 aa, Setaria italica
  Transcript Sequence Number=SeqID_30354
  Subcellular localization annotation: CTP_CleavageSite=58; ConfidenceScore=5.55e-01
KPCVPCHSREFLLRPSSARNPTLPPALPPFVLLPTSPVAAAPSCVTSRHRSYLPSSIRVSLPKKPPLPHARTPSQSLPAALPRGGRDVVTA

SEQ ID NO: 96329 - protein, 178 aa, Setaria italica
  Transcript Sequence Number=SeqID_30355
  Homolog annotation: Hit_ID=B6U6F7; Match level="QueryCoverage=100%, HitCoverage=46%, E-value=2e-67, Identity=75%"; Hit description =Uncharacterized ACR
VLLSGVDLVDGTPVIDIKPYLPYSDSVKGAAVPNWLEIDGALAVESIHFSEQFISALHICWVHAQKQSLYASADEFQDLIKQVLSWDIRSLSQRIRPHQVDMERETNSHRSEEADEDHGDGASSGVVYHLHLEGIDVSYRIDQGSNIVVEDAALLTVVRNQNRDGYLAWRDKLGSSGL

SEQ ID NO: 96330 - protein, 113 aa, Setaria italica
  misc_feature (100)..(100): Xaa can be any naturally occurring amino acid
  Transcript Sequence Number=SeqID_30356
MDQSLSFYSDGLYQSLVLTGESFMKLTMSMAILSHYLLFCFPSFNSLKLCFGLSSPICCPCVQDHEEKSGWRRSWEDQITELKRRSMTKDSEVEILVRWXARMRRRAEASSAE

SEQ ID NO: 96331 - protein, 212 aa, Setaria italica
  Transcript Sequence Number=SeqID_30357
  Gene Ontology: Mol. function=heat shock protein binding; Cellular component=chloroplast; Biological process=protein folding
  Homolog annotation: Hit_ID=B6U349; Match level="QueryCoverage=80%, HitCoverage=84%, E-value=4e-58, Identity=69%"; Hit description =Chaperone protein dnaJ 20
  Pfam annotation: Domain name=DnaJ; Domain location=75-139; Score =103.8; E_value=5.8e-28; Accession=PF00226.23; Description=DnaJ domain
  Subcellular localization annotation: CTP_CleavageSite=51; ConfidenceScore=5.65e-01
MPHLAATPSTSSAAAAAAATVPAALPTGSGCVAFRRPWTIPQPVALRLRLRAQGVRRESGGVRTEEQEQETTARTFYDLLGISAEGSPDEVRAAYRRLALKYHPDVSPPGAAAENTRRFIEVQEAYETLSDPSRRASYDRALARGVCRLAFSGSRAQRAYYHHQDHEEKSGWRRSWEDQITELKRRSMTKDSEENLSWGARMRRRAEASSAE

SEQ ID NO: 96332 - protein, 75 aa, Setaria italica
  Transcript Sequence Number=SeqID_30358
VVVIMAGDERPTFLAMPASGRGVDADDVAVDVGVGCGDGDEEGRCVECGARSRPAGDELMSRSEQSGVVSGSSVI

SEQ ID NO: 96333 - protein, 101 aa, Setaria italica
  Transcript Sequence Number=SeqID_30359
ARASELSVVDRWRRPCSNSKPCDYILMWYQPRRPAAAGPFSQPEPQHLPQAPPPPASDGHPADAPPAGHSVRWLAAAGFAFLIFNSGMAVHRSRGDLGAIA

SEQ ID NO: 96334 - protein, 178 aa, Setaria italica
  misc_feature (84)..(84): Xaa can be any naturally occurring amino acid
  misc_feature (150)..(150): Xaa can be any naturally occurring amino acid
  Transcript Sequence Number=SeqID_30360
  Gene Ontology: Cellular component=integral to membrane
  Homolog annotation: Hit_ID=B9SRB0; Match level="QueryCoverage=84%, HitCoverage=34%, E-value=7e-23, Identity=41%"; Hit description =Auxin:hydrogen symporter, putative
LRNLVLFLSFQKLQLTCWLDAGNLGNIFLIIIPALCKEKGSPFGEHDVCQTYGLAYSSLSMAIGAVFLWSIVYNIVRVTSNVTXGDGNAQTNQTEVLIPGSATETVAEEICSALNDHSDERTLPLISTDIPPTKNKVPLLESTWKSISSXFQKVDLKKLFAPSTIAVVHWFGELLTPF

SEQ ID NO: 96335 - protein, 115 aa, Setaria italica
  Transcript Sequence Number=SeqID_30361
  Gene Ontology: Mol. function=protein serine/threonine kinase activity; Biological process=protein amino acid phosphorylation
  Homolog annotation: Hit_ID=Q00RI0; Match level="QueryCoverage=93%, HitCoverage=16%, E-value=1e-47, Identity=82%"; Hit description =OSIGBa0125M19.6 protein
ASNVLLDAEMNGRLGDFGLARLYDHGTDPHTTHVVGTMGYLAPELGHTGRASKASDVFAFGVFMLEVACGRRPVVQDEHGDHHLLVDWVAERWRGGTVTDAVDPRLRGTSSWRKR

SEQ ID NO: 96336 - protein, 158 aa, Setaria italica
  Transcript Sequence Number=SeqID_30362
  Gene Ontology: Mol. function=iron ion binding; Cellular component =integral to membrane; Biological process=transport
  Homolog annotation: Hit_ID=Q6ZGM7; Match level="QueryCoverage=94%, HitCoverage=22%, E-value=5e-26, Identity=43%"; Hit description =Probable metal-nicotianamine transporter YSL7
FRSLFDVPYARVYRGIAMLSSGQRGLPMHSLWLCRTFFALALALSVLRDVAARRRWRVAEYLPSTICVAIAFVVPAHMPIDMFTGSLAMYLWRRADPRKARAFSAAAASGLICGDGLGILLSSVVALTHARAPICIKFVSSSDNVRLDAFLATLPKIS

SEQ ID NO: 96337 - protein, 181 aa, Setaria italica
  Transcript Sequence Number=SeqID_30363
  Gene Ontology: Mol. function=iron ion binding; Cellular component =integral to membrane; Biological process=transport
  Homolog annotation: Hit_ID=Q6ZGM7; Match level="QueryCoverage=96%, HitCoverage=30%, E-value=1e-43, Identity=46%"; Hit description =Probable metal-nicotianamine transporter YSL7
WGPMSSSNNLMQELKTGYLTLTSPRAVFISQAIGTALGCVVNPLMFWALYKVQDDESELFDVPYARVYRGIAMLSSGQRGLPMHSLWLCRTFFALALALSVLRDVAARRRWRVAEYLPSTICVAIAFVVPAHMPIDMFTGSLAMYLWRRADPRRAPICIKFVSSSDNVRLDAFLATLPKIS

SEQ ID NO: 96338 - protein, 221 aa, Setaria italica
  misc_feature (214)..(214): Xaa can be any naturally occurring amino acid
  Transcript Sequence Number=SeqID_30364
  Gene Ontology: Mol. function=sequence-specific DNA binding; Cellular component=nucleus; Biological process=regulation of transcription, DNA-dependent
  Homolog annotation: Hit_ID=B9RN37; Match level="QueryCoverage=93%, HitCoverage=42%, E-value=3e-45, Identity=47%"; Hit description=WRKY transcription factor, putative
  Pfam annotation: Domain name=WRKY; Domain location=144-204; Score =138.5; E_value=2.2e-38; Accession=PF03106.7; Description=WRKY DNA -binding domain
RGMLEELTRSYGTLYQQLLQVDKQPQHQHQHPDLMNNRSSLPHTHLNTMGAPNTSTRQLLEARASSTAQTQPDAGVEDEASDGAGEASPSLSNNAGNNDSDGKRKLSQDGTAPSRENGEQASSAELPGRKARVSVRARSEAPMISDGCQWRKYGQKMAKGNPCPRAYYRCTMAVACPVRKQVQRCAEDKTILVTTYEGHHNHPLPPAATTMANXTSAAASM

SEQ ID NO: 96339 - protein, 253 aa, Setaria italica
  Transcript Sequence Number=SeqID_30365
  Gene Ontology: Mol. function=nuclease activity; Cellular component =intracellular; Biological process=DNA repair
  Homolog annotation: Hit_ID=O81990; Match level="QueryCoverage=89%, HitCoverage=38%, E-value=3e-39, Identity=46%"; Hit description =Putative transcription repressor HOTR
  Subcellular localization annotation: CTP_CleavageSite=45; ConfidenceScore=5.30e-01
LKQDIFGVKVGIKIKGSGSVNTPPGIMKSMLPRVRTFVGFRPQPVNSEDSGGEATDIPWKKISGIPCGNRQAHRRRSGGHRIKKIDVAKRRTVPIQDSNSFCGVVLEDGSSCLEHPVEGRKRCSLHKGRRVKGSPKSSSTSYPCQAEIPIPHLTEDLDNSDQTQEIIESIPHLTEDLDSSDRTQESKILPQNISTTVEESPRQSNSIKEEEVKTREAPTEDGKHDASRDACICDCEEKASHAEPDVPGTARPF

SEQ ID NO: 96340 - protein, 69 aa, Setaria italica
  Transcript Sequence Number=SeqID_30366
  Gene Ontology: Cellular component=nucleus
  Homolog annotation: Hit_ID=B6UCL1; Match level="QueryCoverage=100%, HitCoverage=9%, E-value=3e-30, Identity=94%"; Hit description =Nucleolar protein 10
MAANHGAGTLKSTSINGVKLYSLTGNRYVAPWVLAKKKRALRKDEEYQRRLDLIHDLRFETATTKIKLT

SEQ ID NO: 96341 - protein, 47 aa, Setaria italica
  Transcript Sequence Number=SeqID_30367
LHITLLIRMRCPEKYNHCDEQANTSSHLRVNCPTSVFKFASGSQQSL

SEQ ID NO: 96342 - protein, 384 aa, Setaria italica
  Transcript Sequence Number=SeqID_30368
  Gene Ontology: Mol. function=metal ion binding; Cellular component =cytoplasm; Biological process=protein amino acid methylation
  Homolog annotation: Hit_ID=B6U5U6; Match level="QueryCoverage=99%, HitCoverage=79%, E-value=4e-93, Identity=50%"; Hit description =Protein binding protein
  Pfam annotation: Domain name=zf-C3HC4; Domain location=17-56; Score =39.3; E_value=1.5e-08; Accession=PF00097.17; Description=Zinc finger, C3HC4 type (RING finger)
QEFIPVKLADIRKEVQCPICLGIIRKTRTVMECLHRFCRECIDKSMRLGNNECPACRTHCASRRSLRDDPNYDALIAALYPDIDKYEEEELAFNEEENDRNKQIQASIAEAFRKQSEVIGRKSTAKATAAAFVRRSRRNIRANGHSTYFRGRGRASSDDAALACSDDEEDGNGENGGKEESSAEESSPEKKQKRPPKWPTPRSSPARAACNEEVASDDKDDVGISRENFSTSPLRAWGKNGTRSQTRYSSFSGSNGRVVKGGRMIKLVECLRNSDDNDSERDIHLCLLPLDGQTTPNLEKPYLCCGPTLSIKQLCQFVATQTSHKDEEVEIYALKPSYSDLVSTNTSGFDKARLVGEERLSDLRSSFTFPNGVLELVYAIKVAN

SEQ ID NO: 96343 - protein, 104 aa, Setaria italica
  Transcript Sequence Number=SeqID_30369
PFTKASFYVISSLFFLYFPPQLLATRASKKAPYLLCNEFHDLLHHCSHDMAPSGNIISSLQVGILSVQVAGVEDGAAGADLLAANRERARVRQRRRRDPDAPPL

SEQ ID NO: 96344 - protein, 129 aa, Setaria italica
  Transcript Sequence Number=SeqID_30370
  Gene Ontology: Mol. function=carbohydrate binding; Biological process= carbohydrate metabolic process
  Homolog annotation: Hit_ID=Q7XV00; Match level="QueryCoverage=99%, HitCoverage=35%, E-value=8e-42, Identity=62%"; Hit description =OSJNBa0036B21.19 protein
NATALNKATPVNLVNHAYWNLAGHGSGDVLGHVIQVLASQYTPVDQSMIPTGEIAAVAGTPYDLRRPTPLGSRIGLVSGGGAVGYDVNYAVHGQGFTLVARVRDPASGRAFELWANQPGVQLYTSNWLK

SEQ ID NO: 96345 - protein, 95 aa, Setaria italica
  Transcript Sequence Number=SeqID_30371
  Gene Ontology: Mol. function=nucleoside transmembrane transporter activity; Cellular component=membrane; Biological process=transport
  Homolog annotation: Hit_ID=B6U145; Match level="QueryCoverage=96%, HitCoverage=22%, E-value=5e-31, Identity=75%"; Hit description =Nucleoside transporter
WLQDYHPTRVLTPSVRTLAFGITLIMTYYEAKMNTRRRNLAGFSLFFLGSFSLIILDVATKGRGGLGVFVGVCIISAIFGTADANCQGALVGDLS

SEQ ID NO: 96346 - protein, 140 aa, Setaria italica
  misc_feature (109)..(109): Xaa can be any naturally occurring amino acid
  Transcript Sequence Number=SeqID_30372
SSRLLDDNPLPLNEVSASELLVSFSHGHLQSGQPPIVGLRSSMPQVDRGFVTLVASDHPGIEVCNPNGHWYLADGVSGPNDLLLLTGRALSHVTAGIQLNSQYRTTNSXNRASLMFRLMPRADAILDCSPISAAGHCITY

SEQ ID NO: 96347 - protein, 113 aa, Setaria italica
  misc_feature (78)..(78): Xaa can be any naturally occurring amino acid
  Transcript Sequence Number=SeqID_30373
LRKLNLGCREVPSRYMCQLTNPKTAKKGEETALTKSAKRGQESRTNVKKKILGRSVKCANAEPDENRNGCGNTAADEXNSRTETARPNEKRKAVLQELTIEVDAARAEDDNKE

SEQ ID NO: 96348 - protein, 73 aa, Setaria italica
  Transcript Sequence Number=SeqID_30374
  Gene Ontology: Mol. function=protein tyrosine kinase activity; Biological process=protein amino acid phosphorylation
  Homolog annotation: Hit_ID=Q654A3; Match level="QueryCoverage=46%, HitCoverage=4%, E-value=9e-09, Identity=76%"; Hit description =Putative receptor-like protein kinase PRK1
FDKDMRGTRSGEGEMLKLLKVGLGCCEPDVSRRWGLEEALARIEELRERDSGDDSISTASSFVSDGEPQSHSA

SEQ ID NO: 96349 - protein, 176 aa, Setaria italica
  misc_feature (159)..(159): Xaa can be any naturally occurring amino acid
  Transcript Sequence Number=SeqID_30375
  Gene Ontology: Mol. function=nucleic acid binding; Cellular component= nucleus; Biological process=regulation of transcription, DNA-dependent
  Homolog annotation: Hit_ID=Q67W65; Match level="QueryCoverage=100%, HitCoverage=9%, E-value=2e-66, Identity=79%"; Hit description =Transcription initiation factor TFIID subunit 1
  Pfam annotation: Domain name=TBP-binding; Domain location=17-83; Score=15.9; E_value=0.0074; Accession=PF09247.3; Description=TATA box-binding protein binding
MSDGERRDEENPTASAADDDDDEDYEEPGGGNHFLGFMFGNVDDSGDFDADYLDEDAKEHLFALADKLGPSFKDIDLIKSSPAPTDPSEQDYDEKAEDAVDYEDIDEEYDGPEVEAATEEDNVLSKKDYLSSAVYASVNNTVSVFDEDNYDEDEETPNXNKSTGDNAVQNLSSVSS

SEQ ID NO: 96350 - protein, 42 aa, Setaria italica
  Transcript Sequence Number=SeqID_30376
LVGAFETVISLQDGKPTSSTQQAGSSQDLFPDDEVNAPEEAE

SEQ ID NO: 96351 - protein, 72 aa, Setaria italica
  Transcript Sequence Number=SeqID_30377
  Gene Ontology: Mol. function=small conjugating protein ligase activity; Biological process=regulation of protein metabolic process
  Homolog annotation: Hit_ID=B6T921; Match level="QueryCoverage=100%, HitCoverage=37%, E-value=6e-33, Identity=88%"; Hit description =Ubiquitin-conjugating enzyme E2 W
  Pfam annotation: Domain name=UQ_con; Domain location=1-72; Score= -1.8; E_value=5.2e-05; Accession=PF00179.18; Description=Ubiquitin -conjugating enzyme
RWMKQHERWVIDVAGAPGTLYTGETYQLQVDFPEHYPMEAPQVIFLHPAPMHPHIYSNGHICLDILYDSWSP

SEQ ID NO: 96352 - protein, 165 aa, Setaria italica
  Transcript Sequence Number=SeqID_30378
  Gene Ontology: Mol. function=small conjugating protein ligase activity; Biological process=ubiquitin-dependent protein catabolic process
  Homolog annotation: Hit_ID=A9PC20; Match level="QueryCoverage=92%, HitCoverage=95%, E-value=6e-77, Identity=85%"; Hit description =Ubiquitin carrier protein
  Pfam annotation: Domain name=UEV; Domain location=24-138; Score= -33.9; E_value=0.009; Accession=PF05743.5; Description=UEV domain
  Pfam annotation: Domain name=UQ_con; Domain location=23-162; Score =185.2; E_value=1.8e-52; Accession=PF00179.18; Description=Ubiquitin -conjugating enzyme
  Pfam module annotation: Pfam domain module=UEV::UQ_con; Domain location=24-138::23-162
MTSSSSSSSSTSRKALSKIACSRLQKELSEWQVNPPAGFKHRVTDNLQRWVIDVAGAPGTLYTGETYQLQVDFPEHYPMEAPQVIFLHPAPMHPHIYSNGHICLDILYDSWSPAMTVSSVCISILSMLSSSPAKQRPADNDRYVRNCRNGRSPKETRWWFHDDTV

SEQ ID NO: 96353 - protein, 57 aa, Setaria italica
  Transcript Sequence Number=SeqID_30379
FSFVMRCYALQRLYQEFCQLFNLASSLQACGVGMSKKFFSSSFQPNYFTVDLKTTIP

SEQ ID NO: 96354 - protein, 104 aa, Setaria italica
  Transcript Sequence Number=SeqID_30380
MEPADRGGGGRGRGWKGKGVSSGSAAGRQLAPVLEDAPAAALLRPLKKIRSPDRRLNRSLSALSSAPPSPDSSSVSNPMSPPATSLPSTRHIFPFAYDPAPAAS

SEQ ID NO: 96355 - protein, 179 aa, Setaria italica
  Transcript Sequence Number=SeqID_30381
  Gene Ontology: Mol. function=protein binding; Cellular component =Golgi membrane; Biological process=protein transport
  Homolog annotation: Hit_ID=Q9SSD6; Match level="QueryCoverage=84%, HitCoverage=100%, E-value=1e-56, Identity=66%"; Hit description =F18B13.6 protein
  Pfam annotation: Domain name=SYS1; Domain location=30-172; Score =256.9; E_value=4.9e-74; Accession=PF09801.1; Description=Integral membrane protein S linking t
EKLGRGEKKPPPFLLPSGEISRGRGAKMFYGAIVWDPWLIVSQIVCLQCLYYLALGLSMSLLVGTRVPRLTLLYFFDFATLTPRTPTGWCAIASFLLAAVAGAGFMLYVIERAKKCLDFAATLYIIHLFICIVYGGWPASVTWWVVNIAGLAIMALLGEYLCIRRELKEIPISRLRASV

SEQ ID NO: 96356 - protein, 78 aa, Setaria italica
  misc_feature (68)..(68): Xaa can be any naturally occurring amino acid
  Transcript Sequence Number=SeqID_30382
  Gene Ontology: Mol. function=aspartate-tRNA ligase activity; Cellular component=cytoplasm; Biological process=tRNA aminoacylation for protein translation
  Homolog annotation: Hit_ID=A8J1X8; Match level="QueryCoverage=98%, HitCoverage=14%, E-value=3e-31, Identity=79%"; Hit description =Aspartyl-tRNA synthetase
VDPMGDLNTEAEKKLGELVRDKYGTEFYMLCRYPSAVRPFYTMPCSDDPRYSCSFDVFVRGEEIISGXQRVHDPELLA

SEQ ID NO: 96357 - protein, 37 aa, Setaria italica
  Transcript Sequence Number=SeqID_30383
PRGQLGSTQITMTMVGPRPTQLRLITRWTALKMISGY

SEQ ID NO: 96358 - protein, 241 aa, Setaria italica
  Transcript Sequence Number=SeqID_30384
  Gene Ontology: Mol. function=transporter activity; Cellular component= membrane; Biological process=oligopeptide transport
  Homolog annotation: Hit_ID=Q7XUE5; Match level="QueryCoverage=100%, HitCoverage=42%, E-value=1e-107, Identity=77%"; Hit description =OSJNBa0076N16.17 protein
  Pfam annotation: Domain name=PTR2; Domain location=52-241; Score= -98.9; E_value=0.014; Accession=PF00854.13; Description=POT family
  Subcellular localization annotation: CTP_CleavageSite=32; ConfidenceScore=5.27e-01
NIPFLLNSVIYLQGTMHMGVSGSATTVTNLVGATSGFALIGAFLSDSYITRSRTILLFGPLEFLGYGLLALQAYIPSLHPPPCNIELSDCKEVHGWNATLFYAALYISAFGEGCIRACLPSLGADQFDHEDPSESHQQSSFFNWYTFGISFGGFVGLIFIVWLQNYKGWDIGLGFCAILILLGLLVFAAGLPFYRNQVPEGSPLTRILQVLVVAFRNRRFELPEELEEARGSRKDKGSAKV

SEQ ID NO: 96359 - protein, 184 aa, Setaria italica
  Transcript Sequence Number=SeqID_30385
  Gene Ontology: Mol. function=DNA binding; Cellular component=nucleus; Biological process=regulation of transcription, DNA-dependent
  Homolog annotation: Hit_ID=B6SV30; Match level="QueryCoverage=93%, HitCoverage=45%, E-value=6e-59, Identity=67%"; Hit description=TCP family transcription factor containing protein
TYNRGRTYGPATISAAEHKHSWQQQQPNVSAAAAADCVGIAHPGKGAHGLSTHAFSAPIKFGNAPPFGMVPAQPFNFTSSVEMPHFSLGQDALAASSASAGDYSLNFSMSSGFLGANRGTLQSNSQSNFSGYHHQQLQRLDGPFLFGHAAAAAHPASENQLTASAALQLWDGFRHSGMKEKSKN

SEQ ID NO: 96360 - protein, 137 aa, Setaria italica
  misc_feature (84)..(84): Xaa can be any naturally occurring amino acid
  misc_feature (124)..(124): Xaa can be any naturally occurring amino acid
  Transcript Sequence Number=SeqID_30386
  Gene Ontology: Mol. function=hydrolase activity, acting on acid anhydrides, catalyzing transmembrane movement of substances; Cellular component=integral to membrane; Biological process=calcium ion transport
  Homolog annotation: Hit_ID=Q2QMX9; Match level="QueryCoverage=100%, HitCoverage=10%, E-value=7e-46, Identity=70%"; Hit description =Calcium-transporting ATPase 1, plasma membrane-type
LFGIKDPVRPGVRQSVATCRSAGIEVRMITGDNINTAKAIARECGILTEDGLAIEGAEFREKNPKELLELIPKIQVLARVFTTXTNMPIASPISASCNAGASFVSSPLDKHTLVKHLRTTFNDXLFAVTGDGTNDAP

SEQ ID NO: 96361 - protein, 179 aa, Setaria italica
  Transcript Sequence Number=SeqID_30387
  Gene Ontology: Mol. function=ATPase activity, coupled to transmembrane movement of ions, phosphorylative mechanism; Cellular component=membrane; Biological process=calcium ion transport
  Homolog annotation: Hit_ID=Q94IN1; Match level="QueryCoverage=91%, HitCoverage=29%, E-value=1e-85, Identity=92%"; Hit description=P -type ATPase (Fragment)
  Pfam annotation: Domain name=Cation_ATPase_C; Domain location=75-177; Score=-7.9; E_value=0.002; Accession=PF00689.13; Description=Cation transporting ATPase, C-terminus
TIEADIGLAMGIAGTEVAKESADVIILDDNFSTIVTVAKWGRSVYINIQKFVQFQLTVNVVALLVNFSSACFTGNAPLTAVQLLWVNMIMDTLGALALATEPPNDDLMKREPVGRTGKFITNVMWRNILGMSFYQFFVMWYLQTQGKNFFGLEGSDTDVVLKLLINFLTSISLLYLVPS

SEQ ID NO: 96362 - protein, 117 aa, Setaria italica
  misc_feature (105)..(105): Xaa can be any naturally occurring amino acid
  Transcript Sequence Number=SeqID_30388
  Gene Ontology: Mol. function=hydrolase activity, acting on acid anhydrides, catalyzing transmembrane movement of substances; Cellular component=integral to membrane; Biological process=calcium ion transport
  Homolog annotation: Hit_ID=Q6ATV4; Match level="QueryCoverage=86%, HitCoverage=9%, E-value=2e-49, Identity=96%"; Hit description =Calcium-transporting ATPase 2, plasma membrane-type
VSGHKHLLPDSVNYFTQVAKESADVVILDDNFSTIVTVAKWGRSVYVNIQKFVQFQLTVNVVALLVNFCSACFTGDAPLTAVQLLWVNMIMDTLGALALATEPPXDNLMKKAPVGRA

SEQ ID NO: 96363 - protein, 99 aa, Setaria italica
  Transcript Sequence Number=SeqID_30389
  Gene Ontology: Mol. function=hydrolase activity, acting on acid anhydrides, catalyzing transmembrane movement of substances; Cellular component=integral to membrane; Biological process=calcium ion transport
  Homolog annotation: Hit_ID=Q6ATV4; Match level="QueryCoverage=100%, HitCoverage=9%, E-value=4e-43, Identity=77%"; Hit description =Calcium-transporting ATPase 2, plasma membrane-type
TKVMWRNILGQSIFQFAVMWYLQTQGKYLFGLEGSDSDIVLNTIIFNTFVFCQVFNEISSRDMDEINVLKGLPDNSIFMAILAGTVIFQFIIVQFLGDF

SEQ ID NO: 96364 - protein, 128 aa, Setaria italica
  Transcript Sequence Number=SeqID_30390
  Gene Ontology: Mol. function=hydrolase activity, acting on acid anhydrides, catalyzing transmembrane movement of substances; Cellular component=integral to membrane; Biological process=calcium ion transport
  Homolog annotation: Hit_ID=Q6ATV4; Match level="QueryCoverage=84%, HitCoverage=10%, E-value=1e-52, Identity=96%"; Hit description =Calcium-transporting ATPase 2, plasma membrane-type
RYWPESSPLDKLTLVKHLRTTFNEVVAVTGDGTNDAPALREADIGLAMGIAGTEVAKESADVVILDDNFSTIVTVAKWGRSVYVNIQKFVQFQLTVNVVALLVNFCSACFTGIFYLVNCVNLSSPSQC

SEQ ID NO: 96365 - protein, 885 aa, Setaria italica
  misc_feature (428)..(428): Xaa can be any naturally occurring amino acid
  Transcript Sequence Number=SeqID_30391
  Gene Ontology: Mol. function=hydrolase activity, acting on acid anhydrides, catalyzing transmembrane movement of substances; Cellular component=integral to membrane; Biological process=calcium ion transport
  Homolog annotation: Hit_ID=Q2QMX9; Match level="QueryCoverage=100%, HitCoverage=86%, E-value=0.0, Identity=89%"; Hit description=Calcium- transporting ATPase 1, plasma membrane-type
  Pfam annotation: Domain name=Cation_ATPase_C; Domain location=705 -880; Score=162.2; E_value=1.6e-45; Accession=PF00689.13; Description= Cation transporting ATPase, C-terminus
  Pfam annotation: Domain name=Cation_ATPase_N; Domain location=1-56; Score=25.5; E_value=1.1e-05; Accession=PF00690.18; Description =Cation transporterATPase, N-terminus
  Pfam annotation: Domain name=E1-E2_ATPase; Domain location=70-311; Score=253.9; E_value=3.9e-73; Accession=PF00122.12; Description=E1 -E2 ATPase
  Pfam annotation: Domain name=Hydrolase; Domain location=315-644; Score=56.8; E_value=8.5e-14; Accession=PF00702.18; Description =haloacid dehalogenase-like hydrolase
  Pfam module annotation: Pfam domain module=Cation_ATPase_C::Cation _ATPase_N::E1-E2_ATPase::Hydrolase; Domain location=705-880::1-56::70- 311::315-644
LSTDEDSIKRRQDIYGINKFTESEIRSFWVFVWEALQDTTLIILAVCAFVSLVVGIAMEGWPKGAHDGLGIVASILLVVFVTATSDYRQSLQFKDLDKEKKKIQVQVTRNGFRQRLSIYDLLPGDVVHLAIGDQVPADGLFISGFSLLINESSLTGESEPVAVSEDNPFLLSGTKVQDGSCKMLVTTVGMRTQWGKLMATLSEGGDDETPLQVKLNGVATIIGQIGLFFAVITFIVLSQGLFSKKYHEGLLLSWSGDEALELLEHFAIAVTIVVVAVPEGLPLAVTLSLAFAMKKMMNDKALVRNLAACETMGSATTICSDKTGTLTTNHMTVVKACICGNIKEVNGSQNASKLCSELPEIVVKTLLESIFNNTGGEVVFNQDGKYQILGTPTETALLEFALALGGDFKAKRDETKIVKVEPFNSTKXRMGVILELPGGGHRAHCKGASEIVLAACDKFLDETGSVHPLDQATADKLNGVIDSFAGEALRTLCLAYREMEEGFSIMEHIPLQGYTCIGIVGIKDPVRPGVRESVATCRAAGIMVRMVTGDNINTAKAIARECGILTEDGIAIEGPEFREKSLDELLKLVPKIQVMARSSPLDKHTLVKHLRTTFNDVVAVTGDGTNDAPALHEADIGLAMGIAGTEVAKESADVIILDDNFSTIVTVAKWGRSVYINIQKFVQFQLTVNVVALLVNFSSACFTGNAPLTAVQLLWVNMIMDTLGALALATEPPNDDLMKREPVGRTGKFITNVMWRNILGMSFYQFFVMWYLQTQGKNFFGLEGSDTDVVLNTIIFNSFVFCQVFNEISSREMEKINVLKGMMKNYVFMAVLTSTVMFQFIMVQFLGEFANTRPLTVHQWIASVLLGLAGMPIAVAIKLIPVGSS

SEQ ID NO: 96366 - protein, 93 aa, Setaria italica
  Transcript Sequence Number=SeqID_30392
PASPVRRRHRGVAVRCAPNGDVASASDTKSNLKVGSPIVILEAPVMLKTAASVPSLRHNSGQVKAGDVGRIMARKPKDVWAVRLAAGMYLLDG

SEQ ID NO: 96367 - protein, 104 aa, Setaria italica
  Transcript Sequence Number=SeqID_30393
  Subcellular localization annotation: CTP_CleavageSite=39; ConfidenceScore=5.72e-01
MAHPLLAAATTAVSSPYVSSTARVPASPVRRRHRGVAVRCAPNGDVASASDTKSNLKVGSPIVILEAPVMLKTAASVPSLRHNSGQVKAGDVGRYVIYSGTRSE

SEQ ID NO: 96368 - protein, 188 aa, Setaria italica
  Transcript Sequence Number=SeqID_30394
ELIDCSVVGKKIQSTSLRCLTMIDCKFAIGSWVNVPNLLSLRCTRPFQQVPCFWNMKFLVTAIIALDDSCIPSDSWWTWADDHKDESDHDGDFFAHSRAEDSDDNGEFFDNESNHFFEYSGAEDSDDNGEFFEHSGLKTLMLTVIMNLIRMKKMNLVLMVLILVLRSRMITSMLALRNLVMTMMMNLT

SEQ ID NO: 96369 - protein, 99 aa, Setaria italica
  Transcript Sequence Number=SeqID_30395
  Pfam annotation: Domain name=F-box; Domain location=15-62; Score =38.5; E_value=2.7e-08; Accession=PF00646.25; Description=F-box domain
PGIGDGAEKARPAEEPARLMCDDALTEVFRRLPARALAACRLVCKSWMSVLTDPHFIHEHLRRGQQKLLLFANDRVIDRSLAMVLSDDNKSMYQLSRPE

SEQ ID NO: 96370 - protein, 129 aa, Setaria italica
  Transcript Sequence Number=SeqID_30396
  Gene Ontology: Mol. function=carbon-nitrogen ligase activity, with glutamine as amido-N-donor
  Homolog annotation: Hit_ID=B9RX50; Match level="QueryCoverage=84%, HitCoverage=17%, E-value=2e-40, Identity=70%"; Hit description =Glutamyl-tRNA(Gln) amidotransferase subunit A, putative
VCYNVLSEAKDFLVGTNTQLISSRRRTEFTLDTRTSLALFGSFTSTDYVASQCIRRRIMHYHMEAFKKVDVIATPTTGITAPKIPPSALKSGESDYVVSAYLMRFVIAGNLIGLPALTVPVGHDKQGLP

SEQ ID NO: 96371 - protein, 71 aa, Setaria italica
  Transcript Sequence Number=SeqID_30397
  Gene Ontology: Mol. function=carbon-nitrogen ligase activity, with glutamine as amido-N-donor
  Homolog annotation: Hit_ID=A2Q1B2; Match level="QueryCoverage=77%, HitCoverage=8%, E-value=2e-14, Identity=61%"; Hit description=Amidase
ILSSNADKLSPVTCCCLSCQVGHDKQGLPIGLQLIGRPWGEASLLRVASAVEELCLKKRNRPSAFYDILKA

SEQ ID NO: 96372 - protein, 320 aa, Setaria italica
  Transcript Sequence Number=SeqID_30398
  Gene Ontology: Mol. function=carbon-nitrogen ligase activity, with glutamine as amido-N-donor; Biological process=translation
  Homolog annotation: Hit_ID=B9RX50; Match level="QueryCoverage=100%, HitCoverage=52%, E-value=1e-118, Identity=63%"; Hit description =Glutamyl-tRNA(Gln) amidotransferase subunit A, putative
  Pfam annotation: Domain name=Amidase; Domain location=1-294; Score= -17.3; E_value=1.7e-10; Accession=PF01425.13; Description=Amidase
  Subcellular localization annotation: CTP_CleavageSite=56; ConfidenceScore=5.21e-01
LVSSGLCSVALGTDGGGSVRIPSALCGIVGFKTTFGRTDMTGVLCDSGTVAVASPLASSVEDVMLVYSAIAGSRPMDKLTLRPSPLCVPNLLSPDNSNIMGSVKIGKYTEWFHDVSDREISSTCEDALNLLCSTFGCQIEEIILPELEEMRTAHVVSIGSESLCDLTPHYKAGRRTEFTLDTRTSLALFGSFTSTDYVASQCIRRRIMHYHMEAFKKVDVIATPTTGITAPKIPPSALKSGESDYVVSAYLMRFVIAGNLIGLPALTVPVGHDKQGLPIGLQLIGRPWGEASLLRVASAVEELCLKKRNRPSAFYDILKA

SEQ ID NO: 96373 - protein, 357 aa, Setaria italica
  misc_feature (55)..(55): Xaa can be any naturally occurring amino acid
  Transcript Sequence Number=SeqID_30399
  Gene Ontology: Mol. function=carbon-nitrogen ligase activity, with glutamine as amido-N-donor
  Homolog annotation: Hit_ID=B9RX50; Match level="QueryCoverage=91%, HitCoverage=53%, E-value=1e-121, Identity=66%"; Hit description =Glutamyl-tRNA(Gln) amidotransferase subunit A, putative
  Pfam annotation: Domain name=Amidase; Domain location=94-356; Score= -23.9; E_value=3.6e-10; Accession=PF01425.13; Description=Amidase
RPSLWVGFTQMLQQTVIPERPMYFPEYPPQDPEPGVVLVGDDRHPVERVHEALQXLPPYDPSVRWATEEKLPFLYWKIRDFAHAYRSGITTPSVVAEHVIAGVEEWNNKKPPMPMLIYFNADDLRKQAEDSTRRFEQGNPISILDGVFVAIKDDIDCFPYPTKGATTFFDQTHTVEKDAVCVARLRKCGVIFIGKANMHELGLGVTGNNPNYGTARNPHSVDRYTGGSSSGPAALVSSGLCSVALGTDGGGSVRIPSALCGIVGFKTTFGRTDMTGVLCDSGTVAVASPLASSVEDVMLVYSAIAGSRPMDKLTLRPSPLCVPNLLSSTKNSGMLFMSTVCGQIVPVSQPLRQFALK

SEQ ID NO: 96374 - protein, 85 aa, Setaria italica
  Transcript Sequence Number=SeqID_30400
  Gene Ontology: Mol. function=hydrolase activity
VAAAVFVAASMPAVGRPMAATSDELLAYLGPDFFLDSKELQQENPEIKGKPFIFGPNFMAQRLYQLSPPEVTFILDATSQIRIWF

SEQ ID NO: 96375 - protein, 84 aa, Setaria italica
  Transcript Sequence Number=SeqID_30401
  Gene Ontology: Mol. function=transferase activity
  Homolog annotation: Hit_ID=Q5EXL9; Match level="QueryCoverage=97%, HitCoverage=17%, E-value=3e-11, Identity=44%"; Hit description=HGA1
MGCPGGPLSTHDFTRFMREVYALPRDAPASLVREPEKRPRLLLVHRGHSRRIMNEQEVLRAAEAAGFEAVAVDFRRDVTVDEQA

SEQ ID NO: 96376 - protein, 238 aa, Setaria italica
  misc_feature (216)..(216): Xaa can be any naturally occurring amino acid
  misc_feature (230)..(230): Xaa can be any naturally occurring amino acid
  Transcript Sequence Number=SeqID_30402
  Subcellular localization annotation: CTP_CleavageSite=25; ConfidenceScore=5.06e-01
DKALVQLNTTVQTPQGLRKSRMLVTGSMNGSIRLYGLGSALNNFGNEMEFWPQPAWTPMGKHKSAALPSIWSSEAAFSILSSGITCIQKFGPHVPDASSNSSVQQALVATLGSGESGGSVYVMDLSDTIETTIGSWTRVASLDHTVWTADCSSDSKHAAFGTDHGAGLVDLETRGFSRLCRSKSAILSLKFVHSGNVVLCGLRNGSIAPVDVRQKXLNHPTGVPSPSTAXRRTVPMLS

SEQ ID NO: 96377 - protein, 79 aa, Setaria italica
  misc_feature (52)..(52): Xaa can be any naturally occurring amino acid
  Transcript Sequence Number=SeqID_30403
  Gene Ontology: Mol. function=cysteine-type endopeptidase activity; Biological process=proteolysis
  Homolog annotation: Hit_ID=B6U746; Match level="QueryCoverage=84%, HitCoverage=15%, E-value=1e-13, Identity=62%"; Hit description =Metacaspase type II
FTMVSDSCHSGGLIDKTKEQIGNSTKQSKAQQLRDRDMKPPPAPPGPGPAPXTSLLRIIHGALKSLGIHLPCHGHKQST

SEQ ID NO: 96378 - protein, 53 aa, Setaria italica
  Transcript Sequence Number=SeqID_30404
  Gene Ontology: Mol. function=ATP binding; Cellular component =chromosome; Biological process=chromosome organization and biogenesis
  Homolog annotation: Hit_ID=Q8GU52; Match level="QueryCoverage=100%, HitCoverage=5%, E-value=2e-20, Identity=86%"; Hit description=SMC6 protein
IWQDAVSRKISLDTLVDFAIAQGSQWIFITPHDISMVKAGDRIKKQQMAAPRG

SEQ ID NO: 96379 - protein, 71 aa, Setaria italica
  Transcript Sequence Number=SeqID_30405
IELNQTEPQQSTGLLLETMHRMIHPHIHGLLEIQIREGYMIKKFLHAWLEIWLFNVLALEAINFCIAHLQS

SEQ ID NO: 96380 - protein, 85 aa, Setaria italica
  misc_feature (33)..(33): Xaa can be any naturally occurring amino acid
  Transcript Sequence Number=SeqID_30406
  Gene Ontology: Mol. function=protein serine/threonine kinase activity; Biological process=protein amino acid phosphorylation
  Homolog annotation: Hit_ID=Q6ERZ1; Match level="QueryCoverage=91%, HitCoverage=16%, E-value=1e-13, Identity=51%"; Hit description =Receptor protein kinase-like
LSFRPAPGPNYWDTVYPDATMNFVFEAIFVAWXGWAPVCLVNTGRGTPFMSSLELRQLGDALYPLVVPGLIISMYTRENMGSSDS

SEQ ID NO: 96381 - protein, 70 aa, Setaria italica
  misc_feature (4)..(4): Xaa can be any naturally occurring amino acid
  Transcript Sequence Number=SeqID_30407
RVTXPGYFTAELVLAFLFVAVSLAFLPLVLPPLSPPPLLLLVVPVGLLAVLVALAFVPLDAQSHLVGSSR

SEQ ID NO: 96382 - protein, 434 aa, Setaria italica
  misc_feature (51)..(51): Xaa can be any naturally occurring amino acid
  misc_feature (417)..(417): Xaa can be any naturally occurring amino acid
  Transcript Sequence Number=SeqID_30408
  Gene Ontology: Mol. function=transcription corepressor activity; Cellular component=nuclear speck; Biological process=mRNA processing
  Homolog annotation: Hit_ID=B9IJU0; Match level="QueryCoverage=98%, HitCoverage=87%, E-value=8e-97, Identity=47%"; Hit description=F-box family protein
  Pfam annotation: Domain name=WD40; Domain location=134-176; Score =24.8; E_value=0.00035; Accession=PF00400.24; Description=WD domain, G-beta repeat
  Pfam annotation: Domain name=WD40; Domain location=184-223; Score =30.9; E_value=5.2e-06; Accession=PF00400.24; Description=WD domain, G-beta repeat
  Pfam annotation: Domain name=WD40; Domain location=272-309; Score =13.1; E_value=1.1; Accession=PF00400.24; Description=WD domain, G -beta repeat
  Pfam annotation: Domain name=WD40; Domain location=82-133; Score=7.7; E_value=4.8; Accession=PF00400.24; Description=WD domain, G-beta repeat
  Pfam module annotation: Pfam domain module=WD40::WD40::WD40::WD40; Domain location=134-176::184-223::272-309::82-133
WYRLFRDQWPFEKIRGAVGLRELYIRRHTEVHQMKFDDPLSAIFYLNPCGXTSPSHLMLDKNSVWLSQGSVAKKLSFDWPVSEVVETHRNHSARITCMRSFSLIDTPLFRSDTQKNEKALVTSSTDRTIRLCWKGHSRCYKGHSAPVTALVDKLLVDGESKVLASGGEDCTIRLWSMSTRAKNHPLIATFHGHEKALSFLSVARHKSSLLVSCSKDSKVKVWDTVAASSGSSSCVGSTHINSSGPPIALKCHESLCYMVAGSEVTAIDLRTMKKASVLALHNHGILSCEMLPSEWLICTGTKDKALLWDIRKGQELPNAVAELHSDGPVTLLHLDPYKVVTGVPSDCEVHVWETRTGELLNTLSCGEPADLGGRSRLSAMAVDGCRIAMAGSSPEASVFHYRDFVKSSAPVSLPGKXEVSRFWRPSSATTIAMI

SEQ ID NO: 96383 - protein, 137 aa, Setaria italica
  misc_feature (33)..(33): Xaa can be any naturally occurring amino acid
  Transcript Sequence Number=SeqID_30409
  Homolog annotation: Hit_ID=B6SU58; Match level="QueryCoverage=94%, HitCoverage=46%, E-value=1e-60, Identity=83%"; Hit description=COV1
  Pfam annotation: Domain name=DUF502; Domain location=54-137; Score =85.1; E_value=2.6e-22; Accession=PF04367.5; Description=Protein of unknown function (DUF502)
IGEKNPSKKFMTGCVILFPIAITFYITWWFIHXVDGFFSPIYAQLGINIFGLGFVTSVTFIFLIGVFMSSWVGASVLSLGEWIIKRMPLVRHIYNASKQISAAISPDQNKQAFKEVVIIRHPRVGEYAFGFITSSVS

SEQ ID NO: 96384 - protein, 275 aa, Setaria italica
  Transcript Sequence Number=SeqID_30410
  Homolog annotation: Hit_ID=B6SU58; Match level="QueryCoverage=100%, HitCoverage=100%, E-value=1e-102, Identity=66%"; Hit description=COV1
  Pfam annotation: Domain name=DUF502; Domain location=116-222; Score =139.9; E_value=8.1e-39; Accession=PF04367.5; Description=Protein of unknown function (DUF502)
MGDNKSPLSLNPMGGRDRDRELLIPVSGGGSAPGDGAENGDRASSSSSSAALSSSGREAFHKVVRSWASKKFMTGCVILFPIAITFYITWWFIHFVDGFFSPIYAQLGINIFGLGFVTSVTFIFLIGVFMSSWVGASVLSLGEWIIKRMPLVRHIYNASKQISAAISPDQNKQAFKEVVIIRHPRVGEYAFGFITSSVSLQSYSGQEDLYCVYVPTNHLYIGDIFMVNSKDVIRPNLSVREGIEIVVSGGMSMPQILSTLDPQVILGDRTGPSRS

SEQ ID NO: 96385 - protein, 127 aa, Setaria italica
  Transcript Sequence Number=SeqID_30411
  Homolog annotation: Hit_ID=B6T5B2; Match level="QueryCoverage=72%, HitCoverage=50%, E-value=2e-38, Identity=82%"; Hit description=CHCH domain containing protein
  Pfam annotation: Domain name=CHCH; Domain location=76-117; Score =21.3; E_value=0.004; Accession=PF06747.5; Description=CHCH domain
  Subcellular localization annotation: CTP_CleavageSite=27; ConfidenceScore=5.08e-01
SPAPAPGWPLQPPPMFLPVTPAPPPPPATMPEVETIRSILKESEAVLEKLDKQEAGARQELSKRAKELHDKEFKLPYQNPMPCTEERAGCLECYKSNAKDPLKCAEAVRRFEACARMAVKNAPTKAD

SEQ ID NO: 96386 - protein, 61 aa, Setaria italica
  Transcript Sequence Number=SeqID_30412
MASSSMARVVPLLLLLLLVVWPCPAASAGRNDDPPGASCYKRLFSLGDSITDAGNLASVAP

SEQ ID NO: 96387 - protein, 114 aa, Setaria italica
  Transcript Sequence Number=SeqID_30413
  Gene Ontology: Mol. function=cyclin-dependent protein kinase inhibitor activity; Cellular component=nucleus; Biological process =cell cycle arrest
  Homolog annotation: Hit_ID=B6TSE9; Match level="QueryCoverage=98%, HitCoverage=52%, E-value=3e-38, Identity=68%"; Hit description =Cyclin dependent kinase inhibitor
  Pfam annotation: Domain name=CDI; Domain location=64-113; Score=77.8; E_value=3.8e-20; Accession=PF02234.11; Description=Cyclin-dependent kinase inhibitor
LAEDEVEVSFGENVLDFDAMERSTRETTPCSLIRNSEMISTPGSTTKSKNSNSMTSRRRIEASICRFIPSSLEMEEFFAAAEQQGQHTFREKYNFCPVNDCPLPGRYEWARLDC

SEQ ID NO: 96388 - protein, 97 aa, Setaria italica
  Transcript Sequence Number=SeqID_30414
  Gene Ontology: Mol. function=catalytic activity; Biological process =metabolic process
  Homolog annotation: Hit_ID=B6TKJ5; Match level="QueryCoverage=86%, HitCoverage=22%, E-value=4e-31, Identity=76%"; Hit description =Hydroxymethylglutaryl-CoA lyase
VLYCTIQLIRKYNNSCNGSTQMVFHGNSHAWHPQCRQADSSCDAVELRDLPRKVMWDLPSFVKIVEVGPRDGLQNEKGNVPTSVKIQLIHKLVADKV

SEQ ID NO: 96389 - protein, 154 aa, Setaria italica
  Transcript Sequence Number=SeqID_30415
  Gene Ontology: Mol. function=catalytic activity; Cellular component =mitochondrial inner membrane; Biological process=metabolic process
  Homolog annotation: Hit_ID=B6TKJ5; Match level="QueryCoverage=97%, HitCoverage=38%, E-value=8e-76, Identity=92%"; Hit description =Hydroxymethylglutaryl-CoA lyase
  Pfam annotation: Domain name=HMGL-like; Domain location=1-138; Score =9.4; E_value=1.3e-10; Accession=PF00682.11; Description=HMGL-like
PVEGAIDPSKVAYVAKELYNMGCSEISLGDTIGVGTPGSVAAMLEAVMSFVPVDKIAVHFHDTYGQALANILVSLQMGISIVDSSVSGLGGCPYAKGATGNVATEDVVYMLHGLGIETNVDLNKLMEAGDYISRHLGRPVGSKTAAALRKHLSP

SEQ ID NO: 96390 - protein, 312 aa, Setaria italica
  Transcript Sequence Number=SeqID_30416
  Gene Ontology: Mol. function=catalytic activity; Cellular component =mitochondrial inner membrane; Biological process=metabolic process
  Homolog annotation: Hit_ID=B6TKJ5; Match level="QueryCoverage=98%, HitCoverage=79%, E-value=1e-130, Identity=76%"; Hit description =Hydroxymethylglutaryl-CoA lyase
  Pfam annotation: Domain name=HMGL-like; Domain location=101-311; Score=126.7; E_value=7.4e-35; Accession=PF00682.11; Description=HMGL- like
SSLEEPLGLGDLPKFSINRLGSLSSPRAYRRAAAADDINNRKYNNSCNGSTQMVFHGNSHAWHPQCRQADSSCDAVELRDLPRKVMWDLPSFVKIVEVGPRDGLQNEKGNVPTSVKIQLIHKLVAAGLSVVEATSFVSPKWVPQLADAKEVLKGIQQVPGVRHPVLTPNLRGFEAAVAAGAKEIAVFASASESFSKSNINCTIEESLVRYRDVTAAAKKHGLLIRGYVSCVIGCPVEGAIDPSKVAYVAKELYNMGCSEISLGDTIGVGTPGSVAAMLEAVMSFVPVDKIAVHFHDTYGQALANILSSSLSK

SEQ ID NO: 96391 - protein, 209 aa, Setaria italica
  Transcript Sequence Number=SeqID_30417
  Gene Ontology: Mol. function=protein binding
  Homolog annotation: Hit_ID=Q7X9L1; Match level="QueryCoverage=99%, HitCoverage=95%, E-value=4e-60, Identity=62%"; Hit description =Holocarboxylase synthetase (Fragment)
MARKRKTEVAPRLDEADRTLHSTFCSAANSLSQLYSQAIAQQKQSFHAGELHALDKLYHWILRKYEEESRLTIADIMAHIQHEMDYRCSDALVAQGVQQQYPPSARQHLGNSSSQLSATSHGSASGLAPRAINTEQSKNSIFSNALSSPVRRSLQSYHPTQAQVQGGGNGGHNSRGSASPGAHNRETNSAGSNDTAMDMVSDSAANEYY

SEQ ID NO: 96392 - protein, 244 aa, Setaria italica
  Transcript Sequence Number=SeqID_30418
  Gene Ontology: Mol. function=protein binding
  Homolog annotation: Hit_ID=Q7X9L1; Match level="QueryCoverage=78%, HitCoverage=91%, E-value=5e-91, Identity=85%"; Hit description =Holocarboxylase synthetase (Fragment)
KPKPRVDRRRGKRGNKLEAQSNPQTLFFPSSIRPAAAAAAAMARKRKTDAAPRLDEADRTLYSTFCGAANSLSQLYTQAMAQQKLSFQAGERHAFEKLYQWILRKHEEESRLTVADIMSHIQHEMDYGGTDAHVSPRVHQHPQIANPFTNSVAPPATGLYGQTAAGFAPRPSLSDQSKNTIFSNALSSPVRRSLQNYHLAQGAGNGGRNTEPNLAGANRETNSASSNDTSMDMVSDSAGNEFYQ

SEQ ID NO: 96393 - protein, 166 aa, Setaria italica
  misc_feature (18)..(18): Xaa can be any naturally occurring amino acid
  Transcript Sequence Number=SeqID_30419
  Gene Ontology: Mol. function=protein dimerization activity; Cellular component=nucleus; Biological process=regulation of transcription, DNA-dependent
  Homolog annotation: Hit_ID=Q8S983; Match level="QueryCoverage=90%, HitCoverage=16%, E-value=3e-73, Identity=83%"; Hit description=Auxin response factor 11
  Pfam annotation: Domain name=AUX_IAA; Domain location=1-139; Score= -93.4; E_value=0.01; Accession=PF02309.8; Description=AUXIAA family
DAGMFSKLPNLRDSQVLXLQEIHNSSMGTPSCSMDAASVKPIKPPVRTYTKVQKLGSVGRSIDVTRFRDYHELRSAIACMFGLQGKLEHPGSSDWKLVYVDYENDVLLVGDDPWEEFINCVRCIRILSPSEVQQMSENGVHVLNDCIQIALLGLLCSLHNVTLQCE

SEQ ID NO: 96394 - protein, 93 aa, Setaria italica
  Transcript Sequence Number=SeqID_30420
  Subcellular localization annotation: CTP_CleavageSite=75; ConfidenceScore=5.73e-01
ASCPSPSQSPPALPRSRLPPLPPPAPTMSAPSDPATAAGQAPAPAAASAASSSGLTFKLHPLVIVNVSDHHTRVKAQAACSGDSSSSSGAAAG

SEQ ID NO: 96395 - protein, 170 aa, Setaria italica
  Transcript Sequence Number=SeqID_30421
  Subcellular localization annotation: CTP_CleavageSite=65; ConfidenceScore=5.48e-01
STLSEIDPASSLSSSSSSLACAKADTSVPQETPTLSKLPSHKSVLSTHSQQMEATNRSVPGEKPSTSTEWVLRNATLDLGPTNGHYNQMSQHLRPQNKLHSEFTTGGNKGKAVSQPGVKPPQKYVKKMNVTFGSAEEQVCSVRVHGRPIGNRTIEIDQASVSSSPTSTPS

SEQ ID NO: 96396 - protein, 107 aa, Setaria italica
  Transcript Sequence Number=SeqID_30422
  Gene Ontology: Mol. function=hydrolase activity; Biological process =metabolic process
  Homolog annotation: Hit_ID=B6TLN8; Match level="QueryCoverage=100%, HitCoverage=29%, E-value=6e-46, Identity=83%"; Hit description =Gibberellin receptor GID1L2
LAAHGDASRVVLAGDSAGANMAHNAAIRLRKEPIDGYGDTVSGVALLHPYFWGKEPLGAEPTDPGYRAMFDPTWGFICGGKFGPDHPYINPTAAPEEWRQLGCPRVL

SEQ ID NO: 96397 - protein, 98 aa, Setaria italica
  Transcript Sequence Number=SeqID_30423
  Gene Ontology: Mol. function=hydrolase activity; Biological process =metabolic process
  Homolog annotation: Hit_ID=B6TLN8; Match level="QueryCoverage=98%, HitCoverage=26%, E-value=6e-43, Identity=83%"; Hit description =Gibberellin receptor GID1L2
LFICGGKFGPDHPYINPTAAPEEWRQLGCPRVLVTTAEQCWFVERARAYAEGIKKCGWDGELEFYESKGEGHVFFLPKHGSDNALKELAVVADFVRRC

SEQ ID NO: 96398 - protein, 439 aa, Setaria italica
  Transcript Sequence Number=SeqID_30424
  Gene Ontology: Mol. function=phosphatidylinositol phosphate kinase activity; Biological process=phosphatidylinositol metabolic process
  Homolog annotation: Hit_ID=Q2QVA9; Match level="QueryCoverage=99%, HitCoverage=26%, E-value=1e-129, Identity=55%"; Hit description =Phosphatidylinositol-4-phosphate 5-Kinase family protein, expressed
SPVAHMYSYTHRNGTLTVLVKRLPLESSLSGEAQGRIWMWTRCLRCNAKPTNRVIISSSACNLSFGKFLELSFSTHSAAKKLSTCGHLLHRDCLRFFGFGSRVAMFIYSSVEIYSACKPPLTLEFNNPNKKDWLEVEVNNVLVKWKQLFSEVENVIQGLRSRYSTQAMGKDTNVSVYEGLLLDVTRMLMREKHEVEVSLKAFNQVVIPKSFPHEILGLNWLYQQLLLGFYIWDLRLLHILEYTKVNTVSLDNSIHESTVKNEQKNSGSIAIQDASSVKDIEMERNEATISSSGSFDDSCTDKHFLDKAQLTDKLIIKEQELPVYQYHGVRSSLSSPGKAAENGSHQFEASVEIANDFCSDKLPFTYNEQPEASKVNEICRVVIPSDDAGKWVWNQFSHLELEYKKELQGCSLDKFHLINKYTPSSSSLTQLKHQMDLGQ

SEQ ID NO: 96399 - protein, 76 aa, Setaria italica
  Transcript Sequence Number=SeqID_30425
TLQIELMSKNTYRYSAAPLSASRSHRIQDTMPGISCFSRLPYAVIFSRQLYKKIVRQNLPKLYQRPQPSTNSRKLI

SEQ ID NO: 96400 - protein, 60 aa, Setaria italica
  Transcript Sequence Number=SeqID_30426
NVYFSGPANIYNYVHDMVFLFISYYLAITQLIARTLKFFIYSSLTYQHNPHACAKMESWQ

SEQ ID NO: 96401 - protein, 171 aa, Setaria italica
  Transcript Sequence Number=SeqID_30427
MARLTASLVWVAVLVVLGVGVTPGKGSIFDDFFGRTDGSPLADFLRTFPKWRIISKQDPNLSLAARNGTVVLAKTEFDDMSQVWIQDSISIGKLAADDGCRKPFALVNFKFNFPKFSAEAIVPSTDGSLPVKLAPYNPSECIPLSMLWTKKADPTSDFSAIRMFKDESKGF

SEQ ID NO: 96402 - protein, 56 aa, Setaria italica
  Transcript Sequence Number=SeqID_30428
PTLTPSPTNPKTQSPSRTYALHDPAKVWPNLDHISGLTIWSRCILCPETAVDVCTL

SEQ ID NO: 96403 - protein, 190 aa, Setaria italica
  misc_feature (73)..(73): Xaa can be any naturally occurring amino acid
  Transcript Sequence Number=SeqID_30429
  Gene Ontology: Mol. function=2 iron, 2 sulfur cluster binding; Cellular component=mitochondrial matrix; Biological process=electron transport chain
  Homolog annotation: Hit_ID=B6U5I8; Match level="QueryCoverage=100%, HitCoverage=100%, E-value=6e-78, Identity=77%"; Hit description=2Fe -2S ferredoxin
  Pfam annotation: Domain name=Fer2; Domain location=79-163; Score =68.8; E_value=2e-17; Accession=PF00111.19; Description=2Fe-2S iron -sulfur cluster binding domain
MFSRISRLGARLLREARAETRAGNLLSSRGSLYQGHVSQHSTPLVTPTVKSMSNVLFSTATSGDQDESNQDKXISVTFVNKDGSEKTIRVPVGMSMLEAAHENDIELEGACEGSLACSTCHVIVMDVNHYNKLEDPTDEENDMLDLAFGLTETSRLGCQVIARPELDGMRLALPAATRNFAVDGYVPKPH

SEQ ID NO: 96404 - protein, 70 aa, Setaria italica
  Transcript Sequence Number=SeqID_30430
SMSICVLCSYITSNTKDLEGLGKGVHSLLWLMDEFDHQQIIKLACMHSSYDRCTIPKVKIIFPVMMQFKK

SEQ ID NO: 96405 - protein, 388 aa, Setaria italica
  Transcript Sequence Number=SeqID_30431
  Gene Ontology: Mol. function=mRNA (2'-O-methyladenosine-N6-) -methyltransferase activity; Cellular component=nucleus; Biological process=nucleobase, nucleoside, nucleotide and nucleic acid metabolic process
  Homolog annotation: Hit_ID=B6SVX1; Match level="QueryCoverage=95%, HitCoverage=52%, E-value=0.0, Identity=97%"; Hit description=N6 -adenosine-methyltransferase MT-A70-like protein
  Pfam annotation: Domain name=MT-A70; Domain location=172-332; Score =318.6; E_value=1.3e-92; Accession=PF05063.6; Description=MT-A70
RTEEDDLKDLELLLNKKTYREKQNTKTGEELLDLIHRPTAKETAVAAKFKTKGGSQLKEYCTNLTKEDCRRQTGSFVACDKVHFRRIIAPHTDTNLGDCSFLDTCRHTKTCKYVHYELDQTPDVPPMMAGALAPPRQIKPQRAEYCSEIELGESQWINCDIRNFRMDILGQFGVIMADPPWDIHMELPYGTMADDEMRTLNVPALQTDGLIFLWVTGRAMELGRECLELWGYKRVEEIIWVKTNQLQRIIRTGRTGHWLNHSKEHCLVGIKGNPLVNRNIDTDVIVAEVRETSRKPDEMYAMLERISPRTRKLELFARMHNTQAGWLSLGNQLNGVRLVDEGLRARYKAAYPDVDVQPPSPPRTSVPADVEQSSSQKAAPPDGGERPA

SEQ ID NO: 96406 - protein, 68 aa, Setaria italica
  Transcript Sequence Number=SeqID_30432
QASVLLLCKAPGEPAGIVLCSLKKGWFYSLRCVPGILFRYGLAEFVQYLDVFRCHQLTRLMFSISSTN

SEQ ID NO: 96407 - protein, 99 aa, Setaria italica
  Transcript Sequence Number=SeqID_30433
  Gene Ontology: Mol. function=nucleotide binding; Biological process =defense response
  Homolog annotation: Hit_ID=Q2QZS8; Match level="QueryCoverage=97%, HitCoverage=9%, E-value=5e-24, Identity=59%"; Hit description=NB-ARC domain containing protein
HQRMQLLPRLKSLQLVKCPMLRALPRQLGQVATSLKELQLAYMDNIKVVENFPFLSETLLFMICEGLENVSNIPKVRELRVHLCPNLRRVEVLDSLHQL

SEQ ID NO: 96408 - protein, 203 aa, Setaria italica
  Transcript Sequence Number=SeqID_30434
  Gene Ontology: Mol. function=nucleic acid binding; Cellular component= cytoplasm; Biological process=RNA processing
  Homolog annotation: Hit_ID=B6SLI2; Match level="QueryCoverage=92%, HitCoverage=91%, E-value=1e-73, Identity=77%"; Hit description=RNA -binding protein 8A
  Pfam annotation: Domain name=RRM_1; Domain location=101-171; Score =66.2; E_value=1.2e-16; Accession=PF00076.14; Description=RNA recognition motif. (a.k.a. RRM, RBD, o
MAAVTNADVEVVDFDLDDDDLMDEDAGAEPSPAPAPTSRLRSTIAGDDAPRKTKGRGFRDDPNSSSAPRDSRFGAGGRGDFDSLGSGGGPAPIRSIEGWIVLVTGVHEEAQEDDLHNAFREFGQVRNLHLNLDRRTGFVKGYALIEYENFEEAQAAIKELDGTELYAQIISVDWAFSSGPAKRRNTQKRPPPRYRSRSPRRTH

SEQ ID NO: 96409 - protein, 57 aa, Setaria italica
  Transcript Sequence Number=SeqID_30435
RRSSAFQLIRKEFKEQKQTALVRCSCTGVPRHTPGALYKNMVFFLNYLFNHFDYIVV

SEQ ID NO: 96410 - protein, 90 aa, Setaria italica
  Transcript Sequence Number=SeqID_30436
MNFVVSIGSLLQTILQDNIFVRIWHNNTDLFCFCIYLVLCYFFGILVATQLMIGCAWVSTTFVPTACAFAHFPPASEVFDSTARLIPDFL

SEQ ID NO: 96411 - protein, 121 aa, Setaria italica
  Transcript Sequence Number=SeqID_30437
  Gene Ontology: Mol. function=symporter activity; Cellular component =integral to membrane; Biological process=auxin mediated signaling pathway
  Homolog annotation: Hit_ID=B6TPT6; Match level="QueryCoverage=87%, HitCoverage=20%, E-value=1e-53, Identity=95%"; Hit description=Auxin transporter-like protein 3
ALLPRTAFRDAAVVLMLVHQFITFGFACTPLYFVWEKLIGLHDCRSLCKRAAARLPVVVPIWFLAIVFPFFGPINSAVGSLLVSFTVYIIPALAHMITFRSASAREVYFTVLLLALFLPSY

SEQ ID NO: 96412 - protein, 116 aa, Setaria italica
  Transcript Sequence Number=SeqID_30438
  Gene Ontology: Mol. function=nucleoside-triphosphatase activity; Cellular component=integral to membrane; Biological process=transport
  Homolog annotation: Hit_ID=Q6ZIV9; Match level="QueryCoverage=99%, HitCoverage=12%, E-value=2e-17, Identity=39%"; Hit description =Putative ABC transporter
TVLEIIPAFSLYRGLYELGQYAITSSETGSHGMQWSDLNDHTNGMRDVLIIIILEWLVLLPIAYYFDHAASVAVGHTSSPLSIIKRLLKKGHASRRITVNEIADKEVQVEMEKLDI

SEQ ID NO: 96413 - protein, 56 aa, Setaria italica
  Transcript Sequence Number=SeqID_30439
DGVSCVMCGAVPLLYNTCDAKSLRIRRDFHIQFGARHIHFYASIRKKRNFNSLKVL

SEQ ID NO: 96414 - protein, 86 aa, Setaria italica
  Transcript Sequence Number=SeqID_30440
IFGLGKVIILLSVLFDYLSNQHECILGMMSFVPLVLRILFIFFTLTSLVPDYEYIICKCIKFIYLSDMARFLQENYSCIYSEGSDQ

SEQ ID NO: 96415 - protein, 90 aa, Setaria italica
  Transcript Sequence Number=SeqID_30441
  Gene Ontology: Mol. function=hydrolase activity, acting on ester bonds; Cellular component=vacuole; Biological process=lipid metabolic process
  Homolog annotation: Hit_ID=Q10KY9; Match level="QueryCoverage=78%, HitCoverage=20%, E-value=6e-15, Identity=56%"; Hit description=GDSL -like Lipase/Acylhydrolase family protein
MASSLMLVLPFFLLVVCPYAAASARQAPCCYKRLFSLGDSITDAGNLAIVAPNIPAMAFPYGETFFHRPNGRFCDGRLIVDFIAEALKLP

SEQ ID NO: 96416 - protein, 136 aa, Setaria italica
  misc_feature (124)..(124): Xaa can be any naturally occurring amino acid
  Transcript Sequence Number=SeqID_30442
  Gene Ontology: Cellular component=integral to membrane
  Subcellular localization annotation: CTP_CleavageSite=71; ConfidenceScore=5.31e-01
MSRRSVNPSRRVADGGLPSVGGLLHPKSRSPPVLTIALVVLGVILLVAYFNSGSGRLKALGVTVTTREAVSRSEGTCTSEVMRALPYLKKAYGNAMQKVLHVGPDSCTVVSNLLKEGKVESLGXVKPYDLEDTDSS

SEQ ID NO: 96417 - protein, 258 aa, Setaria italica
  Transcript Sequence Number=SeqID_30443
  Gene Ontology: Cellular component=integral to membrane
  Pfam annotation: Domain name=Methyltransf_11; Domain location=94-190; Score=-0.6; E_value=0.1; Accession=PF08241.4; Description =Methyltransferase domain
  Subcellular localization annotation: CTP_CleavageSite=65; ConfidenceScore=5.35e-01
MSRRSVNPSRRVADGGLPSVGGLLHPKSRSPPVLTIALVVLGVILLVAYFNSGSGVTVTTREAVSRSEGTCTSEVMRALPYLKKAYGNAMQKVLHVGPDSCTVVSNLLKEGKVEAWGVEPYDLEDTDSSCKSLVRKGFVRMSDIKFPLPYRPDSFSLVVVSDALDYLTPRYLNKTLPDLAKVSTDGLVIFAGNPGQQKPKVSELPKFGRPAKLRSSSWWTRYFVQTGLTENEGPLKKFEEATSKDEYKPDCQIFHLSS

SEQ ID NO: 96418 - protein, 63 aa, Setaria italica
  misc_feature (9)..(9): Xaa can be any naturally occurring amino acid
  Transcript Sequence Number=SeqID_30444
  Subcellular localization annotation: CTP_CleavageSite=27; ConfidenceScore=5.47e-01
FQSVSCSFXSFFFVGGSLDFLKSFYLMSSTPSGQFQLIFQTSKTKPICKPKLLSETSNKGDWR

SEQ ID NO: 96419 - protein, 66 aa, Setaria italica
  Transcript Sequence Number=SeqID_30445
VLLTCICAVGFKDFCDVLAHGSPGSSWWYIVLNSLVFCVIDGSTNQGCYLYCCCIYVVVNDGHGYY

SEQ ID NO: 96420 - protein, 43 aa, Setaria italica
  misc_feature (18)..(18): Xaa can be any naturally occurring amino acid
  misc_feature (41)..(41): Xaa can be any naturally occurring amino acid
  Transcript Sequence Number=SeqID_30446
QYYLKDDPRYPSLSSKKXCTTPMLVSLARNDDDIVDGDEDXLA

SEQ ID NO: 96421 - protein, 88 aa, Setaria italica
  Transcript Sequence Number=SeqID_30447
GKVFTQGFQPSFDYNERHHWISCTTVGRRHVLTRTGAQVDGMTGSPTAGIQGRRRIRQQAHWRGRRRRRTAAGAASDAEGGTGGRQQT

SEQ ID NO: 96422 - protein, 69 aa, Setaria italica
  Transcript Sequence Number=SeqID_30448
  Gene Ontology: Mol. function=P-P-bond-hydrolysis-driven protein transmembrane transporter activity; Cellular component=endoplasmic reticulum membrane; Biological process=intracellular protein transmembrane transport
  Homolog annotation: Hit_ID=B6SPB6; Match level="QueryCoverage=100%, HitCoverage=100%, E-value=5e-23, Identity=81%"; Hit description =Protein transport protein SEC61 gamma subunit
  Pfam annotation: Domain name=SecE; Domain location=10-66; Score=87.7; E_value=4.1e-23; Accession=PF00584.12; Description=SecESec61-gamma subunits of protein translocation complex
MDAIDSVVDPLRDFAKDSVRLVKRCHKPDRKEFTKVAARTAIGFVVMGFVGFFVKLIFIPINNIIVGSG

SEQ ID NO: 96423 - protein, 207 aa, Setaria italica
  Transcript Sequence Number=SeqID_30449
  Gene Ontology: Mol. function=transposase activity; Biological process= transposition, DNA-mediated
  Homolog annotation: Hit_ID=Q2QRE9; Match level="QueryCoverage=90%, HitCoverage=32%, E-value=4e-58, Identity=60%"; Hit description =Transposon protein, putative, CACTA, En/Spm sub-class
MLAVFFVTCQAMDGHVEGLGRGTGVAAWTAPMSNFMLKNLANVVASGVKTGKGFKKVYFNACARAVNEKFNTTLNGEQIKNHLKTWQRKWAKITRLKSLSASGFDEENYIITLDEEHYNGHVHDHKADAEYLNKPLENYAEMETIFGKDMATGKFAKDSSAPLGTEDGDTEDGAANGTEEDPSSAFEEGATSNARPNKRAKIVESAE

SEQ ID NO: 96424 - protein, 69 aa, Setaria italica; identical to SEQ ID NO: 96422
  Transcript Sequence Number=SeqID_30450
  Gene Ontology: Mol. function=P-P-bond-hydrolysis-driven protein transmembrane transporter activity; Cellular component=endoplasmic reticulum membrane; Biological process=intracellular protein transmembrane transport
  Homolog annotation: Hit_ID=B6SPB6; Match level="QueryCoverage=100%, HitCoverage=100%, E-value=5e-23, Identity=81%"; Hit description =Protein transport protein SEC61 gamma subunit
  Pfam annotation: Domain name=SecE; Domain location=10-66; Score=87.7; E_value=4.1e-23; Accession=PF00584.12; Description=SecESec61-gamma subunits of protein translocation complex

SEQ ID NO: 96425 - protein, 389 aa, Setaria italica
  misc_feature (51)..(51): Xaa can be any naturally occurring amino acid
  misc_feature (75)..(75): Xaa can be any naturally occurring amino acid
  misc_feature (300)..(300): Xaa can be any naturally occurring amino acid
  Transcript Sequence Number=SeqID_30451
  Gene Ontology: Mol. function=transposase activity; Biological process= transposition, DNA-mediated
  Homolog annotation: Hit_ID=B6THQ7; Match level="QueryCoverage=96%, HitCoverage=93%, E-value=0.0, Identity=82%"; Hit description =Retrotransposon protein
  Pfam annotation: Domain name=Plant_tran; Domain location=251-342; Score=-34.5; E_value=0.0008; Accession=PF04827.6; Description=Plant transposon protein
  Pfam annotation: Domain name=Transposase_11; Domain location=166-333; Score=24.1; E_value=0.00057; Accession=PF01609.13; Description =Transposase DDE domain
  Pfam module annotation: Pfam domain module=Plant_tran::Transposase _11; Domain location=251-342::166-333
CSSTSNNLGLLSMMAMVIIESRKRKQRARREGITYGPIDERDRMRLRSNLXNNKIWKDDTVCVNMLRLNRAKFFXFCNLFRDRGLLEDTIHCCVEQQVAMFLNTVGHNLRNRVVGTNFDRSGETVSRYFNRVLRAVGELRGELIRPPSLETPTKIQGNHRWDPYFKDCIGAIDGTHVRASVPKDMELAFRGRKSYASQNVMAAVDFDLRFTYVLAGWEGTAHDALVLRDALERENGLRVPQGKFYLVDAGYGAKPGFLPPFRGVRYHLNEWGNNPVQNEKELFNLRHSSLRITVERAFGXLKRRFKILDDATPFFPFPTQVDIVVACCIIHNWVIQDGIDEFFIEDNNFSSYNHATTYSGQAHEHIEMVNFRQSIADQMWALRHSREQY

SEQ ID NO: 96426 - protein, 394 aa, Setaria italica
  Transcript Sequence Number=SeqID_30452
  Gene Ontology: Mol. function=transposase activity; Biological process= transposition, DNA-mediated
  Homolog annotation: Hit_ID=B6THQ7; Match level="QueryCoverage=98%, HitCoverage=96%, E-value=0.0, Identity=79%"; Hit description =Retrotransposon protein
  Pfam annotation: Domain name=Plant_tran; Domain location=256-347; Score=-33.9; E_value=0.0007; Accession=PF04827.6; Description=Plant transposon protein
  Pfam annotation: Domain name=Transposase_11; Domain location=171-338; Score=24.2; E_value=0.00053; Accession=PF01609.13; Description =Transposase DDE domain
  Pfam module annotation: Pfam domain module=Plant_tran::Transposase _11; Domain location=256-347::171-338
MDQQTKVVTCTAAAYMLLSMMAMVIIESRKRKQRARREGITYGPIDERDRMRLEYLNNKIWKDDTVCVNMLRLNRAKFFRFCNLFRDRGLLEDTIHCCVEQQVAMFLNTVGHNLRNRVVGTNFDRSGETVSRYFNRVLRAVGELRGELIRPPSLETPTKIQGNHRWDPYFKDCIGAIDGTHVRASVPKDMELAFRGRKSYASQNVMAAVDFDLRFTYVLAGWEGTAHDALVLRDALERENGLRVPQGKFYLVDAGYGAKPGFLPPFRGVRYHLNEWGNNPVQNEKELFNLRHSSLRITVERAFGCLKRRFKILDDATPFFPFPTQVDIVVACCIIHNWVIQDGIDEFFIEDNNFSSYNHATTYSGQAHEHIEMVNFRQSIADQMWADHQENNIS

SEQ ID NO: 96427 - protein, 52 aa, Setaria italica
  Transcript Sequence Number=SeqID_30453
HSLIAKKRNRKWLDRYVTNVWFKPDRLRIQKVNNTRMLHEEASNPAQIKKPN

SEQ ID NO: 96428 - protein, 330 aa, Setaria italica
  Transcript Sequence Number=SeqID_30454
  Gene Ontology: Mol. function=diaminopimelate epimerase activity; Cellular component=chloroplast; Biological process=lysine biosynthetic process via diaminopimelate
  Homolog annotation: Hit_ID=B4F833; Match level="QueryCoverage=99%, HitCoverage=93%, E-value=1e-160, Identity=85%"; Hit description =Diaminopimelate epimerase
  Pfam annotation: Domain name=DAP_epimerase; Domain location=201-323; Score=163.2; E_value=7.7e-46; Accession=PF01678.11; Description =Diaminopimelate epimerase
  Pfam annotation: Domain name=DAP_epimerase; Domain location=48-170; Score=164.7; E_value=2.8e-46; Accession=PF01678.11; Description =Diaminopimelate epimerase
  Pfam module annotation: Pfam domain module=DAP_epimerase::DAP _epimerase; Domain location=201-323::48-170
  Subcellular localization annotation: CTP_CleavageSite=20; ConfidenceScore=5.04e-01
SRGCVRLSLRGVPCAPRRAVASMAVSTPRSAAAASFLERRESGRALHFVKYQGLGNDFIMVDNRDSSVPKVTPEEAAKLCDRNFGIGADGVIFVMPGSNGADYTMRIFNSDGSEPEMCGNGVRCFARFIAELENLQGTHSFTIHTGAGLIIPEIQSDGQVKVDMGEPILSGPDIPTKLLATKNKVVVQAELEVEGLTWHVTCVSMGNPHCVTFGAKDLKVLQVDDLKLSEIGPKFEHHEMFPARTNTEFVQVLSRSHLKMRVWERGAGATLACGTGACAVVVAAVLEGRAERKCVVDLPGGPLEIEWREDDNHVYMTGPAEAVFYGSVVH

SEQ ID NO: 96429 - protein, 81 aa, Setaria italica
  Transcript Sequence Number=SeqID_30455
  Gene Ontology: Mol. function=transferase activity, transferring glycosyl groups; Cellular component=integral to membrane; Biological process=cell wall organization and biogenesis
  Homolog annotation: Hit_ID=B6SRP0; Match level="QueryCoverage=100%, HitCoverage=14%, E-value=2e-31, Identity=81%"; Hit description =Fucosyltransferase 7
LKAVSNNQDTAGPLATVPDPRDRLLGGLLSPDFDETSCHSRYRALLYRRPSMHAISSYLVSALRRYESLHRRCGPGTPAYA

SEQ ID NO: 96430 - protein, 176 aa, Setaria italica
  misc_feature (76)..(76): Xaa can be any naturally occurring amino acid
  Transcript Sequence Number=SeqID_30456
  Gene Ontology: Mol. function=hydrolase activity, hydrolyzing O -glycosyl compounds; Cellular component=anchored to membrane; Biological process=carbohydrate metabolic process
  Homolog annotation: Hit_ID=Q7XVG8; Match level="QueryCoverage=94%, HitCoverage=40%, E-value=6e-85, Identity=90%"; Hit description =OSJNBa0073L04.8 protein
  Pfam annotation: Domain name=Glyco_hydro_17; Domain location=1-151; Score=-47.9; E_value=3.4e-08; Accession=PF00332.10; Description =Glycosyl hydrolases family 17
FLINCYPYFAYKADPNNVPLEYVLFQPNAGVTDTNTKLNYDNMLYAQVDSVYAAIQALGHTDIDVKISETGWPSRXGDPDEAGATPEYAGTYIGNLLQRIEMKQGTPLRPSVPIDVYVFALFNENLKPGPASERNYGLFYPDGTPVYNVGLRGYLPPMEYSEGTRKVRYIALQSFF

SEQ ID NO: 96431 - protein, 70 aa, Setaria italica
  Transcript Sequence Number=SeqID_30457
CIGCMIYRFILVRYLPLCMINKEIITPKNGFIFFDCQCSQWAALVSHIRTCTHICTREQSAQVETKIKLS

SEQ ID NO: 96432 - protein, 130 aa, Setaria italica
  Transcript Sequence Number=SeqID_30458
  Gene Ontology: Mol. function=electron carrier activity; Biological process=response to oxidative stress
  Homolog annotation: Hit_ID=Q9FEQ8; Match level="QueryCoverage=63%, HitCoverage=24%, E-value=1e-25, Identity=63%"; Hit description =Peroxidase 2
  Subcellular localization annotation: CTP_CleavageSite=66; ConfidenceScore=5.10e-01
MARLGVLILAALLGAVAAQAAGSYGGGNYSPSPSPPAQTPPPPPARPRLRFGFYKHSCPPAEVIVRDAVRNALLVNPGIGAGLIRMAFHDCFVQGCDGSVLLDPTPANPRPEKLGPPNFPSLRGFEVIDA

SEQ ID NO: 96433 - protein, 82 aa, Setaria italica
  Transcript Sequence Number=SeqID_30459
HGAVLIRSLLQRCWIADVCNNISWSSIDERSSQFFVVSLRIFVSLSVVCKFPLADRLVFPLASACLEHFPQKCNALQFASYD

SEQ ID NO: 96434 - protein, 140 aa, Setaria italica
  Transcript Sequence Number=SeqID_30460
MAPAVAGDFIPHEDDDDFFVEYNPHPYRGGYDIAATFGTPLPPSANICYPVSSSAAASVPTVPSPPSPTPEPEEPRGDEEAPREPVQESPEVFPNGASTKGKVRRGGWCGRGFWRKCVRGLDYLFGYKDPYAEQRIGVDS

SEQ ID NO: 96435 - protein, 64 aa, Setaria italica
  Transcript Sequence Number=SeqID_30461
RRSARWTAVTGSSCRRTTSRAGRRQRRSEEEGRGTGNARSWTKPWRVTNCCKLSQGPCWLVFAS

SEQ ID NO: 96436 - protein, 204 aa, Setaria italica
  misc_feature (72)..(72): Xaa can be any naturally occurring amino acid
  misc_feature (172)..(172): Xaa can be any naturally occurring amino acid
  Transcript Sequence Number=SeqID_30462
  Homolog annotation: Hit_ID=Q8S3P4; Match level="QueryCoverage=99%, HitCoverage=25%, E-value=1e-65, Identity=61%"; Hit description =OSJNBa0011F23.16 protein
DCNNGKNQLQSREYEICKAIFRLSIDLASPTCLEPDVVRESIFGQTESSFENFVLAYWERSPNLYRRKTKHXNDDPVFAALHSAFNLGAAPDAIIESFMEGLVSCPAIASDELDINSFLQEVHDSLGDAIMYRQDIRVLRTQDLSDQTSRGCVMEEHFFDDGTVFLDEDTFXQKCKHSFKNGYSIALRGMEFRFAKVAAIASRP

SEQ ID NO: 96437 - protein, 69 aa, Setaria italica
  Transcript Sequence Number=SeqID_30463
MADWGPVVVGVVLFVLLSPGLLCELPGTHRHVDFGGFHTNGKAIFVHTLIFFAAFTILTLALHVHIYTG

SEQ ID NO: 96438 - protein, 100 aa, Setaria italica
  Transcript Sequence Number=SeqID_30464
  Gene Ontology: Mol. function=methyltransferase activity
  Subcellular localization annotation: CTP_CleavageSite=73; ConfidenceScore=5.15e-01
MTVARGPPGRPSSALLGCWRRRQPLGFGAKVGIAIALGLSFAIIWTSVSPTSSSQQISTERSSFAAEVAAPPTASHNRTSTSIAGGHAHRKPRPVPHSHK

SEQ ID NO: 96439 - protein, 40 aa, Setaria italica
  Transcript Sequence Number=SeqID_30465
RIIDLLWNCNVSSDIHVFHFRKAKNNVNDSMVSFEMPDTN

SEQ ID NO: 96440 - protein, 118 aa, Setaria italica
  Transcript Sequence Number=SeqID_30466
  Gene Ontology: Mol. function=oxidoreductase activity; Biological process=oxidation reduction
  Homolog annotation: Hit_ID=Q7XC87; Match level="QueryCoverage=99%, HitCoverage=27%, E-value=2e-41, Identity=64%"; Hit description =Oxidoreductase, 2OG-Fe oxygenase family protein
WGFFQLINHGIPDEVISNFRNDMNEFFKQPLEAKKVYSMEPGNLEGYGQHFVVSDNQKLDWADMFYLMLRPSDSRNLRFWPRNPPSFRDSIDTYSSEAAKLVSCLLRFVAMDMGVEPE

SEQ ID NO: 96441 - protein, 33 aa, Setaria italica
  Transcript Sequence Number=SeqID_30467
RAAQALILSIMPERILRAQRHDSDRFVKQTISC

SEQ ID NO: 96442 - protein, 113 aa, Setaria italica
  misc_feature (82)..(82): Xaa can be any naturally occurring amino acid
  Transcript Sequence Number=SeqID_30468
NNHYYSHSHSHYNSSNSSGSYYYCDPAGGGGGGGGGGGYYYDHQPAAPAPYQEECGNDHGFYMDEDFSSSSSSRHHHHQSPXAPAPRPAAPPPPAPAPPPPTTPTTTTTTPTP

SEQ ID NO: 96443 - protein, 73 aa, Setaria italica
  Transcript Sequence Number=SeqID_30469
  Gene Ontology: Mol. function=protein kinase activity; Cellular component=integral to membrane; Biological process=protein amino acid phosphorylation
  Homolog annotation: Hit_ID=Q94HB9; Match level="QueryCoverage=100%, HitCoverage=9%, E-value=1e-35, Identity=95%"; Hit description =Putative leucine-rich repeat transmembrane protein kinase 1
VDPALKGLYPAKSLSRFADVVALCVQPEPEFRPPMSEVVQALVRLVQRANMTRRMLDGEEASRRPDDQDQEFV

SEQ ID NO: 96444 - protein, 143 aa, Setaria italica
  misc_feature (34)..(34): Xaa can be any naturally occurring amino acid
  Transcript Sequence Number=SeqID_30470
  Gene Ontology: Mol. function=protein kinase activity; Cellular component=integral to membrane; Biological process=protein amino acid phosphorylation
  Homolog annotation: Hit_ID=B6UIP4; Match level="QueryCoverage=81%, HitCoverage=17%, E-value=2e-60, Identity=95%"; Hit description =Leucine-rich repeat transmembrane protein kinase 1
  Pfam annotation: Domain name=Pkinase_Tyr; Domain location=1-141; Score=-139.3; E_value=0.00018; Accession=PF07714.9; Description =Protein tyrosine kinase
ATKRLVSNISKLHHPNLSELVGYCMEHGQHLLVXDFHRNGSLHDMLHLSDEYNKPLSWNSRVKIALGSARALEYLHEICSPSIIHKNFKSSNILLDTELNPHISDAGLSSFVPDAEFQASSILGFLGIIGCSPLLGLVTLFCL

SEQ ID NO: 96445 - protein, 87 aa, Setaria italica
  Transcript Sequence Number=SeqID_30471
  Gene Ontology: Mol. function=protein kinase activity; Cellular component=integral to membrane; Biological process=protein amino acid phosphorylation
  Homolog annotation: Hit_ID=B6UIP4; Match level="QueryCoverage=88%, HitCoverage=11%, E-value=1e-34, Identity=90%"; Hit description =Leucine-rich repeat transmembrane protein kinase 1
APVRAITCPVGNSPAVKKLNSTALPSQSSDDFYELVSNISKLHHPNLSELVGYCMEHGQHLLVFDFHRNGSLHDMLHLSDEYNKPLS

SEQ ID NO: 96446 - protein, 351 aa, Setaria italica
  Transcript Sequence Number=SeqID_30472
  Gene Ontology: Mol. function=transporter activity; Cellular component= intracellular; Biological process=transport
  Homolog annotation: Hit_ID=B9RJH0; Match level="QueryCoverage=80%, HitCoverage=81%, E-value=1e-104, Identity=65%"; Hit description =Transporter, putative
  Pfam annotation: Domain name=CRAL_TRIO; Domain location=101-262; Score=41.9; E_value=2.5e-09; Accession=PF00650.12; Description =CRALTRIO domain
  Pfam annotation: Domain name=CRAL_TRIO_N; Domain location=12-81; Score=34.6; E_value=4e-07; Accession=PF03765.7; Description=CRALTRIO, N-terminus
  Pfam module annotation: Pfam domain module=CRAL_TRIO::CRAL_TRIO_N; Domain location=101-262::12-81
MSSASGVTNGHGKEAALYEEQKSKIGKVKTELGQLSGKSALYCSDASIARYLIARNWDVRKATKMLKKTLKWRLEYKPDEIRWDDISDEAVTGKIYRADYFDKSGRSILVMRPGCQNTKDAKGQVKYLVYCMENAILNLPHGQDQMVWLIDFAGFNLGNLSINVTKLTADVLQGHYPERLGVAILYNAPKFFEPFWKMASPILERKTRNKVKFVYSDRPDTMKIIEDLFNMDELECAFGGKNPATFNINDYAVRMREDDKKMPSFWSPENSALASEPYLMSNQKPQESSSSGVKAEETEPEKREETDTAPEKRAESDTESEKEEETQTESSTVEQKSLPGEDTAPADKSGL

SEQ ID NO: 96447 - protein, 720 aa, Setaria italica
  Transcript Sequence Number=SeqID_30473
  Gene Ontology: Mol. function=protein kinase activity; Cellular component=integral to membrane; Biological process=protein amino acid phosphorylation
  Homolog annotation: Hit_ID=B6UIP4; Match level="QueryCoverage=93%, HitCoverage=99%, E-value=0.0, Identity=85%"; Hit description=Leucine- rich repeat transmembrane protein kinase 1
  Pfam annotation: Domain name=LRRNT_2; Domain location=31-72; Score =40.7; E_value=5.7e-09; Accession=PF08263.4; Description=Leucine rich repeat N-terminal domain
  Pfam annotation: Domain name=LRR_1; Domain location=124-146; Score =12.7; E_value=1.1; Accession=PF00560.25; Description=Leucine Rich Repeat
  Pfam annotation: Domain name=LRR_1; Domain location=148-170; Score =18.2; E_value=0.034; Accession=PF00560.25; Description=Leucine Rich Repeat
  Pfam annotation: Domain name=LRR_1; Domain location=196-217; Score =16.7; E_value=0.095; Accession=PF00560.25; Description=Leucine Rich Repeat
  Pfam annotation: Domain name=LRR_1; Domain location=218-240; Score =4.5; E_value=42; Accession=PF00560.25; Description=Leucine Rich Repeat
  Pfam annotation: Domain name=LRR_1; Domain location=99-120; Score =9.9; E_value=3.8; Accession=PF00560.25; Description=Leucine Rich Repeat
  Pfam annotation: Domain name=Pkinase; Domain location=417-688; Score =89.4; E_value=1.2e-23; Accession=PF00069.17; Description=Protein kinase domain
  Pfam annotation: Domain name=Pkinase_Tyr; Domain location=417-688; Score=83.9; E_value=5.7e-22; Accession=PF07714.9; Description =Protein tyrosine kinase
  Pfam module annotation: Pfam domain module=LRRNT_2::LRR_1::LRR_1::LRR_ 1::LRR_1::LRR_1::Pkinase::Pkinase_Tyr; Domain location=31-72::124 -146::148-170::196-217::218-240::99-120::417-688::417-688
MARAAWAAWLLVLLCFGAWTPRRILVSAATDANDVTALNTLFTSMSSPGQLQGWKASGGDPCSESWQGITCSGSSVTAIKLPGLGLSGTLAYNMNTMDSLVELDLSQNNLGGGQQIPYNLPNKKLERLNLAGNQFSGAVPYSISTMPKLQYLNLNHNQLSGDITDIFSNLPSLTTVRPFLQFSTGNLPQSFTSLSSLKTLYLQNNQLTGSINVLANLPLDDLNVANNRFTGWIPNELKKINSLQTDGNSWSTGPAPPPPPFTAPPHSRSNRRKSPGQHSNGSNNSGSGGSSGIGAGAIAGIIISVLVIGAVVAFFLIKRKQRKGAMPEHYEQRQPFNSFPSNEVKEMKPIQEATTVEVESLPSPAAVNLKPPPKIERNQSFDDDDIASKPVAKKSNAAPVKATVYSVADLQMATDSFSMDNLIGEGTFGRVYRAQFSDGKVLAVKKLNSTALPSQSSDDFYELVSNISKLHHPNLSELVGYCMEHGQHLLVFDFHRNGSLHDMLHLSDEYNKPLSWNSRVKIALGSARALEYLHEICSPSIIHKNFKSSNILLDTELNPHISDAGLSSFVPDAEFQASDQGSGYGAPEVDMTGQYTLKSDVYSFGVVMLELLTGRKPFDSSRPRSEQSLVRWATPQLHDIDALDRMVDPALKGLYPAKSLSRFADVVALCVQPEPEFRPPMSEVVQALVRLVQRANMTRRMLDGEEASRRSYRYCQEVPR

SEQ ID NO: 96448 - protein, 73 aa, Setaria italica
  Transcript Sequence Number=SeqID_30474
VIRKCCQFPMVFSEETSRCNILVGSDGASAVSLVGGFSEVSPLFFVSLLKSNIDTEKPSANSVVGVKPAETST

SEQ ID NO: 96449 - protein, 526 aa, Setaria italica
  Transcript Sequence Number=SeqID_30475
  Gene Ontology: Mol. function=metal ion binding
PRRLPKSSESVVKTEKLSPSDTAAEKIPQSIITEKVESVLKSPQSDTAHQKILERELVTENILESAMAVKKPHPSTLIANKPLIEDIAEEPVQTSEPSEQPLQNKEAVEKPYQSDDVAADMTGSEVTHEKTTEPESDATLNKPNKDPSEHEGLSSGKSSLDSQSNSNTEQPLVPQVVAEKAAAQITEAENDADAENSSESLSIAPAESPKEQPSEHQKDVAMEQPLEPQHEKDSENPLELVGAATAKESSEPESHITAEKPAESQNDADQLAEQSSEPQSNESTEKPEVHQSSTSSDKPSGLQSNAATDKLSEQPSEPESNASFKKPSEFQTDAVAMAPPEPQFDAAPDKVTDQLLKPHDDASVEKPPGTESNADSDIPSESSSATDTLPVDHPNNITTAEPLPGGISDQTSHQSNAPIETPSGSETVVGDSTHNEETTSKPSEESIAIEKPSEEEEVSVKPPEDGVTSEKSSEEDKADAEPSEDNASLEKQLEADEVSAKSSEDIVTPQKPLEVGETSVEPSENN

SEQ ID NO: 96450 - protein, 254 aa, Setaria italica
  misc_feature (229)..(229): Xaa can be any naturally occurring amino acid
  Transcript Sequence Number=SeqID_30476
  Gene Ontology: Mol. function=metal ion binding
  Subcellular localization annotation: CTP_CleavageSite=36; ConfidenceScore=5.08e-01
LQNKNKPLLSSTTTEKRSLSGAAIEKPSPNNGVDVKQSENSTVVKRSWQRSVATENPPESILPSDKPSVTSANDAKPSETSKVVKKPWQHIVAAEKQIQNSAQTEKSQNSVPTEKSSPTTEMKPLDNTTEVKSPWGRRVFNHKPLKSNIDTEKPSANSVVGVKPAETSTVTPVPQQHTENVEKPSDTSANDAKNGDDTKRTDDVKPSENTAAVVRKSWQRNIGSEKQPXSSAVDAKSTESSGTIKRLWQRNVAT

SEQ ID NO: 96451 - protein, 291 aa, Setaria italica
  Transcript Sequence Number=SeqID_30477
  Gene Ontology: Mol. function=metal ion binding
  Homolog annotation: Hit_ID=A6N0K3; Match level="QueryCoverage=37%, HitCoverage=100%, E-value=8e-12, Identity=53%"; Hit description=Lim domain containing protein (Fragment)
LQRSHWKEGGASTEPSEDNASLEEPKEEDKVTHKPSEDDSVALEKPLEADEVSAKSSEDIVTPQKPLEVGETSVEPSENNASPGKPSEENEESAKPSEDVVTPEKPLEEGGASTEPSEDNASLEEPKEEDKVTHKPSEDDSVALEKPPEEGEASSEPSEDTAARGETKEKDEVIAKSSEASVALEKPLEESEAIAEPSEDNAAIGKPLEEDKANDEPSDDSVALGKLQEEGVDSVKPSEEDVAPEKSAADKPSEEVVDEKPSHDDAIVEPSSQDDTATEKPSATTDTAETA

SEQ ID NO: 96452 - protein, 239 aa, Setaria italica
  Transcript Sequence Number=SeqID_30478
  Gene Ontology: Mol. function=metal ion binding
  Subcellular localization annotation: CTP_CleavageSite=58; ConfidenceScore=5.60e-01
LDAKSTESSGTIKRLWQRNVATEKPSQSGTSVVAPSQSSVAVSKPFQSNTAAKRPWQRSMAPEKQKETDLSSNKPLQSKPLQIKTVVESPLESTIAVKETSQSIAPAEELQQVILATENILQISKDTKNNGDTSEKPPTSETAEAPSLPTSILQRDVSSEKPLETDIPTMTPSQVPELPKSSESVVKTEKLSPSDTAAEKIPQSIITEKVESVLKSPQSDTAHQKILERELVTENILFW

SEQ ID NO: 96453 - protein, 279 aa, Setaria italica
  misc_feature (29)..(29): Xaa can be any naturally occurring amino acid
  misc_feature (48)..(48): Xaa can be any naturally occurring amino acid
  misc_feature (194)..(194): Xaa can be any naturally occurring amino acid
  misc_feature (255)..(255): Xaa can be any naturally occurring amino acid
  Transcript Sequence Number=SeqID_30479
  Gene Ontology: Mol. function=nucleic acid binding; Cellular component= nucleus; Biological process=termination of RNA polymerase II transcription
  Homolog annotation: Hit_ID=Q9FWR3; Match level="QueryCoverage=92%, HitCoverage=11%, E-value=5e-98, Identity=64%"; Hit description =F17F16.1 protein
SEDGSPVADEDEVDEVSDEALGGKLNFCXCTERKVSAELATAHAREKXKADENKFLKHKVRKSILGEAEIIVTTLSGCGGDIYGVCSETASSNKYGTFSEHALFDVVVIDEAAQALEPATLIPLQLLKSRGTKCIMVGDPKQLPATVMSGLASKFLYECSMFERLQRAGYPVIMLTKQYRMHPEISRFPSLHFXRNKLLDGAEMAEKSASFHDHDYLGPYMFFDIADGREHCGRNAATQSLCNEFEADAALEILXFLKKRYPLEFSSRKIGIITPYRSQ

SEQ ID NO: 96454 - protein, 59 aa, Setaria italica
  Transcript Sequence Number=SeqID_30480
ACLSKWLRSTMSKSVIFLVVVVHRRNILLIQDLFQYSFHLMEQYMFSMQVLKSLTAISS

SEQ ID NO: 96455 - protein, 103 aa, Setaria italica
  Transcript Sequence Number=SeqID_30481
  Subcellular localization annotation: CTP_CleavageSite=19; ConfidenceScore=5.37e-01
SQAVLDSCSGVLASGAVPPSSMVRSSPTFVQWMKMRPRGSEALDLAAYQKFGVSGDGDGWIWLRSGSQAEQFIGEEDEDVYVISSSLRVLYVKGGCTRCTVLH

SEQ ID NO: 96456 - protein, 225 aa, Setaria italica
  Transcript Sequence Number=SeqID_30482
  Subcellular localization annotation: CTP_CleavageSite=29; ConfidenceScore=5.06e-01
EFSPSYSSHRRFRRRLRLPPVDPPGLLPSGGPLGGGAGRGARHLSGRALYSCRCRSTSSYLPAMACGSSSMVIFLLCLFGGGGGVIPGEQGARLVDLYLLAYGVELWSFPLLGSLSGWLAASSSAVLDSCSGVLASGAVPPSSMVRSSPTFVQWMKMRPRGSEALDLAAYQKFGVSGDGDGWIWLRSGSQAEQFIGEEDEDVYVISSSLRVLYVKGGCTRCTVLH

SEQ ID NO: 96457 - protein, 232 aa, Setaria italica
  misc_feature (142)..(142): Xaa can be any naturally occurring amino acid
  Transcript Sequence Number=SeqID_30483
MPGKGQRRREKNYRAAHGGDSRLPPPPKQRELEAIPSKLRRLIAFQNKHDDNANAFSGGARAPGKQDDGLGKNRPAKDKKTKKQTPEAPAESKASEIKGGHGSAANENVNAEGSKGKRKRGKAVDLRFKELEENVSISKKQXRKKHLDEKKKKRKGNKTETLPDFPGREKVKFGEVVEAPPKLSFPKVKSASDASREMLRKEAIENYRNIKGWTSRPGLQLPTLAENTFLSP

SEQ ID NO: 96458 - protein, 205 aa, Setaria italica
  Transcript Sequence Number=SeqID_30484
  Homolog annotation: Hit_ID=Q9M4C6; Match level="QueryCoverage=83%, HitCoverage=79%, E-value=1e-21, Identity=44%"; Hit description=VIP1 protein
SYAAVAAENPAPNGGVAKEEEGAAGTHATAKSYAAVAAHAEIEDLRAAKLDLEGKLAEAQRENEALAKEAHRMEGIFTQSREEVTSAEFAADSAEKEAASLRAEVERLQAALKIEKGEHELDKRRHEELAKEVEAVRQEKLKLEEEIKALKASAATTTTKEREAAPSAEAPKEVEGVWQAMAVAAAIGAAGTAAVVLIGLRLIKR

SEQ ID NO: 96459 - protein, 83 aa, Setaria italica
  Transcript Sequence Number=SeqID_30485
  Gene Ontology: Cellular component=membrane
  Homolog annotation: Hit_ID=B6U3D7; Match level="QueryCoverage=73%, HitCoverage=17%, E-value=2e-25, Identity=86%"; Hit description =Nodulin protein
TTKSGPVFTAAFIPIIQIMVAIIDFFFLHEQIYLGSILGSVLMIFGLYLLLWGKKKDALACCTDNKQVDEEEADKEEQQAEKS

SEQ ID NO: 96460 - protein, 62 aa, Setaria italica
  Transcript Sequence Number=SeqID_30486
  Subcellular localization annotation: CTP_CleavageSite=30; ConfidenceScore=5.71e-01
PNSEISDSSLERAFSSSFLSSVNSSSLSLNSSRSSSYFLVFFWMLAFSLDAFSMTSLRDAIL

SEQ ID NO: 96461 - protein, 183 aa, Setaria italica
  misc_feature (5)..(5): Xaa can be any naturally occurring amino acid
  Transcript Sequence Number=SeqID_30487
  Homolog annotation: Hit_ID=Q9LN06; Match level="QueryCoverage=98%, HitCoverage=35%, E-value=2e-27, Identity=38%"; Hit description =T6D22.10
HEVRXCVRQHPDLGRIVLEVAKNRLDQMLYVGLTEDHEESARLFAHMVGAQVLSQSGTLNFDLKEDLPSENDSHPSMVEPEDEETNKHLNSTHGWQTNEALNSTDDEQGKGNMTVGKLMEAYETCIAKLRKSQSNRRKISLKKVEEANFSKEARKLVPETIVKQIISLNSLDMELYDHAKKFL

SEQ ID NO: 96462 - protein, 162 aa, Setaria italica
  Transcript Sequence Number=SeqID_30488
  Homolog annotation: Hit_ID=Q9LN06; Match level="QueryCoverage=46%, HitCoverage=12%, E-value=2e-16, Identity=56%"; Hit description =T6D22.10
PTEETNKHLNSTHGWQTNEALNSTDDEQGKGNMTVGKLMEAYETCIAKLRKSQSNRRKISLKKVEEANFSKEARKLVPETIVKQIISLNSLDMELYDHAKKIFTQEHLMLKAQQSMGWTDIICSDGVCSPWMVVVLGLGITVIIALVSFAVTTRRRTSKLKV

SEQ ID NO: 96463 - protein, 356 aa, Setaria italica
  Transcript Sequence Number=SeqID_30489
  Gene Ontology: Mol. function=catalytic activity; Biological process =fructose 2,6-bisphosphate metabolic process
  Homolog annotation: Hit_ID=Q9LN06; Match level="QueryCoverage=79%, HitCoverage=48%, E-value=1e-111, Identity=65%"; Hit description =T6D22.10
MARAALGLGAAARALALLAVASVALLPLVSSDDGYRHCEGVVRGWAYSSTGRDKDGDKMSLKDLLFFLHIPRTGGRTYFHCFLKKLYTNAQECPRSYDKLRFDPSHPDCKLVVSHDDYSLTSKLPRERTSVVTILRNPVDRVFSTYEFSVEVAARFLVHPNLTSAKLMTTRVLTKSRAVSTLDIWPWKYLVPWMREDLFARRDARGIDKVHSSKKVNAYDVEDMVMPLHQYINDPVAHEIIHNGATFQITGLTNNSYFDGAHEVRHCVRQHPDLGRIVLEVAKNRLDQMLYVGLTEDHEESARLFAHMVGAQVLSQSGTLNFDLKEDLPSENDSHPSMVEPEDEETNHLNSTHGWW

SEQ ID NO: 96464 - protein, 121 aa, Setaria italica
  Transcript Sequence Number=SeqID_30490
  Gene Ontology: Mol. function=cyclin-dependent protein kinase activity; Cellular component=cytoplasm; Biological process=protein amino acid phosphorylation
  Homolog annotation: Hit_ID=Q84SN3; Match level="QueryCoverage=92%, HitCoverage=28%, E-value=2e-54, Identity=83%"; Hit description =Cyclin-dependent kinase F-3
  Pfam annotation: Domain name=Pkinase; Domain location=1-121; Score= -63.0; E_value=9.7e-05; Accession=PF00069.17; Description=Protein kinase domain
  Pfam annotation: Domain name=Pkinase_Tyr; Domain location=9-117; Score=-151.1; E_value=0.0011; Accession=PF07714.9; Description =Protein tyrosine kinase
  Pfam module annotation: Pfam domain module=Pkinase::Pkinase_Tyr; Domain location=1-121::9-117
KFFQWEECVSLREVKLKEVTMENHELFFIFEHMECNLYDVIRERQVAFSEGDIRNFMVQILQGLAYMHNNGYFHRDLKPENLLVTNGIVKIADFGLAREVSSNPPYTDYVSTNSPHVNKTR

SEQ ID NO: 96465 - protein, 432 aa, Setaria italica
  Transcript Sequence Number=SeqID_30491
  Gene Ontology: Mol. function=cyclin-dependent protein kinase activity; Cellular component=intracellular membrane-bounded organelle; Biological process=protein amino acid phosphorylation
  Homolog annotation: Hit_ID=Q84SN3; Match level="QueryCoverage=100%, HitCoverage=100%, E-value=0.0, Identity=85%"; Hit description=Cyclin- dependent kinase F-3
  Pfam annotation: Domain name=Pkinase; Domain location=4-283; Score =360.2; E_value=3.7e-105; Accession=PF00069.17; Description=Protein kinase domain
  Pfam annotation: Domain name=Pkinase_Tyr; Domain location=4-283; Score=51.4; E_value=3.8e-17; Accession=PF07714.9; Description =Protein tyrosine kinase
  Pfam module annotation: Pfam domain module=Pkinase::Pkinase_Tyr; Domain location=4-283::4-283
MERYKVIREIGDGTCGNVFMAYNVETNEIVAVKKMKRKFFQWEECVSLREVKALQKLIHPNIVKLKEVTMENHELFFIFEHMECNLYDVIRERQVAFSEGDIRNFMVQILQGLAYMHNNGYFHRDLKPENLLVTNGIVKIADFGLAREVSSNPPYTDYVSTRWYRAPEVLLQSSAYTPAIDMWAVGAILAELFTLSPLFPGESETDQLYKICTVLGTPDCTVWPEGMNLPRSSTFKFFQIPPRNLWELIPNASLEAIDLIQRLCSWDPQRRPTAEQALQHPFFNVCNWVPRPVHDASHTKANEPKAHPRLELNLWDFSTEPDDCFLDLTLSLKPSFPGTDLANHVPQRTEEEILLYSGFENTPVKPGFWPLVPSDRPIGDVPAMPSWQQAYMVDSRASLPGFSGTPFGLSLQPSLMENHHHSLAPIRQVNFF

SEQ ID NO: 96466 - protein, 115 aa, Setaria italica
  Transcript Sequence Number=SeqID_30492
  Subcellular localization annotation: CTP_CleavageSite=30; ConfidenceScore=5.27e-01
APASASTSTSTAPRTGARARAHGRAVKTIRERAREGEGTTRRPKQLAVRWVRIRATRDRIESHPYRTTPRSPCTVRWACHLAEGPGNGRPRSGRRPCAEQPTANPAMMGSKGNPY

SEQ ID NO: 96467 - protein, 84 aa, Setaria italica
  Transcript Sequence Number=SeqID_30493
  Gene Ontology: Mol. function=nucleotide binding; Biological process =defense response
SLSATSGSFQCQAFVTVSQRFDVKVLIRDILLQIIQPVHRQGHRASTEAGEASREGMLKGMETWDVGVIASMLRQQLENKRYLI

SEQ ID NO: 96468 - protein, 88 aa, Setaria italica
  Transcript Sequence Number=SeqID_30494
  Homolog annotation: Hit_ID=Q652V2; Match level="QueryCoverage=75%, HitCoverage=19%, E-value=2e-23, Identity=85%"; Hit description=33 kDa secretory protein-like
MSKLLAPAPLPVLLLLVLSACTTPARGGDDYTAFVYAGCSQARYDPGSQYAADVDTTLSSLVNSAGYTAYANYTSPSAATGLAGVYQC

SEQ ID NO: 96469 - protein, 84 aa, Setaria italica
  misc_feature (74)..(74): Xaa can be any naturally occurring amino acid
  Transcript Sequence Number=SeqID_30495
  Homolog annotation: Hit_ID=B4FA28; Match level="QueryCoverage=70%, HitCoverage=18%, E-value=1e-10, Identity=67%"; Hit description =Glyoxylate reductase
MPPPATNAADSVADDKPLVLLAQPLFPHFAAALEGRYRFVLAADADAAAAAEARVLLVPGLKVVTAELIDRLPXALELVVATSV

SEQ ID NO: 96470 - protein, 60 aa, Setaria italica
  Transcript Sequence Number=SeqID_30496
PYPRYAPRVCREDPMPRLLCFRLAQIFFPALQAVAVLVSFAFGRSAPLIHGSAQPPAQLF

SEQ ID NO: 96471 - protein, 91 aa, Setaria italica
  Transcript Sequence Number=SeqID_30497
  Gene Ontology: Mol. function=electron carrier activity; Biological process=response to oxidative stress
  Homolog annotation: Hit_ID=Q5U1S9; Match level="QueryCoverage=70%, HitCoverage=17%, E-value=3e-28, Identity=90%"; Hit description=Class III peroxidase 14
MSQVRSKGMDGAAVVAAVMAAAVALLCFQLPAVAQGQLQVGFYNTSCPNAESLVRQAVANAFANDSGIAAGLIRLHFHDCFVRGCDASVLL

SEQ ID NO: 96472 - protein, 65 aa, Setaria italica
  Transcript Sequence Number=SeqID_30498
GAIAQLTSKPCWPPLVLPLLPCRYHYVLDRLNLPHLPATSLRRGSCVTLHDGCAYRLMRAGQAFM

SEQ ID NO: 96473 - protein, 55 aa, Setaria italica
  misc_feature (21)..(21): Xaa can be any naturally occurring amino acid
  Transcript Sequence Number=SeqID_30499
  Gene Ontology: Mol. function=nucleotide binding; Biological process =defense response
  Homolog annotation: Hit_ID=Q53Q39; Match level="QueryCoverage=98%, HitCoverage=6%, E-value=3e-10, Identity=57%"; Hit description=NB-ARC domain containing protein, expressed
YEGLYIVLPKLDTVPEDVESXLQKLRLLHLHEDFKAEWDRKGMHQKMSYVLELRI

SEQ ID NO: 96474 - protein, 199 aa, Setaria italica
  Transcript Sequence Number=SeqID_30500
  Gene Ontology: Mol. function=transferase activity
  Homolog annotation: Hit_ID=B6SYB6; Match level="QueryCoverage=90%, HitCoverage=33%, E-value=7e-84, Identity=86%"; Hit description =Glycosyltransferase
  Subcellular localization annotation: CTP_CleavageSite=61; ConfidenceScore=5.07e-01
SLWRRRPGPCPRPAKPKLLIFIRKQNRVLLNLPHVVTACRRAGFAPHVMNLRRQTPLPVIHAALASADAMVAVHGAAVTHFLFMRPGSVLLQIVPVGLDWAADAFYGKPAQQLGLEYLEYKVAPEESSLAAEYGLNSTVVRDPSVISSRGWWEMKKVYMDRQNVTVNIKRFGELLKAARTHLKNATACAKGAGAAAALR

SEQ ID NO: 96475 - protein, 133 aa, Setaria italica
  misc_feature (21)..(21): Xaa can be any naturally occurring amino acid
  Transcript Sequence Number=SeqID_30501
  Gene Ontology: Mol. function=GTPase activity
  Homolog annotation: Hit_ID=B9S4R5; Match level="QueryCoverage=69%, HitCoverage=13%, E-value=1e-29, Identity=62%"; Hit description =Interferon-induced guanylate-binding protein, putative
HHAAQSVLKLEDEIKKVCTLXVYRNFLLANEYQSSKLCEARFSECEDKMDHLQVLKLPSMAKFNAGFTHCNRSFVRECVGPAKESYERRMSKVCLLLKIVYMLIIEDLSVVAFAICFCFMRIFNSQPVPFFPT

SEQ ID NO: 96476 - protein, 211 aa, Setaria italica
  Transcript Sequence Number=SeqID_30502
  Gene Ontology: Mol. function=GTPase activity
  Homolog annotation: Hit_ID=UPI000034EE3F; Match level="QueryCoverage =98%, HitCoverage=30%, E-value=4e-83, Identity=65%"; Hit description =guanylate-binding family protein
GSNKKTYLLANEYQSSKLCEARFSECEDKMDHLQVLKLPSMAKFNAGFTHCNRSFVRECVGPAKESYERRMSKMLVKSRALFIKEYNNKLFNWLVTFSLVMVVIGRFVIKFFLLEIVAWVMFIFLETYTRMFWSAESLYYNPAWHIIVSSWETIVYSPILDLDRWAIPIVIMLSFGILYWRCFGGRRKRGRGSLLPLYKNSYKNSSRPRSD

SEQ ID NO: 96477 - protein, 80 aa, Setaria italica
  Transcript Sequence Number=SeqID_30503
FSADKTMCRLPGPYCCSCGEQDIKIMTKVCVADAYHWSEHMNPLVGWSGFASLSVTFSVQYFFLFHFPLRVILFYVYATF

SEQ ID NO: 96478 - protein, 65 aa, Setaria italica
  Transcript Sequence Number=SeqID_30504
  Homolog annotation: Hit_ID=UPI000034F28B; Match level="QueryCoverage =98%, HitCoverage=8%, E-value=6e-26, Identity=90%"; Hit description =DENN (AEX-3) domain-containing protein
  Subcellular localization annotation: CTP_CleavageSite=59; ConfidenceScore=5.03e-01
DTLCSNLRSHTITNVQSNNDKVSLLLRESFIGSFPSRDRPFMKLFVDTQLFSVHTDLVLSFYQKD

SEQ ID NO: 96479 - protein, 573 aa, Setaria italica
  misc_feature (32)..(32): Xaa can be any naturally occurring amino acid
  Transcript Sequence Number=SeqID_30505
  Gene Ontology: Cellular component=integral to membrane
  Homolog annotation: Hit_ID=UPI000034F28B; Match level="QueryCoverage =99%, HitCoverage=67%, E-value=1e-142, Identity=68%"; Hit description= DENN (AEX-3) domain-containing protein
  Pfam annotation: Domain name=DENN; Domain location=265-447; Score =21.7; E_value=3.7e-08; Accession=PF02141.13; Description=DENN (AEX -3) domain
MLMNEKPVFPRRSRYMITTNRCYCILSRLPFXELHFGVLQSILMEERLEWLTDGVSILTSLSLEEACEENDICEGTEVTAKQYLDANTTDMDKSSESSTGVSSKELSDTDSSSGCKDTQLDFVSNEGEQQDNSCVKEQSDLETETAIHCDTPKVSDHCVPEDTSSDQSEVKPHELDSGARKNCDDSPQGNEGDEQLDLFITDTILPLMRSRLCEDCESSPSSQDSPSEGRNLRCDTQDSDSEEPSSIGHGDLVRHNNILQWAKAKKYGSLQVVCQYYQLQCPARGSSLTFHPLEHLHPLSFHRPGETVLHIAGSTIELRSRDTSLEVAEMRNALFAEEESTALSTWAVASICGCLRLEHVMTLFAAALLEKQIVIVCSNLGMLSASVLSIIPLIRPYQWQSLLIPVLPIDMMDFLDAPVPYIVGVQNKASDVLNRLANAVVIDANRNQIKSSSVPQLPQHRELLASLRPYHSILVGESYLARKRPVYECTDSQVEAAKGFLAVLRDYLDTLCSNLRSHTITNVQSNNDKVSLLLRESFIGSFPSRDRPFMKLFVDTQLFSVHTDLVLSFYQKD

SEQ ID NO: 96480 - protein, 214 aa, Setaria italica
  Transcript Sequence Number=SeqID_30506
  Gene Ontology: Mol. function=ubiquitin-protein ligase activity; Cellular component=intracellular; Biological process=ubiquitin -dependent protein catabolic process
  Homolog annotation: Hit_ID=Q9AWV3; Match level="QueryCoverage=74%, HitCoverage=50%, E-value=3e-52, Identity=56%"; Hit description =P0044F08.7 protein
  Pfam annotation: Domain name=Sina; Domain location=1-175; Score= -35.0; E_value=0.00015; Accession=PF03145.8; Description=Seven in absentia protein family
MERVVETVEVPCCFAKNGCTKKITYFNKKKHEKACRYGPCFCPEPGCGFTGPAVALANHLITRHKWPFMKFKYFEQFSLSLQRGPRVLQAPDSKIFLMNLKPVEPLGHAISLVCVQPEAMDSRFGCSVAFSCFTGHHQLSTLDAVRSSSLSDGMPEDFFCIVPKAGGTEIFLRTTIDNELVHDEEDELEDEDEDEDDESYNEDEDDEEDDSDDE

SEQ ID NO: 96481 - protein, 69 aa, Setaria italica
  Transcript Sequence Number=SeqID_30507
MSSWLRSAVSRAVEVGGRSGVARAVKGYADAVAHHAGQAVADILHDRMGAQNYKSFKKTVARLEEAAVS

SEQ ID NO: 96482 - protein, 77 aa, Setaria italica
  Transcript Sequence Number=SeqID_30508
  Gene Ontology: Mol. function=metallocarboxypeptidase activity; Biological process=proteolysis
DDCFKMFNPVDKTTFDVGKSSIPVPTIFLVVLFLFDNHRFCQQRVINKWCMAFLILFEEGLRNLQDSQIVSQGTQGI

SEQ ID NO: 96483 - protein, 330 aa, Setaria italica
  Transcript Sequence Number=SeqID_30509
  Gene Ontology: Mol. function=metallocarboxypeptidase activity; Biological process=proteolysis
  Homolog annotation: Hit_ID=B9R8M1; Match level="QueryCoverage=97%, HitCoverage=71%, E-value=1e-111, Identity=62%"; Hit description =Carboxypeptidase B2, putative
  Pfam annotation: Domain name=Peptidase_M14; Domain location=1-228; Score=18.5; E_value=2.3e-09; Accession=PF00246.16; Description=Zinc carboxypeptidase
LSFGQHGRELITSEVALRLLYILTEKHKIAGVDLSSFEKVLDNLVIKVVPMENLNGRRRVEEGELCDRRNGRGVDLNRNWSVDWGKKEKDYDPYEENPGIAPFSEPETQIMRELSRSFKPHVWVNVHSGMEALFMPYDHKNTTPNGASAHLMRSVLENLNHRHFQDSCLVGSGGGSVGYLAHGTTTDYMHDIAKVPMPFTFEIYGDEKASTDDCFKMFNPVDKTTFDRVINKWCMAFLILFEEGLRNLQDSQIVSQGALDNWVPIGGDVERNVERKSSRERRKLEGLDLGMQELRTYFRLFMVSTFLLMFMFCTRISKNRNRDSGNAFDP

SEQ ID NO: 96484 - protein, 78 aa, Setaria italica
  Transcript Sequence Number=SeqID_30510
  Gene Ontology: Mol. function=ubiquitin-specific protease activity; Biological process=ubiquitin-dependent protein catabolic process
  Homolog annotation: Hit_ID=B6T4L6; Match level="QueryCoverage=85%, HitCoverage=20%, E-value=3e-34, Identity=97%"; Hit description =Ubiquitin fusion degradation protein 1
  Pfam annotation: Domain name=UFD1; Domain location=1-78; Score=-2.4; E_value=6.6e-08; Accession=PF03152.6; Description=Ubiquitin fusion degradation protein UFD1
HTLDIVLLLSNAVIMPPSALDRLASLHIEYPMLFELHNDATQRISHCGVLEFVAEEGMIIMPYWMMQNMLLQEGDTVR

SEQ ID NO: 96485 - protein, 45 aa, Setaria italica
  Transcript Sequence Number=SeqID_30511
  Gene Ontology: Biological process=ubiquitin-dependent protein catabolic process
  Homolog annotation: Hit_ID=B6T4L6; Match level="QueryCoverage=86%, HitCoverage=12%, E-value=3e-16, Identity=94%"; Hit description =Ubiquitin fusion degradation protein 1
FLLFLQFYGGYAYHGSTFEQTYRCYPASFFDKPHLEGGDKVIMPP

SEQ ID NO: 96486 - protein, 322 aa, Setaria italica
  Transcript Sequence Number=SeqID_30512
  Gene Ontology: Mol. function=ubiquitin-specific protease activity; Cellular component=proteasome complex; Biological process=ubiquitin -dependent protein catabolic process
  Homolog annotation: Hit_ID=B6T4L6; Match level="QueryCoverage=100%, HitCoverage=100%, E-value=1e-156, Identity=83%"; Hit description =Ubiquitin fusion degradation protein 1
  Pfam annotation: Domain name=UFD1; Domain location=10-184; Score =421.1; E_value=1.8e-123; Accession=PF03152.6; Description=Ubiquitin fusion degradation protein UFD1
MFYGGYAYHGSTFEQTYRCYPASFFDKPHLEGGDKVIMPPSALDRLASLHIEYPMLFELHNDATQRISHCGVLEFVAEEGMIIMPYWMMQNMLLQEGDTVRVKNATLPKGTYVKLQPHTTDFLDISNPKAILEKTLRNFSCLTTGDSIMVAYNNKQYYIDIVETKPASAVSIIETDCEVDFAPPLDYKEPEKPQQPTIPTSKAAAEVGDTVVEDEPKFKPFTGSGKRLDGRASKLQASEVPSTAHSVPLDSNKRANQQTSSAPATTSGASNSTRQKTGKLVFGSSASNNKEPQKAPAKEEEPPKKDELKFQAFSGKSYSLKR

SEQ ID NO: 96487 - protein, 87 aa, Setaria italica
  Transcript Sequence Number=SeqID_30513
  Subcellular localization annotation: CTP_CleavageSite=74; ConfidenceScore=5.78e-01
SLSIRTSCLRRRFIPLRPSTAASSRRGPPPPPPPATTLLSGRFVQRRRLRLPVFSATTPSLGLTALPPLPLHCSAASRWTDLESADS

SEQ ID NO: 96488 - protein, 117 aa, Setaria italica
  Transcript Sequence Number=SeqID_30514
  Gene Ontology: Cellular component=integral to membrane; Biological process=transport
  Homolog annotation: Hit_ID=Q7XKF4; Match level="QueryCoverage=100%, HitCoverage=16%, E-value=1e-53, Identity=84%"; Hit description =Probable metal-nicotianamine transporter YSL13
FFFVRLWTKAIESVGLLKQPFTRQENTVIQTCVVASYGLAFSGGFGSYLLAMSDKIAAMSTEANDAQNIKNPQLGWIIGFLFLVSFIGLFGLVPLRKVMIVDYKLTYPSGTATAYLI

SEQ ID NO: 96489 - protein, 262 aa, Setaria italica
  misc_feature (55)..(55): Xaa can be any naturally occurring amino acid
  Transcript Sequence Number=SeqID_30515
  Gene Ontology: Mol. function=iron ion binding; Cellular component =integral to membrane; Biological process=transport
  Homolog annotation: Hit_ID=Q5JQD7; Match level="QueryCoverage=98%, HitCoverage=43%, E-value=1e-99, Identity=63%"; Hit description =Probable metal-nicotianamine transporter YSL12
  Pfam annotation: Domain name=OPT; Domain location=1-260; Score= -147.5; E_value=1.7e-06; Accession=PF03169.7; Description=OPT oligopeptide transporter protein
PSLNISAGLLGFFFVRLWTKAIESVGLLKQPFTRQENTVIQTCVVASYGLAFSGXVVFYKLTYPSGTATAYLINGFHTPEGAKLAKKQVKALGKFFLFSFLWGFFQWFYTGGDSCGFQNFPTLGLQAYKNRFYFFPSPTYVGVGMICPHIVNVSVLLGGILSWGIMWPLIRNKKGSWYPASLQESSLHGLQGYRVFISIAIILGDGLYNFVKVLIRTTAGFISMMKKDSTLPVSNDSSPITESVSFDDERRTELFLKRSKSP

SEQ ID NO: 96490 - protein, 546 aa, Setaria italica
  Transcript Sequence Number=SeqID_30516
  Gene Ontology: Mol. function=iron ion binding; Cellular component =integral to membrane; Biological process=transport
  Homolog annotation: Hit_ID=Q6H7J6; Match level="QueryCoverage=100%, HitCoverage=75%, E-value=0.0, Identity=82%"; Hit description =Probable metal-nicotianamine transporter YSL14
  Pfam annotation: Domain name=OPT; Domain location=14-543; Score =435.3; E_value=9.5e-128; Accession=PF03169.7; Description=OPT oligopeptide transporter protein
  Subcellular localization annotation: CTP_CleavageSite=50; ConfidenceScore=5.03e-01
RAFAGQPVPSWREQLTVRAFVVSFFLAVLFSIIVMKLNLTTGIIPSLNISAGLLGFFFVRLWTKAIESMGLLRQPFTRQENTVIQTCVVAAYDIAFSGGFGTYLFGMSEKIANQATEANDAQNIKNPHLGWMIGFLFLVSFIGLLALVPLRKIMIVDYKLTYPSGTATAYLINGFHTPEGAKLAKKQVKTLGKYFVFSFFWGFFQWFYTAGDDCGFKNFPTLGLEAYNNRFFFDFSPTYVGVGMICPYIVNVSVLLGGILSWGVMWPLIAKKKGSWYPADVGDSSLHGLQAYRVFISIALILGDGLYNFIKVLIRTIAGFISMVQQNSKSMLPVSDHGSSMSTAEAVSFDEERRTELFLKDQIPKSVAYGGYAAVAAVSIGTLPQIFPQLKWYYILVAYVVAPVLAFCNAYGSGLTDWSLASTYGKLAIFVFGAWAGLAQGGVLVGLAACGVMMSIVSTASDLMQDFKTGYLTLASPRSMFISQVIGTGMGCVIAPCIFWLFYKAFGDIGESGTEYPAPYAIVYRNMAILGVDGFGSLPKNCLTLC

SEQ ID NO: 96491 - protein, 238 aa, Setaria italica
  Transcript Sequence Number=SeqID_30517
  Gene Ontology: Mol. function=iron ion binding; Cellular component =integral to membrane; Biological process=transport
  Homolog annotation: Hit_ID=Q6H7J6; Match level="QueryCoverage=98%, HitCoverage=32%, E-value=1e-111, Identity=85%"; Hit description =Probable metal-nicotianamine transporter YSL14
  Pfam annotation: Domain name=OPT; Domain location=1-210; Score= -246.2; E_value=0.0037; Accession=PF03169.7; Description=OPT oligopeptide transporter protein
  Subcellular localization annotation: CTP_CleavageSite=53; ConfidenceScore=5.02e-01
VFAIFVFGAWAGLAQGGVLVGLAACGVMMSIVSTASDLMQDFKTGYLTLASPRSMFISQVIGTGMGCVIAPCIFWLFYKAFGDIGESGTEYPAPYAIVYRNMAILGVDGFGSLPKNCLTLCYIFFAAAIAINLVRDLTPNRVSRFIPLPMAMAIPFYIGSYFAIDMFLGCAILFVWERLNKAKADAFGPAVASGLICGDGIWTLPQSILALAKVKPPICMKFLSRATNAKVDSFLGLS

SEQ ID NO: 96492 - protein, 99 aa, Setaria italica
  Transcript Sequence Number=SeqID_30518
  Gene Ontology: Mol. function=two-component response regulator activity; Cellular component=endoplasmic reticulum membrane; Biological process=two-component signal transduction system (phosphorelay)
  Homolog annotation: Hit_ID=Q949H5; Match level="QueryCoverage=96%, HitCoverage=11%, E-value=2e-24, Identity=56%"; Hit description =Ethylene receptor
MGYTHCACDGGGGGGGGGFWSLDNIFKWQKVSDLLIAAAYFSIPLELLYFVAGLRHLLPFRWVLVQFGAFIVLCGLTHLLAAFTYEPHPFMVVLLLTAA

SEQ ID NO: 96493 - protein, 298 aa, Setaria italica
  misc_feature (277)..(277): Xaa can be any naturally occurring amino acid
  Transcript Sequence Number=SeqID_30519
  Gene Ontology: Mol. function=transferase activity, transferring glycosyl groups; Cellular component=integral to membrane; Biological process=protein amino acid glycosylation
  Homolog annotation: Hit_ID=B6SJ23; Match level="QueryCoverage=100%, HitCoverage=44%, E-value=1e-167, Identity=94%"; Hit description =Galactosyltransferase/ transferase, transferring hexosyl groups
  Pfam annotation: Domain name=Galactosyl_T; Domain location=64-252; Score=58.3; E_value=2.8e-14; Accession=PF01762.13; Description =Galactosyltransferase
DATALSLNGDIDIESIFASSLPNSHPSFAPERYLEMSEQWRAPPLPTEPVELFIGILSAASHFAERMAVRKSWMMYTRKSSNVVARFFVALNGKKEVNAELKKEAEFFRDIVIVPFVDSYDLVVLKTVAIAEYGVRVVPAKYVMKCDDDTFVRIDSVLDQVKKARSDRSVYVGSINYFHRPLRSGKWAVTYEEWPEEVYPNYANGPGYVISSDIARYIVSEFDNQTLRLFKMEDVSMGMWVEKFNNTRRPVEIRHDVRFYQSGCYNGYFTAHYQSPXQHMICLWRKLQSGSAQCCNVR

SEQ ID NO: 96494 - protein, 82 aa, Setaria italica
  Transcript Sequence Number=SeqID_30520
  Homolog annotation: Hit_ID=B6TBZ6; Match level="QueryCoverage=91%, HitCoverage=20%, E-value=2e-21, Identity=62%"; Hit description=MtN21 nodulin protein-like
TLLGVAGPMLLTFYKGADVTPWHSSVNLVAHQHRQQLEVVAEATNRVMGSLLCISSCFFYAIWLILQAKLSKEYPASTPTSR

SEQ ID NO: 96495 - protein, 101 aa, Setaria italica
  Transcript Sequence Number=SeqID_30521
  Subcellular localization annotation: CTP_CleavageSite=68; ConfidenceScore=5.75e-01
CKESRGTSSPKGPNFARSGWSSATNSGGKSARPVTAEPRNQRARSNLSTPGTSKVNQSLHAQPAQLLSCELTNRAPLARTPSLVQIEPRPRTHPLLTGRDE

SEQ ID NO: 96496 - protein, 149 aa, Setaria italica
  Transcript Sequence Number=SeqID_30522
  Gene Ontology: Mol. function=structural constituent of ribosome; Cellular component=ribonucleoprotein complex; Biological process =translation
  Homolog annotation: Hit_ID=P0C482; Match level="QueryCoverage=100%, HitCoverage=63%, E-value=5e-81, Identity=96%"; Hit description=30S ribosomal protein S2, chloroplastic
  Pfam annotation: Domain name=Ribosomal_S2; Domain location=13-149; Score=157.0; E_value=5.7e-44; Accession=PF00318.12; Description =Ribosomal protein S2
MTRRYWNINLKEMIEAGVHFGHGIKKWNPKMAPYISAKRKGTHIINLARTARFLSEACDLVFDAASQGKSFLIVGTKKRAADLVASAAIRSRCHYVNKKWFSGMLTNWSITKTRLSQFRDLRAEEKMGKFHHLPKRDAAILKRKLSTLQ

SEQ ID NO: 96497 - protein, 169 aa, Setaria italica
  misc_feature (137)..(137): Xaa can be any naturally occurring amino acid
  Transcript Sequence Number=SeqID_30523
  Gene Ontology: Mol. function=microtubule motor activity; Cellular component=microtubule associated complex; Biological process =microtubule-based movement
  Homolog annotation: Hit_ID=Q2QP07; Match level="QueryCoverage=97%, HitCoverage=18%, E-value=6e-72, Identity=80%"; Hit description =Kinesin motor protein, putative, expressed
  Pfam annotation: Domain name=Kinesin; Domain location=41-169; Score= -93.1; E_value=2.9e-09; Accession=PF00225.15; Description=Kinesin motor domain
KLGLLSHDPSTWKLQEKVLEENRKLYNQIQDLKGNIRVYCRVRPFLPGQISSSSSVAGIEERTITISTAAKYAKDGSKSFTFNKVFGPAATQDEVFSDMQPLIRSVLDGFNVCIFAYGQTGSGKTYTMSGPKVLTEXLGVNYRALNDLFSLQEQRNGTINYDISVQMIE

SEQ ID NO: 96498 - protein, 326 aa, Setaria italica
  Transcript Sequence Number=SeqID_30524
  Gene Ontology: Mol. function=electron carrier activity; Cellular component=extracellular region; Biological process=hydrogen peroxide catabolic process
  Homolog annotation: Hit_ID=P37834; Match level="QueryCoverage=93%, HitCoverage=93%, E-value=1e-149, Identity=83%"; Hit description =Peroxidase 1
  Pfam annotation: Domain name=peroxidase; Domain location=40-288; Score=450.0; E_value=3.6e-132; Accession=PF00141.15; Description =Peroxidase
MASRAAVVVLLLSAFAAAAASAQLDEKFYSQSCPSVEDVVRKEMVRALSAAPSLAGPLLRMHFHDCFVRGCDGSVLLDSTANTTAEKDAKPNLTLRGFGFIERVKAAVEKACPDTVSCADVLALMARDAVWLSKGPFWAVPLGRRDGRVSISNETDQLPPPTGNFTELTQIFATKNLDAKDLVVLSAGHTLGTSHCFSFSDRLYNFTGMDNAHDTDPTLDPMYMARLRGKCPSLDDNTTLVEMDPGSFKTFDLSYFGHVAKRRGLFHSDGALLTDPFTRAYVLRHATGAYREEFFADFAASMVKMGSVEVLTGSQGEIRKKCSVVN

SEQ ID NO: 96499 - protein, 63 aa, Setaria italica
  Transcript Sequence Number=SeqID_30525
  Gene Ontology: Mol. function=aspartic-type endopeptidase activity; Biological process=proteolysis
  Homolog annotation: Hit_ID=B6SMJ5; Match level="QueryCoverage=100%, HitCoverage=14%, E-value=3e-26, Identity=93%"; Hit description =Aspartic proteinase nepenthesin-2
  Subcellular localization annotation: CTP_CleavageSite=28; ConfidenceScore=5.52e-01
FGCGSINAGDLANSSGMVGFGRGPLSLVSQLGPSRFSYCLTSYLSPTPSRLYFGVFANLNSTN

SEQ ID NO: 96500 - protein, 217 aa, Setaria italica
  Transcript Sequence Number=SeqID_30526
  Subcellular localization annotation: CTP_CleavageSite=23; ConfidenceScore=5.14e-01
FGYLNNSRFRAMSFRFDLSVSFLASALSVLLVVATCMPLGYRSEAARDKVLSLVRYLKDAVIALLAVTAVTIAKEFLGGDTVLALFPEIAVAAMYYAVSLLTDETAGQGQRDAAAEHKLEIQPTAVVATFGFGMLGAAYAALLGTPEYDVYTKALVFTLLAAVVSSLGRVAGPLCRRRRDKDAAACVVFLGNVLPIVEMLVAVPLAAKVVINVLAAS

SEQ ID NO: 96501 - protein, 68 aa, Setaria italica
  misc_feature (14)..(14): Xaa can be any naturally occurring amino acid
  Transcript Sequence Number=SeqID_30527
MASAEDQAAAAALXGGDPAAFDGLLSTLMSSSNTDRSAAEAAFHRLRASHPEPLALRLASSLASPATD

SEQ ID NO: 96502 - protein, 113 aa, Setaria italica
  Transcript Sequence Number=SeqID_30528
  Gene Ontology: Mol. function=protein serine/threonine kinase activity; Cellular component=plasma membrane; Biological process =protein amino acid phosphorylation
  Homolog annotation: Hit_ID=B6SHH9; Match level="QueryCoverage=100%, HitCoverage=18%, E-value=1e-55, Identity=92%"; Hit description =BRASSINOSTEROID INSENSITIVE 1-associated receptor kinase 1
  Pfam annotation: Domain name=Pkinase_Tyr; Domain location=1-113; Score=-160.3; E_value=0.0046; Accession=PF07714.9; Description =Protein tyrosine kinase
RLCRLKLNEPALDWSTRMQIALGAARGLEYLHEHCNPKIIHRDVKAANVLLDGNFEAVVGDFGLAKMMDIGRNTVTTGLRGTMGHIAPEYIKTGRPSVKTDIFGYGVTLLEIV

SEQ ID NO: 96503 - protein, 127 aa, Setaria italica
  Transcript Sequence Number=SeqID_30529
  Gene Ontology: Mol. function=protein serine/threonine kinase activity; Cellular component=plasma membrane; Biological process =protein amino acid phosphorylation
  Homolog annotation: Hit_ID=B6RF08; Match level="QueryCoverage=85%, HitCoverage=17%, E-value=3e-34, Identity=69%"; Hit description =Brassinosteroid insensitive1-associated receptor kinase 1
  Pfam annotation: Domain name=LRR_1; Domain location=23-45; Score =17.7; E_value=0.05; Accession=PF00560.25; Description=Leucine Rich Repeat
  Pfam annotation: Domain name=LRR_1; Domain location=47-69; Score =15.6; E_value=0.21; Accession=PF00560.25; Description=Leucine Rich Repeat
  Pfam annotation: Domain name=LRR_1; Domain location=71-93; Score =17.6; E_value=0.051; Accession=PF00560.25; Description=Leucine Rich Repeat
  Pfam annotation: Domain name=LRR_1; Domain location=95-118; Score =7.2; E_value=13; Accession=PF00560.25; Description=Leucine Rich Repeat
  Pfam module annotation: Pfam domain module=LRR_1::LRR_1::LRR_1::LRR _1; Domain location=23-45::47-69::71-93::95-118
VCRSLSSSGLTGTLSPSIAKITTLQELILHGNSITGVIPQEFGNLSSLKTLDLGKNNLNGSIPDTLGRLPKLEIMDLSQNHLSGSIPSSFINLQSLNNINLAYNNLSSEIPQYLLRVPQYKYVISAP

SEQ ID NO: 96504 - protein, 157 aa, Setaria italica
  Transcript Sequence Number=SeqID_30530
  Gene Ontology: Mol. function=protein serine/threonine kinase activity; Cellular component=plasma membrane; Biological process =protein amino acid phosphorylation
  Homolog annotation: Hit_ID=B6SHH9; Match level="QueryCoverage=80%, HitCoverage=20%, E-value=2e-47, Identity=74%"; Hit description =BRASSINOSTEROID INSENSITIVE 1-associated receptor kinase 1
  Pfam annotation: Domain name=Pkinase_Tyr; Domain location=50-157; Score=-159.5; E_value=0.004; Accession=PF07714.9; Description =Protein tyrosine kinase
ISILKESTKLLLTDTRRKCSTIPGQNDHRLEFGQIKRFLWRELQIATNNFSEQNVLGKGGFGKVYKGVLPGPDSIKIAVKRLFDVQSPEGEMAFLREVELISIAVHKNILRLIGFCTTPTERLLVYPFMENLSVASRLRGTTKLRPSLLHYTIYLYL

SEQ ID NO: 96505 - protein, 82 aa, Setaria italica
  Transcript Sequence Number=SeqID_30531
  Gene Ontology: Mol. function=protein serine/threonine kinase activity; Cellular component=plasma membrane; Biological process =protein amino acid phosphorylation
  Homolog annotation: Hit_ID=B6SHH9; Match level="QueryCoverage=86%, HitCoverage=11%, E-value=1e-24, Identity=76%"; Hit description =BRASSINOSTEROID INSENSITIVE 1-associated receptor kinase 1
IHKLIQMIVNVKVKLMMEEGQLEAIVDRNLGDLYNLEELEKIIQIALLCTDMEPDHRPAMSEVVQMLEGELVPAERWQEWQL

SEQ ID NO: 96506 - protein, 189 aa, Setaria italica
  misc_feature (81)..(81): Xaa can be any naturally occurring amino acid
  misc_feature (106)..(106): Xaa can be any naturally occurring amino acid
  Transcript Sequence Number=SeqID_30532
  Gene Ontology: Mol. function=protein serine/threonine kinase activity; Cellular component=plasma membrane; Biological process =protein amino acid phosphorylation
  Homolog annotation: Hit_ID=B6RF08; Match level="QueryCoverage=90%, HitCoverage=38%, E-value=2e-61, Identity=54%"; Hit description =Brassinosteroid insensitive1-associated receptor kinase 1
  Pfam annotation: Domain name=Pkinase; Domain location=3-185; Score= -104.0; E_value=0.027; Accession=PF00069.17; Description=Protein kinase domain
  Pfam annotation: Domain name=Pkinase_Tyr; Domain location=1-137; Score=-141.1; E_value=0.00024; Accession=PF07714.9; Description =Protein tyrosine kinase
  Pfam module annotation: Pfam domain module=Pkinase::Pkinase_Tyr; Domain location=3-185::1-137
FLFTIHLVKYLVTKLENADIKLNEPALDWSTRMQIALGAARGLEYLHEHCNPKIIHRDVKAANVLLDGNFEAVVGDFGSLXAKMMDIGRNTVTTGLRGTMGHIAPXEELEKIIQIALLCTDMEPDHRPAMSEVVQMLEGELVPAERWQEWQLAELNRRQQYEMRQQCKPFSFSEESLNIQEAIELSTGR

SEQ ID NO: 96507 - protein, 56 aa, Setaria italica
  Transcript Sequence Number=SeqID_30533
LDSFVRTKCWTGKRMELTATHTVMCNSLAFQCWVTRFLLTQMRTNFCRLRNEKLSK

SEQ ID NO: 96508 - protein, 62 aa, Setaria italica
  misc_feature (43)..(43): Xaa can be any naturally occurring amino acid
  misc_feature (51)..(51): Xaa can be any naturally occurring amino acid
  misc_feature (57)..(57): Xaa can be any naturally occurring amino acid
  Transcript Sequence Number=SeqID_30534
  Homolog annotation: Hit_ID=B6RF08; Match level="QueryCoverage=79%, HitCoverage=7%, E-value=8e-12, Identity=59%"; Hit description =Brassinosteroid insensitive1-associated receptor kinase 1
  Pfam annotation: Domain name=LRRNT_2; Domain location=21-61; Score =24.4; E_value=0.00045; Accession=PF08263.4; Description=Leucine rich repeat N-terminal domain
GGFNHFFFRTQTPEIKLCFVCSSAVEALYEMRQQLIDNSGVLXDWKDNQMXPCYWNXVTCQD

SEQ ID NO: 96509 - protein, 599 aa, Setaria italica
  Transcript Sequence Number=SeqID_30535
  Gene Ontology: Mol. function=protein serine/threonine kinase activity; Cellular component=plasma membrane; Biological process =protein amino acid phosphorylation
  Homolog annotation: Hit_ID=B6RF08; Match level="QueryCoverage=98%, HitCoverage=96%, E-value=0.0, Identity=75%"; Hit description =Brassinosteroid insensitive1-associated receptor kinase 1
  Pfam annotation: Domain name=LRRNT_2; Domain location=13-53; Score =30.3; E_value=7.8e-06; Accession=PF08263.4; Description=Leucine rich repeat N-terminal domain
  Pfam annotation: Domain name=LRR_1; Domain location=104-126; Score =15.6; E_value=0.21; Accession=PF00560.25; Description=Leucine Rich Repeat
  Pfam annotation: Domain name=LRR_1; Domain location=128-150; Score =17.6; E_value=0.051; Accession=PF00560.25; Description=Leucine Rich Repeat
  Pfam annotation: Domain name=LRR_1; Domain location=152-175; Score =7.2; E_value=13; Accession=PF00560.25; Description=Leucine Rich Repeat
  Pfam annotation: Domain name=LRR_1; Domain location=56-78; Score=6.6; E_value=17; Accession=PF00560.25; Description=Leucine Rich Repeat
  Pfam annotation: Domain name=LRR_1; Domain location=80-102; Score =17.7; E_value=0.05; Accession=PF00560.25; Description=Leucine Rich Repeat
  Pfam annotation: Domain name=Pkinase; Domain location=273-547; Score =112.6; E_value=1.3e-30; Accession=PF00069.17; Description=Protein kinase domain
  Pfam annotation: Domain name=Pkinase_Tyr; Domain location=273-547; Score=102.0; E_value=2e-27; Accession=PF07714.9; Description=Protein tyrosine kinase
  Pfam module annotation: Pfam domain module=LRRNT_2::LRR_1::LRR_1::LRR_ 1::LRR_1::LRR_1::Pkinase::Pkinase_Tyr; Domain location=13-53::104 -126::128-150::152-175::56-78::80-102::273-547::273-547
FLISKSAEVSAAAEFQVEALYEMRQQLIDNSGVLNDWKDNQMSPCYWDHVTCQDNKVTTISLSSSGLTGTLSPSIAKITTLQELILHGNSITGVIPQEFGNLSSLKTLDLGKNNLNGSIPDTLGRLPKLEIMDLSQNHLSGSIPSSFINLQSLNNINLAYNNLSSEIPQYLLRVPQYNYTGNHLNCGQHLFPCEGGSTKTGGSKNSKLNVVLGSIAGAVTLLVLGVLFVLWWQRMRYRPEIFIDVSGQNDHRLEFGQIKRFLWRELQIATNNFSEQNVLGKGGFGKVYKGVLPGPDSIKIAVKRLFDVQSPEGEMAFLREVELISIAVHKNILRLIGFCTTPTERLLVYPFMENLSVASRLRDIKLNEPALDWSTRMQIALGAARGLEYLHEHCNPKIIHRDVKAANVLLDGNFEAVVGDFGLAKMMDIGRNTVTTGLRGTMGHIAPEYIKTGRPSVKTDIFGYGVTLLEIVTGERVIAFYPEAGEIMLIDRVKLMMEEGQLEAIVDRNLGDLYNLEELEKIIQIALLCTDMEPDHRPAMSEVVQMLEGELVPAERWQEWQLAELNRRQQYEMRQQCKPFSFSEESLNIQEAIELSTGR

SEQ ID NO: 96510 - protein, 247 aa, Setaria italica
  Transcript Sequence Number=SeqID_30536
  Gene Ontology: Mol. function=RNA binding; Cellular component=integral to membrane; Biological process=protein transport
  Homolog annotation: Hit_ID=C1EAN8; Match level="QueryCoverage=99%, HitCoverage=97%, E-value=4e-69, Identity=52%"; Hit description=Unc -50 family protein
  Pfam annotation: Domain name=UNC-50; Domain location=17-247; Score =451.3; E_value=1.5e-132; Accession=PF05216.5; Description=UNC-50 family
MLPTTASKGRGAARSAPPLFGPYLRRIVKWQQMDIEYTFWQMVHLCTSPKVVYQHTKYHKQTKNQWARDDPAFIVILILFLMFATSAYCAAYGESASHAALTITSVVFFHFLFAGIVLATLCWFLTNSYLREEPNSHVVEQRVEWLYAFDVHCNSFFPAFVILYVLQYFLSPLLVAHGFFPALLSNLLFVVAISYYHYLNFLGYDVLPFLDRTTFFLYPIGLVIILSPLMILIGFNPTRYFLSLYFG

SEQ ID NO: 96511 - protein, 65 aa, Setaria italica
  Transcript Sequence Number=SeqID_30537
FFSGQRNSPVPPFYRRVYHIFVMQNITSSYWQLHIAMHRSLNPETHTDKINRGNAAWRLQNQKGM

SEQ ID NO: 96512 - protein, 73 aa, Setaria italica
  Transcript Sequence Number=SeqID_30538
  Gene Ontology: Mol. function=protein binding; Cellular component =extracellular region
  Homolog annotation: Hit_ID=B6SN21; Match level="QueryCoverage=100%, HitCoverage=21%, E-value=2e-25, Identity=78%"; Hit description =Polygalacturonase inhibitor
HNNLTGTVPAEFAAVNFAQIDLSRNGFTGDASTLFGRAKPAQQMDLSRNDLSFDLSGVELPEQLILLDVSHNA

SEQ ID NO: 96513 - protein, 208 aa, Setaria italica
  misc_feature (72)..(72): Xaa can be any naturally occurring amino acid
  misc_feature (198)..(198): Xaa can be any naturally occurring amino acid
  Transcript Sequence Number=SeqID_30539
  Gene Ontology: Mol. function=GABA-B receptor activity; Cellular component=integral to membrane; Biological process=G-protein coupled receptor protein signaling pathway
  Homolog annotation: Hit_ID=B9SDW0; Match level="QueryCoverage=81%, HitCoverage=18%, E-value=8e-58, Identity=65%"; Hit description =Glutamate receptor 3 plant, putative
  Pfam annotation: Domain name=ANF_receptor; Domain location=52-208; Score=-8.8; E_value=0.00056; Accession=PF01094.20; Description =Receptor family ligand binding region
MGYSHLAALLLCACMFASGTTAGNQNGTGVPTRPAEVRIGALFTFDSVIGKAVRPAIELAVAHVNADPSILXGTKLSVLMQDTKCSGFVGTIEALQLLAKDVVAVLGPQSSAVAHVICHAVNELHVPLVSFSATDPTLSSLEYPYFVRATQSDYYQMGAIASIISYYRWKQVIAIYVDDDYGRGGIMALGDALAKKEXKIAYKAKLPP

SEQ ID NO: 96514 - protein, 124 aa, Setaria italica
  Transcript Sequence Number=SeqID_30540
  Gene Ontology: Cellular component=proton-transporting two-sector ATPase complex; Biological process=ATP synthesis coupled proton transport
  Homolog annotation: Hit_ID=B6TC18; Match level="QueryCoverage=98%, HitCoverage=97%, E-value=6e-53, Identity=77%"; Hit description =Hydrogen-transporting ATP synthase, rotational mechanism
  Pfam annotation: Domain name=ATP-synt_G; Domain location=14-124; Score=183.2; E_value=7.2e-52; Accession=PF04718.7; Description =Mitochondrial ATP synthase g subunit
MALASRLAQLQAKACEATRFVAKHGCAYQRSLVEKNKKYVVEPPTIEKCQELSKQLFYTRLASIPGRYEAFWKELDQVKQLWKNRNDLKVEHAGVAALFGIELYAWLCAGEIVGRGFTLTGYHV

SEQ ID NO: 96515 - protein, 108 aa, Setaria italica
  misc_feature (29)..(29): Xaa can be any naturally occurring amino acid
  Transcript Sequence Number=SeqID_30541
  Gene Ontology: Cellular component=chloroplast
  Homolog annotation: Hit_ID=B9SMY0; Match level="QueryCoverage=92%, HitCoverage=22%, E-value=2e-27, Identity=59%"; Hit description =Pentatricopeptide repeat-containing protein, putative
  Pfam annotation: Domain name=PPR; Domain location=23-57; Score=28.4; E_value=2.9e-05; Accession=PF01535.12; Description=PPR repeat
  Pfam annotation: Domain name=PPR; Domain location=58-91; Score=24.8; E_value=0.00036; Accession=PF01535.12; Description=PPR repeat
  Pfam module annotation: Pfam domain module=PPR::PPR; Domain location =23-57::58-91
DRIEEAITTFCKVQDMGIRPNAVLYNAIXLGLCKRRETYNAINLFSYMISNGCMPNESTYTILIEGLAYEGLAKEARELLGELCSRGVVNKKFMKKGAVKMLDGPTQT

SEQ ID NO: 96516 - protein, 73 aa, Setaria italica
  Transcript Sequence Number=SeqID_30542
SIIMQSHQLVALQDGMVWLVINLINHVMGPSQAKPNQSPLRRPCVVGQLRRRQRVGERAHGADLHLQRRHVVD

SEQ ID NO: 96517 - protein, 99 aa, Setaria italica
  misc_feature (2)..(2): Xaa can be any naturally occurring amino acid
  Transcript Sequence Number=SeqID_30543
  Subcellular localization annotation: CTP_CleavageSite=38; ConfidenceScore=5.53e-01
SXLVFFVFFFGKKKSVAFLSGLGYSRCQRFPRSLPKICVSQSQQPANHSTCLTTYRLQLQDKACSFLLYVLGSGNASVDCYWQQWNRPRSCFRLLPGPD

SEQ ID NO: 96518 - protein, 90 aa, Setaria italica
  Transcript Sequence Number=SeqID_30544
  Gene Ontology: Mol. function=ubiquitin-protein ligase activity
  Homolog annotation: Hit_ID=B9SIX2; Match level="QueryCoverage=100%, HitCoverage=2%, E-value=7e-36, Identity=77%"; Hit description =Ubiquitin-protein ligase, putative
FQLKKAFKSGSLDLKIKADYPNSRELKSHLANGSLAKLLLSISTRGKLAVGEGDKVAIFDVGQIIGQPTASPITADKTNVKPLSRNIVRF

SEQ ID NO: 96519 - protein, 241 aa, Setaria italica
  Transcript Sequence Number=SeqID_30545
  Gene Ontology: Cellular component=chloroplast envelope
  Homolog annotation: Hit_ID=Q31IL6; Match level="QueryCoverage=51%, HitCoverage=57%, E-value=7e-13, Identity=39%"; Hit description =UPF0114 protein
  Pfam annotation: Domain name=UPF0114; Domain location=58-198; Score =216.4; E_value=7.5e-62; Accession=PF03350.8; Description =Uncharacterized protein family, UPF0114
  Subcellular localization annotation: CTP_CleavageSite=43; ConfidenceScore=5.36e-01
LGGGFLRAVRGGGGGGGGGGVATPRQRVVGGSGSNGPVPTTAKATAKATAIETTVERVIFDFRFMALLAIAGSLAGSVLCFLNGCVFIKEAYQVYWSSCVKGVHTGQMVLKVVEAIDVYLAGTVMLIFGMGLYGLFISNASTDVPSESDPLRGSSLFGMFAMKERPKWMKITSLDELKTKVGHVIVMILLVKMFERSKMVKITTGLDLLSYSVCIFLSSASLYILHNLHRGDHEEGAMPNL

SEQ ID NO: 96520 - protein, 56 aa, Setaria italica
  Transcript Sequence Number=SeqID_30546
VTTSVQTTWTPQLHCTETKAKIMVSKLWNAYSKAWYTFSSSAAHSMLDSSSYNLLV

SEQ ID NO: 96521 - protein, 168 aa, Setaria italica
  misc_feature (53)..(53): Xaa can be any naturally occurring amino acid
  misc_feature (68)..(68): Xaa can be any naturally occurring amino acid
  Transcript Sequence Number=SeqID_30547
  Gene Ontology: Mol. function=protein binding
  Homolog annotation: Hit_ID=Q10GD4; Match level="QueryCoverage=91%, HitCoverage=25%, E-value=1e-62, Identity=78%"; Hit description =Leucine Rich Repeat family protein, expressed
KAFPHTLSRLLLALCPNVTTRGIQLATAQLPHLQLMDCGMSLCANLKQWKKGXVGDINGCIRIITKIXAYKNQPIHQKLIIKHGNLKKLSLWGCSAIDALYVNCPELNDLNLNSCTNLHPERLVLQCPNLKNVHAVGCQDMLIGAIRNQVNQFQETSHGIKLNTLHPG

SEQ ID NO: 96522 - protein, 98 aa, Setaria italica
  Transcript Sequence Number=SeqID_30548
  Gene Ontology: Mol. function=protein binding
  Homolog annotation: Hit_ID=Q10GD4; Match level="QueryCoverage=93%, HitCoverage=16%, E-value=5e-33, Identity=73%"; Hit description =Leucine Rich Repeat family protein, expressed
ELNDLNLNSCTNLHPERLVLQCPNLKNVHAVGCQDMLIGAIRNQFTAAESSLPCKLLADGSKRVQLPQFQQHQPPEDDKLFESSRTQCTVHLHITRAS

SEQ ID NO: 96523 - protein, 75 aa, Setaria italica
  Transcript Sequence Number=SeqID_30549
  Gene Ontology: Mol. function=protein binding
  Homolog annotation: Hit_ID=Q10GD4; Match level="QueryCoverage=70%, HitCoverage=8%, E-value=1e-13, Identity=69%"; Hit description =Leucine Rich Repeat family protein, expressed
TGPSVSVFSNILPNFRQVLNEFTAAESSLPCKLLADGSKRVQLPQFQQHQPPEDDKLFESSRTQCTVHLHITRAS

SEQ ID NO: 96524 - protein, 449 aa, Setaria italica
  Transcript Sequence Number=SeqID_30550
  Gene Ontology: Mol. function=protein binding
  Homolog annotation: Hit_ID=Q10GD4; Match level="QueryCoverage=94%, HitCoverage=68%, E-value=1e-179, Identity=76%"; Hit description =Leucine Rich Repeat family protein, expressed
  Pfam annotation: Domain name=LRR_1; Domain location=155-182; Score =4.8; E_value=36; Accession=PF00560.25; Description=Leucine Rich Repeat
  Pfam annotation: Domain name=LRR_1; Domain location=207-233; Score =8.7; E_value=6.5; Accession=PF00560.25; Description=Leucine Rich Repeat
  Pfam annotation: Domain name=LRR_1; Domain location=312-334; Score =4.3; E_value=46; Accession=PF00560.25; Description=Leucine Rich Repeat
  Pfam annotation: Domain name=LRR_1; Domain location=82-107; Score =4.6; E_value=40; Accession=PF00560.25; Description=Leucine Rich Repeat
  Pfam module annotation: Pfam domain module=LRR_1::LRR_1::LRR_1::LRR _1; Domain location=155-182::207-233::312-334::82-107
VRYLTYLSTNGSSGPSFGALLPRCPALSRLDLRMERDVDATTLACLAFSCPSLKTLEITMAANAINRMTGEDLSRFVSEKSSLSVLKIGGCSNLDFINLCSSSLSVLWLSELCSLSKSVMNCPNMSELSLCFAQQSNDCTDMVSLMDAMGRTCPNLNKMHISSNQLSNEAVFALESANLRGLCMLSLILGSKITDAAVASIVRLCTSLELLDLSGSSISDNGVGMICKAFPHTLSRLLLALCPNVTTRGIQLATAQLPHLQLMDCGMSLCANLNNEKGPMFGDINGGIRIIRKLCASKNQPIHQKLIIKHGNLKKLSLWGCSAIDALYVNCPELNDLNLNSCTNLHPERLVLQCPNLKNVHAVGCQDMLIGAIRNQVNQTLITCKPQNLNKVLNEFTAAESSLPCKLLADGSKRVQLPQFQQHQPPEDDKLFESSRTQCTVHLHITRAS

SEQ ID NO: 96525 - protein, 417 aa, Setaria italica
  misc_feature (23)..(23): Xaa can be any naturally occurring amino acid
  Transcript Sequence Number=SeqID_30551
  Gene Ontology: Mol. function=nucleotide binding; Biological process =defense response
  Homolog annotation: Hit_ID=Q9ZNV6; Match level="QueryCoverage=99%, HitCoverage=33%, E-value=2e-69, Identity=40%"; Hit description=Pib
  Pfam annotation: Domain name=LRR_1; Domain location=13-36; Score=6.2; E_value=20; Accession=PF00560.25; Description=Leucine Rich Repeat
  Pfam annotation: Domain name=LRR_1; Domain location=257-277; Score =5.4; E_value=29; Accession=PF00560.25; Description=Leucine Rich Repeat
  Pfam annotation: Domain name=LRR_1; Domain location=279-303; Score =2.5; E_value=1e+02; Accession=PF00560.25; Description=Leucine Rich Repeat
  Pfam annotation: Domain name=LRR_1; Domain location=38-60; Score =11.4; E_value=2; Accession=PF00560.25; Description=Leucine Rich Repeat
  Pfam annotation: Domain name=LRR_1; Domain location=62-83; Score=8.7; E_value=6.5; Accession=PF00560.25; Description=Leucine Rich Repeat
  Pfam module annotation: Pfam domain module=LRR_1::LRR_1::LRR_1::LRR _1::LRR_1; Domain location=13-36::257-277::279-303::38-60::62-83
KWRSFFISEKMRFLRVLDLEGTXGLVSHHLEHIGKLLHLRYLSLRGCDYIFHLSDSLGNLKQLETLDISATPILKLPKTITKLKKLQYLRAGSVGNNDDSLDVLEELPKVVNNRPCFCMGWLLGFCVACCAPQLLKEVMDVDGDMNRCDVCTQCCCVMLPILMAKEGPTWMPRGIGKLKSLRTLGVVNLAWDKANLLDIKRLTQLRKLAVTCINKENSQEFCSVVANLSCLESLLVQACGMPGLHGCLEGLASAPKNLQSLKIYGNLLKLPGWVEGLKNLVKLVLRSSRILEHEPALQVLGKLPNLVSLRLWAKSFQVDDLRFTFHPEAFPSLIVLELNDIDGLKSVEFEEGAMLRLERLDFRGKLEETNTGMFSGLPLLRSLKEFMLDNKTYKHAFMEDLQGQLGANRNGPALKRW

SEQ ID NO: 96526 - protein, 47 aa, Setaria italica
  Transcript Sequence Number=SeqID_30552
  Gene Ontology: Mol. function=protein binding
  Homolog annotation: Hit_ID=Q2QNU9; Match level="QueryCoverage=100%, HitCoverage=9%, E-value=2e-10, Identity=70%"; Hit description =Leucine Rich Repeat family protein, expressed
MVEALRLESCPFINEKGLERIGTLCSHLKEIDLTDCRIDDEALRHLA

SEQ ID NO: 96527 - protein, 129 aa, Setaria italica
  Transcript Sequence Number=SeqID_30553
  Gene Ontology: Mol. function=hydrolase activity, acting on glycosyl bonds; Cellular component=vacuole; Biological process=cell wall organization and biogenesis
  Homolog annotation: Hit_ID=B9RR75; Match level="QueryCoverage=100%, HitCoverage=26%, E-value=7e-50, Identity=71%"; Hit description =Polygalacturonase, putative
DERYWPLMSPLPSYGYGREHKGPRYGSLIHGQDLKDVTITGNNGTINGQGQSWWVKFRRKQLNHTRGPLVQLMRSSNIIISNITLRDSPFWTLHTYDCKNVTISEATILAPIAGAPNTDGIDPDSCENV

SEQ ID NO: 96528 - protein, 258 aa, Setaria italica
  Transcript Sequence Number=SeqID_30554
  Gene Ontology: Mol. function=hydrolase activity, acting on glycosyl bonds; Cellular component=vacuole; Biological process=cell wall organization and biogenesis
  Homolog annotation: Hit_ID=B9RR75; Match level="QueryCoverage=100%, HitCoverage=52%, E-value=1e-114, Identity=73%"; Hit description =Polygalacturonase, putative
  Pfam annotation: Domain name=Glyco_hydro_28; Domain location=1-230; Score=-74.2; E_value=2.1e-05; Accession=PF00295.9; Description =Glycosyl hydrolases family 28
TLHTYDCKNVTISEATILAPIAGAPNTDGIDPDSCENVVIKNCYISVGDDGIAIKSGWDQYGIAYGRPSANIIIQNVVIRSMVSAGVSIGSEMSGGVSNVLVENVHVWDSRRGVRIKTAPGRGAYVSNISYRNISLEHVRVGIVIKTDYNEHPDEGFNPKAMPIIENISYTSIHGQGVRVPVRIQGSAEIPVKNVTFQDMSVGIVDRKHHVFQCSFVQGQVIGYVFPVPCKNLDVYNERRELVKQSTFQNISDIDYSF

SEQ ID NO: 96529 - protein, 235 aa, Setaria italica
  Transcript Sequence Number=SeqID_30555
  Homolog annotation: Hit_ID=B5RHT5; Match level="QueryCoverage=46%, HitCoverage=9%, E-value=1e-12, Identity=36%"; Hit description =Zonadhesin-related protein
MEMQPSITTQDARLNRTDLSGMPVTRSTTILQSVEPSSDPHAEQAGSVGMLSAPDLQHEVQPSPQMQDQPAEMEGAGTSGTIAAQNLQPETQSSTSVQHIPPERTHPDERIQIGLQPSSTSGPEHYQLFTVPPAAVNNLSHSSEPLINEYEKLKLFKAAVSKQYDQQKSKLQTECNQEMEKIVKKYELLLQKEEHTYHRSNKLADDMYMKLFLQQSLAENFQEKFMKSIPAQVRK

SEQ ID NO: 96530 - protein, 303 aa, Setaria italica
  Transcript Sequence Number=SeqID_30556
KSKLQTECNQEMEKIVKKYELLLQKEEHTYHRSNKLADDMYMKLFLQQSLAENFQEKFMKSIPAQVRSMSPTIQQAPQSFQPALSRMSVAQTTSLPVASPPWLNSSHSTGPFLQVQPSQVARPSASEAVQPQPVILPGSLYRATPPPASSMPLRNGSYGRGPAPHLQQQRMLAASALALRDQQQLAAMSPGVTSSRQSAPGSATELMANFLQSPPSTTPVPMAAQQASGLIPGLHHMPGGPPNGAAGIRQSGGHLAVMNQAAPEPSPEAMLLFQRRWRTHPIAPPSSVHRTVASASNPHTKVT

SEQ ID NO: 96531 - protein, 98 aa, Setaria italica
  Transcript Sequence Number=SeqID_30557
  Gene Ontology: Mol. function=metal ion binding; Cellular component =integral to membrane; Biological process=multicellular organismal development
  Homolog annotation: Hit_ID=B6TJT8; Match level="QueryCoverage=93%, HitCoverage=21%, E-value=8e-28, Identity=64%"; Hit description =Palmitoyltransferase ZDHHC9
MAMAKHKQRRVYQAWRGNNIILCGGRLIFGPDAKATLISFSLIAIPVAVFCVFVARHLIHIFPAYNAGYAILAVTIGLTIYVLLLLFLTSSQDPGIVP

SEQ ID NO: 96532 - protein, 99 aa, Setaria italica
  Transcript Sequence Number=SeqID_30558
LWVVHMIPESLHVWSCAKSVASCVGMSSMEVTPWRMEPKSNLFGSLKAWQSGGATFTHGSMRLKLRDTGSLVSSKIEFCLKSYLLALAMESWPLAPCGM

SEQ ID NO: 96533 - protein, 81 aa, Setaria italica
  misc_feature (25)..(25): Xaa can be any naturally occurring amino acid
  Transcript Sequence Number=SeqID_30559
  Gene Ontology: Cellular component=cytoskeleton; Biological process =phagocytosis
KEQLHWSFLFSNLIAQWAQWLGKVXEEMYSMVLHQLVEYLVTFLFQEERLNTLRRRLQIPFDGSRIEHQDALRQLWRLAYP

SEQ ID NO: 96534 - protein, 315 aa, Setaria italica
  misc_feature (19)..(19): Xaa can be any naturally occurring amino acid
  Transcript Sequence Number=SeqID_30560
  Gene Ontology: Cellular component=cytoskeleton; Biological process =phagocytosis
  Homolog annotation: Hit_ID=Q9SS63; Match level="QueryCoverage=57%, HitCoverage=100%, E-value=5e-77, Identity=73%"; Hit description =T12J13.11 protein
  Pfam annotation: Domain name=ELMO_CED12; Domain location=116-286; Score=264.4; E_value=2.6e-76; Accession=PF04727.5; Description =ELMOCED-12 family
MSISNLRRRLHHGDVDGRXNEHVDISSADALNEPLLGSSHDNGGSEVYDPRRQDLWDDDRKKEQLHWSFLFSNLIAQWAQWLANIIVGSGSIFGRLFPFSLDNQSNPVYLSPLQEERLNTLRRRLQIPFDGSRIEHQDALRQLWRLAYPTREIPPLKSELWKEMGWQGTDPSTDFRGGGLISLENLIFFARNYAKSFQMLLNKVQGQRSDWEYPFAVAGINTSFMLIQMLDLQSTVPSSKSGIRFLELLERDENAFDHLYCVAFRLLDAQWLVKRASYMEFNEVMKTTRSQLERELVLEDVQAVKDLPSYTMLDK

SEQ ID NO: 96535 - protein, 96 aa, Setaria italica
  Transcript Sequence Number=SeqID_30561
  Homolog annotation: Hit_ID=B6UCF2; Match level="QueryCoverage=89%, HitCoverage=41%, E-value=9e-23, Identity=71%"; Hit description=Seed specific protein Bn15D17A
  Pfam annotation: Domain name=DUF260; Domain location=1-55; Score= -26.4; E_value=0.0012; Accession=PF03195.6; Description=Protein of unknown function DUF260
PPSPVLVDAAVFQSLLYEAAGRTINPVSGAVGLLGAGSWHLCQAAVETVLRGGGIRPLPELDGGVPAADGSFAFTARRAAGCSTFSAAKRATGRVL

SEQ ID NO: 96536 - protein, 162 aa, Setaria italica
  misc_feature (4)..(4): Xaa can be any naturally occurring amino acid
  misc_feature (108)..(108): Xaa can be any naturally occurring amino acid
  Transcript Sequence Number=SeqID_30562
  Gene Ontology: Mol. function=transferase activity, transferring glycosyl groups; Cellular component=endoplasmic reticulum membrane; Biological process=GPI anchor biosynthetic process
  Homolog annotation: Hit_ID=B9RHL3; Match level="QueryCoverage=90%, HitCoverage=27%, E-value=2e-53, Identity=65%"; Hit description =Glycosyltransferase, putative
  Pfam annotation: Domain name=Glyco_transf_22; Domain location=1-161; Score=-98.5; E_value=0.00024; Accession=PF03901.9; Description=Alg9 -like mannosyltransferase family
RTYXNPDEHWQCLEVAHRIAFGYGHLTWEWKRGLRSYLHPLIFAALYKILALLHLDTPWFMVMAPRLLQSVFAAFGDLYLYKLSKLIFNSQVAQWTLFSQLVNWFMFXCITRTLSNSLETVLTVAGLYYWFIAIESSKGTSIVSKQQAASKQTPPSKKIGSS

SEQ ID NO: 96537 - protein, 86 aa, Setaria italica
  Transcript Sequence Number=SeqID_30563
TRTPRHAVMRLICSPFAAVLRMTTCADTDAISPSVEQPSKKTAAGAVVERREARRRPSLEQLIRMETAPLPLPPPSRPGRRRKPDT

SEQ ID NO: 96538 - protein, 41 aa, Setaria italica
  Transcript Sequence Number=SeqID_30564
  Pfam annotation: Domain name=CutA1; Domain location=4-39; Score= -45.0; E_value=0.021; Accession=PF03091.7; Description=CutA1 divalent ion tolerance protein
MHHCPWLLAPHPCSVPEVIALPITGGNSKYLEWIKNSTRED

SEQ ID NO: 96539 - protein, 122 aa, Setaria italica
  Transcript Sequence Number=SeqID_30565
  Gene Ontology: Mol. function=copper ion binding; Cellular component =chloroplast; Biological process=response to metal ion
  Homolog annotation: Hit_ID=P93009; Match level="QueryCoverage=91%, HitCoverage=61%, E-value=2e-44, Identity=78%"; Hit description =Protein CutA, chloroplastic
  Pfam annotation: Domain name=CutA1; Domain location=19-120; Score =217.4; E_value=3.8e-62; Accession=PF03091.7; Description=CutA1 divalent ion tolerance protein
KKVLHSSARMESASTTVPSIVVYVTVPNREAGKKLSQSIISKKLAACVNIVPGIESVYWWEGKVQSDAEELLIIKTRESLLDALTEHVKANHEYDVPEVIALPITGGNSKYLEWIKNSTRED

SEQ ID NO: 96540 - protein, 289 aa, Setaria italica
  misc_feature (59)..(59): Xaa can be any naturally occurring amino acid
  Transcript Sequence Number=SeqID_30566
  Gene Ontology: Mol. function=ATPase activity, coupled to transmembrane movement of substances; Cellular component=integral to membrane; Biological process=transport
  Homolog annotation: Hit_ID=Q7FMW2; Match level="QueryCoverage=99%, HitCoverage=73%, E-value=1e-143, Identity=67%"; Hit description=MDR -like ABC transporter
  Pfam annotation: Domain name=ABC_tran; Domain location=124-289; Score= 154.3; E_value=3.6e-43; Accession=PF00005.19; Description=ABC transporter
ELGSIMTVLFCSYGLAVWYGSRLIVERGYNGGMIISVIMAVMMGAMSLGQATPSVTAFXAEGQGAAYRMFKTIERKPDIDIYDTTGIILEDIKGDVELKDVYFSYPTRSEHLVFDGFSLQVPSGTTMALVGESGSGKSTVISLVERFYDPKAGEVLIDGVDIRRMKLGWIRGKISLVSQEPVLFSTTIRENIAYGMENLTPDEIMRAIKLANAAKFVDKLPDGLDTMVGEHGTQLSGGQKQRIAIARAIVKNPRILLLDEATSALDMESERVVQEALNRVMLERTTIIV

SEQ ID NO: 96541 - protein, 79 aa, Setaria italica
  Transcript Sequence Number=SeqID_30567
PAPNMLFVIFTIYQCISFVNCRYESLTLIKRECSYTHKNGIWQTSTQRCSILFKFHFQLFEPSNINSFFPSSKRIDLLM

SEQ ID NO: 96542 - protein, 73 aa, Setaria italica
  Transcript Sequence Number=SeqID_30568
  Subcellular localization annotation: CTP_CleavageSite=41; ConfidenceScore=5.19e-01
TGPATIAAVWSTSSTNIALHDPNTVMALFPPSHILVPTTISSNTERHQKKARGREAGRPGQSSTWDCDFSTSW

SEQ ID NO: 96543 - protein, 68 aa, Setaria italica
  Transcript Sequence Number=SeqID_30569
  Gene Ontology: Mol. function=structural molecule activity; Cellular component=viral capsid; Biological process=oxidation reduction
  Homolog annotation: Hit_ID=Q5ZDZ9; Match level="QueryCoverage=97%, HitCoverage=13%, E-value=5e-22, Identity=69%"; Hit description =Putative spore coat protein
AVPEHERTWKNVVKLAPGFVTTVVVKFLMVDTGRAYPFDAAAEPGYVYHCHILDHEDNAMIRPLKLIR

SEQ ID NO: 96544 - protein, 98 aa, Setaria italica
  misc_feature (14)..(14): Xaa can be any naturally occurring amino acid
  misc_feature (25)..(25): Xaa can be any naturally occurring amino acid
  misc_feature (51)..(51): Xaa can be any naturally occurring amino acid
  Transcript Sequence Number=SeqID_30570
  Homolog annotation: Hit_ID=B9RIP1; Match level="QueryCoverage=98%, HitCoverage=14%, E-value=4e-30, Identity=63%"; Hit description =Pentatricopeptide repeat-containing protein, putative
SELGYEPETSNVLXHDIGEEEKQYXLCYHSEKLAIAFGLISTPPGETIRVXIKTLRICGDCHVVAKLISKVYGRVIIIRDRARFHRFEDGQCSCRDYW

SEQ ID NO: 96545 - protein, 152 aa, Setaria italica
  Transcript Sequence Number=SeqID_30571
YRTLVNFLTLRHAHGSRRRSWKPQGPDPARTPLPRLPDDDSGPSCQLPWEEAEGKEGRAGKIPPPAPRAHGQIRWRQGRSERRRCGREERKVGTAPGTLGSSAGALTVLAVAELLHGGELLGLARKGVDWQRRGAPGTGTGRRSSAAVLLCS

SEQ ID NO: 96546 - protein, 114 aa, Setaria italica
  misc_feature (104)..(104): Xaa can be any naturally occurring amino acid
  Transcript Sequence Number=SeqID_30572
  Gene Ontology: Mol. function=drug transporter activity; Cellular component=membrane; Biological process=multidrug transport
  Homolog annotation: Hit_ID=B9RC22; Match level="QueryCoverage=73%, HitCoverage=15%, E-value=6e-28, Identity=66%"; Hit description =Multidrug resistance pump, putative
CPQTTGCGVLRGSARPKDAASINLRSFYLVGTPVALGLAFWFHYDFKGLWLGLLAAQATCMVRMMLVIGRTDWASEAKRSRQLTGAGDGKDAAAGGDEKSRSLXLTDVEQANDH

SEQ ID NO: 96547 - protein, 173 aa, Setaria italica
  misc_feature (8)..(8): Xaa can be any naturally occurring amino acid
  misc_feature (12)..(12): Xaa can be any naturally occurring amino acid
  Transcript Sequence Number=SeqID_30573
  Gene Ontology: Mol. function=L-aspartate oxidase activity; Cellular component=cytoplasm; Biological process=NAD biosynthetic process
  Homolog annotation: Hit_ID=B6U0K6; Match level="QueryCoverage=100%, HitCoverage=25%, E-value=2e-93, Identity=94%"; Hit description=L -aspartate oxidase 1
DLLTCQKXNGEXYCYGVDSIDVETQKVVRFISKVTLLASGGAGHIYPTTTNPPVATGDGIAMSHRAQAVISNMEFVQFHPTALSDEGLPIKPSIRRENAFLITEAVRGDGGILYNQSMERFMPLYDDRAELAPRDVVARSIDDQLKKRGESYVLLDISHRPRDKVLAHFPNIA

SEQ ID NO: 96548 - protein, 152 aa, Setaria italica
  Transcript Sequence Number=SeqID_30574
  Homolog annotation: Hit_ID=B6TWN1; Match level="QueryCoverage=82%, HitCoverage=32%, E-value=1e-18, Identity=48%"; Hit description=Metal ion binding protein
GGGEGKDDKKDKAGEGEKNKGAAAAPVGDDTKSKGKGIEVAAAGPSTAAAAAFMAAPAGPSTYHVAPPHGYVAYQQGPPPPASYYPPYPYYGNADGMGHANPSAATYYPHPGYQHQPDGSQQQAYPPYPYRFDMAPAPQLFSDENPNACSVM

SEQ ID NO: 96549 - protein, 317 aa, Setaria italica
  misc_feature (14)..(14): Xaa can be any naturally occurring amino acid
  misc_feature (174)..(174): Xaa can be any naturally occurring amino acid
  misc_feature (191)..(191): Xaa can be any naturally occurring amino acid
  Transcript Sequence Number=SeqID_30575
  Gene Ontology: Mol. function=RNA-directed DNA polymerase activity; Cellular component=chromatin; Biological process=RNA-dependent DNA replication
  Homolog annotation: Hit_ID=Q8L7J3; Match level="QueryCoverage=98%, HitCoverage=19%, E-value=1e-143, Identity=78%"; Hit description=Gag -pol polyprotein
  Pfam annotation: Domain name=Retrotrans_gag; Domain location=47-143; Score=93.4; E_value=8.2e-25; Accession=PF03732.9; Description =Retrotransposon gag protein
  Pfam annotation: Domain name=zf-CCHC; Domain location=253-270; Score =18.6; E_value=0.0005; Accession=PF00098.15; Description=Zinc knuckle
  Pfam module annotation: Pfam domain module=Retrotrans_gag::zf-CCHC; Domain location=47-143::253-270
MMMLYSKIKFKMPXFDGKYDPDAYITWKIAVDPKFACHEFPENARVRAATSEFTDFASVWWIEHGKKNPNNMPQTWDALKRVMRARFVPSYYARDLLNMLQQLRQGAKSVEEYYQELQMGMLRCKLEEGEEPAMARFLGGLNREIQDILAYKDYTNVTRLFHLACKAEREVQGXRASIKTNISAGKSTLWXPRTTISLTGRAPPPAHSPSRPAPPSLSSDKQRAPPTNSATKTAQKPATSTTSVASTGRTRDVQCHRCKSFGHVQRDCPCKRVLVVKEDGGYSSASDFDEDTLSLLAVDHAGSEKQPEEEIGAKDAD

SEQ ID NO: 96550 - protein, 83 aa, Setaria italica
  Transcript Sequence Number=SeqID_30576
MVAVTLPAILTVLALLGSVACQGGYGDGNPAPAPQPHAYPPARPQPPPSPPTTSRPPSYPTTSLNPPPPPKIPQPLTYPPTNS

SEQ ID NO: 96551 - protein, 55 aa, Setaria italica
  Transcript Sequence Number=SeqID_30577
PFPPPNLSAEHAVSEPASELDLPSAPLGLSGDLGGGAASYPLRAGWLAGRPGGSR

SEQ ID NO: 96552 - protein, 91 aa, Setaria italica
  Transcript Sequence Number=SeqID_30578
  Gene Ontology: Mol. function=methyltransferase activity; Cellular component=intracellular; Biological process=metabolic process
  Homolog annotation: Hit_ID=Q9C5Q8; Match level="QueryCoverage=91%, HitCoverage=8%, E-value=1e-24, Identity=60%"; Hit description =CORYMBOSA2
ENAGPCKFRNHDHKFEWTRAQFQCWATDLAVKHNYSVEFCGVGGSGEEPGYASQIAVFRRMARDLETMCLNTDQDQPYELLWEWPNASIPV

SEQ ID NO: 96553 - protein, 71 aa, Setaria italica
  Transcript Sequence Number=SeqID_30579
  Gene Ontology: Mol. function=zinc ion binding
  Homolog annotation: Hit_ID=Q53LU1; Match level="QueryCoverage=100%, HitCoverage=11%, E-value=5e-18, Identity=63%"; Hit description=RWP -RK domain, putative
STYTGSDDYVLEYFLPLMCKGCDEQQRLLDDIAETMQRACKSLRTVSNSELMADTTVKPSNKKGCRIRFPS

SEQ ID NO: 96554 - protein, 126 aa, Setaria italica
  Transcript Sequence Number=SeqID_30580
  Gene Ontology: Mol. function=serine-type endopeptidase activity; Biological process=negative regulation of catalytic activity
  Homolog annotation: Hit_ID=Q9LJ20; Match level="QueryCoverage=99%, HitCoverage=15%, E-value=4e-35, Identity=58%"; Hit description =Putative subtilisin-like protein
  Pfam annotation: Domain name=Inhibitor_I9; Domain location=1-41; Score=24.8; E_value=0.00034; Accession=PF05922.8; Description =Peptidase inhibitor I9
TQSYHHAFEGFAAALTEEEAAALSGHERVVSVFKDRALQLHTTRSWDFLEVQSGLRSGRLGRRASGDVIIGIIDTGVWPESPSFDDAGMREVPARWRGVCMEGPDFNKSSCNKKLIGARYYSVQPE

SEQ ID NO: 96555 - protein, 81 aa, Setaria italica
  Transcript Sequence Number=SeqID_30581
  Gene Ontology: Mol. function=protein serine/threonine kinase activity; Cellular component=integral to membrane; Biological process=protein amino acid phosphorylation
  Homolog annotation: Hit_ID=Q2HV99; Match level="QueryCoverage=100%, HitCoverage=10%, E-value=1e-22, Identity=61%"; Hit description =Protein kinase; Type I EGF
LETEVPLLVYEFVPNGTLYDHLHVDNPQRPLTWKDRLRIASEVASSLAYLHSAASTSVVHRDIKTSNILLDDRLTAKVSDF

SEQ ID NO: 96556 - protein, 103 aa, Setaria italica
  misc_feature (17)..(17): Xaa can be any naturally occurring amino acid
  Transcript Sequence Number=SeqID_30582
  Gene Ontology: Mol. function=ATP-dependent helicase activity; Cellular component=intracellular; Biological process=RNA processing
  Homolog annotation: Hit_ID=A7LFZ6-2; Match level="QueryCoverage=99%, HitCoverage=6%, E-value=3e-40, Identity=71%"; Hit description =Isoform 2 of Endoribonuclease Dicer homolog 4
TFYLLLPIKQKFYGDKXIIDWPAVKRCLSSPVFQDPTSLSLHDSYLPNESLKLLDGTYSKADVIGSLVFTPHNNLFFFVDDILDEINGKSEFNGATYAAHFEG

SEQ ID NO: 96557 - protein, 71 aa, Setaria italica
  Transcript Sequence Number=SeqID_30583
  Gene Ontology: Mol. function=NAD(P)H dehydrogenase (quinone) activity; Cellular component=plasma membrane; Biological process =oxidation reduction
  Homolog annotation: Hit_ID=B6T653; Match level="QueryCoverage=94%, HitCoverage=33%, E-value=2e-26, Identity=83%"; Hit description=NADPH quinone oxidoreductase 1
MVCVTIVAPLKNALDWASRGKNCWADKPAAIVSAGGGFGGGRSQYHLRQVGVFLDLHFINKPELCVQAFQQ

SEQ ID NO: 96558 - protein, 195 aa, Setaria italica
  Transcript Sequence Number=SeqID_30584
  Gene Ontology: Mol. function=NAD(P)H dehydrogenase (quinone) activity; Cellular component=plasma membrane; Biological process =oxidation reduction
  Homolog annotation: Hit_ID=B6T653; Match level="QueryCoverage=92%, HitCoverage=91%, E-value=2e-90, Identity=87%"; Hit description=NADPH quinone oxidoreductase 1
  Pfam annotation: Domain name=FMN_red; Domain location=10-176; Score =170.3; E_value=5.5e-48; Accession=PF03358.7; Description=NADPH -dependent FMN reductase
  Pfam annotation: Domain name=Flavodoxin_2; Domain location=7-179; Score=-62.8; E_value=0.012; Accession=PF02525.9; Description =Flavodoxin-like fold
  Pfam module annotation: Pfam domain module=FMN_red::Flavodoxin_2; Domain location=10-176::7-179
MEAAAAKPVLRVAAICGSLRKTSFNRGLLRAAAEVCEDSIPGLRVDQLDISDLPIINTDLETDGGFPPAVEAFRAKVCQADCFLFGAPEYNYSIATPLKNALDWASRGKNCWADKPAAIVSAGGGFGGGRSQYHLRQVGVFLDLHFINKPELCVQAFQQPPKFDNDGNLIDDQIRERLKQVLLSLQAFTLRLQKD

SEQ ID NO: 96559 - protein, 49 aa, Setaria italica
  misc_feature (33)..(33): Xaa can be any naturally occurring amino acid
  Transcript Sequence Number=SeqID_30585
HVHSSTSTQLLCVGVRNDVARSDFSVDSSTQYXIISAGHLGDAVVEPCW

SEQ ID NO: 96560 - protein, 73 aa, Setaria italica
  Transcript Sequence Number=SeqID_30586
FDIFLGQWWYSLRIQCACQVRYIALFISPFVALSNYKIEPCIVLLLYFIFGKSHKCSSSTIQGSIWQSHTVLS

SEQ ID NO: 96561 - protein, 62 aa, Setaria italica
  Transcript Sequence Number=SeqID_30587
IVSSSFGISTTRVLHLYAYYYVITSYKIKYISYSVRWYVTVRTKSRHVKINSTRMHTTAEIS

SEQ ID NO: 96562 - protein, 80 aa, Setaria italica
  Transcript Sequence Number=SeqID_30588
SVEELCIATMSRDPCGFTPSSKSTGFIGVTVVSSGEVADKECRLPSLMLLCPETAKRSLEARGESIFSSKDATFALALIA

SEQ ID NO: 96563 - protein, 91 aa, Setaria italica
  Transcript Sequence Number=SeqID_30589
YSCPILWPLKTNQNDMKELPRPIHGLPVARATTNRRHTSLPHPLLPFFVDSREELLQPASPHQCHGHPPLWLYCSRASVAAPPAQLSSLWS

SEQ ID NO: 96564 - protein, 100 aa, Setaria italica
  Transcript Sequence Number=SeqID_30590
  Gene Ontology: Mol. function=mannitol dehydrogenase activity; Biological process=oxidation reduction
  Homolog annotation: Hit_ID=B4FJW4; Match level="QueryCoverage=100%, HitCoverage=27%, E-value=5e-43, Identity=77%"; Hit description =Mannitol dehydrogenase
  Pfam annotation: Domain name=ADH_N; Domain location=11-97; Score =68.0; E_value=3.4e-17; Accession=PF08240.4; Description=Alcohol dehydrogenase GroES-like doma
PFVFKRRENGVDDVTIKVLYCGMCHTDLHFMKNHWDITMYPVVPGHEITGVVTSVGANVSGFKAGDRVGVGCIVEACLDCDHCRHSDESYCDKLVLTYNG

SEQ ID NO: 96565 - protein, 496 aa, Setaria italica
  Transcript Sequence Number=SeqID_30591
  Homolog annotation: Hit_ID=Q7XKU1; Match level="QueryCoverage=90%, HitCoverage=93%, E-value=2e-17, Identity=34%"; Hit description =OSJNBa0022H21.16 protein
  Pfam annotation: Domain name=DUF295; Domain location=372-422; Score =61.1; E_value=4.3e-15; Accession=PF03478.10; Description=Protein of unknown function (DUF295)
MAPFRRWADLPPDLLCRIGDRLDLKWYASARGACTAWRCALAPPSPALLVVADDARWCPHAASLPTRRSFELTAIVSGSRCVGSSNGWLALSVALFTGQTAFVLLNPIAAVEILLPPLIYESRWVSKVVFTPSPAKDDFAAAAICDIDRIAYVTAGARRWAVLEPVRLTSGDQLTDVVYTDKGKVYCLTKCGDVHVLRLPERRRRKPANADEAGPSEPEFSVLQPPAERSINFRPMRWQQQRNFRLVRYEQARTGNLEPIPLRLTLCAESFSYKRVPPESQGPDLNAPATVEPLLSEANLPFNPATVFAPPYDTVSAFTSAKNLVFCEGNLYQVWRNASCTVTLQLPAGGQRRVAENEILVLRYYPRRQPCWDVVKDLGGYSLFVGRNNAVSMYAEGVPGLKGNCVYWIGGRGRDQGMVFDMESGRSTPCRAPQVGILPGHPHSTICWYFLSDLVSNNSNCITTTTTVASSSSNGGRKVYQTRARARADLAQDVEE

SEQ ID NO: 96566 - protein, 180 aa, Setaria italica
  Transcript Sequence Number=SeqID_30592
  Gene Ontology: Mol. function=nucleic acid binding; Cellular component= nucleus
  Homolog annotation: Hit_ID=Q2R4J4; Match level="QueryCoverage=100%, HitCoverage=88%, E-value=1e-77, Identity=64%"; Hit description=Zinc finger CCCH domain-containing protein 63
  Pfam annotation: Domain name=zf-CCCH; Domain location=45-71; Score =46.4; E_value=1.1e-10; Accession=PF00642.16; Description=Zinc finger C-x8-C-x5-C-x3-H type (and similar)
  Pfam annotation: Domain name=zf-CCCH; Domain location=91-117; Score =45.3; E_value=2.5e-10; Accession=PF00642.16; Description=Zinc finger C-x8-C-x5-C-x3-H type (and similar)
  Pfam module annotation: Pfam domain module=zf-CCCH::zf-CCCH; Domain location=45-71::91-117
QYYTGSRQSGTPGMGDQGMFSSYQAGSVPVGLYAVQRENVFPERPDQPECQFYMKTGDCKFGAVCKFHHPRERIIPTPNCALSSLGLPLRPGEPICSFYSRYGMCKFGPNCKFDHPLGTVMFGHASSPTGEVPTSRRMLAHVPSHPEVSPDSGSGRSRRISHSDSQQIPPGERSTEREAS

SEQ ID NO: 96567 - protein, 172 aa, Setaria italica
  Transcript Sequence Number=SeqID_30593
  Gene Ontology: Mol. function=nucleic acid binding; Cellular component= nucleus
  Homolog annotation: Hit_ID=Q2R4J4; Match level="QueryCoverage=97%, HitCoverage=37%, E-value=3e-73, Identity=80%"; Hit description=Zinc finger CCCH domain-containing protein 63
  Pfam annotation: Domain name=zf-CCCH; Domain location=2-26; Score =32.4; E_value=1.9e-06; Accession=PF00642.16; Description=Zinc finger C-x8-C-x5-C-x3-H type (and similar)
  Subcellular localization annotation: CTP_CleavageSite=90; ConfidenceScore=5.11e-01
MKRKCAYYLRTGQCKFGSTCKFHHPQPSTMMVAVRGSGYSPGQSATSPGQHAYQGAVTSWPLSRSASFIASPRWPGHSSYAQVIVPPGLVQVPGWSPYTAQIGSSSSDDQQQTPGAAQYYTGSRQSGTPGMGDQGMFSSYQAGSVPVGLYAVQRENVFPERPDQPVGQVSSW

SEQ ID NO: 96568 - protein, 134 aa, Setaria italica
  Transcript Sequence Number=SeqID_30594
  Homolog annotation: Hit_ID=Q7XKG7; Match level="QueryCoverage=96%, HitCoverage=35%, E-value=2e-15, Identity=40%"; Hit description =OSIGBa0153E02-OSIGBa0093I20.2 protein
  Pfam annotation: Domain name=DUF2296; Domain location=101-134; Score =32.1; E_value=2.2e-06; Accession=PF10058.1; Description=Predicted integral membrane metal-bind
KYDLDPAAKAAAASVLASKMGAETGLKLHMGDEAKSGSTQARSNEVEVVPKDGLRNRRETKAKGSSYSSTAAAHTGGGMEAMPPSKVVGHYEGSGTSDGGWIAKIAALLVGEDPSQSYALICGNCHMHNGLARK

SEQ ID NO: 96569 - protein, 145 aa, Setaria italica
  Transcript Sequence Number=SeqID_30595
PAQYLVGDGGRYPLLPWLMVPFPGPVVPGSPEAAFNAAHRAMCCPVRRAVRSLMGWGAIARLHEEESPRAAVACIGTCAMLHNVLLTREDYSALAPDEAEAESEREVQSQGVGTGAGSEGVEVDGRALVLRSALAATMKDLRAPD

SEQ ID NO: 96570 - protein, 79 aa, Setaria italica
  Transcript Sequence Number=SeqID_30596
PLEGAHPAHEFEHTGAGEEKPCPAQEFESIGAGEEEELNLLRSMGWDENEVVQPLQQEEIADCLRQNVRLQQKLQECRG

SEQ ID NO: 96571 - protein, 80 aa, Setaria italica
  Transcript Sequence Number=SeqID_30597
MASRGRGPGGNANRGAGRKGKPADSKSAQPSSPEQQLVAFVQELVGKTMKEDEARQFCKERNFDQDRIQADLANRLDKHE

SEQ ID NO: 96572 - protein, 49 aa, Setaria italica
  Transcript Sequence Number=SeqID_30598
  Gene Ontology: Mol. function=ubiquitin-protein ligase activity; Cellular component=ubiquitin ligase complex; Biological process =ubiquitin-dependent protein catabolic process
FEDDLESNRAMRDQGGGSPQLEQDINRLEKIVEILTQDKFCYEAQILRV

SEQ ID NO: 96573 - protein, 882 aa, Setaria italica
  misc_feature (26)..(26): Xaa can be any naturally occurring amino acid
  Transcript Sequence Number=SeqID_30599
  Gene Ontology: Mol. function=ubiquitin-protein ligase activity; Cellular component=ubiquitin ligase complex; Biological process =ubiquitin-dependent protein catabolic process
  Homolog annotation: Hit_ID=B9T3S8; Match level="QueryCoverage=94%, HitCoverage=80%, E-value=0.0, Identity=66%"; Hit description =Ubiquitin-protein ligase, putative
  Pfam annotation: Domain name=U-box; Domain location=788-862; Score =154.1; E_value=4.1e-43; Accession=PF04564.7; Description=U-box domain
  Pfam annotation: Domain name=Ufd2P_core; Domain location=116-774; Score=910.9; E_value=6.3e-271; Accession=PF10408.1; Description =Ubiquitin elongating factor core
  Pfam module annotation: Pfam domain module=U-box::Ufd2P_core; Domain location=788-862::116-774
PAELLVFLLAEVAADPLVALTPPAGXPAPPGFIDEFFGGADYESIEPAMGELYERLRQSVEKVSALGDFQRPLRVLRRLVGIPNCAKSLVNHPKWIPKNQIMLIGEGRVMELSSVLGAFLHVSAIRDREFASKPDVGQQCFSEASSRRPADLLSSFTTIKSVMNGLYDGLKDVLLILLKNLDTREKVLEYIAEVINKNASRSGMQVDPLKCASSGMFVNLSAVMLRLCEPFLDNMESKKDKIDVNYLFCNNRIDFKDLTAINASSDEVSSWIESVNSECDQNNSSGEARFVESQEATSSGKNSTALVRCSKKENFSFICECFFMTARVLNLGLMKAISDFKHISQQLSRFEDDLESNRAMRDQGGGSPQLEQDINRLEKIVEILTQDKFCYEAQILRDGAFLQRALSFYRLMILWSVDLVGGFKMPLPSQCPKEFSCIPEHFLDDAMDLLVLTSRIPKALESFVLDDFLSFIIMFMGSTSYIKNPYLRAKMVEVLNCWMPQRSGLSSTASLFEGHQLCLDYLVRNLLKLYVDIEFTGSHTQFFDKFNIRHNIAELLEYLWDVPSHRNAWRQIAKEEEKGVYLNFLNFLINDSIYLLDESLNKILELKEIEAEMANTVEWDRRPAQEREERLRVFHQWENIVRFDMKLANEDVGMLAFTSEQIPAPFLLPEMVERVASMLNYFLLQLAGPQRKSLTVKDPEKYEFKPKQLLKQIATIYVHISRGDKEAVFPAAISKDGRAYNDQLFASAANILWRIGGDPQIINEFMQLAGKAKAAASEAMDAEAILGDIPDEFLDPIQYTLMKDPVILPSSKVTIDRPVIIRHLLSDSTDPFNRSHLTQDMLIPNTELKLQIEEFVRSQQSRKRTAAESEIGEADGAADMVE

SEQ ID NO: 96574 - protein, 92 aa, Setaria italica
  Transcript Sequence Number=SeqID_30600
  Homolog annotation: Hit_ID=B6UAA0; Match level="QueryCoverage=100%, HitCoverage=16%, E-value=1e-21, Identity=63%"; Hit description=Pre -mRNA-splicing factor PRP17
  Subcellular localization annotation: CTP_CleavageSite=49; ConfidenceScore=5.12e-01
MDLLQSSYAPDDASSPEESAAASSPDSSPLRLPSKSAAPAVDDTALSLSAAASASRPLDPSLHLVAFNPTADQLWAPIVGPQHPHAPISSAS

SEQ ID NO: 96575 - protein, 184 aa, Setaria italica
  Transcript Sequence Number=SeqID_30601
  Gene Ontology: Mol. function=serine-type endopeptidase activity; Cellular component=cell wall; Biological process=negative regulation of catalytic activity
  Homolog annotation: Hit_ID=B9SV70; Match level="QueryCoverage=100%, HitCoverage=35%, E-value=4e-80, Identity=75%"; Hit description =Peptidase, putative
PEFLGLPQGAWVQEGGPQFAGQGVVVGLIDTGIDPTHPSFADDLSTDSYPVPAHYSGICEVTNDFPSGSCNRKLVGARHFAASAITRGVFNASQDLASPADSDGHGTHTASIAAGNHGIPVVVAGHQFGNASGMAPRAHIAVYKALYKSFGGFAADVVAAIDQAAEDNVDIISLSITPYRRPPG

SEQ ID NO: 96576 - protein, 175 aa, Setaria italica
  Transcript Sequence Number=SeqID_30602
  Gene Ontology: Mol. function=binding; Biological process=cell redox homeostasis
  Homolog annotation: Hit_ID=B9T4H3; Match level="QueryCoverage=100%, HitCoverage=27%, E-value=5e-33, Identity=43%"; Hit description =Tetratricopeptide repeat protein, putative
  Pfam annotation: Domain name=TPR_2; Domain location=145-175; Score =6.3; E_value=5.5; Accession=PF07719.9; Description=Tetratricopeptide repeat
  Pfam annotation: Domain name=TPR_2; Domain location=99-132; Score =25.4; E_value=0.00023; Accession=PF07719.9; Description =Tetratricopeptide repeat
  Pfam annotation: Domain name=TPR_4; Domain location=145-170; Score =12.9; E_value=1.2; Accession=PF07721.6; Description=Tetratricopeptide repeat
  Pfam annotation: Domain name=TPR_4; Domain location=53-78; Score =11.2; E_value=2; Accession=PF07721.6; Description=Tetratricopeptide repeat
  Pfam annotation: Domain name=TPR_4; Domain location=99-124; Score =18.3; E_value=0.031; Accession=PF07721.6; Description=Tetratricopepti de repeat
  Pfam module annotation: Pfam domain module=TPR_2::TPR_2::TPR_4::TPR _4::TPR_4; Domain location=145-175::99-132::145-170::53-78::99-124
KQSSKESTVADVSRAQSVKSRIAKSSDARRLKDWITVLQEAQAAVSDGADCAPQVMALQAEALLRLQRHDEADAVLAGAGAPRFGVDESTKFFGTFGHAYVLIVRAQVDMAAGRFEDAVATAQTAFQLDPSNREVTIVQRRAKAAAAARLRGNDLFKAGKFAEACAAYGEGLDRE

SEQ ID NO: 96577 - protein, 80 aa, Setaria italica
  Transcript Sequence Number=SeqID_30603
VVLSIYYLLLSCSSWFTGEAAQDDDFEGLIDGDEDDDEDDEDDEDEEDEESEDDYDAKKTQGAAGGEGQQGERPAECKQQ

SEQ ID NO: 96578 - protein, 373 aa, Setaria italica
  Transcript Sequence Number=SeqID_30604
  Gene Ontology: Cellular component=nucleus; Biological process =nucleosome assembly
  Homolog annotation: Hit_ID=Q8L8G5; Match level="QueryCoverage=100%, HitCoverage=100%, E-value=1e-159, Identity=77%"; Hit description =Nucleosome/chromatin assembly factor group A
  Pfam annotation: Domain name=NAP; Domain location=58-315; Score =476.1; E_value=5.1e-140; Accession=PF00956.10; Description =Nucleosome assembly protein (NAP)
MSDGKDSLDLSGLGAALPNATELSAEDKANLVASIKNTLEGLASRHIDVLESLEPKVRKRVEKLREIQGQHDELEAKFFEERAALEAKYQKLYEPLYSKRYEIVNGVIEVEGVKEESAAETPAEQKSGDEKPAEQKEEKGVPAFWLNAMKNHEILAEEIQERDEEALKYLKDIKWYRISEPKGFKLEFHFDTNPFFKNSVLTKTYHMIDEDEPILEKAIGTEIEWHPGKCLTQKVLKKKPRKGSKNTKPITKTEDCESFFNFFSPPQVPDDDEEIDEDTAEQLQNQMEQDYDIGSTIRDKIIPHAVSWFTGEAAQDDDFEGLIDGDEDDDEDDEDDEDEEDEESEDDYDAKKTQGAAGGEGQQGERPAECKQQ

SEQ ID NO: 96579 - protein, 102 aa, Setaria italica
  Transcript Sequence Number=SeqID_30605
  Gene Ontology: Mol. function=protein binding; Biological process =defense response
  Homolog annotation: Hit_ID=Q2R0W6; Match level="QueryCoverage=100%, HitCoverage=18%, E-value=2e-35, Identity=73%"; Hit description =Leucine Rich Repeat family protein, expressed
  Pfam annotation: Domain name=LRR_1; Domain location=20-41; Score=8.5; E_value=7.3; Accession=PF00560.25; Description=Leucine Rich Repeat
  Pfam annotation: Domain name=LRR_1; Domain location=43-64; Score=8.4; E_value=7.5; Accession=PF00560.25; Description=Leucine Rich Repeat
  Pfam module annotation: Pfam domain module=LRR_1::LRR_1; Domain location=20-41::43-64
LESSVKLKNCYLQNIGDLFQLRYLRIAASSITRLPEEIGELQFLETLDLRSTWIRKLPASIVKLRRLIFLLVNGSQLLDGVRNMQFLEELSGVSIYNECSTN

SEQ ID NO: 96580 - protein, 181 aa, Setaria italica
  Transcript Sequence Number=SeqID_30606
  Gene Ontology: Mol. function=protein binding; Cellular component =membrane; Biological process=defense response
  Homolog annotation: Hit_ID=Q2R0W6; Match level="QueryCoverage=98%, HitCoverage=32%, E-value=2e-59, Identity=65%"; Hit description =Leucine Rich Repeat family protein, expressed
GFVKVKSGRNLVDEGKCYFNELINRSLIQPVNIELDGQATACRVHDMILDLIVSKAVEENFITPIGDPTQTLVSQEKVRRLSIDYRAPDAVISDSSLIFSHSRSLSIFGYSEKMLSFSNFQALRVLDLESSVKLKNCYLQNIGDLFQLRYLRIAASSITRLPEEIGELQFLETLDLRSTIR

SEQ ID NO: 96581 - protein, 94 aa, Setaria italica
  Transcript Sequence Number=SeqID_30607
LCRALPSLPPAADVGDELFGNNRNARAMKPLGVDVRRPKRKVNGSLIAIAVLSTSSSLALSTCCLAAWFLILNFRGPGDMVQGFPHIVLPKIFY

SEQ ID NO: 96582 - protein, 59 aa, Setaria italica
  Transcript Sequence Number=SeqID_30608
VRSKVRYMLEKPPTMASEATAAIISNPLMAPLPLSHQQAEQQLPLRRGLAAGEHRQVPG

SEQ ID NO: 96583 - protein, 63 aa, Setaria italica
  Transcript Sequence Number=SeqID_30609
FFPFVVIVDKPNTALVDIAVKDSPGQMQLLNVQVTDVVKESSGQTRNVDVRMTDEIKITSGTI

SEQ ID NO: 96584 - protein, 365 aa, Setaria italica
  Transcript Sequence Number=SeqID_30610
  Homolog annotation: Hit_ID=B6TK52; Match level="QueryCoverage=77%, HitCoverage=78%, E-value=3e-89, Identity=63%"; Hit description=AT hook motif family protein
IRQDGLQSSLTSGDRVHGNRSGRPRNSANKMKNSDNQASYHSSALQDNSGKDDVLGKHFVGKLTKKIPGFSLITVKVKDNQVLKGWVPDENNLRQITPKDDLAPELPMLRPSQVRKRASAIHMQAAPPVPIHLEDVTLAKPLQMRRPAEKIIAKHTAPLPPRPYIGSAVLAAIPVSISPSNPEMRTLAKHDTELVIPQSSVAAVPIKSARPVLVPCKQVENELAGKNSVNEFQKDSESSNETKDSSVIVDKPNTALVDIAVKDSPEERQLLNVQVTDVVKESSGQTRNVDVRMTDEIKITSGTADQPDSANSEQQSSKEPSDITEQSEQLKTETVVLKGVDGLKSGTSDDVHPAHDEHEMKVDSN

SEQ ID NO: 96585 - protein, 102 aa, Setaria italica
  Transcript Sequence Number=SeqID_30611
  Subcellular localization annotation: CTP_CleavageSite=37; ConfidenceScore=5.55e-01
VSTFIKGYQPPTSKTGTLICGFSTSTVMNTRGLLVAVCTGGVCQGGCGAWRTTSVCGNGSLLDILGMHYFLKICPCKYGRKVEWGDEDLGMAEIDRRAGCRV

SEQ ID NO: 96586 - protein, 136 aa, Setaria italica
  Transcript Sequence Number=SeqID_30612
GSVEATRKQCGTGITVSFESVDEQQEIQEMGSVKTTSKQRGTGVTVSLESSVEQEIQELGSVEATSKQHSSGITVLLESSDKQQEMGSAEATTKELDTGYVFKKKTRLGGEALYGFLFIIVQYLLVSPISFMPMLR

SEQ ID NO: 96587 - protein, 144 aa, Setaria italica
  Transcript Sequence Number=SeqID_30613
  Gene Ontology: Cellular component=cell wall
  Homolog annotation: Hit_ID=B6TFP8; Match level="QueryCoverage=86%, HitCoverage=76%, E-value=2e-47, Identity=79%"; Hit description =Disease resistance response protein 206
  Pfam annotation: Domain name=Dirigent; Domain location=13-143; Score =67.7; E_value=4.3e-17; Accession=PF03018.6; Description=Dirigent -like protein
MAPSLAAAVLLFLLAPMSSPAAVLAADGGTTTHLHLFMHDILTGSNPTAVQVIKGPSAVPGLAFGDTTVIDDALTEDPSSSSAAVGRVQGFYMMTSQSGGAVLTVCANLLLTAGGYNGSTVAVMGRDDIAADVRELAVVGGTGC

SEQ ID NO: 96588 - protein, 61 aa, Setaria italica
  Transcript Sequence Number=SeqID_30614
  Homolog annotation: Hit_ID=B6UBZ5; Match level="QueryCoverage=63%, HitCoverage=12%, E-value=2e-10, Identity=82%"; Hit description =Hydrolase
MGFGVVSLLNAVFRRMFTSAGLRPGSATVDADDTTIHFWAHPSLLHAPPPRSSSSRRGRWW

SEQ ID NO: 96589 - protein, 85 aa, Setaria italica
  Transcript Sequence Number=SeqID_30615
  Gene Ontology: Mol. function=transferase activity, transferring glycosyl groups; Biological process=metabolic process
  Homolog annotation: Hit_ID=B6SUB6; Match level="QueryCoverage=80%, HitCoverage=14%, E-value=5e-28, Identity=88%"; Hit description =Anthocyanidin 5,3-O-glucosyltransferase
MEGAGAAAPTITAAATGRRPVVLYPSPGMGHLVSMIELGKILGARGLAVTIVVIDPPYNTGATGPFLAGVSAANPSISFHRLPKV

SEQ ID NO: 96590 - protein, 48 aa, Setaria italica
  Transcript Sequence Number=SeqID_30616
LHDECNLNDVTFRSVSCYKHGLSSFARYNHFSVFCPCFLELRVCDMMC

SEQ ID NO: 96591 - protein, 75 aa, Setaria italica
  Transcript Sequence Number=SeqID_30617
  Homolog annotation: Hit_ID=B9SGR5; Match level="QueryCoverage=88%, HitCoverage=8%, E-value=2e-14, Identity=57%"; Hit description =Pentatricopeptide repeat-containing protein, putative
EEKGIAPNKTRYRKMYIEMHSRMFTSKHASQARQDRRRERKRAAEAFKFWLGLPNSYYGSEWRVEPLLEGDDDPS

SEQ ID NO: 96592 - protein, 42 aa, Setaria italica
  Transcript Sequence Number=SeqID_30618
  Gene Ontology: Mol. function=oxidoreductase activity, acting on the CH-OH group of donors, NAD or NADP as acceptor; Cellular component =glycerol-3-phosphate dehydrogenase complex; Biological process =glycerol-3-phosphate catabolic process
  Homolog annotation: Hit_ID=B6SKP4; Match level="QueryCoverage=100%, HitCoverage=9%, E-value=3e-15, Identity=95%"; Hit description =Glycerol-3-phosphate dehydrogenase
DSILQAIRDESMYDPRERIEMAQRQSLYRPSLLGLPKGDAKA

SEQ ID NO: 96593 - protein, 94 aa, Setaria italica
  Transcript Sequence Number=SeqID_30619
MAAVTRAQSVCPSEHAVPMGYDDEPLLGRYNEAVRLEKTAAAADGDASFVQTCLNGLNALTGVGLLSVPYALSEGGWLSLALLAAVAAVCWYTG

SEQ ID NO: 96594 - protein, 53 aa, Setaria italica
  Transcript Sequence Number=SeqID_30620
YTRETNIIVYSYDFAPHICLHKLENGCKTASPMNLGACNPVLKCYARRSYLSW

SEQ ID NO: 96595 - protein, 165 aa, Setaria italica
  Transcript Sequence Number=SeqID_30621
FDTEDTRIPVFLLLILKEEARKESVAYEPWSMQPSIEVLREKKLPKLDEHLHFPSATTQVMDKAEMMKETEAVKDNSVTATDGICTASILKNSSHRDGAIYKGNWEECYLIDIADRKESKGSKYLSCSYSLFLGHLQTMSSIDMYGLYMGVGYAIGKLTICGAKS

SEQ ID NO: 96596 - protein, 96 aa, Setaria italica
  Transcript Sequence Number=SeqID_30622
IREWLQNSVAYEPWSMQPSIEVLREKKLPKLDEHLHFPSATTQVMDKAEMMKETEAVKDNSVTATDGICTASILRIMNKNRKDIWIPCSLYGQQYQ

SEQ ID NO: 96597 - protein, 108 aa, Setaria italica
  Transcript Sequence Number=SeqID_30623
LHFPSATTQVMDKAEMMKETEAVKDNSVTATDGICTASILKNSSHRDGAIYKGNWEECYLIDIADRKESKGSKYLSCSYSLFLGHLQTMSSIDMYGFVYGRWIRPLAS

SEQ ID NO: 96598 - protein, 166 aa, Setaria italica
  Transcript Sequence Number=SeqID_30624
  Subcellular localization annotation: CTP_CleavageSite=27; ConfidenceScore=5.35e-01
SFSTPRTDPPFFPTLSRSPILHPPTLKASREGSTEADQMQQSRRILRFCRCPSIASDAPRRWSPESGGRNVPSTAAAASTLPDELLGRLSRCVHLPLVASYRKYIFPNNAWDKSFDLDYDQKINIIRRMLISSKRSPTPHAPAPTLARYTLTHTKKNELDICWVLF

SEQ ID NO: 96599 - protein, 142 aa, Setaria italica
  Transcript Sequence Number=SeqID_30625
IREWLQNSVAYEPWSMQPSIEVLREKKLPKLDEHLHFPSATTQVMDKAEMMKETEAVKDNSVTATDGICTASILKNSSHRDGAIYKGNWEECYLIDIADRKESKGSKYLSCSYSLFLGHLQTMSSIDMYGFVYGRWIRPLAS

SEQ ID NO: 96600 - protein, 68 aa, Setaria italica
  Transcript Sequence Number=SeqID_30626
ELMMARESGLLAGSSGSSRRCHGEHSNKDGGGGRSGRALPDAAKRLPSVGRSCFSSRSGRGKDSVLPM

SEQ ID NO: 96601 - protein, 133 aa, Setaria italica
  Transcript Sequence Number=SeqID_30627
  Gene Ontology: Mol. function=peptidyl-prolyl cis-trans isomerase activity; Biological process=protein folding
MKQLTLQLQEQKAAANNENVEVVVERSLRNLSSGRDLVDGLEALRDRWATGMEEMIYLGWITAWLQHDLMLIDDDDDGSTVLGGSTYDGGEDVGAVLGGSAYDDDDDRKRKGVHPPEDEKKKGETMVAAAAPS

SEQ ID NO: 96602 - protein, 44 aa, Setaria italica
  Transcript Sequence Number=SeqID_30628
VTNLDIHAEESLKRTYCHNESPSRRSCNMKYLVLHMVRCLLNFQ

SEQ ID NO: 96603 - protein, 71 aa, Setaria italica
  Transcript Sequence Number=SeqID_30629
CYICRTKFGTWGWEYDICSPLFMLRLQMMIACKTLLKTGMLSRHCSILLKPQTVQLATYTQYSLSNTNLSL

SEQ ID NO: 96604 - protein, 316 aa, Setaria italica
  misc_feature (4)..(4): Xaa can be any naturally occurring amino acid
  Transcript Sequence Number=SeqID_30630
  Gene Ontology: Mol. function=structural constituent of ribosome; Cellular component=intracellular; Biological process=translation
  Homolog annotation: Hit_ID=B6TT32; Match level="QueryCoverage=75%, HitCoverage=74%, E-value=1e-107, Identity=81%"; Hit description=30S ribosomal protein S5
  Pfam annotation: Domain name=Ribosomal_S5; Domain location=159-225; Score=123.0; E_value=9.9e-34; Accession=PF00333.12; Description =Ribosomal protein S5, N-terminal domain
  Pfam annotation: Domain name=Ribosomal_S5_C; Domain location=235-308; Score=102.8; E_value=1.2e-27; Accession=PF03719.7; Description =Ribosomal protein S5, C-terminal domain
  Pfam module annotation: Pfam domain module=Ribosomal_S5::Ribosomal_S5_ C; Domain location=159-225::235-308
  Subcellular localization annotation: CTP_CleavageSite=60; ConfidenceScore=5.56e-01
MATXSPTTPTPTAPFPSLPLAFRLRPQPLLLSASRRLLLLPVPKVSSWDESAPGEEGEAEDSEESGAAAGDEDEDEEDEKPRPEPVSSAEFQFAAPPEGYVEPAAFDELPPESPEDVAAAYESLYGPAFSGETVLGNNVFEVKVVDPVDMDREQRPNDEFSERVVQVNRVTKVVKGGRQLSYRAIVVVGDMKGHVGVGVGKAKEVSEAITKAAMNGRRNLVTVPLTKYSTFPHRADADFGAARVMLRPACPGSGVIAGGAVRVVLEMAGVENALGKQLRSKNPLNNARATIKATQMMRQFKDVADERGIPMEELWK

SEQ ID NO: 96605 - protein, 143 aa, Setaria italica
  misc_feature (17)..(17): Xaa can be any naturally occurring amino acid
  misc_feature (31)..(31): Xaa can be any naturally occurring amino acid
  misc_feature (64)..(64): Xaa can be any naturally occurring amino acid
  misc_feature (67)..(67): Xaa can be any naturally occurring amino acid
  Transcript Sequence Number=SeqID_30631
GAFTNTVERMLDVLHCXVKDILKSWAAYLTXKKYKLVSNTQANQNTRLMRILEETREADGESDXIRXRMQAVCLQISDCIHNLHEILDYIFALEMQKLLGNDPPGQGPGSTSDQRPLHPLQRRVASVGSVGGTELTRVASAKG

SEQ ID NO: 96606 - protein, 78 aa, Setaria italica
  Transcript Sequence Number=SeqID_30632
  Gene Ontology: Mol. function=protein serine/threonine kinase activity; Biological process=protein amino acid phosphorylation
  Homolog annotation: Hit_ID=Q67TV6; Match level="QueryCoverage=69%, HitCoverage=6%, E-value=2e-16, Identity=74%"; Hit description =Putative serine/threonine-specific protein kinase
MAARSWLLLLCLAAVATAGVLQARAQPDSIGFISIDCGLSGTASYVDDTNTLSYAPDAAFVDAGSNHNISAEYITPKL

SEQ ID NO: 96607 - protein, 80 aa, Setaria italica
  Transcript Sequence Number=SeqID_30633
  Homolog annotation: Hit_ID=B9MZ67; Match level="QueryCoverage=98%, HitCoverage=3%, E-value=4e-15, Identity=50%"; Hit description =Chromatin remodeling complex subunit
HNSRGAVFIDDQERVIKTILFVTSILPYICRPLLIVSTSASLSLWETKFSRLAASINVVVYNGEKDVRKSIRDLEFYEDW

SEQ ID NO: 96608 - protein, 101 aa, Setaria italica
  Transcript Sequence Number=SeqID_30634
  Gene Ontology: Mol. function=ARF GTPase activator activity; Cellular component=plasma membrane; Biological process=regulation of ARF GTPase activity
  Homolog annotation: Hit_ID=B6THV1; Match level="QueryCoverage=82%, HitCoverage=25%, E-value=5e-33, Identity=85%"; Hit description=ZAC
  Pfam annotation: Domain name=C2; Domain location=28-91; Score=57.3; E_ value=5.9e-14; Accession=PF00168.22; Description=C2 domain
PLITCFSFLASFGLYIFQAGMVEFIGILKVKVIRGTKLAVRDLISSDPYVVLTLGQQKAKTSVIKRNLNPVWNEELKLSVPQKYGPLKLVSPPPTSLSPTS

SEQ ID NO: 96609 - protein, 176 aa, Setaria italica
  Transcript Sequence Number=SeqID_30635
  Gene Ontology: Mol. function=ARF GTPase activator activity; Cellular component=plasma membrane; Biological process=regulation of ARF GTPase activity
  Homolog annotation: Hit_ID=B6THV1; Match level="QueryCoverage=99%, HitCoverage=55%, E-value=2e-85, Identity=87%"; Hit description=ZAC
  Pfam annotation: Domain name=ArfGap; Domain location=1-68; Score= -41.0; E_value=0.094; Accession=PF01412.10; Description=Putative GTPase activating protein for Arf
  Pfam annotation: Domain name=C2; Domain location=106-176; Score=77.9; E_value=3.8e-20; Accession=PF00168.22; Description=C2 domain
  Pfam module annotation: Pfam domain module=ArfGap::C2; Domain location=1-68::106-176
VTLDQWTDDEINSMIEVGGNSYANAIYEAFLPEGYHKPHPDSSQEERADFIRSKYESQEFMKPSLRIVSNKSSLEAIDSRKHMDSNASHSASFNSEAGMVEFIGILKVKVIRGTKLAVRDLISSDPYVVLTLGQQKAKTSVIKRNLNPVWNEELKLSVPQKYGPLKLEVFDHDLLF

SEQ ID NO: 96610 - protein, 252 aa, Setaria italica
  misc_feature (164)..(164): Xaa can be any naturally occurring amino acid
  misc_feature (234)..(234): Xaa can be any naturally occurring amino acid
  Transcript Sequence Number=SeqID_30636
  Gene Ontology: Mol. function=ARF GTPase activator activity; Cellular component=plasma membrane; Biological process=regulation of ARF GTPase activity
  Homolog annotation: Hit_ID=B6THV1; Match level="QueryCoverage=98%, HitCoverage=78%, E-value=1e-122, Identity=87%"; Hit description=ZAC
  Pfam annotation: Domain name=ArfGap; Domain location=1-70; Score= -33.3; E_value=0.021; Accession=PF01412.10; Description=Putative GTPase activating protein for Arf
  Pfam annotation: Domain name=C2; Domain location=108-187; Score =103.3; E_value=8.5e-28; Accession=PF00168.22; Description=C2 domain
  Pfam module annotation: Pfam domain module=ArfGap::C2; Domain location=1-70::108-187
LSVTLDQWTDDEINSMIEVGGNSYANAIYEAFLPEGYHKPHPDSSQEERADFIRSKYESQEFMKPSLRIVSNKSSLEAIDSRKHMDSNASHSASFNSEAGMVEFIGILKVKVIRGTKLAVRDLISSDPYVVLTLGQQKAKTSVIKRNLNPVWNEELKLSVPQKXGVPKLEVFDHDLLSRDDKMGEAEIDLQPMISAATAFGDPDLLADMQIGKWLKSPDNALARDSAVNVVGGXKVKQEVSLKLQNVEVPGK

SEQ ID NO: 96611 - protein, 684 aa, Setaria italica
  misc_feature (25)..(25): Xaa can be any naturally occurring amino acid
  Transcript Sequence Number=SeqID_30637
  Gene Ontology: Mol. function=nucleic acid binding; Cellular component= intracellular; Biological process=mRNA processing
  Homolog annotation: Hit_ID=B9SDF9; Match level="QueryCoverage=92%, HitCoverage=72%, E-value=1e-170, Identity=48%"; Hit description =Tuftelin interacting protein, putative
  Pfam annotation: Domain name=G-patch; Domain location=25-69; Score =66.6; E_value=9e-17; Accession=PF01585.15; Description=G-patch domain
  Pfam annotation: Domain name=TFP11; Domain location=238-475; Score =419.7; E_value=4.7e-123; Accession=PF08697.3; Description=Tuftelin interacting protein 11
  Pfam module annotation: Pfam domain module=G-patch::TFP11; Domain location=25-69::238-475
KAARRRQAAGVDAGEPAAALGEPGXNSKVAKMMAMMGYKKGMGLGKNKQGITAPVETTLRPKNAGLGSVEGFKEPKPMMAKENLPAPAPPPTSGKKEKRWSKKASTKKAPVMTKNELLAMRAEQEQEEQPTVVQKVIDMRGPQARVLTDLKGLNEEQEMEANDVPMPELQYNVRLLVDEAKADVLRLDGQLRREQEKVASLMREKEKVAKQEAAQKRQLQVMEIIAGTLEQVRVDDTAGMLTLDGLLQTFHGLKVQFEEEFKMCSIAWIACRYAHPLLIRIFQGWQPLQDPKFGLDVMKKWKDLLQGDQPFDFSDGSASMTPYVQLVSEVILPAVRISGTNSWEAREPEPMLNFLELWDNKKLLPPVLLQSILEHVIMPKLSAAVDSWDPRRESVPIHVWVHPWLPMLRERIETLCHSIRYKLSTVLHVWQAHDASAYAVLSPWKDVFDSASWEDLIVRYIIPKLRLALQEFQINPANQKLDQFNWVMLWASAIPVHLMVHMLEVDFFSKWQQVLYHWLCSPNPDFNEIMNWYKGWKGLFPPELLANERIRMLLTAGLDMMNQAAEGLEVVQPGARENVGYLRATEKRQFDAAQQAYNAVPGAAMADLSFKESIQAYAMEQGVLFMPRVGKFYNGMPVYEFGTVSICIDSVKRLLYAQLQEGIERWSAVTLTQLMEMNRMGRSR

SEQ ID NO: 96612 - protein, 142 aa, Setaria italica
  misc_feature (67)..(67): Xaa can be any naturally occurring amino acid
  Transcript Sequence Number=SeqID_30638
  Gene Ontology: Mol. function=pseudouridine synthase activity; Biological process=tRNA pseudouridine synthesis
  Homolog annotation: Hit_ID=B6TRU2; Match level="QueryCoverage=82%, HitCoverage=23%, E-value=2e-62, Identity=93%"; Hit description =Pseudouridylate synthase/ transporter
  Pfam annotation: Domain name=TruB_N; Domain location=8-114; Score =4.0; E_value=2.8e-06; Accession=PF01509.10; Description=TruB family pseudouridylate synthase (N terminal domain)
FFYINFCSNYLCFCNSACLLSFYDQVIQREPWEHIKDGDIRKAAASFKGEIWQVPPMFSAIKVGGEXMYDKARRGETVELSPRRISIYQFDIERSLEDRQNLIFRVTCSKGTYIRSLCADLGKALGSCAHLTALRRDSIGNF

SEQ ID NO: 96613 - protein, 302 aa, Setaria italica
  misc_feature (30)..(30): Xaa can be any naturally occurring amino acid
  Transcript Sequence Number=SeqID_30639
  Gene Ontology: Mol. function=pseudouridine synthase activity; Biological process=tRNA pseudouridine synthesis
  Homolog annotation: Hit_ID=B6TRU2; Match level="QueryCoverage=97%, HitCoverage=59%, E-value=1e-133, Identity=80%"; Hit description =Pseudouridylate synthase/ transporter
  Pfam annotation: Domain name=TruB_N; Domain location=104-254; Score =179.9; E_value=7e-51; Accession=PF01509.10; Description=TruB family pseudouridylate synthase (N terminal domain)
FSFIDKKDGDNDKGEVLERKVEDFFRSLRXGPGEAEAKAKRPAAARAEPRQVKREVPREEERPQPYLVTRTTELPPRWDGPGGTVVLIDKPKGWTSFTVCGKLRRLVKVKKVGHAGTLDPMATGLLIVCVGKATKIVDCYQGMVKGYSGVFRLGEATSTWDADSPVIQREPWEHIKDGDIRKAAASFKGEIWQVPPMFSAIKVGGEKMYDKARRGETVELSPRRISIYQFDIERSLEDRQNLIFRVTCSKGTYIRSLCADLGKALGSCAHLTALRRDSIGEYKVNDAWNFDELEEQINKGYL

SEQ ID NO: 96614 - protein, 70 aa, Setaria italica
  Transcript Sequence Number=SeqID_30640
FVSSVIQKLSLIFPLFQVYARYIQFRVLVRTFCRWACLFYFPGSRAKICVGGMNQAGHKFGVGYTSYLCF

SEQ ID NO: 96615 - protein, 50 aa, Setaria italica
  Transcript Sequence Number=SeqID_30641
AARFPVDYVEFDVQVKTPASPIELLFFLAHPKREREALADADCPPVSPSR

SEQ ID NO: 96616 - protein, 345 aa, Setaria italica
  Transcript Sequence Number=SeqID_30642
  Gene Ontology: Mol. function=aspartic-type endopeptidase activity; Cellular component=chromatin; Biological process=DNA integration
  Homolog annotation: Hit_ID=Q2QMU2; Match level="QueryCoverage=57%, HitCoverage=52%, E-value=2e-52, Identity=54%"; Hit description =Retrotransposon protein, putative, unclassified
  Pfam annotation: Domain name=Retrotrans_gag; Domain location=172-270; Score=10.8; E_value=0.0053; Accession=PF03732.9; Description =Retrotransposon gag protein
  Subcellular localization annotation: CTP_CleavageSite=37; ConfidenceScore=5.16e-01
GVAAAPVGGGAARLPFPAPPPLPPPDGNLATALVAARAAAAEGQARLRAAALAWERERDAADILARQIAEAEQLLTMSHDSTATSSGSGAPRPPVVAWTDPADPLVAQLHYQAGGVQNIKSLVPVVLDPESPSYARWRDMVLLILRRYALDDHVLTDTFPAARTAAWVRLDSIVLSWILGTISLDLHDLVRGTPDTTARRAWLALEGQFLGNAEARALRLDASFRTFVQGDLSVGEFCRKMKTMADSLGDLGWAVEDRILVLNVLRGLNERYAHLRTWITRQRPFPTFLQVRDDLVMEELTQGIQPGSLPAPGSASSSTALAVTPPPRPSASPPSSLLGPPSSAE

SEQ ID NO: 96617 - protein, 57 aa, Setaria italica
  Transcript Sequence Number=SeqID_30643
  Subcellular localization annotation: CTP_CleavageSite=34; ConfidenceScore=5.38e-01
EFQKSVHKQGLKPHSNSCHATTSTGISTWKPRKTSMALWNSKSEGRLSTGLWVLSTR

SEQ ID NO: 96618 - protein, 125 aa, Setaria italica
  misc_feature (18)..(18): Xaa can be any naturally occurring amino acid
  Transcript Sequence Number=SeqID_30644
  Gene Ontology: Mol. function=DNA-directed RNA polymerase activity; Cellular component=nucleus; Biological process=transcription
  Homolog annotation: Hit_ID=Q84R88; Match level="QueryCoverage=96%, HitCoverage=10%, E-value=2e-63, Identity=95%"; Hit description=DNA -directed RNA polymerase
  Pfam annotation: Domain name=RNA_pol_Rpb2_3; Domain location=3-69; Score=75.7; E_value=1.7e-19; Accession=PF04565.8; Description=RNA polymerase Rpb2, domain 3
VSQVFLRLSYMASLGYMXTRITPQFEKTRKTSGPRALQPSQWGMLCPCDTPEGEACGLTKNLALLTHVTTDQEEGPLMNLCKSLGVEDLSLLSGEEIHAPGSFLVMFNGLILGKHRQPQTFCLTS

SEQ ID NO: 96619 - protein, 96 aa, Setaria italica
  Transcript Sequence Number=SeqID_30645
PMRVVFLVIGVCVFGRNEGLIVFRRWLSHSVYPFKNGHLFLYVYVCICMYTMFKYVLLNFVLLVTSDVLAPNFVDSNLLLSNESTFGTLFHSNSVH

SEQ ID NO: 96620 - protein, 79 aa, Setaria italica
  Transcript Sequence Number=SeqID_30646
PPNNEKPNSWLRPWPPWPWAHRALGGTWEATKRPRSALARRHARWSPALAEEKIIRPCCAALRQRPWSFAHEHNLSDFQ

SEQ ID NO: 96621 - protein, 48 aa, Setaria italica
  Transcript Sequence Number=SeqID_30647
YTQRWEDSHLLYCVIPDLTSSGRCGNNIGYFLKLWDLTEFLLEFLKTN

SEQ ID NO: 96622 - protein, 142 aa, Setaria italica
  Transcript Sequence Number=SeqID_30648
  Gene Ontology: Mol. function=protein serine/threonine kinase activity; Biological process=protein amino acid phosphorylation
  Homolog annotation: Hit_ID=Q7X6I1; Match level="QueryCoverage=96%, HitCoverage=16%, E-value=3e-54, Identity=72%"; Hit description =OSJNBa0028I23.2 protein
  Pfam annotation: Domain name=PAN_2; Domain location=17-84; Score =93.8; E_value=6.1e-25; Accession=PF08276.3; Description=PAN-like domain
ELDDRTGGCARNTPLSCEGNTSAAGMADKFYPMSSVQLPADAQNVGTATSAGECSLACLGSCSCTAYSYDQGGCSIWHDKLLNVRQQGNSVLLLRLAAKELQSSKGSNRMGVIIGAAVGASTATLVLIFLLIIWMRKRGAVW

SEQ ID NO: 96623 - protein, 89 aa, Setaria italica
  Transcript Sequence Number=SeqID_30649
  Gene Ontology: Mol. function=binding
  Homolog annotation: Hit_ID=B9RQE4; Match level="QueryCoverage=96%, HitCoverage=7%, E-value=1e-09, Identity=41%"; Hit description=DNA repair/transcription protein met18/mms19, putative
MHAFCSTPYFEPFAIPLLLDKLSSSLPLAKIESLKYLDNCIRFYGTDRMVRHASAVWFKLKEVIFSSSPEEFLLTSGSPKDAEKNKNQM

SEQ ID NO: 96624 - protein, 214 aa, Setaria italica
  misc_feature (93)..(93): Xaa can be any naturally occurring amino acid
  Transcript Sequence Number=SeqID_30650
  Gene Ontology: Mol. function=acid-amino acid ligase activity; Cellular component=cytoplasm; Biological process=peptidoglycan-based cell wall biogenesis
  Homolog annotation: Hit_ID=C4WRH2; Match level="QueryCoverage=98%, HitCoverage=23%, E-value=2e-40, Identity=45%"; Hit description =Putative UDP-N-acetylmuranoylanalyl-D-2-6-diaminoligase
  Pfam annotation: Domain name=Mur_ligase; Domain location=91-166; Score=9.2; E_value=0.0044; Accession=PF01225.17; Description=Mur ligase family, catalytic domain
EVIDLDEIRKLQGLSVVSVADEEDEEAEGAEDEDGDDGLPLDEDEEGFDVTEELGLEGARIRQPAFRMTLAELLDESKLVPVAVTGDQDVALXGVQHDASLVAAGDLFVCVGEEGLAGLTEADKRGAVAVVADQDVNIEGTLACRALVIVDDIAAALRVLPACLYRRPSTDMAVIGVTGTDGVTTTTHLVKAMYEAMGVRTGMVGVLGAYAFGS

SEQ ID NO: 96625 - protein, 146 aa, Setaria italica
  Transcript Sequence Number=SeqID_30651
  Subcellular localization annotation: CTP_CleavageSite=57; ConfidenceScore=5.49e-01
QIISAVLQQIISKSFFGWERPASPLSGSMGGTTPMQPEHLPPSSRPCRRQSMPSEVRAAARTVAARPSSSFPLPSLYFSSPQDPSMATQMSRLGGLLRPGGARSGMGTSGFGSSLSGSEAAGPAAHVPAAIYPCPRNRQGPCGGDR

SEQ ID NO: 96626 - protein, 124 aa, Setaria italica
  Transcript Sequence Number=SeqID_30652
FFFKTIRIQNSKAHMAEISTLQFGLGRSRLISDSELQSRSQTINLLTTKRSLFTEATHIHIPKNTSRFRHTPETQKASHRSPYSSCWQCGHAHRRNLTTEVELLHRIEEGVVGALDLVLEVVHL

SEQ ID NO: 96627 - protein, 262 aa, Setaria italica
  Transcript Sequence Number=SeqID_30653
  Gene Ontology: Mol. function=voltage-gated potassium channel activity; Cellular component=voltage-gated potassium channel complex; Biological process=potassium ion transport
  Homolog annotation: Hit_ID=B9T3Z0; Match level="QueryCoverage=100%, HitCoverage=57%, E-value=8e-87, Identity=60%"; Hit description =Potassium channel tetramerization domain-containing protein, putative
GGVAAFSALTGEPRHRFRVAHGRQPRSFTAGALAFDDGEGCRVFASCKGRLNEYGVAVWDVNTGEQAGFFYEPPGCALGDADRLQWLDGTGTLMAATMFPRADSSFISLLDFRDKSVVWSWSDAGTPASLEDKHAVHAVAMEDGRSVCVINQYHDLGFLDLRKNAAGVRWRSRSKLTASGKTKTWGEETCYPKLATHGGQLFASTGDAISVFSGPDHVLTSTLRGGNGGAICDLSIGGDRLFALHSEENVFDVWETPPPAII

SEQ ID NO: 96628 - protein, 158 aa, Setaria italica
  Transcript Sequence Number=SeqID_30654
  Gene Ontology: Mol. function=DNA binding; Biological process =regulation of transcription
  Homolog annotation: Hit_ID=B6T0Y4; Match level="QueryCoverage=61%, HitCoverage=33%, E-value=8e-37, Identity=80%"; Hit description =ANAC030
  Pfam annotation: Domain name=NAM; Domain location=1-67; Score=27.2; E_ value=5.6e-10; Accession=PF02365.7; Description=No apical meristem (NAM) protein
  Subcellular localization annotation: CTP_CleavageSite=28; ConfidenceScore=5.56e-01
TRTNRATAAGFWKATGRDKPVLSSSSSRSSSLGGVGVIGMRKTLVFYRGRAPNGRKTDWIIHEYRLQNNEHAPAQEEGWVVCRAFQKPMPNQQQRHACYAAAAAAGYPAGGYPSYYYMSGAGAAAPALLHHDHNNSLAAESKLQVQLLADMPPLQSPA

SEQ ID NO: 96629 - protein, 460 aa, Setaria italica
  Transcript Sequence Number=SeqID_30655
  Homolog annotation: Hit_ID=B6U8B2; Match level="QueryCoverage=20%, HitCoverage=24%, E-value=1e-33, Identity=75%"; Hit description=WDL1
  Pfam annotation: Domain name=TPX2; Domain location=240-296; Score =94.9; E_value=2.8e-25; Accession=PF06886.3; Description=Targeting protein for Xklp2 (TPX2)
MEDADAAAAAAAAVENGAVEAAEGYVVVTAAADGEPAGDREDLSAVQEAAEGGSEAASAAVPLAEDAAPATAKAPAKKAGSGDAAVPRKGKLPNGRVPAAAAKGKKPGVLSQSASFPARGPSGGAKKAAAAAAVATTPKQAKAAVANGSEAASGRAAEKKANSARTPVVARRAMPVKSGSVDAAAPNDATPAVQESHENTAKPLKQVQPGKTEDDVRSTTSSTNTPRAAARKIAAAAFSFRLEQRAEKRKEFFQKLEEKIHAKELEQTNLQEKSKESQEAEIKLLRKSLTFKATPMPSFYKEQPPKVELKKIPPTRARSPKLGRHKPTNSATAASADGSVSCESPRSTANSARVNEVAENNKPRAPARKPVQRSVTKTTSQVSGTAKAEPRPMVTKPKTSNSKSKVSRAKAAQVQDNPVEVPPTQPSAPEELTVEHGVGEATGPDLAAPLVASNEVPVHG

SEQ ID NO: 96630 - protein, 74 aa, Setaria italica
  Transcript Sequence Number=SeqID_30656
RTTSVSSNISVCKGFFFLETTLVTNNQNHKTRWLSQRAYNLCNQSHIFRNVLVKKCYIIRTFNQEDMFGSWAMS

SEQ ID NO: 96631 - protein, 122 aa, Setaria italica
  misc_feature (2)..(3): Xaa can be any naturally occurring amino acid
  misc_feature (111)..(111): Xaa can be any naturally occurring amino acid
  Transcript Sequence Number=SeqID_30657
  Gene Ontology: Mol. function=hydrolase activity, hydrolyzing O -glycosyl compounds; Cellular component=cell wall; Biological process= carbohydrate metabolic process
  Homolog annotation: Hit_ID=Q53MQ1; Match level="QueryCoverage=99%, HitCoverage=15%, E-value=5e-49, Identity=76%"; Hit description =Glycosyl hydrolase family 3 C terminal domain containing protein, expressed
  Pfam annotation: Domain name=Glyco_hydro_3_C; Domain location=1-81; Score=-78.4; E_value=0.091; Accession=PF01915.14; Description =Glycosyl hydrolase family 3 C terminal domain
AXXWAGYPGQAGGLAIARILFGDHNPSGRLPVTWYPEEFTKIPMTDMRMRADPATGYPGRSYRFYQGNTVYKFGYGLSYSSFSRKLVSGANMPAIPTTVLAGLREMMAGEXGTSYHVDAIGA

SEQ ID NO: 96632 - protein, 49 aa, Setaria italica
  Transcript Sequence Number=SeqID_30658
LFPTRITKRRHYDQARSCFVTVVSTGISELMVRTSLLIRSSVSQIQHPC

SEQ ID NO: 96633 - protein, 377 aa, Setaria italica
  misc_feature (11)..(11): Xaa can be any naturally occurring amino acid
  Transcript Sequence Number=SeqID_30659
  Gene Ontology: Mol. function=binding; Cellular component=chloroplast
  Homolog annotation: Hit_ID=O49300; Match level="QueryCoverage=73%, HitCoverage=21%, E-value=4e-53, Identity=42%"; Hit description =T26J12.6 protein
  Pfam annotation: Domain name=Arm; Domain location=14-56; Score=1.5; E_ value=8; Accession=PF00514.15; Description=Armadillobeta-catenin-like repeat
  Pfam annotation: Domain name=Arm; Domain location=297-337; Score =12.0; E_value=0.36; Accession=PF00514.15; Description=Armadillobeta -catenin-like repeat
  Pfam annotation: Domain name=Arm; Domain location=97-138; Score=16.5; E_value=0.098; Accession=PF00514.15; Description=Armadillobeta -catenin-like repeat
  Pfam module annotation: Pfam domain module=Arm::Arm::Arm; Domain location=14-56::297-337::97-138
KTAAYALEKLXSVSSTICQKIKAEGGLELLVNTVKDPHTPVKQLEKIISVLSRMFDMGISMVAAPESYARENAMSAERNIQGDTASGNSGISHTFVNQEMASEMILDFDAISRLTKVLKEASPSLQAKVCCVLEHLAASEQHATSMTATCTGSVIETILEIGVIHGTRADSEDFDNRSSVATEEVSQAVSAAVRLLTKLLNFDLFVRSINTEKFTSLLRRMLKSSFPLQSKDWLAACLVKLESRAGLSGNHGVSSIDMEITIYQTIPRLVERMMTSFSFENKRSAVIELNKIISSGVLEYTRALADTGGIFPLVKMLEEGDGDALEATLAILYNLSMDPENHPAIIAAGAVPLLKRIILAEAPHWTSAIQLLRTLPV

SEQ ID NO: 96634 - protein, 319 aa, Setaria italica
  misc_feature (65)..(65): Xaa can be any naturally occurring amino acid
  misc_feature (89)..(89): Xaa can be any naturally occurring amino acid
  misc_feature (117)..(117): Xaa can be any naturally occurring amino acid
  misc_feature (148)..(148): Xaa can be any naturally occurring amino acid
  misc_feature (171)..(171): Xaa can be any naturally occurring amino acid
  misc_feature (201)..(201): Xaa can be any naturally occurring amino acid
  misc_feature (265)..(265): Xaa can be any naturally occurring amino acid
  misc_feature (283)..(283): Xaa can be any naturally occurring amino acid
  Transcript Sequence Number=SeqID_30660
  Gene Ontology: Mol. function=phosphotransferase activity, alcohol group as acceptor; Biological process=metabolic process
  Homolog annotation: Hit_ID=B9SJ57; Match level="QueryCoverage=96%, HitCoverage=44%, E-value=1e-40, Identity=51%"; Hit description =Uridine cytidine kinase I, putative
  Pfam annotation: Domain name=PRK; Domain location=22-180; Score= -25.1; E_value=2.1e-05; Accession=PF00485.10; Description =Phosphoribulokinase  Uridine kinase family
MLLLLSVQAIQALLENKGYPVIVGIGGPSGSGKTSLAQKMANIIGCEVVSLESYYKPEQVRDYKXIMEIRNSHKAEVPCFDFENFSRKXFKELQVSEESGVVIFEGVYTLHPAIRNXAGLWIAVVGGVHSHLITRIQRDKSRAGLFIXHYVKYYDGSRISCICSNYIGLSXQVYSDAFFTPLKILIEVDHLQGVATPYLQXKGTNKDIVSSAGSALSLDGSYTTKSYLQIILESLPADDNVSVGIHNQQAARLQELVEFIQSKGXGSFSSDSSSPNRRRKFTXTRISVLDDMQSRIRKLERWNTINMVLWTILLSALVG

SEQ ID NO: 96635 - protein, 442 aa, Setaria italica
  misc_feature (108)..(108): Xaa can be any naturally occurring amino acid
  misc_feature (203)..(203): Xaa can be any naturally occurring amino acid
  Transcript Sequence Number=SeqID_30661
  Gene Ontology: Mol. function=phosphotransferase activity, alcohol group as acceptor; Biological process=metabolic process
  Homolog annotation: Hit_ID=B9SJ57; Match level="QueryCoverage=98%, HitCoverage=91%, E-value=1e-159, Identity=44%"; Hit description =Uridine cytidine kinase I, putative
  Pfam annotation: Domain name=PRK; Domain location=17-193; Score=48.3; E_value=3e-11; Accession=PF00485.10; Description=Phosphoribulokinase Uridine kinase family
VYKAIQALLENKGYPVIVGIGGPSGSGKTSLAQKMANIIGCEVVSLESYYKPEQVRDYKYDDYSSLDIALLTKTIMEIRNSHKAEVPCFDFENFSRKGFKELQVSEEXGVVIFEGVYTLHPAIRKLLDLWIAVVGGVHSHLITRIQRDKSRAGLSISQTEIMTTVFPLFQQYIEPHLVHAHLKIQNDFDPVLSPESSLFVLKXKKQVSYQDILKVLDATKVCSSVQNFTDVYLRLPGVPSNGQLTEGECIRVRICEGRFALLIREPIREGNFIIQPKVDFDISASTVAGLLKLGYQAVAYIEASAVIYQDGKILIEVDHLQGVATPYLQIKGTNKDIVSSAGSALSLDGSYTTKSYLQIILESLPADDNVSVGIHNQQAARLQELVEFIQSQGGSFSSDSSSPMREISSTDSMEYNKYGFVDYITVCSCWIFILPKKTSLIK

SEQ ID NO: 96636 - protein, 457 aa, Setaria italica
  Transcript Sequence Number=SeqID_30662
  Subcellular localization annotation: CTP_CleavageSite=25; ConfidenceScore=5.17e-01
MEPRRISASPRPCSGRRVVARKRPRQESVVSSVRKLQRREISSRRDRACAMTAAQERFRNITLQEEFDTHDPKENCLLLPYLRKRSKIIEIVAARDIVFALSQSGVCAAFSRETNQRICFLNGSPDEVIRSLFYNKNNDSLITVSVYGSENFSALRCRTTRIEYIRRGQPDAGFSLFETESLKWPGFVEFDDVNGKVLTYSAQDSTYKVFDLKNYTLLYSVSDKNVQEIKISPGIMLLIYTRTSSSVPLKILSIEDGTVLKSFSHLLHRNKKVDFIEQFNEKLLVKQEGENLQILDVRNFQLTEVSRTEFMTPSAFIFLYELQLFLTFRNRSVAVWNFRGELVTSFEDHLLWHPDCNTNNIYITSDQDLIISYCKADSTDSSSEENAGSINISSILTGKCLAKVNSGNGNSCKQKKAWKFQNTVSEALEDITALYYDEERDEIYTGNRHGLVHVWSN

SEQ ID NO: 96637 - protein, 112 aa, Setaria italica
  Transcript Sequence Number=SeqID_30663
  Gene Ontology: Mol. function=DNA binding
  Homolog annotation: Hit_ID=Q10G93; Match level="QueryCoverage=34%, HitCoverage=3%, E-value=1e-13, Identity=76%"; Hit description=DIRP family protein, expressed
SEGSSNSDSARGLEDLPESTANIFCEVYPTVPREINPEISMSRRRKMKNKMHRKKKYVMCNKGSDNVEARKLLHCLSSEFLRRWCTYEWFYSAIDFPWFMDNEFVKYMNHPY

SEQ ID NO: 96638 - protein, 138 aa, Setaria italica
  misc_feature (26)..(26): Xaa can be any naturally occurring amino acid
  misc_feature (97)..(97): Xaa can be any naturally occurring amino acid
  Transcript Sequence Number=SeqID_30664
  Gene Ontology: Mol. function=DNA binding
  Homolog annotation: Hit_ID=B9RF70; Match level="QueryCoverage=84%, HitCoverage=13%, E-value=2e-13, Identity=32%"; Hit description =Always early, putative
GKPITECSASKTKRKRHTKVPAEAIXAIDITEGSSNSDSARGLEDLPESTANIFCEVYPTVPREINPEISMSRRRKMKNKMHITYFYVMCNKGSDNXRWCTYEWFYSAIDFPWFMDNEFVKYMNHPYLRHISRLARSE

SEQ ID NO: 96639 - protein, 358 aa, Setaria italica
  misc_feature (208)..(208): Xaa can be any naturally occurring amino acid
  Transcript Sequence Number=SeqID_30665
  Gene Ontology: Mol. function=DNA binding; Cellular component=nucleus; Biological process=embryonic development ending in birth or egg hatching
  Homolog annotation: Hit_ID=B9RF70; Match level="QueryCoverage=47%, HitCoverage=16%, E-value=1e-59, Identity=56%"; Hit description =Always early, putative
  Pfam annotation: Domain name=DIRP; Domain location=39-140; Score =135.4; E_value=1.8e-37; Accession=PF06584.5; Description=DIRP
HEKRKYVMCNKGSDNVEARKLLHCLSSEFLRRWCTYEWFYSAIDFPWFMDNEFVKYMNHPYLRHISRLARSEWSIIRSYRGKPRRFSDNFLVMERKQLEDYRKEVRTYYAQLSDGSLDSLPADVARPFSIGQQVIVRHPSSRELCDGKVVMVDQDCCKVQFDNPELGLDLVQDVDCMPVNWLDNLPDNVRSTLESHDVHNILEMEHVXKVTPSGNRDHTINEVSIPELPISVDITSDEQLEVEYSVDSERTQKESTSDGIVQSTDFPNNNDDHYDQLESYCSAFVRSMQSQAREMVDEVMQATSGGNSSQDEGAGAVNQATNCISPDLGAVTCDSQLPSNLIMNCTATVLAIKRLADS

SEQ ID NO: 96640 - protein, 58 aa, Setaria italica
  Transcript Sequence Number=SeqID_30666
TNRTQESILASSDGKIVMADRCLNMSMHAGKKNSETHYSQLLHMDANFSIVISACIKP

SEQ ID NO: 96641 - protein, 86 aa, Setaria italica
  Transcript Sequence Number=SeqID_30667
  Gene Ontology: Mol. function=hydrolase activity; Biological process =lipid catabolic process
  Homolog annotation: Hit_ID=B9SQ95; Match level="QueryCoverage=97%, HitCoverage=19%, E-value=3e-13, Identity=45%"; Hit description =Patatin B2, putative
MLFLRGPDGRPRYSAQEALAFVAGSVGKKDWGGRRGRWAKLFRRSRSGEQVFRRVFGDATLRDTVAPLLVPCYDLATGAPFVFSRA

SEQ ID NO: 96642 - protein, 484 aa, Setaria italica
  misc_feature (475)..(475): Xaa can be any naturally occurring amino acid
  Transcript Sequence Number=SeqID_30668
  Gene Ontology: Mol. function=protein serine/threonine kinase activity; Biological process=protein amino acid phosphorylation
  Homolog annotation: Hit_ID=Q25AB6; Match level="QueryCoverage=100%, HitCoverage=90%, E-value=1e-123, Identity=46%"; Hit description =B0808H03.2 protein
  Pfam annotation: Domain name=B_lectin; Domain location=2-118; Score =113.1; E_value=9e-31; Accession=PF01453.16; Description=D-mannose binding lectin
  Pfam annotation: Domain name=PAN_1; Domain location=269-354; Score =12.6; E_value=0.011; Accession=PF00024.18; Description=PAN domain
  Pfam annotation: Domain name=PAN_2; Domain location=269-338; Score =110.5; E_value=5.5e-30; Accession=PF08276.3; Description=PAN-like domain
  Pfam annotation: Domain name=S_locus_glycop; Domain location=132-257; Score=47.1; E_value=7e-11; Accession=PF00954.12; Description=S-locus glycoprotein family
  Pfam module annotation: Pfam domain module=B_lectin::PAN_1::PAN_2::S _locus_glycop; Domain location=2-118::269-354::269-338::132-257
PNHTVVWVANRDSPITTPSAKLAITDNQELALSDDEGRTLWTTARGSSTATATTGGAGAVAVLLGSGNFILRSANGTDMWQSFDHPTDTMLPTMKVLLSYKGHVATRFIAWKGPADPSTGAFSASIDPSSNLQFFVWYGTRTYLRINFFGDTSLFGGGGTTSSSIVYQRTATGDELSYMYTVPDGSSYTRFLLEYTGKVRVRAWNNSTSSWAAGFERPSSSCDLYASCGSFGYCDNTMAVPACQCLDGFEPIDGLDMSRGCRRNEALGCGTKDRFVPLPGMKVPGKFLHIENTSSDQCAAECRKNCSCTAYAYVSMSSAGTLASTSRCLVWTGDLIDTGKVGIFGSDLYLRLAGRSHVRNKSNIEKILPPVIACVLLLSCAALVWRCKYRAGKQHKKEARKRIMLEYVRSTDEDGDNNVELPYISFKDLVVATDNFSDSNMLGKGGFGKVYKGFLDGTKEVAIKRLSKGSGQGTXGVQNEVVLI

SEQ ID NO: 96643 - protein, 74 aa, Setaria italica
  Transcript Sequence Number=SeqID_30669
  Gene Ontology: Mol. function=amino acid binding; Biological process =metabolic process
  Homolog annotation: Hit_ID=B6SV85; Match level="QueryCoverage=100%, HitCoverage=16%, E-value=4e-25, Identity=83%"; Hit description=ACR4
MVRCVEMVAEEEDDDEYAKLVRRMNPPRVVIDNDSCNNATVIRVDRVKKHGILLEAVQVLVDLNLVITKAYISS

SEQ ID NO: 96644 - protein, 90 aa, Setaria italica
  Transcript Sequence Number=SeqID_30670
  Gene Ontology: Mol. function=phosphogluconate dehydrogenase (decarboxylating) activity; Cellular component=mitochondrion; Biological process=valine metabolic process
  Homolog annotation: Hit_ID=B6SHU3; Match level="QueryCoverage=83%, HitCoverage=21%, E-value=5e-35, Identity=93%"; Hit description=3 -hydroxyisobutyrate dehydrogenase
ASPFPVRSEHFLVWRGSGWRVGSKVQRWGRSCLRGFSSHAIPSQLENVGFIGLGNMGSHMARNLITAGYKVTVHDINENSMKKFSDDGIP

SEQ ID NO: 96645 - protein, 229 aa, Setaria italica
  misc_feature (39)..(39): Xaa can be any naturally occurring amino acid
  misc_feature (45)..(45): Xaa can be any naturally occurring amino acid
  misc_feature (114)..(114): Xaa can be any naturally occurring amino acid
  misc_feature (133)..(133): Xaa can be any naturally occurring amino acid
  Transcript Sequence Number=SeqID_30671
  Gene Ontology: Mol. function=aspartic-type endopeptidase activity; Cellular component=chromatin; Biological process=RNA-dependent DNA replication
  Homolog annotation: Hit_ID=Q8SA93; Match level="QueryCoverage=81%, HitCoverage=6%, E-value=1e-39, Identity=43%"; Hit description =Putative polyprotein
GSCPTARCSDQLRWKHTQNGVYSSKSAYAAFFVGTIKFXSLEENXKSRAPLRCKFFIWLAINNRCWTTDHLAKRGLPHPEVCPFCDQEEETIQHLLVGCVFTRQIWTLILQPYXLTALIPSPSEARFSCRWRXLRSIPKEIRKGLNSLIILVSWEVWKHRNSCVFENARPSTSLLLQTVADESSVWGMAGAKKKPPGTPSEVAGPISLGQGVFGRGHAWCCGVPVSFAV

SEQ ID NO: 96646 - protein, 146 aa, Setaria italica
  Transcript Sequence Number=SeqID_30672
  Gene Ontology: Mol. function=phosphogluconate dehydrogenase (decarboxylating) activity; Cellular component=mitochondrion; Biological process=valine metabolic process
  Homolog annotation: Hit_ID=B6SHU3; Match level="QueryCoverage=99%, HitCoverage=42%, E-value=6e-75, Identity=91%"; Hit description=3 -hydroxyisobutyrate dehydrogenase
NGKRAIYCGGAGNGSAAKICNNMAMAISMLGVSEAFALGQNLGIKASTLTDIFNCSSARCWSSDTYNPVPGVMEGVPSSRNYDGGFTSKLMAKDLDLAMASASGVGFKCPLGSEALEIYRKLSKDGCELKDFSCAFRHYYAGKDEE

SEQ ID NO: 96647 - protein, 293 aa, Setaria italica
  misc_feature (123)..(123): Xaa can be any naturally occurring amino acid
  Transcript Sequence Number=SeqID_30673
  Gene Ontology: Mol. function=phosphogluconate dehydrogenase (decarboxylating) activity; Cellular component=mitochondrion; Biological process=valine metabolic process
  Homolog annotation: Hit_ID=B6SHU3; Match level="QueryCoverage=94%, HitCoverage=80%, E-value=1e-143, Identity=89%"; Hit description=3 -hydroxyisobutyrate dehydrogenase
  Pfam annotation: Domain name=F420_oxidored; Domain location=7-185; Score=-27.7; E_value=0.00053; Accession=PF03807.9; Description=NADP oxidoreductase coenzyme F420-dependent
  Pfam annotation: Domain name=NAD_binding_2; Domain location=5-180; Score=177.3; E_value=4.4e-50; Accession=PF03446.7; Description=NAD binding domain of 6-phosphogluconate dehydrogenase
  Pfam module annotation: Pfam domain module=F420_oxidored::NAD_binding_ 2; Domain location=7-185::5-180
VAGAFQNVGFIGLGNMGSHMARNLITAGYKVTVHDINENSMKKFSDDGIPTKQSPLEVSESSDVVITMLPSSSHVLEVYNGTNGLLGAGSRLGPWLYIDSSTVDPQTSRKISAAISRCHLKEXKGYAENPMILDAPVSGGVPAAEAGKLTFMVGGLEEAYLAAKPLLLSMGKRAIYCGGAGNGSAAKICNNMAMAISMLGVSEAFALGQNLGIKASTLTDIFNCSSARCWSSDTYNPVPGVMEGVPSSRNYDGGFTSKLMAKDLDLAMASASGFHLQIDGIVTINSLLDRNLL

SEQ ID NO: 96648 - protein, 64 aa, Setaria italica
  Transcript Sequence Number=SeqID_30674
LYLPYGFVTPLSERGVCVVKVCVLAACLRRPYLISLLFGILFYYLFWLFRIPLKNLRQVRKLVT

SEQ ID NO: 96649 - protein, 48 aa, Setaria italica
  Transcript Sequence Number=SeqID_30675
SSSLVVRWCLLDSHCLCHKLLGGMDKLSIARSMGPTLHSPETLILTLD

SEQ ID NO: 96650 - protein, 197 aa, Setaria italica
  Transcript Sequence Number=SeqID_30676
  Gene Ontology: Mol. function=phosphoribosylformylglycinamidine synthase activity; Cellular component=chloroplast; Biological process='de novo' IMP biosynthetic process
  Homolog annotation: Hit_ID=B9SDY9; Match level="QueryCoverage=65%, HitCoverage=9%, E-value=8e-28, Identity=49%"; Hit description =Phosphoribosylformylglycinamidine synthase, putative
  Subcellular localization annotation: CTP_CleavageSite=55; ConfidenceScore=5.10e-01
MASPGQMMASNLLRTEGFPGNMGKKSGLIAARSLGSRRLRMTRHCFHQQHLCWPRALRVAVHNIRLSSCPGAVVSKGFDSPLVENSDTALDVGIIHLYRIPFLQESETMELLRKVKAKVSANIVDIMTEQCFNVQLDNPLTPEKLSTLHWLLAETYEPEKLQTRSFLEEEVSGSSCTVIVEVGPRMAFSTAFSSNLI

SEQ ID NO: 96651 - protein, 86 aa, Setaria italica
  Transcript Sequence Number=SeqID_30677
  Gene Ontology: Mol. function=transferase activity; Cellular component= endoplasmic reticulum membrane; Biological process=metabolic process
  Homolog annotation: Hit_ID=B6SHC0; Match level="QueryCoverage=100%, HitCoverage=28%, E-value=7e-38, Identity=87%"; Hit description =Dehydrodolichyl diphosphate synthase 6
VKYITVYAFSIDNFKRDPIEVQLLMELMEEKINELLDNQSVIHKMNCKINFWGNLDLMCEPVRLGAQKLMASTAGNTGLVFSICMP

SEQ ID NO: 96652 - protein, 211 aa, Setaria italica
  Transcript Sequence Number=SeqID_30678
  Homolog annotation: Hit_ID=Q53P84; Match level="QueryCoverage=94%, HitCoverage=17%, E-value=2e-69, Identity=67%"; Hit description=FHA domain containing protein, expressed
KNLIVDADQDQEAFCSDKENMTPQSSAARKTRDMSENRARVESAITKKRVADRLPFQTLLSNSPLGPVSSLDCNCVVPRTADIAAGDLAIKLEDKLNNLALHKQESGRAGQRMKSWTMVANTDSLLDDESRKSIMLLKGIKGTHLFVPRIVIRELDSMKQQEGLFRRSTKATSVLQWIEECMATESWWIHVQSSSEMLPVAPTPTFDFLSF

SEQ ID NO: 96653 - protein, 208 aa, Setaria italica
  misc_feature (77)..(77): Xaa can be any naturally occurring amino acid
  misc_feature (126)..(126): Xaa can be any naturally occurring amino acid
  Transcript Sequence Number=SeqID_30679
  Gene Ontology: Mol. function=hydrogen-translocating pyrophosphatase activity; Cellular component=membrane; Biological process=proton transport
  Homolog annotation: Hit_ID=Q56ZN6; Match level="QueryCoverage=85%, HitCoverage=22%, E-value=5e-86, Identity=89%"; Hit description =Pyrophosphate-energized membrane proton pump 2
  Pfam annotation: Domain name=H_PPase; Domain location=1-208; Score= -368.3; E_value=4.6e-10; Accession=PF03030.8; Description=Inorganic H+ pyrophosphatase
TLFFGQKLLYNHSVLNFQSTRWLLYTEQAPSAWLNFALCGLVGIITAYAFVWISKYYTDYKHEPVRLLALSSSTGHXGTNIIAGVSLGMESTALPVLVISVAIISAYWLGQTSGLVDDSGNPTGGXFGTAVATMGMLSTAGYVLTMDMFGPIADNAGGIVEMSQQPESVREITDVLDAVGNTTKATTKGFCPIWYSVGLTLVLSFPFL

SEQ ID NO: 96654 - protein, 799 aa, Setaria italica
  Transcript Sequence Number=SeqID_30680
  Gene Ontology: Mol. function=hydrogen-translocating pyrophosphatase activity; Cellular component=membrane; Biological process=proton transport
  Homolog annotation: Hit_ID=Q56ZN6; Match level="QueryCoverage=100%, HitCoverage=99%, E-value=0.0, Identity=79%"; Hit description =Pyrophosphate-energized membrane proton pump 2
  Pfam annotation: Domain name=7tm_1; Domain location=48-247; Score= -109.1; E_value=0.069; Accession=PF00001.13; Description=7 transmembrane receptor (rhodopsin family)
  Pfam annotation: Domain name=H_PPase; Domain location=61-795; Score =1540.3; E_value=0; Accession=PF03030.8; Description=Inorganic H+ pyrophosphatase
  Pfam module annotation: Pfam domain module=7tm_1::H_PPase; Domain location=48-247::61-795
MMEEDMENGRSYQERPRTFSTVRSKSSVPLVFRLLMRINPRALIILSLLVFSGVLYVGASTSPILVFVFCICTLSLFFSLYLTKWVLAKDEGPPEMSEISDAIRDGAEGFFRTQYGTISKMACILGFVILVIYLFRTTTPQQEASGIGRTTSAYITVASFLLGALCSGIAGFVGMWVSVRANVRVSSAARRSAREALQIAVRAGGFSAIVVVCMAVFGVAILYSTFYVWLGVDSPGSMKVTDLPLLLVGYGFGASFVALFAQLGGGIYTKAADVGADLVGKVEQGIPEDDPRNPAVIADLVGDNVGDCAARGADLFESIAAEIISAMILGGTMAQRCKIEDPSGFILFPLVVHSFDLVVSSVGILSIRGTRDSGLISPIEDPMSIMQKGYSITIMLAVLTFGVSTRWLLYTEQAPSAWLNFALCGLVGIITAYAFVWISKYYTDYKHEPVRLLALSSSTGHGTNIIAGVSLGMESTALPVLVISVAIISAYWLGQTSGLVDDSGNPTGGLFGTAVATMGMLSTAGYVLTMDMFGPIADNAGGIVEMSQQPESVREITDVLDAVGNTTKATTKGFAIGSAALASFLLFSAYMDEVASFAQLPFKEVDIAVPEIFVGGLLGSMLIFLFSAWACSAVGKTAQEVVNEVRRQFIERPGIMDYKEKPDYGRCVAIVASASLREMIRPGALAIISPMAVGVIFRILGYYTGQPLLGAKVVASMLMFATVSGILMALFLNTAGGAWDNAKKYIETGALGGKGSESHKAAVTGDTVGDPFKDTAGPSIHVLIKMLATITLVMAPIFL

SEQ ID NO: 96655 - protein, 117 aa, Setaria italica
  misc_feature (76)..(76): Xaa can be any naturally occurring amino acid
  Transcript Sequence Number=SeqID_30681
  Gene Ontology: Mol. function=aspartic-type endopeptidase activity; Cellular component=nucleus; Biological process=RNA-dependent DNA replication
  Homolog annotation: Hit_ID=Q2R0G5; Match level="QueryCoverage=100%, HitCoverage=5%, E-value=7e-25, Identity=49%"; Hit description =Retrotransposon protein, putative, unclassified
CCIPSTMHQYLVKWVSDNIEVVNADSAYSIAAADTQQWSCETVRCISGRVCETDFLKVTDFGLQPIRAVGSEDSDXMDQFAQEDGKLGHGFTSADSLEMIDLGDGTKPRLTYISANL

SEQ ID NO: 96656 - protein, 58 aa, Setaria italica
  Transcript Sequence Number=SeqID_30682
  Gene Ontology: Mol. function=electron carrier activity; Cellular component=extracellular region; Biological process=hydrogen peroxide catabolic process
  Homolog annotation: Hit_ID=Q7XN76; Match level="QueryCoverage=96%, HitCoverage=17%, E-value=2e-25, Identity=94%"; Hit description =OSJNBa0089N06.6 protein
PNLSLRGFGTIDRVKAKLEKACPGVVSCADILALVARDVVVLTKGPHWDVPTGRRDWG

SEQ ID NO: 96657 - protein, 114 aa, Setaria italica
  Transcript Sequence Number=SeqID_30683
  Gene Ontology: Mol. function=structural constituent of ribosome; Cellular component=ribonucleoprotein complex; Biological process =translation
  Homolog annotation: Hit_ID=A3BB28; Match level="QueryCoverage=100%, HitCoverage=30%, E-value=2e-55, Identity=89%"; Hit description =Ribosomal protein L15
SDPTNLQEIFHRMRTEGLTDYAIKMFDGLSKDGLTHEALALFAVIKDKGAMPDVVAHTAVLEAYVNAGPAHWRDAVRTYDRMLASGVKPNAYTLAVLVRGLSASDRCSEAGRYL

SEQ ID NO: 96658 - protein, 79 aa, Setaria italica
  Transcript Sequence Number=SeqID_30684
  Gene Ontology: Mol. function=transporter activity; Cellular component= membrane; Biological process=oligopeptide transport
  Homolog annotation: Hit_ID=B6SXM6; Match level="QueryCoverage=100%, HitCoverage=13%, E-value=7e-29, Identity=77%"; Hit description =Peptide transporter PTR2
MEVEAVESNALRGAADRRTSKRDRRVFWACIFILANNCFQYTAYFAVSTNLVNYLKDRLHVGSKAAANGVTNWLGTSSI

SEQ ID NO: 96659 - protein, 625 aa, Setaria italica
  misc_feature (91)..(91): Xaa can be any naturally occurring amino acid
  Transcript Sequence Number=SeqID_30685
  Gene Ontology: Mol. function=nucleic acid binding; Cellular component= intracellular; Biological process=regulation of transcription, DNA -dependent
  Homolog annotation: Hit_ID=B9RZ08; Match level="QueryCoverage=96%, HitCoverage=83%, E-value=1e-149, Identity=45%"; Hit description =Transcription factor, putative
  Pfam annotation: Domain name=JmjC; Domain location=61-184; Score =180.2; E_value=6e-51; Accession=PF02373.14; Description=JmjC domain
  Pfam annotation: Domain name=zf-C5HC2; Domain location=283-336; Score= 38.7; E_value=2.3e-08; Accession=PF02928.8; Description=C5HC2 zinc finger
  Pfam module annotation: Pfam domain module=JmjC::zf-C5HC2; Domain location=61-184::283-336
ISFWQRMESVEYACDIDGSAFSSSPDDQLGRSKWNLKRFSRLPNSTLRLLRAAVPGITDPMLYIGMLFSMFAWHVEDHYLYSINYHHCGAXKTWYGIPGSAASDFEKVVREHVYDHEILSGEGENAAFDVLLGKTTIFPPNILLHHHVPVYRAVQKPGEFVVTFPRAYHSGFSHGFNCGEAVNFAMGEWFPLGAVASQRYALLKRIPVLPYEELLCKETALVADEFPMSDHQDITLTGDAHTQSCMKAPFVQLMRFQHRVRWLLVKMGARTHYKADIDATVLCGICKRDCYVAHIMCNCRADAICLCHEDEIRKCPCSCDRVIFVRKDIFELEALSKKFEEEVGILDEVGSRMSQSDGSSTHSYLFDGIDHNAKYFPYCKIQIDASPEIHTFSERDVLGYDLNKPYPTASTITFAHGPHDYSTQSDECTSSNPRTFSSSYPENGTINAYPLSIPDQAFSSDKLAAQDSDDSDYEVFRVKRRSGIVLEKRCSEDVTTNLTENQVLRRLKKARSDGRQEKRATEVSCGTRSDSMRIESHCVDSVSGNRESLINGTKLKMIHQLDVTIVEDDVGFSQKSNYCSYLSPSVDLGPKRLKIRGPSFPSTISEVEISYRFQEDSDLASHHTQ

SEQ ID NO: 96660 - protein, 185 aa, Setaria italica
  Transcript Sequence Number=SeqID_30686
  Gene Ontology: Mol. function=transferase activity; Cellular component= cytoplasm; Biological process=response to stress
  Homolog annotation: Hit_ID=B6TXQ4; Match level="QueryCoverage=91%, HitCoverage=52%, E-value=1e-66, Identity=77%"; Hit description =Glutathione S-transferase, C-terminal domain containing protein
  Pfam annotation: Domain name=GST_N; Domain location=2-77; Score=44.2; E_value=5.1e-10; Accession=PF02798.12; Description=Glutathione S -transferase, N-terminal domain
MASVKVFGSPTSAEVARVLMCLFEKDVEFQLIRVDAYRGPKRMPQYLKLQPHGEALTFEDENTTLSESRGILRHISHKYAKQGNPDLIGTGALERASIEQWLQTEAQSFDAPSAEMVYSLALLPPNLPKQQNDNGSGFNNGSGSGFNNSGRERDVGNASAGSKQRSPAGWPAANQNQNQQQAKHQ

SEQ ID NO: 96661 - protein, 104 aa, Setaria italica
  Transcript Sequence Number=SeqID_30687
  Subcellular localization annotation: CTP_CleavageSite=47; ConfidenceScore=5.08e-01
AMDSAADAKRTTTARRTSASRPGRSHSPAAVAPVLAILISVPRECYCCAHPAELGMHCRSASDPAGGCSARPGRRDRWLVGAVHVGSRIDQSIGRSRLVVRARS

SEQ ID NO: 96662 - protein, 288 aa, Setaria italica
  Transcript Sequence Number=SeqID_30688
  Gene Ontology: Mol. function=transporter activity; Cellular component= membrane; Biological process=oligopeptide transport
  Homolog annotation: Hit_ID=B9S1I2; Match level="QueryCoverage=92%, HitCoverage=44%, E-value=8e-84, Identity=57%"; Hit description =Peptide transporter, putative
  Pfam annotation: Domain name=PTR2; Domain location=1-197; Score= -102.5; E_value=0.019; Accession=PF00854.13; Description=POT family
RAARADTDSKLGKRDPWKLCTVTQVEEVKSILRLLPIWLCTILYSVVFTQMASLFVVQGAAMRRTTPFAGFSVPPSSMSAFDILTVAATIFLYRRAICPFLARLTGRPSGPTELQRMGLGLVVGALAMATAGTVEHFRKAGATAAMSSDLHIMWQVPQYSLIGVSEVMMYVGQLEFFNDQMPDGLKSFGSALCMMSMSLGNYFSDVIVSAVTRVTTTRGRAGWIPADLNEGHLDRFYFLLAIIAVADFAVYLVCASRYGSGKVDGRSSDDEEEGTAGQVEIPSAERMT

SEQ ID NO: 96663 - protein, 78 aa, Setaria italica
  Transcript Sequence Number=SeqID_30689
  Homolog annotation: Hit_ID=Q2R482; Match level="QueryCoverage=66%, HitCoverage=6%, E-value=1e-12, Identity=84%"; Hit description=DNA replication licensing factor MCM2, putative, expressed
MDDSENNAPSTPGSPGFSTDRLPPNTTTSRGATDPSSYSDDDGEAEVDPHVLPEDDDPAAAAPADEEDEEGEDLFNDN

SEQ ID NO: 96664 - protein, 51 aa, Setaria italica
  Transcript Sequence Number=SeqID_30690
ARRRRHQSRTPLHSHSHSHSRAFSVRAQPLSLPLLEFVLVQLWWIVVDCRR

SEQ ID NO: 96665 - protein, 82 aa, Setaria italica
  Transcript Sequence Number=SeqID_30691
LNLNEIECVRLLVDANREWVLYGREPLEIYRLAAGLWYMERRDLITSLYILLRSVALDQGLDADLMSEIEEQMQPLFNDGLR

SEQ ID NO: 96666 - protein, 104 aa, Setaria italica
  misc_feature (61)..(61): Xaa can be any naturally occurring amino acid
  Transcript Sequence Number=SeqID_30692
MHVSLSHFILQCSFARKVWERIRVWSDNLVRVLVQDLSAEDCWNNARTRPTYRNKFEGAKXAVLMYTAWNIWKDRNRRKFEDRAMTAAQVEQETEAEIAITRLA

SEQ ID NO: 96667 - protein, 206 aa, Setaria italica
  misc_feature (173)..(173): Xaa can be any naturally occurring amino acid
  misc_feature (176)..(176): Xaa can be any naturally occurring amino acid
  Transcript Sequence Number=SeqID_30693
  Gene Ontology: Mol. function=transferase activity, transferring groups other than amino-acyl groups
  Homolog annotation: Hit_ID=B6SRZ2; Match level="QueryCoverage=98%, HitCoverage=48%, E-value=4e-37, Identity=44%"; Hit description =Anthranilate N-benzoyltransferase protein 1
  Pfam annotation: Domain name=Transferase; Domain location=2-206; Score=-139.0; E_value=0.00037; Accession=PF02458.7; Description =Transferase family
MATVERLTTELVVPAEETPAGAVWLSNLDLAARRGYTPTVYFYRANGRPEFFEAGAVRDSLARALVAFYPLAGRLGADAATGRVQIDCTGEGAVFVSARSADTALDDLLSEFVPCDEMRALFVPPTPAPNPPCPLLFAQLTRLRCGGVVLGLALHHSVVDARSAAHFVETWAXIAXGGGDAAPLPPCFDHRLLSARPAPTVLYDHP

SEQ ID NO: 96668 - protein, 141 aa, Setaria italica
  Transcript Sequence Number=SeqID_30694
  Gene Ontology: Mol. function=nucleotide binding; Biological process =defense response
  Homolog annotation: Hit_ID=Q10HQ9; Match level="QueryCoverage=45%, HitCoverage=6%, E-value=3e-13, Identity=59%"; Hit description=NB-ARC domain containing protein
IKDSNELRVLPQKLPSHLKKLVIINCEKVIRLPAVPCLTHLVLKGNIDEETLSCLHFPLLRTLKVCFLRKAEEVKLENLPKLEGLAITGCKRLFSIDGLCSVESLGILNIKDCPNLQLPLKPLPQKVQQSTVTNCPQLQEW

SEQ ID NO: 96669 - protein, 162 aa, Setaria italica
  Transcript Sequence Number=SeqID_30695
  Subcellular localization annotation: CTP_CleavageSite=40; ConfidenceScore=5.06e-01
MRAAPTDPSTAPAPAPARSMLKRLFDRQLLRISPAERLPSAAAAGEKDEAEPSSVCLDGMVRSFLEDGVGAGAEKPGHGGRYCNCFHGGDNSDDEEDEEAAAAASDVAETIKGVAYCLGFNNFGGRWPPSRAQEVISNRLAPPSPGPRPLTTNDYRETTNLT

SEQ ID NO: 96670 - protein, 135 aa, Setaria italica
  Transcript Sequence Number=SeqID_30696
  Gene Ontology: Mol. function=sequence-specific DNA binding; Cellular component=nucleus; Biological process=regulation of transcription, DNA-dependent
  Homolog annotation: Hit_ID=Q6IEP4; Match level="QueryCoverage=100%, HitCoverage=30%, E-value=4e-26, Identity=55%"; Hit description=WRKY transcription factor 37
MEGDQAGGDLTDIVRAGGAMPGSAEVPSTAAEWQLQGEPTMLFPPPPSSSDGCAGGAGGGADVFGDPFAGLGDPFSSDYASGADFLDAMPDAMAKVGFDTAVGGSGGGGGGGGQLMDMSRKPFLPRGLQQMPAVG

SEQ ID NO: 96671 - protein, 473 aa, Setaria italica
  Transcript Sequence Number=SeqID_30697
  Gene Ontology: Mol. function=glutamate-1-semialdehyde 2,1-aminomutase activity; Cellular component=chloroplast; Biological process =tetrapyrrole biosynthetic process
  Homolog annotation: Hit_ID=Q6YZE2; Match level="QueryCoverage=94%, HitCoverage=93%, E-value=0.0, Identity=93%"; Hit description =Glutamate-1-semialdehyde 2,1-aminomutase, chloroplastic
  Pfam annotation: Domain name=Aminotran_3; Domain location=83-409; Score=246.3; E_value=7.2e-71; Accession=PF00202.13; Description =Aminotransferase class-III
  Subcellular localization annotation: CTP_CleavageSite=35; ConfidenceScore=5.34e-01
MAGAAAAAVASGISARPSAPRRALAGHRARPSVVRAAISVEKGEKAYTVQKSEEIFNAAKELMPGGVNSPVRAFKSVGGQPIVFDSVKGSRMWDVDGNEYIDYVGSWGPAIIGHADDKVNAALIETLKKGTSFGAPCLLENVLAEMVIAAVPSVEMVRFVNSGTEACMGALRLVRAFTGREKIIKFEGCYHGHADSFLVKAGSGVATLGLPDSPGVPKGATCETLTAAYNDAEAVKKLFEDNKGEIAAVFLEPVVGNAGFIPPQPGFLNALRDLTKQNGALLVFDEVMTGFRLAYGGAQEYFGITPDVTTMGKVIGGGLPVGAYGGRREIMEMVAPAGPMYQAGTLSGNPLAMTAGIHTLKRLMEPGTYEYLDKITGDLVRGILDAGAKTGHEMCGGHIRGMFGVFFTGGPVHNFADAKKSDTEKFGRFYRGMLEEGVYLAPSQFEAGFTSLAHTSQDIEKTIEAAEKVLKRI

SEQ ID NO: 96672 - protein, 165 aa, Setaria italica
  Transcript Sequence Number=SeqID_30698
  Gene Ontology: Mol. function=protein serine/threonine phosphatase activity; Cellular component=protein serine/threonine phosphatase complex; Biological process=protein amino acid dephosphorylation
  Homolog annotation: Hit_ID=A3A8W2; Match level="QueryCoverage=97%, HitCoverage=43%, E-value=1e-38, Identity=50%"; Hit description =Probable protein phosphatase 2C 21
  Pfam annotation: Domain name=PP2C; Domain location=1-165; Score= -11.8; E_value=3.3e-05; Accession=PF00481.13; Description=Protein phosphatase 2C
  Subcellular localization annotation: CTP_CleavageSite=27; ConfidenceScore=5.12e-01
TTNLGCSATVAVARGSRVTVGNVGSCRCVASRNGQAIQLSTDHIPRNRGERRRIQRAGGTLELDKYVAVEALRGPGYRAYRGILATSRAIGSFVFKQNKNLPPEEQLVICNPDIHSMEITDDVEFLVIANCGVWLYMTSQGVVDFVHEQLGSGETDLRVICQRLV

SEQ ID NO: 96673 - protein, 230 aa, Setaria italica
  Transcript Sequence Number=SeqID_30699
  Gene Ontology: Mol. function=aspartate-tRNA ligase activity; Cellular component=cytoplasm; Biological process=tRNA aminoacylation for protein translation
  Homolog annotation: Hit_ID=B9SBT1; Match level="QueryCoverage=96%, HitCoverage=41%, E-value=8e-92, Identity=71%"; Hit description =Aspartyl-tRNA synthetase, putative
  Pfam annotation: Domain name=tRNA-synt_2; Domain location=87-230; Score=-84.9; E_value=1.7e-07; Accession=PF00152.12; Description=tRNA synthetases class II (D, K and N)
VSGGDGGMARFAAGLSRESVVDVAGVVSLPREPVRGTTQQLVEIQVEKLHCISRAVPNLPISVAAAARSKEDVARAKAAGEQLVHVGQDKRLDYRVIDLRTAANQAIFRVQCQVENVFRQVLLSEGFVGIHTPKLIGGSSEGGAAVFKLDYNGQPACLAQSPQLHKQMAVCGGFERVFEVGPVFRAESSDTHRHLCEFVGLDVEMALRDHYSEVCDVVDRLFVAMFDHLN

SEQ ID NO: 96674 - protein, 103 aa, Setaria italica
  Transcript Sequence Number=SeqID_30700
  Subcellular localization annotation: CTP_CleavageSite=35; ConfidenceScore=5.46e-01
SSHQLIFFVQIKFYVTISFVTSCNTSSQLILWRNRAERVSVKSARISTPGQRDRGRGRAQPRGRLQEERDSLCADGVPRSGGRRRGGGRGWEWSVAGGRSASK

SEQ ID NO: 96675 - protein, 106 aa, Setaria italica
  Transcript Sequence Number=SeqID_30701
  Gene Ontology: Mol. function=binding
  Homolog annotation: Hit_ID=B9SFB9; Match level="QueryCoverage=99%, HitCoverage=18%, E-value=7e-10, Identity=33%"; Hit description =Ubiquitin-protein ligase, putative
  Pfam annotation: Domain name=Arm; Domain location=64-106; Score=23.2; E_value=0.0011; Accession=PF00514.15; Description=Armadillobeta -catenin-like repeat
RLDEVYASGALTRARALVVPRPGAGATRDDVRFYVRDLFARLRAGGAEMRREAAAALGEALRDDEKCVRVVASDVPDGVGVLVSLLECPDPRVQEEALEAVSVIAG

SEQ ID NO: 96676 - protein, 45 aa, Setaria italica
  Transcript Sequence Number=SeqID_30702
PTLLLAHTIEDSQSPCTHKQLHIQNSAQIYTSVSSHDKEFIKNPL

SEQ ID NO: 96677 - protein, 470 aa, Setaria italica
  Transcript Sequence Number=SeqID_30703
  Gene Ontology: Mol. function=catalytic activity; Cellular component =cytoplasm; Biological process=metabolic process
  Homolog annotation: Hit_ID=B8XVQ4; Match level="QueryCoverage=100%, HitCoverage=78%, E-value=0.0, Identity=75%"; Hit description =Autophagy-related 7
  Pfam annotation: Domain name=ThiF; Domain location=354-467; Score =28.9; E_value=1.2e-08; Accession=PF00899.13; Description=ThiF family
MAGAGAAGFPRQLLVEAIECLADEGFWDALRRLKLEVLGIDDFLIPITGYYAPCQFHQASLFNLRSESLVPPSHNPVGDRNSCPILGTLINTNNMRGFQDLDRELLLKTEAKKILHDIVSGKVEEDPALLLRFLVISFADLKNWKIYYNVAFPSLVFNSTLLSLQVASEVLSNEEVESLKIALQEWRASTETTVIPFFLVTISSDSSASIRQLKDWKTCQGKYQKLLFGFYDHGRRPDCPGWAIRNYIAFLSIRWKIEKVQFFCYREFQGNPDLVQSLIGEASFPSPSGWDDPDHVPDAFGWEGVKPGKGTKDMKPKELDIQSSNPASQDEEKQLMHLKLMGWRHFPVNIDKLSQVRVLVLGAGTLGCEVARLLMTWGVRKLTVVDSGSVAMSDLVKQSLYIDKDCGVPRATAIVPHLKSRCPAVEVEGIQMEIPVPGHPYSPSKMAGVLDDCKHLQTLVAANDASFLVN

SEQ ID NO: 96678 - protein, 259 aa, Setaria italica
  misc_feature (259)..(259): Xaa can be any naturally occurring amino acid
  Transcript Sequence Number=SeqID_30704
  Pfam annotation: Domain name=DUF1645; Domain location=77-258; Score= -26.4; E_value=0.0018; Accession=PF07816.3; Description=Protein of unknown function (DUF1645)
GNGGDGEEDDDGDEEFQPRGSYATGGSSVPFDWEERPGTPKRGLGGGAAANEAAWDTDFEFGTIADKAAPAETLTTADELFEEGKIRPLKPRLKTAEEPKVRPLKPPPGLLDGGSVASSPRSPMARGGMRSPRRRSRVGSGVDFDPFAAALLEATKAPSPLGGKEANGGVAPGSPPKKLATRPASRSTGWRRWRLSDLLLFRSSSDGAGANNKQEPIFKPAQQFDAPVKKAFAQPAMTIKAGGKGDDMGKANKHGNRRX

SEQ ID NO: 96679 - protein, 134 aa, Setaria italica
  misc_feature (10)..(10): Xaa can be any naturally occurring amino acid
  Transcript Sequence Number=SeqID_30705
  Gene Ontology: Cellular component=integral to membrane
  Homolog annotation: Hit_ID=B6T959; Match level="QueryCoverage=90%, HitCoverage=64%, E-value=9e-48, Identity=76%"; Hit description =UPF0497 membrane protein 2
  Pfam annotation: Domain name=DUF588; Domain location=1-125; Score =143.1; E_value=8.8e-40; Accession=PF04535.4; Description=Domain of unknown function (DUF588)
MGTTNETLPXFTQFIRFKAQYSDLPTLTFFVIANSIVCAYLILSLPLSIVHIIRSRAKFSRLLLIFLDAAMLALVTAGASAAAAIVYLAHKGNVRANWLAICQQFDSFCERISGSLIGSFGAMVLLILLILLCD

SEQ ID NO: 96680 - protein, 115 aa, Setaria italica
  Transcript Sequence Number=SeqID_30706
  Gene Ontology: Mol. function=drug transporter activity; Cellular component=membrane; Biological process=multidrug transport
  Homolog annotation: Hit_ID=Q10A00; Match level="QueryCoverage=100%, HitCoverage=23%, E-value=7e-29, Identity=55%"; Hit description=MATE efflux family protein, expressed
  Subcellular localization annotation: CTP_CleavageSite=42; ConfidenceScore=5.16e-01
FLQTQNLVVPVMLSSGATALCHPAVCWLLVRGLGLGRNGAALANGVSYLANLTFLALYVRLSPSCKATWTGFSAEAFRGVTEFLKLAVPSAVMVCMEWWSFELLVLLSGLLPEPK

SEQ ID NO: 96681 - protein, 237 aa, Setaria italica
  Transcript Sequence Number=SeqID_30707
  Homolog annotation: Hit_ID=Q9MAC0; Match level="QueryCoverage=97%, HitCoverage=51%, E-value=3e-98, Identity=78%"; Hit description =T4P13.26 protein
PTGPPEIEQKVLSSPEVGIGPYVEVAFYHKPSKTLLVTDAVIFVPRQPPECISKESLLASAKNGLAVKILSKGKEVPDEPVVDNKLNRQKGWERMVLQILFLGPSNLLEPNASFAQMSQKLIVSPIVKTLVFSKVPEKVRDWVDRIAADWQFRRIIPCHFAAPINVSRSDFLAAFAFLDEFLPDRPAPAPGLSLLFASFMGKAASYFPPDDMKTLSSLECLMVSVGAVKKTVSGRKR

SEQ ID NO: 96682 - protein, 417 aa, Setaria italica
  Transcript Sequence Number=SeqID_30708
  Gene Ontology: Cellular component=integral to membrane
  Homolog annotation: Hit_ID=P92961; Match level="QueryCoverage=98%, HitCoverage=92%, E-value=8e-81, Identity=40%"; Hit description =Proline transporter 1
  Pfam annotation: Domain name=Aa_trans; Domain location=6-402; Score =185.2; E_value=1.9e-52; Accession=PF01490.10; Description =Transmembrane amino acid transporter protein
WRCCLVTDSWQQVGLLLVIGFNCAYVLSFSNLMMAPLGWGWGVACLLLVGAAAWYANWLLAGLHFVDGQRFIRYRDLMGFVFGRKMYYITYFLQFATLLLCNMGFILLGARALKAINVEFTHSPARLQWFITATGIIYFAFAYFVPTISAMRNWLATSAALTLAYDVALLAILIRDGKSNNNQKDFSVHGSPSEKVFNALGAVAAILVCNTSGLLPEIQSTVREPSVRGMRRALLLQYTAGAAGYYGISVAGYWAYGSAVSEYLPNQLGGPRWAVVLINAAAFLQSVVSQHLFVVPIHEAMDTQLQRLDEGMFSRYNLTRRFFARGLIFGFNVFVTALFPFMGDFVNLVGSFSLVPLTFMFPSMVILKIKGKSGGRWSRLWHWGVIVFSTLLCVATTASAVRLIFNNARIYRFFADT

SEQ ID NO: 96683 - protein, 82 aa, Setaria italica
  Transcript Sequence Number=SeqID_30709
AKTPHPQQPVFNFITMLHGCYHCTREGSTTMNLNNHLAKYGKSEKMILRRIKWTRHKISHGTLSTSSSRYLKFLNFILYFCK

SEQ ID NO: 96684 - protein, 124 aa, Setaria italica
  misc_feature (1)..(1): Xaa can be any naturally occurring amino acid
  misc_feature (119)..(119): Xaa can be any naturally occurring amino acid
  Transcript Sequence Number=SeqID_30710
  Gene Ontology: Mol. function=hydrolase activity
  Subcellular localization annotation: CTP_CleavageSite=2; ConfidenceScore=5.38e-01
XRARAYAAISRVRTTTVPAVASWLHLRNTHGVLLMVVLFALFLRKLSGARSRAALARRRSLCEKAMRHAGTYEEWVRAAKVLDKMSEQVHEADFYDEELIRSRLEELRRRREDRSLRDXVVFCM

SEQ ID NO: 96685 - protein, 37 aa, Setaria italica
  Transcript Sequence Number=SeqID_30711
MSAPLDRLARPCFEGPSSHDERKERKSDVGNSEEDRK

SEQ ID NO: 96686 - protein, 265 aa, Setaria italica
  Transcript Sequence Number=SeqID_30712
  Gene Ontology: Mol. function=RNA binding; Cellular component =chloroplast
  Homolog annotation: Hit_ID=Q208U9; Match level="QueryCoverage=99%, HitCoverage=78%, E-value=1e-119, Identity=81%"; Hit description=CFM6
  Pfam annotation: Domain name=CRS1_YhbY; Domain location=101-185; Score=113.0; E_value=1e-30; Accession=PF01985.13; Description=CRS1 YhbY domain
VRLDTEGGFARFAIGDTDSAKQKGKQRQQPLKKKKMSRKAKVNQLKWYRLKAKKKMKSPNPEVRIRYKLEKAKRKEEWLIEKLRKYDLPRTPEPVHDPEILTEEEKFYLKRTGERKKNYVPVGRRGVFGGVVLNMHLHWKKHETVKVVCKPCRPGQVYEYAEELTRLSKGTVIDIKPDNTIIFYRGKNYVQPKVMSPPDTLSKQKALEKYRYEQSLEHTSQFIEKLEKELEDYQKHVALFKNREGATPVDEETTVDDPTSTSYSE

SEQ ID NO: 96687 - protein, 156 aa, Setaria italica
  Transcript Sequence Number=SeqID_30713
  Gene Ontology: Mol. function=serine-type carboxypeptidase activity; Cellular component=extracellular region; Biological process =proteolysis
  Homolog annotation: Hit_ID=B6T4S1; Match level="QueryCoverage=96%, HitCoverage=30%, E-value=2e-69, Identity=82%"; Hit description=SCPL33
FTNWFGNPLTDDYYDSKGLAEYAWSHSVVSDEVYERIKKVCDFRISNWTDDCDKAMSTVFSQYHEIDIYNIYAPRCNLPQSSAAVAGDQELAVNDQEHFRRRIRMFSGYDACYSSYAEKYFNKADVQRAFHANVTGTRKWQVCSDSILRHTNFSVL

SEQ ID NO: 96688 - protein, 58 aa, Setaria italica
  Transcript Sequence Number=SeqID_30714
MHLWPSLRIRDSFKHGYLQKLELNLGHMKRAQRGQGQKGEGQDDQDGQAGDGEGAAAP

SEQ ID NO: 96689 - protein, 94 aa, Setaria italica
  Transcript Sequence Number=SeqID_30715
  Gene Ontology: Mol. function=triose-phosphate isomerase activity; Cellular component=cytoplasm; Biological process=fatty acid biosynthetic process
  Homolog annotation: Hit_ID=B4FY90; Match level="QueryCoverage=73%, HitCoverage=44%, E-value=1e-26, Identity=82%"; Hit description =Triosephosphate isomerase
  Pfam annotation: Domain name=TIM; Domain location=2-81; Score=-114.9; E_value=0.0015; Accession=PF00121.10; Description=Triosephosphate isomerase
MWKFRLKGCNACCFTEKIKDWSNVVVAYEPVWAIGTGKVATPDQAQEVHASLRDWLKINVSPEVSESTRIIYGGIHFLSSCLTNVHQLLNLFGT

SEQ ID NO: 96690 - protein, 133 aa, Setaria italica
  misc_feature (10)..(10): Xaa can be any naturally occurring amino acid
  misc_feature (60)..(60): Xaa can be any naturally occurring amino acid
  Transcript Sequence Number=SeqID_30716
  Gene Ontology: Mol. function=triose-phosphate isomerase activity; Cellular component=cytoplasm; Biological process=fatty acid biosynthetic process
  Homolog annotation: Hit_ID=P12863; Match level="QueryCoverage=100%, HitCoverage=52%, E-value=7e-65, Identity=93%"; Hit description =Triosephosphate isomerase, cytosolic
  Pfam annotation: Domain name=TIM; Domain location=1-125; Score=57.7; E_value=2.6e-14; Accession=PF00121.10; Description=Triosephosphate isomerase
QGLKVIACVXDLEQREAGSTMDVVAAQTKAIAEKIKDWSNVVVAYEPVWAIGTGKVATPXQAQEVHASLRDWLKINVSPEVSESTRIIYGGSVTAANCKELAAKPDVDGFLVGGASLKPEFIDIINSATVKSA

SEQ ID NO: 96691 - protein, 296 aa, Setaria italica
  misc_feature (76)..(76): Xaa can be any naturally occurring amino acid
  Transcript Sequence Number=SeqID_30717
  Gene Ontology: Mol. function=triose-phosphate isomerase activity; Cellular component=cytoplasm; Biological process=fatty acid biosynthetic process
  Homolog annotation: Hit_ID=P12863; Match level="QueryCoverage=85%, HitCoverage=100%, E-value=1e-127, Identity=89%"; Hit description =Triosephosphate isomerase, cytosolic
  Pfam annotation: Domain name=TIM; Domain location=48-288; Score =438.5; E_value=1.1e-128; Accession=PF00121.10; Description =Triosephosphate isomerase
MTQGTPRLTSISALTPQEAKSNLEAPQVPIQPSSSFRTQHLVEMGRKFFVGGNWKCNGTADQVDKIVKTLNEGQVXPPDVVEVVVSPPYVFLPVVKSQLRPEFQVAAQNCWVKKGGAFTGEVSAEMLVNLGVPWVILGHSERRALLGESNEFVGDKVAYALSQGLKVIACVGETLEQREAGSTMDVVAAQTKAIAEKIKDWSNVVVAYEPVWAIGTGKVATPDQAQEVHASLRDWLKINVSPEVSESTRIIYGGSVTAANCKELAAKPDVDGFLVGGASLKPEFIDIINSATVKSA

SEQ ID NO: 96692 - protein, 66 aa, Setaria italica
  Transcript Sequence Number=SeqID_30718
LHSSRQTNALLLRDRLNVAKRSASLVEPLAQLYIQPTREPSDLHKLATPTQQLRVQKHLISQLKAE

SEQ ID NO: 96693 - protein, 90 aa, Setaria italica
  Transcript Sequence Number=SeqID_30719
  Gene Ontology: Mol. function=agmatine deiminase activity; Biological process=polyamine biosynthetic process
  Homolog annotation: Hit_ID=B6TJ57; Match level="QueryCoverage=93%, HitCoverage=22%, E-value=6e-36, Identity=83%"; Hit description =Agmatine deiminase
  Pfam annotation: Domain name=PAD_porph; Domain location=1-86; Score= -189.6; E_value=0.0029; Accession=PF04371.7; Description =Porphyromonas-type peptidyl-arginine deiminase
TERTFTTTNKGNAVAREPGTRLAASYVNFYIANGGIVAPSFGDKWDEEAYKVLQKAFPDREVVMVEGGREIALGGGNVHCITQQQPVRPS

SEQ ID NO: 96694 - protein, 35 aa, Setaria italica
  Transcript Sequence Number=SeqID_30720
KFSQTEKHIAMIGRLKSSLPLDLLYFFKNYPPISL

SEQ ID NO: 96695 - protein, 80 aa, Setaria italica
  Transcript Sequence Number=SeqID_30721
MTESRDPPTGCAMFGIYSGMFRRRRSASMTSLHRINATEAEAAAPAAQANPAHRKAAAVPHDSSLVRRPSALPVPAQNGA

SEQ ID NO: 96696 - protein, 51 aa, Setaria italica
  Transcript Sequence Number=SeqID_30722
SIYIIEFRLLEHESTIDGLGSKFQQNLHEPEKIIYASREQSFGSLNSVCSW

SEQ ID NO: 96697 - protein, 80 aa, Setaria italica
  misc_feature (51)..(51): Xaa can be any naturally occurring amino acid
  Transcript Sequence Number=SeqID_30723
MAAKLAVLTVLALLGSVSCQSGYGGYGYGDGNPTPPPPPTYPPTPSPTHLXPPTPSPPTYPPTPSPPTYPPTPTPLPPLF

SEQ ID NO: 96698 - protein, 43 aa, Setaria italica
  Transcript Sequence Number=SeqID_30724
  Pfam annotation: Domain name=WD40; Domain location=5-43; Score=18.6; E_value=0.027; Accession=PF00400.24; Description=WD domain, G-beta repeat
KCWLKNTMTLNNAHEGLIAALAACSATGKVASVSHDRFVKLWK

SEQ ID NO: 96699 - protein, 210 aa, Setaria italica
  misc_feature (10)..(10): Xaa can be any naturally occurring amino acid
  misc_feature (166)..(166): Xaa can be any naturally occurring amino acid
  misc_feature (205)..(205): Xaa can be any naturally occurring amino acid
  Transcript Sequence Number=SeqID_30725
  Gene Ontology: Mol. function=DNA binding; Cellular component=nucleus; Biological process=regulation of transcription, DNA-dependent
  Homolog annotation: Hit_ID=Q5ZBP6; Match level="QueryCoverage=75%, HitCoverage=29%, E-value=2e-74, Identity=88%"; Hit description =LEUNIG-like
  Pfam annotation: Domain name=WD40; Domain location=131-169; Score =23.7; E_value=0.00074; Accession=PF00400.24; Description=WD domain, G-beta repeat
  Pfam annotation: Domain name=WD40; Domain location=173-210; Score =23.6; E_value=0.00081; Accession=PF00400.24; Description=WD domain, G-beta repeat
  Pfam module annotation: Pfam domain module=WD40::WD40; Domain location=131-169::173-210
  Subcellular localization annotation: CTP_CleavageSite=70; ConfidenceScore=5.47e-01
TGHANTLGRXNNSKEEKKPGSSSGRANSSGTAIPAGPSPSSAPSTPSTHTPGDAMSVQQLQQNGGSAKPMVMFGSDGTGSLTSPANPLDDVDRLLEDGSLDDNVESFLSQDDMDPRDNLGRCMDASKGFGFSEVAKARASSTKVVCCHFSSDGKLLATGGHDKKVXLWCTEPLKSKSQLEEHSFLITDVRFSPSMSRLATSSFDXTVRVW

SEQ ID NO: 96700 - protein, 475 aa, Setaria italica
  Transcript Sequence Number=SeqID_30726
  Gene Ontology: Mol. function=DNA binding; Cellular component=nucleus; Biological process=regulation of transcription, DNA-dependent
  Homolog annotation: Hit_ID=Q5ZBP6; Match level="QueryCoverage=92%, HitCoverage=81%, E-value=0.0, Identity=80%"; Hit description=LEUNIG -like
  Pfam annotation: Domain name=WD40; Domain location=180-218; Score =24.1; E_value=0.00059; Accession=PF00400.24; Description=WD domain, G-beta repeat
  Pfam annotation: Domain name=WD40; Domain location=222-260; Score =46.1; E_value=1.4e-10; Accession=PF00400.24; Description=WD domain, G-beta repeat
  Pfam annotation: Domain name=WD40; Domain location=265-304; Score =32.7; E_value=1.5e-06; Accession=PF00400.24; Description=WD domain, G-beta repeat
  Pfam annotation: Domain name=WD40; Domain location=308-346; Score =9.7; E_value=2.8; Accession=PF00400.24; Description=WD domain, G -beta repeat
  Pfam annotation: Domain name=WD40; Domain location=351-388; Score =31.0; E_value=4.9e-06; Accession=PF00400.24; Description=WD domain, G-beta repeat
  Pfam annotation: Domain name=WD40; Domain location=395-433; Score =9.9; E_value=2.7; Accession=PF00400.24; Description=WD domain, G -beta repeat
  Pfam annotation: Domain name=WD40; Domain location=436-475; Score =18.6; E_value=0.026; Accession=PF00400.24; Description=WD domain, G -beta repeat
  Pfam module annotation: Pfam domain module=WD40::WD40::WD40::WD40::WD4 0::WD40::WD40; Domain location=180-218::222-260::265-304::308 -346::351-388::395-433::436-475
  Subcellular localization annotation: CTP_CleavageSite=22; ConfidenceScore=5.35e-01
QPQQHNSQQQPQQHQLQQPAVSSQQSQSSNQLLQQEKSGIGSMPVDGGMPNTFGGAEQTAKKRKKPGSSSGRANSSGTANTAGPSPSSAPSTPSTHTPGDAMSVQQLQQNGGSAKPMVMFGSDGTGSLTSPANPLDDVDRLLEDGSLDDNVESFLSQDDMDPRDNLGRCMDASKASRFGFSEVAKARASSTKVVCCHFSSDGKLLATGGHDKKVFLWCTEPLKSKSQLEEHSFLITDVRFSPSMSRLATSSFDKTVRVWDADNTDYSLRTFTGHSASVMSLDFHPNKEDMICSCDSDGEVRSWSINNGSCLTCVKVFKGGATQMRFQPCKGKYLAAASEKTIYILDGETQHSCRSPLQGHNKNIQSLCWDSTGDYLASVSEDSVRIWSFTPGHDGDFVNELNCSGNKFHSCVFHPTYPSLLVIGCYESLELWDIREKNTMTLNNAHEGLIAALAACSATGKVASVSHDRFVKLWK

SEQ ID NO: 96701 - protein, 71 aa, Setaria italica
  Transcript Sequence Number=SeqID_30727
  Gene Ontology: Mol. function=protein serine/threonine kinase activity; Biological process=protein amino acid phosphorylation
ACVGNDGRSRPGMAEVSAILSDVEAAYRRRDGAPAGEDDEPDDGGEGRLSGCLLGPSRSVHKADMLLRPPV

SEQ ID NO: 96702 - protein, 246 aa, Setaria italica
  misc_feature (78)..(78): Xaa can be any naturally occurring amino acid
  Transcript Sequence Number=SeqID_30728
  Homolog annotation: Hit_ID=Q9LGH0; Match level="QueryCoverage=93%, HitCoverage=59%, E-value=8e-24, Identity=34%"; Hit description=NAM -like protein-like
QRIRRKAKLRRRCLARIEGTSQNGVITQDEIVQALALFKPEDQNSKSFQFLHCWNLLRTHLKWIGRSSPVAPQNSSQXKQKTTPSPSPRSSAPCILEDSEAAIQECEVPIQPMGRNMEKENLQQGGDSLSLENLQGGDSLSLEAIDNLCAEKNEADVEKERKENERAYALEQERVALEQLRAANEAKSLETRSKELDLKSKELDLKIMLEEERIMALDISAMSGPQQQYYKSLQNDIITRRFNRSG

SEQ ID NO: 96703 - protein, 71 aa, Setaria italica
  Transcript Sequence Number=SeqID_30729
  Gene Ontology: Mol. function=transferase activity, transferring glycosyl groups; Cellular component=integral to membrane; Biological process=protein amino acid glycosylation
  Homolog annotation: Hit_ID=B6UBH3; Match level="QueryCoverage=100%, HitCoverage=19%, E-value=3e-32, Identity=95%"; Hit description=Beta -1,3-galactosyltransferase 6
GFSSIGRRRALRRTWLPADRQGLQRLEEATGLAFRFVIGKSNSKNKMAVLNREVEEYDDFVLLDLEEEYSR

SEQ ID NO: 96704 - protein, 65 aa, Setaria italica
  Transcript Sequence Number=SeqID_30730
HGLLLKGKNNLFVHHIYSVGEMVRKARVRLEVLSLNPNIAYAHISHQNHFLAQSHLVSVGVNNRY

SEQ ID NO: 96705 - protein, 46 aa, Setaria italica
  Transcript Sequence Number=SeqID_30731
RLTASFSSGSLKWEHYQIPRDYEQDGGRHSESTNHRLYAIAKSRTI

SEQ ID NO: 96706 - protein, 76 aa, Setaria italica
  Transcript Sequence Number=SeqID_30732
KKVENKYPNFVNMEMTSQRTVTLKQIPVNPIPYSLTTKYASAVQRNARTSYGIKQLFFQMSLLPHPSYHCYTLWMK

SEQ ID NO: 96707 - protein, 133 aa, Setaria italica
  Transcript Sequence Number=SeqID_30733
  Gene Ontology: Mol. function=hydrolase activity, hydrolyzing O -glycosyl compounds; Cellular component=cell wall; Biological process= carbohydrate metabolic process
  Homolog annotation: Hit_ID=Q10QC0; Match level="QueryCoverage=100%, HitCoverage=23%, E-value=8e-58, Identity=82%"; Hit description=1,4 -beta-xylanase, putative, expressed
  Pfam annotation: Domain name=CBM_4_9; Domain location=1-115; Score= -11.7; E_value=0.032; Accession=PF02018.9; Description=Carbohydrate binding domain
YGVVEEGASASGNRYAVARNRTRPYQSVSQKVYLQNDTHYTLSAWLQVSNGSADIRAVVKTNGDFIHAGGVEARSGCWSILKGGLTAAAAGPAELYFESNATVEVWVDNVSLQPFSQEEWAAHHHTAIKSARK

SEQ ID NO: 96708 - protein, 50 aa, Setaria italica
  Transcript Sequence Number=SeqID_30734
STLKSLNTRPCTLNKSTWSSVGFHPINHLTPDRESKTRSKASGYRDYSSP

SEQ ID NO: 96709 - protein, 84 aa, Setaria italica
  Transcript Sequence Number=SeqID_30735
  Gene Ontology: Cellular component=plasma membrane
  Homolog annotation: Hit_ID=Q7XSP2; Match level="QueryCoverage=97%, HitCoverage=40%, E-value=1e-20, Identity=70%"; Hit description =OSJNBa0070M12.13 protein
KKRAADAQKQELWRLFLAFFLFLALVLSAVAGSPPARLQCRHLWAPAGLLSLAHLAFYAAVAHHLRCLNGFRYQRRCHKLTLAL

SEQ ID NO: 96710 - protein, 117 aa, Setaria italica
  misc_feature (10)..(10): Xaa can be any naturally occurring amino acid
  Transcript Sequence Number=SeqID_30736
  Gene Ontology: Mol. function=binding
  Homolog annotation: Hit_ID=Q10D20; Match level="QueryCoverage=100%, HitCoverage=3%, E-value=4e-46, Identity=77%"; Hit description=WD-40 repeat family protein, putative, expressed
NKTKTNASGXSPDASLDDLTLPKFGDDVSSGGSHGDLDEFSPQKDSFSHLSELENADLAGQSSEFIVLSNADMVEHVLLDWTIWVAAPISVQITLLGFLERMVSMHWFRNHNLTILR

SEQ ID NO: 96711 - protein, 185 aa, Setaria italica
  misc_feature (34)..(34): Xaa can be any naturally occurring amino acid
  misc_feature (51)..(51): Xaa can be any naturally occurring amino acid
  Transcript Sequence Number=SeqID_30737
  Gene Ontology: Mol. function=binding
  Homolog annotation: Hit_ID=Q10D20; Match level="QueryCoverage=80%, HitCoverage=4%, E-value=3e-62, Identity=79%"; Hit description=WD-40 repeat family protein, putative, expressed
ACCACSCLKLTETRDMLHMALELLALSLQQSHQXNVKNMQALRGYHLLALXFLHRRMSLFDMQSLDIFFRIAACEASFPEPKKSKINRTASYASGMSPDASLDDLTLPKFGDDVSSGGSHGDLDEFSPQKDSFSHLSELENADLAGQSSEFIVLSNADMVEHVLLDWTIWVAAPISVQITLIVRL

SEQ ID NO: 96712 - protein, 64 aa, Setaria italica
  Transcript Sequence Number=SeqID_30738
  Gene Ontology: Mol. function=phosphotransferase activity, phosphate group as acceptor; Biological process=nucleobase, nucleoside, nucleotide and nucleic acid metabolic process
TTGKLRRVDGAKSADEVFEDVKAIFVQLNTQVNQGSSVSRAQSNPLKRFVDLFCGCFGTQEETN

SEQ ID NO: 96713 - protein, 119 aa, Setaria italica
  Transcript Sequence Number=SeqID_30739
YLPLPGMNAPRPSREDRDEGKQRRREVDDDRAGLAPGAGPARRRRARALPTRGTCNKYNRGIIEHVKKVSVHPCKIVYVLHIILQKLSSTNCMNFTEKQSNYHMDLENKKLRLQMRPES

SEQ ID NO: 96714 - protein, 153 aa, Setaria italica
  Transcript Sequence Number=SeqID_30740
  Gene Ontology: Mol. function=peptidase activity; Cellular component =plasma membrane; Biological process=lipid transport
  Homolog annotation: Hit_ID=B6TH95; Match level="QueryCoverage=67%, HitCoverage=50%, E-value=4e-51, Identity=93%"; Hit description=Lipid binding protein
  Pfam annotation: Domain name=Tryp_alpha_amyl; Domain location=1-76; Score=19.8; E_value=0.0045; Accession=PF00234.14; Description =Protease inhibitorseed storageLTP f
LMGLATCLTFVQDKATARAPTPDCCAGLKQVVSASKKCMCVLVKDRDEPALGFKINVTRAMDLPDICNYPATFSDCPKILGMSPDAPEAEIFKEYAKKHESQNGTTQTAAATGAAGGKSASSSPTGGAGAGSQPSAVIVYLASALLAFVSVLA

SEQ ID NO: 96715 - protein, 164 aa, Setaria italica
  Transcript Sequence Number=SeqID_30741
  Gene Ontology: Mol. function=peptidase activity; Cellular component =plasma membrane; Biological process=lipid transport
  Homolog annotation: Hit_ID=B6TH95; Match level="QueryCoverage=73%, HitCoverage=58%, E-value=3e-58, Identity=90%"; Hit description=Lipid binding protein
  Pfam annotation: Domain name=Tryp_alpha_amyl; Domain location=44-123; Score=32.1; E_value=2.3e-06; Accession=PF00234.14; Description =Protease inhibitorseed storageLTP f
  Subcellular localization annotation: CTP_CleavageSite=79; ConfidenceScore=5.17e-01
MAFAHGGGRGSSSSPAAAVAVMVVMTMVLAGVARGDFAADRAECANQLMGLATCLTFVQDKATARAPTPDCCAGLKQVVSASKKCMCVLVKDRDEPALGFKINVTRAMDLPDICNYPATFSDCPKILGMSPDAPEAEIFKEYAKKHESQNGTTQVRNVPHLDLQ

SEQ ID NO: 96716 - protein, 128 aa, Setaria italica
  Transcript Sequence Number=SeqID_30742
  Gene Ontology: Mol. function=protein serine/threonine kinase activity; Biological process=protein amino acid phosphorylation
  Homolog annotation: Hit_ID=Q5QLM8; Match level="QueryCoverage=99%, HitCoverage=19%, E-value=3e-42, Identity=58%"; Hit description =Receptor protein kinase-like
  Pfam annotation: Domain name=PAN_2; Domain location=49-121; Score =2.2; E_value=0.00091; Accession=PF08276.3; Description=PAN-like domain
PCYVHGLCGRNAICEYEPSLRCSCAPGYEMVDRQDSRKGCKPMFTVTNCSLQASPSPSPEQRYKFVKMPHTDFYGYDLWFYQSVTFEYCKKICLETCLCVGFSYKLEGQGVCYPKSVLFNGFTSSSFT

SEQ ID NO: 96717 - protein, 79 aa, Setaria italica
  Transcript Sequence Number=SeqID_30743
ALAYFFQARFHAYCEYLGKTAKCVNSSVPASAVTLEIDGGTAELNSYFCLLLFPLASFESDRGYFTHIFVQCWRCIDAF

SEQ ID NO: 96718 - protein, 97 aa, Setaria italica
  Transcript Sequence Number=SeqID_30744
  Gene Ontology: Mol. function=protein tyrosine kinase activity; Biological process=protein amino acid phosphorylation
  Homolog annotation: Hit_ID=Q2QVC2; Match level="QueryCoverage=85%, HitCoverage=30%, E-value=5e-27, Identity=77%"; Hit description =Protein kinase domain containing protein
SASFSAPVSGSTATDRSGSGEHGGGAVPEVVRWVRRGFEEDTRPVAEMVDPALLRGPALPKKEVVAAFHVALACTEVDPELRPRMKAVADNLDKIGS

SEQ ID NO: 96719 - protein, 124 aa, Setaria italica
  Transcript Sequence Number=SeqID_30745
  Gene Ontology: Mol. function=aspartic-type endopeptidase activity; Cellular component=chromatin; Biological process=RNA-dependent DNA replication
  Homolog annotation: Hit_ID=B3VTB4; Match level="QueryCoverage=60%, HitCoverage=60%, E-value=2e-20, Identity=60%"; Hit description =Putative retroelement protein
PPGMPVCDQAQEKAPHLLLSFVFTKQIWSLVFSHLNLVVDVPVNSSSFSAWWGKVIRAAPNQWRKGLNSLIILVAWEIWKHRNSCVFEGVLPNSQVLLQAITNESTLWCLAGASKLKQLLAGRL

SEQ ID NO: 96720 - protein, 94 aa, Setaria italica
  Transcript Sequence Number=SeqID_30746
EKQTKLLGIDRGENDQCAGSKEVQDASFRLLLAHRHSYPPTVFLHGNQRRTGVAKDNTSEELAYLQLVHGPRDLKNRNLARNKTERSSLVPKVR

SEQ ID NO: 96721 - protein, 73 aa, Setaria italica
  Transcript Sequence Number=SeqID_30747
  Gene Ontology: Mol. function=triacylglycerol lipase activity; Biological process=lipid metabolic process
GRRNDAVDCPIGTEVAERWRRWAIFVSLVAQMLLLWIKRPMAACGRVIEYWMNLITDNGGGVLGLVRNAMRGT

SEQ ID NO: 96722 - protein, 87 aa, Setaria italica
  Transcript Sequence Number=SeqID_30748
GQLLQPAATPRGGREEWRPPVGFSWLLRRAVGRDRHPATTGRRERMAAVIRPLLTRTPLATSLPSGGGAEADDALAASGLPSVVDAA

SEQ ID NO: 96723 - protein, 134 aa, Setaria italica
  misc_feature (9)..(9): Xaa can be any naturally occurring amino acid
  Transcript Sequence Number=SeqID_30749
  Gene Ontology: Mol. function=(S)-norcoclaurine synthase activity; Biological process=response to biotic stimulus
  Homolog annotation: Hit_ID=B6SQM0; Match level="QueryCoverage=97%, HitCoverage=85%, E-value=1e-52, Identity=79%"; Hit description=Major pollen allergen Car b 1 isoforms 1A and 1B
  Pfam annotation: Domain name=Bet_v_I; Domain location=12-134; Score= -18.0; E_value=8.6e-05; Accession=PF00407.11; Description =Pathogenesis-related protein Bet v I family
RDRLPASDXWAIYGTLRAAELLPELLPHVLAKVELVSGDGGVGTILQLTFPPGIPGLESYKEKFIKVDNENYIKEAQTIDGDILKLGFLSYMIRFEIIAKGPDSSVIRSTIEYEIDDAHPELEAMVNTAPLAAT

SEQ ID NO: 96724 - protein, 239 aa, Setaria italica
  misc_feature (144)..(144): Xaa can be any naturally occurring amino acid
  Transcript Sequence Number=SeqID_30750
  Gene Ontology: Cellular component=integral to membrane
  Homolog annotation: Hit_ID=B6TTZ1; Match level="QueryCoverage=92%, HitCoverage=82%, E-value=7e-55, Identity=50%"; Hit description =Tetraspanin family protein
  Pfam annotation: Domain name=DUF996; Domain location=30-153; Score= -51.8; E_value=0.049; Accession=PF06195.5; Description=Protein of unknown function (DUF996)
  Pfam annotation: Domain name=Tetraspannin; Domain location=1-157; Score=21.8; E_value=6.3e-05; Accession=PF00335.12; Description =Tetraspanin family
  Pfam module annotation: Pfam domain module=DUF996::Tetraspannin; Domain location=30-153::1-157
SVVRPSCPPSPAPVVVAAGGELVRLGRPLMLLVDASSLSDGTAERLSSAWFIFTFIGVGVVLFITSIFGCAGARNGCCLSIYSFLIILFILVELATGGFIFFNHSWKEVIPVDKTGNFDMMYSFLKENWRIAKWVALGAVIFEXALLFTVAIIVQSGNQADYDSDDEYIVPRSGIRQPLVNQQQGAADPRVPNLDYRPIRNDAWSQRMREKYGVDSFDPNRFQQATISPAEQRNRCTIL

SEQ ID NO: 96725 - protein, 86 aa, Setaria italica
  Transcript Sequence Number=SeqID_30751
  Subcellular localization annotation: CTP_CleavageSite=62; ConfidenceScore=5.70e-01
VLTPHGKFPVSPSRLASPPTSPAQPPDPAPPAPRSPRPTPVGEPTDPPSPRPAVRRRPPFPRVAHRRGVPRLPSACRSGVALRPGQ

SEQ ID NO: 96726 - protein, 271 aa, Setaria italica
  Transcript Sequence Number=SeqID_30752
  Gene Ontology: Mol. function=protein serine/threonine kinase activity; Cellular component=cytoplasmic vesicle; Biological process= intracellular protein transport
  Homolog annotation: Hit_ID=Q2R8X2; Match level="QueryCoverage=94%, HitCoverage=37%, E-value=2e-46, Identity=43%"; Hit description =Protein kinase domain containing protein, expressed
  Pfam annotation: Domain name=WD40; Domain location=182-220; Score =38.5; E_value=2.6e-08; Accession=PF00400.24; Description=WD domain, G-beta repeat
  Pfam annotation: Domain name=WD40; Domain location=98-134; Score=4.5; E_value=11; Accession=PF00400.24; Description=WD domain, G-beta repeat
  Pfam module annotation: Pfam domain module=WD40::WD40; Domain location=182-220::98-134
DGRFGGSITPLVAKFIAQKNWIVVGCSFGYIKVYKYCKQALFSEIKSFKAHEYGGISSLELHRTGPYVLSAVEDEGHSAPMWDNPMDKIKMWDWENGWKLICTFNTEKYTYQIKFNPMDLNMFATISGGVKVWNICSPDSVSELRRTHPTRLDFFSRDGAPHMIFADQSNRRKPTIWDCQNMKCVSTLKEHLADVSVVFSHPELPVLVTGSIDGTIRLWNSSTFSLLGVLNCGLRNVVAITSLKGSRRIAILHYGGLAIAEIDTEQSVAIV

SEQ ID NO: 96727 - protein, 43 aa, Setaria italica
  Transcript Sequence Number=SeqID_30753
TRLDRSQLSLWLAANAAATNHQFVRGNHFTAMAGNLSLRHATE

SEQ ID NO: 96728 - protein, 178 aa, Setaria italica
  misc_feature (49)..(49): Xaa can be any naturally occurring amino acid
  misc_feature (64)..(64): Xaa can be any naturally occurring amino acid
  Transcript Sequence Number=SeqID_30754
  Gene Ontology: Mol. function=binding
  Homolog annotation: Hit_ID=B9T2A1; Match level="QueryCoverage=29%, HitCoverage=17%, E-value=3e-18, Identity=82%"; Hit description=Heat shock protein 70 (HSP70)-interacting protein, putative
ALMLRAQTLVTLKDYQSALFDVNRLIEINPSSEVYRNLQARLKTQLSLXPIPECEEESLYLEEXKDELLPKGDQKIETSITKSDQPETKLVLENKPSNGHILERKPGTEPQKVDVPPTLPSKPQGWEAIPKPKGHSGLDYSKWDSVEDDSSEDEDDDEEDELPQYKFKVRTVGVRSVK

SEQ ID NO: 96729 - protein, 137 aa, Setaria italica
  Transcript Sequence Number=SeqID_30755
LKTICFFRFCMNKLERDYSNSTSPEHQMNKNSWSNWFLIHSIISWGVFTCEIQIRICFASDVVGSSDSCWDVLDAIHRRGSRGRCWYSGSSREARGVFYCSIHTKHNAILLINPTLSLLLWHECNQTILKTRNFSIL

SEQ ID NO: 96730 - protein, 83 aa, Setaria italica
  misc_feature (11)..(11): Xaa can be any naturally occurring amino acid
  misc_feature (28)..(28): Xaa can be any naturally occurring amino acid
  misc_feature (33)..(33): Xaa can be any naturally occurring amino acid
  Transcript Sequence Number=SeqID_30756
  Gene Ontology: Mol. function=nucleic acid binding
  Homolog annotation: Hit_ID=Q2QN68; Match level="QueryCoverage=100%, HitCoverage=21%, E-value=2e-16, Identity=52%"; Hit description=RNA recognition motif family protein, expressed
SRYDIDVHWCXKSLNELPESSAVAVLNXGGDNXNKGDYFASLIAKHQAEAFGYSLHDTTYLPRNSEMHGKRYTHEDYDYMAPG

SEQ ID NO: 96731 - protein, 113 aa, Setaria italica
  Transcript Sequence Number=SeqID_30757
  Gene Ontology: Mol. function=triacylglycerol lipase activity; Biological process=lipid metabolic process
  Homolog annotation: Hit_ID=B6TIE4; Match level="QueryCoverage=88%, HitCoverage=25%, E-value=2e-27, Identity=54%"; Hit description =Triacylglycerol lipase
  Pfam annotation: Domain name=Lipase_3; Domain location=2-108; Score =25.7; E_value=5.6e-06; Accession=PF01764.17; Description=Lipase (class 3)
MDDLDISLVPASEIVLPGSAINPCVHGGWLSVYTTADPGSQYNQESARHQVLNEVKRIQDLYKNEETSITITGHSLGAALATINAIDIVSNGYNKSCPVSAILVTFRKEPLKK

SEQ ID NO: 96732 - protein, 86 aa, Setaria italica
  Transcript Sequence Number=SeqID_30758
  Subcellular localization annotation: CTP_CleavageSite=47; ConfidenceScore=5.12e-01
TSWRGAQRAPRSVRLRRRRRRLLRRRRGCARRLSAACSKRRSPWPQRAAHGEPPDQAPELRRDPRQLHLEPARRTKRTRGSQGMHT

SEQ ID NO: 96733 - protein, 50 aa, Setaria italica
  misc_feature (50)..(50): Xaa can be any naturally occurring amino acid
  Transcript Sequence Number=SeqID_30759
MGQGQSQSAPPAEEPSPPAVEPSSPSPAPAPASSSLEALAAEAMSFDEGX

SEQ ID NO: 96734 - protein, 44 aa, Setaria italica
  Transcript Sequence Number=SeqID_30760
NRTVSCNLQKYKSSKSNQCDTFILATALYFFARPDFVPPLNHHN

SEQ ID NO: 96735 - protein, 51 aa, Setaria italica
  Transcript Sequence Number=SeqID_30761
  Homolog annotation: Hit_ID=B6SJK3; Match level="QueryCoverage=74%, HitCoverage=9%, E-value=4e-10, Identity=76%"; Hit description=mTERF family protein
GQLDYKTNLKVFSARFVWRYAKDVPDVVKAFEGKIKFQGFGDREFELCHTE

SEQ ID NO: 96736 - protein, 117 aa, Setaria italica
  Transcript Sequence Number=SeqID_30762
  Gene Ontology: Mol. function=binding
  Homolog annotation: Hit_ID=Q9AUY1; Match level="QueryCoverage=100%, HitCoverage=20%, E-value=3e-41, Identity=77%"; Hit description =Armadillo/beta-catenin-like repeat family protein, expressed
  Pfam annotation: Domain name=Arm; Domain location=29-69; Score=24.2; E_value=0.00055; Accession=PF00514.15; Description=Armadillobeta -catenin-like repeat
  Pfam annotation: Domain name=Arm; Domain location=70-110; Score=34.6; E_value=3.9e-07; Accession=PF00514.15; Description=Armadillobeta -catenin-like repeat
  Pfam module annotation: Pfam domain module=Arm::Arm; Domain location =29-69::70-110
EGGLRSLLLYLDGPLPPEPAVGALRNLVGAVSPDSLVSLGVLPRLVHVLRVGPVGAQQAAAAAICRISSTAEMKRAVGEHGCVPLLVRLLEAKSSGAREVAAQALASLGGCPANARE

SEQ ID NO: 96737 - protein, 106 aa, Setaria italica
  Transcript Sequence Number=SeqID_30763
  Gene Ontology: Mol. function=protein serine/threonine kinase activity; Cellular component=integral to membrane; Biological process=protein amino acid phosphorylation
  Homolog annotation: Hit_ID=B9RWM9; Match level="QueryCoverage=96%, HitCoverage=8%, E-value=7e-21, Identity=51%"; Hit description =Leucine-rich repeat receptor protein kinase EXS, putative
  Pfam annotation: Domain name=LRR_1; Domain location=2-24; Score=11.5; E_value=2; Accession=PF00560.25; Description=Leucine Rich Repeat
  Pfam annotation: Domain name=LRR_1; Domain location=26-48; Score=4.9; E_value=35; Accession=PF00560.25; Description=Leucine Rich Repeat
  Pfam annotation: Domain name=LRR_1; Domain location=50-72; Score =13.0; E_value=0.97; Accession=PF00560.25; Description=Leucine Rich Repeat
  Pfam annotation: Domain name=LRR_1; Domain location=74-96; Score =10.9; E_value=2.5; Accession=PF00560.25; Description=Leucine Rich Repeat
  Pfam module annotation: Pfam domain module=LRR_1::LRR_1::LRR_1::LRR _1; Domain location=2-24::26-48::50-72::74-96
ATSTALDLSHNHLTGIIPPGLFLLRNLTKLLLLSNDLSGPLPLEIGKAASLVRLRLGGNRIAGSIPASVSGMKSINFLDLGSNRLAGPVPAELGNCSQLQMLDLSN

SEQ ID NO: 96738 - protein, 118 aa, Setaria italica
  Transcript Sequence Number=SeqID_30764
VWDTLPLNLIYCPSSRRCRRRPPARPPPPASLPPPSAPPYGGRGRYRREGGAPAAPEHSYRGVPAGRRWPCAPAHAPPRTNGFPAGRGRSSPSASSRRGRRRAGPGACGLKGEGGRAG

SEQ ID NO: 96739 - protein, 149 aa, Setaria italica
  Transcript Sequence Number=SeqID_30765
FSNIIVMYLVSESKLSRRRSKLQKAGDDTAARDEDMIQDSQKQEEVVLAEVLLPTIIGESKQEQENKMAMVVYDEKGALLGNGDVPMLVVMDEERETSAVNDSLRMNQIVLHNADEVHEEIEEGDFELEQGDEMSEDVEQQFAVEDELG

SEQ ID NO: 96740 - protein, 200 aa, Setaria italica
  Transcript Sequence Number=SeqID_30766
  Gene Ontology: Mol. function=transcription regulator activity; Cellular component=nucleus; Biological process=regulation of transcription
MQGDPGYGYGGYGYGYTAGAGGYNYDMASYGGGGAYHTANDQYPAAPATYEDPLAGRRQHDFPAPLTGLEFQATDTCPKNYVIFDQTYDRSRVMFHPSLANNLGSSGGGYGHDHGCYGYDQNYAGKGAYYGDGGGTASVRQKEDTDEIDALMSTEDGEDEDDVRSTGRTPGCGGAGGSPDSTCSSGGGGQKKKERMKKMV

SEQ ID NO: 96741 - protein, 134 aa, Setaria italica
  misc_feature (72)..(72): Xaa can be any naturally occurring amino acid
  Transcript Sequence Number=SeqID_30767
  Homolog annotation: Hit_ID=A2Q3T8; Match level="QueryCoverage=43%, HitCoverage=21%, E-value=2e-11, Identity=65%"; Hit description =Ribosomal protein S7
FSDKFICSDPRLGLHELFEEELARRVEEAIRKNVEERLNSDEVKLDIKRRIEEGIRKLFDEVDAQLQKEKKXALYEARQKAEQERREREELDRMLEENRRKVEAAQRKEALEQQQKELERYLELERITKAKRRS

SEQ ID NO: 96742 - protein, 260 aa, Setaria italica
  Transcript Sequence Number=SeqID_30768
  Subcellular localization annotation: CTP_CleavageSite=96; ConfidenceScore=5.78e-01
MPRTVSRSPPPFRRRRSPSPRYTSRRNRRDRSRSPYSSRRKTRSPSPLWDRSNSPTPRRHRSPPSPRRHIRRRSRSTTSSFVNNSCSPSRGSEQINLSEKTQDGSGRKERRHKEAEFKLLEEELARRVEEAIRKNVEERLNSDEVKLDIKRRIEEGIRKLFDEVDAQLQKEKKAALYEARQKAEQERREREELDRMLEENRRKVEAAQRKEALEQQQKELERYLELERIQKQREEALRRKKMEEEEERANELRLLGKSRR

SEQ ID NO: 96743 - protein, 161 aa, Setaria italica
  misc_feature (31)..(31): Xaa can be any naturally occurring amino acid
  Transcript Sequence Number=SeqID_30769
  Gene Ontology: Mol. function=serine-type endopeptidase activity; Biological process=proteolysis
  Homolog annotation: Hit_ID=Q5ZBS1; Match level="QueryCoverage=90%, HitCoverage=48%, E-value=7e-48, Identity=69%"; Hit description =Subtilisin-like serine proteinase-like protein
GPSFHGLAAGVARGGAPHARIAVYKILWGRXAGGNDAALLAAIDDAIHDGVDVLSLSVGGFSDNSFGALHAVQKGITVVYAAGNDGPSPQTVENTSPWVITVAASKMDRSFPTVITLGNKQKIVGQSLYYQGKNSSRSIFRSLENGGLCTADDLNGKDLKG

SEQ ID NO: 96744 - protein, 111 aa, Setaria italica
  Transcript Sequence Number=SeqID_30770
  Subcellular localization annotation: CTP_CleavageSite=58; ConfidenceScore=5.86e-01
GASGRMYHTRPPSNQTSSSSFPPQNFLPPPKLAKPTRPNSSSSCQPFARIPPRQPQIRAAPGDPELGMLAASRGAGPAGSAAGARGSLPRGRLRRRLRRDGTALRGREGVG

SEQ ID NO: 96745 - protein, 108 aa, Setaria italica
  Transcript Sequence Number=SeqID_30771
  Gene Ontology: Mol. function=protein serine/threonine kinase activity; Biological process=protein amino acid phosphorylation
  Homolog annotation: Hit_ID=Q60DP7; Match level="QueryCoverage=81%, HitCoverage=50%, E-value=3e-25, Identity=61%"; Hit description =Phosphonate metabolism protein, putative
RITRNLGRKGKPEDGDEDARAAQLVWKIIDGDVGKPFVSSGLEFVPLPVRILSLVFSVHVMHGEGYICLGFLFGRRARVVYLSDLSRFVPSTEHGMIFVSSIILCSNN

SEQ ID NO: 96746 - protein, 82 aa, Setaria italica
  Transcript Sequence Number=SeqID_30772
  Gene Ontology: Mol. function=phosphatidylinositol phosphate kinase activity; Biological process=phosphatidylinositol metabolic process
  Homolog annotation: Hit_ID=Q2QVA9; Match level="QueryCoverage=100%, HitCoverage=4%, E-value=4e-32, Identity=75%"; Hit description =Phosphatidylinositol-4-phosphate 5-Kinase family protein, expressed
DGNFSGSGAALNTQDILISMSSQHIKNKAVCDQNHLSRITYYGYFDTSLGRHLQDNLLNEKQSCLSCGESPEAHMYSYTHHN

SEQ ID NO: 96747 - protein, 280 aa, Setaria italica
  Transcript Sequence Number=SeqID_30773
  Gene Ontology: Mol. function=protein serine/threonine kinase activity; Biological process=protein amino acid phosphorylation
  Homolog annotation: Hit_ID=Q7F0U5; Match level="QueryCoverage=71%, HitCoverage=26%, E-value=8e-45, Identity=47%"; Hit description =Protein kinase-like
  Pfam annotation: Domain name=Pkinase; Domain location=2-148; Score= -104.6; E_value=0.029; Accession=PF00069.17; Description=Protein kinase domain
  Pfam annotation: Domain name=Pkinase_Tyr; Domain location=1-148; Score=-154.6; E_value=0.0019; Accession=PF07714.9; Description =Protein tyrosine kinase
  Pfam module annotation: Pfam domain module=Pkinase::Pkinase_Tyr; Domain location=2-148::1-148
QVIHGDIKPANILLDENLNAKISDFGISKLLSTDNTLYTTHVIGSIGYMDPLFARSGRLTSKSDVYSFGVVLLELITRRKAVDEGKISLTENFTQALAKRKKIRDFYDVKVSHDNNLRILDGIAKVAAKCLAMDIEKRPEMKDVAEHLRKLRKAQYESRENIALFGWVWRSKQAPQNMVPTDKMDQVLIEEVQAQKAGEVDINVHNITAMREGSPRYHSFSSLQEQELEELLRSSAEVLGKGKYASTYKAELDNSTLVVKRLKIEGVPEAVFNCSYCCYP

SEQ ID NO: 96748 - protein, 468 aa, Setaria italica
  misc_feature (461)..(461): Xaa can be any naturally occurring amino acid
  Transcript Sequence Number=SeqID_30774
  Gene Ontology: Mol. function=transferase activity, transferring glycosyl groups; Biological process=metabolic process
  Homolog annotation: Hit_ID=B6TL37; Match level="QueryCoverage=99%, HitCoverage=94%, E-value=0.0, Identity=79%"; Hit description =Cytokinin-O-glucosyltransferase 2
  Pfam annotation: Domain name=UDPGT; Domain location=4-468; Score= -46.5; E_value=7e-09; Accession=PF00201.10; Description=UDP -glucoronosyl and UDP-glucosyl transferase
MARAHAVVVPYPGSGNINPALQLAKLLHRHGVYITFVNTEHNHRRVQDTEGAGAVRGREGFRFEAIPDGLSEADRGKQDYGRGLSVSMSTRCAAPLRDLIARLNGTPGVPPVSCVLPTMLMSFALGVARELGIPTLAFWTGSAAALMTHMRLRELEERGYVPLKDQSFLTNGYLEKTVIDWIPGMPPIRLGDFSSFLRTTDPNDFGLRFNESEANKCTQAGALILNTFDGLEADVLAALRAEYPRIYTIGPLGSMLRRGATAAAGEDDGESTGLSLWKQDTECLAWLDTQEPRSVVYVNFGSHTVLTPEQLAEFAWGLAASGHVILWCIRDNLLRGGGGGMAVLPPEFTAETAGRCRVTPWCPQEQVLRHPAVGCFLTHSGWNSTCETVAAGVPMVCWPGFSDQYTNCKYSCEVWGVGVRLDAEVRREQVAMHVREVMGSEEMQRNAAKWKEEAEAATGPXGSSLRIY

SEQ ID NO: 96749 - protein, 174 aa, Setaria italica
  misc_feature (145)..(145): Xaa can be any naturally occurring amino acid
  misc_feature (167)..(167): Xaa can be any naturally occurring amino acid
  Transcript Sequence Number=SeqID_30775
  Gene Ontology: Mol. function=4 iron, 4 sulfur cluster binding
  Homolog annotation: Hit_ID=B6TX88; Match level="QueryCoverage=100%, HitCoverage=37%, E-value=5e-76, Identity=81%"; Hit description=4Fe -4S ferredoxin, iron-sulfur binding protein
  Pfam annotation: Domain name=Fer4; Domain location=116-139; Score =16.4; E_value=0.0011; Accession=PF00037.19; Description=4Fe-4S binding domain
  Pfam annotation: Domain name=Fer4; Domain location=69-94; Score=1.1; E_value=0.28; Accession=PF00037.19; Description=4Fe-4S binding domain
  Pfam module annotation: Pfam domain module=Fer4::Fer4; Domain location=116-139::69-94
FEDAADVRNLSLVYTLAGVDCIDCAADASVVGAVNEGIDVAASIIPAVQRPWVMVSVNDDCRDLHFRKAEFDPEDCPPDCSKPCEKVCPADAISLESIMVGGEHTRSDPLHGKLKGGVLTERCYGCGRCLPVCPYDRINDASFAXIISGAVSYVRDPITTSELLKRXDVDAIEI

SEQ ID NO: 96750 - protein, 279 aa, Setaria italica
  Transcript Sequence Number=SeqID_30776
  Gene Ontology: Mol. function=4 iron, 4 sulfur cluster binding
  Homolog annotation: Hit_ID=B6TX88; Match level="QueryCoverage=97%, HitCoverage=62%, E-value=1e-112, Identity=73%"; Hit description=4Fe -4S ferredoxin, iron-sulfur binding protein
PCEKVCPADAISLESIMVGGEHTRSDPLHGKLKGGVLTERCYGCGFHPSSCPIARLGAVSYVRDPITTSELLKRNDVDAIEIHTTGKGTDTFDALWNSFSESINNVKLVAVSLPDIGESTVDFMNVLYAIMEPHFQGYNLWQLDGRPMSGDIGRGATRETVSFAIHMASVPERPPGFYQLAGGTNSYTIDCLKKAGLFQSMTFPGTTTSETISSQQALIGGIAYGGYARKIIGRTLRKIPAQFGRVHIEDHPDHLLEALQDALSLVGPVKGYPALSSMK

SEQ ID NO: 96751 - protein, 105 aa, Setaria italica
  Transcript Sequence Number=SeqID_30777
  Gene Ontology: Mol. function=DNA-directed RNA polymerase activity; Cellular component=chloroplast; Biological process=transcription
  Homolog annotation: Hit_ID=B6T2W0; Match level="QueryCoverage=100%, HitCoverage=55%, E-value=3e-53, Identity=93%"; Hit description=DCL protein
VVQLIKDILHSDRYGDGECLCPNDENVVVQKLLAFHPRAQDKIGCGLDAIMVDRHPEFRKSRCLFVVRTDGVWIDFSYQKCLRAYIREKYPSHGERFIREHFKRT

SEQ ID NO: 96752 - protein, 61 aa, Setaria italica
  Transcript Sequence Number=SeqID_30778
TFTLQVNCLNLQNCLLYLIVLLVTVNCRQCFYTVHLHCLKKTELVVDLAVVVGGTLEDLLN

SEQ ID NO: 96753 - protein, 302 aa, Setaria italica
  misc_feature (199)..(199): Xaa can be any naturally occurring amino acid
  misc_feature (279)..(279): Xaa can be any naturally occurring amino acid
  misc_feature (286)..(286): Xaa can be any naturally occurring amino acid
  Transcript Sequence Number=SeqID_30779
  Subcellular localization annotation: CTP_CleavageSite=34; ConfidenceScore=5.23e-01
DREDDGGGDFFSKNKDILLQKPAGRGKQRSHSTRAKMSSKNSPGENKIGESKNKRSLKLPGRSETLPLSDSRLLKSDVKSKRASGNRTKKNLFKDLDDLSNGKPLEEEQEKADVALHDVGPDTQMAVEAMEALVQCSPAKGQPLSDRDTRAEKSRIAKSHSKNDSPQKRTSSIQGVTTHSKRRKVTASNTNPQKERCKXNSERIVKIKHKQTKSVPLKSKVSKKFIDENKYCGTPVAHRTRHCGRNDPSEFTDLCSNKQLKRGKKLTGDGSTVGEVQKXHIKNNPXKPLISEKTTESGSSHF

SEQ ID NO: 96754 - protein, 175 aa, Setaria italica
  misc_feature (19)..(19): Xaa can be any naturally occurring amino acid
  misc_feature (23)..(23): Xaa can be any naturally occurring amino acid
  Transcript Sequence Number=SeqID_30780
  Gene Ontology: Mol. function=nucleic acid binding; Cellular component= nucleus; Biological process=chromatin modification
  Homolog annotation: Hit_ID=UPI000034F468; Match level="QueryCoverage =100%, HitCoverage=26%, E-value=2e-69, Identity=69%"; Hit description= CHR18; ATP binding / DNA binding / helicase/ nucleic acid binding
  Pfam annotation: Domain name=ResIII; Domain location=10-175; Score= -38.0; E_value=0.082; Accession=PF04851.7; Description=Type III restriction enzyme, res subunit
FYDRIPPEVESKLMPFQRXGIRXVLQHGGRALIADEMGLGKTLQAIAVASCLHDAWPVLVIAPSSLRLQWASMIQSWLNIPMEDILVVLPQTGGSHKAGFRLVYSNTKGDFRLDGVFNVISYDVVPKIQSTLLDLDFKIVIADESHFLKNGQAKRTIASLPVLQKAQYVILLSGT

SEQ ID NO: 96755 - protein, 59 aa, Setaria italica
  Transcript Sequence Number=SeqID_30781
VAGECCTVSHHAVHEDGVAWRFNLQAHRCSSSWRGRKGQQQGQGHTIICCEFPLPLYFK

SEQ ID NO: 96756 - protein, 137 aa, Setaria italica
  Transcript Sequence Number=SeqID_30782
  Gene Ontology: Mol. function=transferase activity, transferring glycosyl groups; Cellular component=plasma membrane; Biological process=sucrose metabolic process
  Homolog annotation: Hit_ID=Q6EZE8; Match level="QueryCoverage=81%, HitCoverage=9%, E-value=8e-34, Identity=67%"; Hit description =Sucrose-phosphate synthase
GNEWINGYLEAILDAGLRLRGEQGGGAGPHQALALTPRLLQAPALAEAAAYSPTRYFVEEVVSRFDDRDLHKTWTKVVAMRNSQERNNRLENLCWRIWNVARKKKQVEWEYSRQLARRRLEQELGRREAAEELSEGE

SEQ ID NO: 96757 - protein, 86 aa, Setaria italica
  Transcript Sequence Number=SeqID_30783
  Gene Ontology: Mol. function=ubiquitin-protein ligase activity; Cellular component=ubiquitin ligase complex; Biological process =ubiquitin-dependent protein catabolic process
  Homolog annotation: Hit_ID=B6SVN8; Match level="QueryCoverage=100%, HitCoverage=18%, E-value=2e-27, Identity=72%"; Hit description =Immediate-early fungal elicitor protein CMPG1
VKKMFRVSDMATEFAVSALWRLCRAGDAGANACRAEALRVGAFQKLLLLLQVGCGGVTKERASELLKMLNGSRGSVECIETVDFKG

SEQ ID NO: 96758 - protein, 133 aa, Setaria italica
  Transcript Sequence Number=SeqID_30784
  Homolog annotation: Hit_ID=B6TN37; Match level="QueryCoverage=100%, HitCoverage=31%, E-value=2e-65, Identity=88%"; Hit description=F-box domain containing protein
ITAPRLESLEVHGFTWITLRGHSLRRLSIAKSTGRVHMVDTGKLPDLEHLSLRGVQWNWAAVSSVLQCASEVKHLVMKIEFCGDLDALQPFPEVDLVDFFNSHPKLRKFEIHGAMFAAMCQKNSLKNLDSRFL

SEQ ID NO: 96759 - protein, 148 aa, Setaria italica
  misc_feature (69)..(69): Xaa can be any naturally occurring amino acid
  misc_feature (93)..(93): Xaa can be any naturally occurring amino acid
  Transcript Sequence Number=SeqID_30785
GQYLQRRMLLAVNATALHLLSGAFLAVSASWPLYPAAAAASDRTTNIQADVPSPEAWRMCNWRRTTSSXVLAAHLTQGILAPMSRAVCLGGAXEAFAIRELRVVGVVAVEKMGSPYATFDDWDSLPSNVPFNFHPESTKATARGDFHA

SEQ ID NO: 96760 - protein, 77 aa, Setaria italica
  Transcript Sequence Number=SeqID_30786
  Gene Ontology: Mol. function=carbon-nitrogen ligase activity, with glutamine as amido-N-donor
  Homolog annotation: Hit_ID=B6TMI1; Match level="QueryCoverage=100%, HitCoverage=24%, E-value=3e-26, Identity=68%"; Hit description =Amidase
EKVMQDNKLDAIVAPGASAHSLLAIGGYPAITVPAGYASNGVPFAICFGGLKGSEPKLIEIAYSFEQATKVRKPPSL

SEQ ID NO: 96761 - protein, 94 aa, Setaria italica
  Transcript Sequence Number=SeqID_30787
  Gene Ontology: Mol. function=protein tyrosine kinase activity; Cellular component=integral to membrane; Biological process=protein amino acid phosphorylation
  Homolog annotation: Hit_ID=Q8SAW1; Match level="QueryCoverage=94%, HitCoverage=24%, E-value=8e-14, Identity=47%"; Hit description =Putative wall-associated protein kinase
  Pfam annotation: Domain name=EGF; Domain location=53-91; Score=22.4; E_value=0.0018; Accession=PF00008.19; Description=EGF-like domain
  Pfam annotation: Domain name=EGF_CA; Domain location=49-91; Score =35.9; E_value=1.7e-07; Accession=PF07645.7; Description=Calcium binding EGF domain
  Pfam module annotation: Pfam domain module=EGF::EGF_CA; Domain location=53-91::49-91
GGGSCAAPQGTGCSGNSSCADAPSGAKGYVCSCLTFYEGNPYIPNGCQDVNECSDHSLNGCDHTTICVNREGGYDCKCKPGMTRRGTEGPCTEK

SEQ ID NO: 96762 - protein, 68 aa, Setaria italica
  Transcript Sequence Number=SeqID_30788
  Gene Ontology: Mol. function=phosphatidate cytidylyltransferase activity; Cellular component=integral to membrane; Biological process=phospholipid biosynthetic process
  Homolog annotation: Hit_ID=Q7XR51; Match level="QueryCoverage=57%, HitCoverage=12%, E-value=2e-13, Identity=92%"; Hit description =Probable phytol kinase 1, chloroplastic
FIVHLLLGHRHCIWLILLSICICLGLNLAGFADIVGRRYGSVKLPFNEKKSWIGSISMFISGFLLSAM

SEQ ID NO: 96763 - protein, 91 aa, Setaria italica
  misc_feature (41)..(41): Xaa can be any naturally occurring amino acid
  Transcript Sequence Number=SeqID_30789
  Gene Ontology: Mol. function=phosphatidate cytidylyltransferase activity; Cellular component=integral to membrane; Biological process=phospholipid biosynthetic process
  Homolog annotation: Hit_ID=Q2N2K4; Match level="QueryCoverage=98%, HitCoverage=20%, E-value=5e-22, Identity=65%"; Hit description =Probable phytol kinase, chloroplastic
RQSLSRKIVHVLSGVLFMSSWPLFRYALPPHEASECSHLEXHSLRKGCSICSNSTEARYFAAVVPFLNSMRLLTYGLRLSTDEALVKSVTR

SEQ ID NO: 96764 - protein, 239 aa, Setaria italica
  Transcript Sequence Number=SeqID_30790
  Gene Ontology: Mol. function=phosphatidate cytidylyltransferase activity; Cellular component=integral to membrane; Biological process=phospholipid biosynthetic process
  Homolog annotation: Hit_ID=Q2N2K4; Match level="QueryCoverage=94%, HitCoverage=74%, E-value=2e-96, Identity=77%"; Hit description =Probable phytol kinase, chloroplastic
  Pfam annotation: Domain name=CTP_transf_1; Domain location=46-239; Score=-19.7; E_value=0.0003; Accession=PF01148.12; Description =Cytidylyltransferase family
VAALAAAAPPAVLRDGAATLFVTAGAYALVRTFDVLTERRLVEKSLSRKIVHVLSGVLFMSSWPLFSNSTEARYFAAVVPFLNSMRLLTYGLRLSTDEALVKSVTREGKPEELLRGPLYYVLVLLFSVLVFWRESAIGIVSLSMMSGGDGFADIVGRRYGSVKLPFNEKKSWIGSISMFISGFLLSAIMLFYFSSLGYIHVSWEEAFGKLALVALAATVVECIPVIDVVDDNISVPLAT

SEQ ID NO: 96765 - protein, 43 aa, Setaria italica
  Transcript Sequence Number=SeqID_30791
ALIGSDEDSEHVQFTSSFKLLSKSSYFITRCIYPGDRCAISED

SEQ ID NO: 96766 - protein, 108 aa, Setaria italica
  Transcript Sequence Number=SeqID_30792
  Gene Ontology: Mol. function=DNA-directed DNA polymerase activity; Cellular component=DNA polymerase III complex; Biological process =DNA replication
  Homolog annotation: Hit_ID=Q53M12; Match level="QueryCoverage=87%, HitCoverage=8%, E-value=8e-28, Identity=58%"; Hit description=ATPase, AAA family protein
TKTTFQESSRSLLQKYRPKSFSELVGHDVIAQSLSSAVLKGKLAPIYLFHGPHGIGKTSAARIFAAALNCRSPGGNQPCGRCEECMAIFSGSSSSVVEVDASKLDCKS

SEQ ID NO: 96767 - protein, 81 aa, Setaria italica
  Transcript Sequence Number=SeqID_30793
QITLHVFVSAWPVIHYPVIRLQPIQKCYRCTTAVNGSHPGSCNLPSSSTIALVFICVYSVEPNKIRDLIHPLPLALYFVSV

SEQ ID NO: 96768 - protein, 132 aa, Setaria italica
  Transcript Sequence Number=SeqID_30794
  Gene Ontology: Mol. function=transporter activity; Cellular component= membrane; Biological process=transport
  Homolog annotation: Hit_ID=Q27GI3; Match level="QueryCoverage=100%, HitCoverage=24%, E-value=8e-63, Identity=81%"; Hit description =Nucleobase-ascorbate transporter 6
  Subcellular localization annotation: CTP_CleavageSite=48; ConfidenceScore=5.19e-01
IFFAYIGACGLSFLQFCNLNSFRTKFILGFSLFMGLSVPQYFNEYTSVAGYGPVHTGARWFNDMINVPFSSKPFVAVLVAFFLDNTIQRRDTAVRRDRGYHWWDKFRSFKTDSRSEEFYSLPFNLNKFFPSV

SEQ ID NO: 96769 - protein, 61 aa, Setaria italica
  Transcript Sequence Number=SeqID_30795
  Gene Ontology: Mol. function=citrate transmembrane transporter activity; Cellular component=integral to membrane; Biological process=citrate transport
  Homolog annotation: Hit_ID=B6ST51; Match level="QueryCoverage=96%, HitCoverage=10%, E-value=2e-22, Identity=88%"; Hit description =Citrate transporter family protein
  Subcellular localization annotation: CTP_CleavageSite=50; ConfidenceScore=5.14e-01
MALASTEKVVLGCIAFGIFWVLAVFPSVPFMPVGRTAGSLLGAMLMVLFRVMTPEPGLRRH

SEQ ID NO: 96770 - protein, 560 aa, Setaria italica
  Transcript Sequence Number=SeqID_30796
  Gene Ontology: Mol. function=citrate transmembrane transporter activity; Cellular component=integral to membrane; Biological process=citrate transport
  Homolog annotation: Hit_ID=B6ST51; Match level="QueryCoverage=100%, HitCoverage=100%, E-value=0.0, Identity=84%"; Hit description =Citrate transporter family protein
  Pfam annotation: Domain name=ArsB; Domain location=139-558; Score= -219.3; E_value=0.052; Accession=PF02040.7; Description=Arsenical pump membrane protein
  Pfam annotation: Domain name=CitMHS; Domain location=16-506; Score =432.7; E_value=5.8e-127; Accession=PF03600.8; Description=Citrate transporter
  Pfam annotation: Domain name=DUF2298; Domain location=21-549; Score= -172.3; E_value=0.059; Accession=PF10060.1; Description =Uncharacterized membrane protein (DUF
  Pfam annotation: Domain name=DctM; Domain location=16-555; Score= -235.3; E_value=0.043; Accession=PF06808.4; Description=DctM-like transporters
  Pfam module annotation: Pfam domain module=ArsB::CitMHS::DUF2298::DctM ; Domain location=139-558::16-506::21-549::16-555
  Subcellular localization annotation: CTP_CleavageSite=50; ConfidenceScore=5.13e-01
MALASTEKVVLGCIAFGIFWVLAVFPSVPFMPVGRTAGSLLGAMLMVLFRVMTPEQAYAAIDLPILGLLFGTMVVSIFLERADMFKYLGAALAWRSRGSKDLLFRVCLVSAVASALFTNDTCCVVLTEFILKLARQNNLPPQPFLLALASSSNIGSAATPIGNPQNLVIAVQSGITFGQFLIGVFPAMIVGVITNTCILLCYFWKYLSVPEKDQEGGGGAAAGPEVVADDEVTSHRFTPARMSHASSVNGVDADCISEPIRRSDSLNRADTHSMRSRSYNSEGDIQVAIRSMRASTMSQEMVEVSTICDRRDDAVGPRKITRTTSHQRSVIIEDAPEADAKDGEKGKDGDEVKEKRWKVLVWKSAVYLTTLGMLIALLMGLNMSWSAITAALVLLALDFTDAQACLEKVSYSLLIFFCGMFITVEGFNRTGIPNALWELVEPYSRIDSAKGTALLAIVILVLSNVASNVPTVLLLGSRVAASAAAISPASQKKAWLILAWVSTVAGNLTLLGSAANLIVCEQARRAQFYGYNLTFWSHLRFGVPSTIIVTAIGLLIVASY

SEQ ID NO: 96771 - protein, 146 aa, Setaria italica
  Transcript Sequence Number=SeqID_30797
  Subcellular localization annotation: CTP_CleavageSite=87; ConfidenceScore=5.15e-01
QSFGATDGDAHAHDNATLQVLPSTPDLTSPASTRGIADLFSNPDQGLLPNPPPAPGRKRRRLKKTMVAISSLRRSKRQACRRIKHLSAEERVNHVLCRRLGYIKDDFTPAEEAIRDFIATFQGPMPQFIIKAMTALFQLDDDDLCK

SEQ ID NO: 96772 - protein, 88 aa, Setaria italica
  Transcript Sequence Number=SeqID_30798
  Gene Ontology: Mol. function=glucose-6-phosphate dehydrogenase activity; Cellular component=chloroplast; Biological process =carbohydrate metabolic process
  Homolog annotation: Hit_ID=C0HEF0; Match level="QueryCoverage=100%, HitCoverage=22%, E-value=2e-42, Identity=93%"; Hit description =Glucose-6-phosphate 1-dehydrogenase
  Pfam annotation: Domain name=G6PD_C; Domain location=1-87; Score= -188.7; E_value=0.1; Accession=PF02781.8; Description=Glucose-6 -phosphate dehydrogenase, C-terminal domain
ELNLFYRDKYNTEVPDSYEHLLLDVLDGDSHLFMRSDELAAAWNVLTPIIHEIDQNIVAPELYEAGGRGPINAYYLAAKHGVRWDDDW

SEQ ID NO: 96773 - protein, 93 aa, Setaria italica
  Transcript Sequence Number=SeqID_30799
NLPVKAIANSHWINSGLKIPPVIGGGLTVEQFVSSHLAADCAPSVKDELCRVVNNFCTNANSLLSMFVGSFLKDLSGLIPSLSNTIPRGSSKA

SEQ ID NO: 96774 - protein, 66 aa, Setaria italica
  misc_feature (66)..(66): Xaa can be any naturally occurring amino acid
  Transcript Sequence Number=SeqID_30800
SCEQWTRYLKNDGVYGNLPVKAIANSHWINSGLKIPPVIGGGLTVEQFVSSHLAADCAPSVRLGLX

SEQ ID NO: 96775 - protein, 266 aa, Setaria italica
  Transcript Sequence Number=SeqID_30801
  Gene Ontology: Mol. function=transferase activity, transferring glycosyl groups; Cellular component=integral to membrane; Biological process=metabolic process
  Homolog annotation: Hit_ID=Q5Z6K2; Match level="QueryCoverage=97%, HitCoverage=55%, E-value=6e-88, Identity=62%"; Hit description =Putative UDP-glucose glucosyltransferase
  Pfam annotation: Domain name=Glyco_tran_28_C; Domain location=69-242; Score=-36.6; E_value=0.055; Accession=PF04101.8; Description =Glycosyltransferase family 28 C-terminal domain
GRAMGSSRGSILNSFHELESFYIDKWNREMPLNKMWPVGPLCLAGEPVRTLDSDIAAWLDSRLAMNRPVLYVAFGSQADLSRSQLEEMAIGLDRSDLDFIWVVRSKWFGQDEPFQGRFGDRGKVVKYFINQLGVLSHKAIKGFFSHCGWNSVMESISMGVPILAYPMAAEQKLNAKFVVDVLKVGIRIWPSKMGDGGPGSELVPSEDVQTLARELILGEGGKCAAAKASELATSARAAMETGGSSFESLELMLREVCEIGRPEAKE

SEQ ID NO: 96776 - protein, 126 aa, Setaria italica
  Transcript Sequence Number=SeqID_30802
  Homolog annotation: Hit_ID=Q108V8; Match level="QueryCoverage=96%, HitCoverage=4%, E-value=7e-48, Identity=79%"; Hit description=DNAJ heat shock N-terminal domain-containing protein, putative, expressed
AVTRIMGLLRNGSEGVAAEGSGLVAMLIGGGPGDASMLMDTRGESHATYMHAKSVLFSHPMYVPILVNRLKPISVSPLLSLSVVEVLEAMLCEPHGETTQHATFVELLRQVAGLRRRLFACFVLSI

SEQ ID NO: 96777 - protein, 94 aa, Setaria italica
  Transcript Sequence Number=SeqID_30803
  Homolog annotation: Hit_ID=B6SWN7; Match level="QueryCoverage=100%, HitCoverage=19%, E-value=7e-27, Identity=74%"; Hit description=Amino acid permease
HAKISKQDSFLGELEDGGGGGGGEHDELPLIGDGPAGPPEGSSVTAAVFNLATSIIGAGIMALPATMKVLGVAVGLVSILVMGVLSEITIELLV

SEQ ID NO: 96778 - protein, 69 aa, Setaria italica
  Transcript Sequence Number=SeqID_30804
MELSNLRSQRIVRSGSMVAVFVPVDDDGVVVLDGPPERVVELVHAVDLLHLHRLGHVPEVCARPDPLPA

SEQ ID NO: 96779 - protein, 170 aa, Setaria italica
  Transcript Sequence Number=SeqID_30805
  Gene Ontology: Mol. function=protein disulfide oxidoreductase activity; Cellular component=chloroplast; Biological process=cell redox homeostasis
  Homolog annotation: Hit_ID=B6TXH7; Match level="QueryCoverage=92%, HitCoverage=84%, E-value=6e-62, Identity=73%"; Hit description =Thioredoxin-like 5
  Pfam annotation: Domain name=Thioredoxin; Domain location=66-162; Score=16.1; E_value=1.1e-05; Accession=PF00085.12; Description =Thioredoxin
  Subcellular localization annotation: CTP_CleavageSite=12; ConfidenceScore=5.06e-01
AAASPHPHSSAACSTVGGGAAGRVLWLWNGVGRERGRRERGQRVRAGAYFWDVSKPVEMEEIDSMDKLDDALRWSVENNHAVVIDWMASWCRKCIYLKPRLEKIAGEYPGVRFYFVDVNQVPQTVVKRGNITKMPTIQLWKDGEWKAEVIGGHKAWLVMDEVREMIQANK

SEQ ID NO: 96780 - protein, 73 aa, Setaria italica
  Transcript Sequence Number=SeqID_30806
  Gene Ontology: Cellular component=chloroplast; Biological process =electron transport chain
  Homolog annotation: Hit_ID=A6N1I7; Match level="QueryCoverage=82%, HitCoverage=46%, E-value=2e-25, Identity=93%"; Hit description =Thioredoxin-like 5
FVGLNIPSNFCCRVRFYFVDVNQVPQTVVKRGNITKMPTIQLWKDGEWKAEVIGGHKAWLVMDEVREMIQANK

SEQ ID NO: 96781 - protein, 86 aa, Setaria italica
  Transcript Sequence Number=SeqID_30807
LELFGCKKLEELPALWELPALQILRLWRLNSLHCLCSGGTTPVTFPKLNVLILLEMAKFEAWWEAHEVQGEEPIFPKVEELVINEC

SEQ ID NO: 96782 - protein, 81 aa, Setaria italica
  Transcript Sequence Number=SeqID_30808
WRLASGSKRKYLFCYLVYFDFSCPLWIMFKALTTVLHRISLFCFLLRWSISAGIEAAFTHDGRVVNLYSYCFCWICMYEKV

SEQ ID NO: 96783 - protein, 96 aa, Setaria italica
  misc_feature (10)..(10): Xaa can be any naturally occurring amino acid
  Transcript Sequence Number=SeqID_30809
  Homolog annotation: Hit_ID=B6UB15; Match level="QueryCoverage=68%, HitCoverage=14%, E-value=8e-15, Identity=66%"; Hit description=Amino acid-polyamine transporter
SVGDAFGRAXGAAVLNVCIASTTTGTLVVYLIIIGDVMSGSVGGGDEHAGVLRELFGARWWTGREFVLLVTAVFVLLPLVLRRRVGEFTFQLRRTF

SEQ ID NO: 96784 - protein, 456 aa, Setaria italica
  Transcript Sequence Number=SeqID_30810
  Homolog annotation: Hit_ID=B6UB15; Match level="QueryCoverage=99%, HitCoverage=98%, E-value=1e-154, Identity=66%"; Hit description =Amino acid-polyamine transporter
  Pfam annotation: Domain name=Aa_trans; Domain location=31-446; Score =103.3; E_value=8.2e-28; Accession=PF01490.10; Description =Transmembrane amino acid transporter protein
  Pfam annotation: Domain name=Trp_Tyr_perm; Domain location=31-442; Score=-237.5; E_value=0.0011; Accession=PF03222.5; Description =Tryptophantyrosine permease family
  Pfam module annotation: Pfam domain module=Aa_trans::Trp_Tyr_perm; Domain location=31-446::31-442
MTPPASKGKSAGGLDDEPLLPEFFPGDGGGGGASVSGAVFNVSTSIVGAGIMSIPAAMRVLGVAPALLLIAAVAALADVSVEFMLRYTRWAAAKQATTYAGLMGDAFGRAGAAVLNVCIASTTTGTLVVYLIIIGDVMSGSVGGGDEHAGVLRELFGARWWTGREFVLLVTAVFVLLPLVLRRRVDSLRFTSAISIMLAVVFMLISLGIAVYALLKGTATMPRMLPDFSRLSSPFELFTAVPVIVVAFTFHFNVHPIRAELSKTSDMKAAVRISLVLCAAIYAAVGFFGFLLFGDATMADVLANFDRSSGAGVPQALNDAARLSYALHLVLVFPLLFFSLRVNVDELLFPGRRPLATDTRRFVSLTAVLMAVLYALAIAIPSIWTLFEYSGSTFAVTISLIFPGAIVLRDVHGIAKRKDKALAATMIILAVVTSSIAIASNIMSSISDKVREGHDS

SEQ ID NO: 96785 - protein, 109 aa, Setaria italica
  misc_feature (33)..(33): Xaa can be any naturally occurring amino acid
  misc_feature (56)..(56): Xaa can be any naturally occurring amino acid
  misc_feature (108)..(108): Xaa can be any naturally occurring amino acid
  Transcript Sequence Number=SeqID_30811
  Gene Ontology: Mol. function=protein serine/threonine kinase activity; Biological process=protein amino acid phosphorylation
  Homolog annotation: Hit_ID=Q2R2E4; Match level="QueryCoverage=97%, HitCoverage=22%, E-value=2e-24, Identity=46%"; Hit description =Leucine Rich Repeat family protein, expressed
  Pfam annotation: Domain name=LRR_1; Domain location=1-23; Score=11.0; E_value=2.4; Accession=PF00560.25; Description=Leucine Rich Repeat
  Pfam annotation: Domain name=LRR_1; Domain location=25-48; Score=8.3; E_value=7.9; Accession=PF00560.25; Description=Leucine Rich Repeat
  Pfam annotation: Domain name=LRR_1; Domain location=74-96; Score=5.3; E_value=29; Accession=PF00560.25; Description=Leucine Rich Repeat
  Pfam module annotation: Pfam domain module=LRR_1::LRR_1::LRR_1; Domain location=1-23::25-48::74-96
  Subcellular localization annotation: CTP_CleavageSite=66; ConfidenceScore=5.17e-01
NLSRLTLGFNNFTGLIPNSIWNISSLQAFTVQXNYLSGSLPPNAFNSFPNLQIIGXDHNQFRGSIPASIANASSLWLVQLGANPLSGIIPPEIGGLKHLKLLELSGNXA

SEQ ID NO: 96786 - protein, 417 aa, Setaria italica
  Transcript Sequence Number=SeqID_30812
  Gene Ontology: Mol. function=protein disulfide isomerase activity; Cellular component=endoplasmic reticulum lumen; Biological process =cell redox homeostasis
  Homolog annotation: Hit_ID=B6TWZ8; Match level="QueryCoverage=93%, HitCoverage=93%, E-value=0.0, Identity=94%"; Hit description=PDIL5-2- Zea mays protein disulfide isomerase
  Pfam annotation: Domain name=Calsequestrin; Domain location=2-370; Score=-87.4; E_value=0.0047; Accession=PF01216.9; Description =Calsequestrin
  Pfam annotation: Domain name=Thioredoxin; Domain location=37-141; Score=128.9; E_value=1.6e-35; Accession=PF00085.12; Description =Thioredoxin
  Pfam module annotation: Pfam domain module=Calsequestrin::Thioredoxin; Domain location=2-370::37-141
MATRVLPPALLPLLLLLLPLSARATAAAGEEFSRDGRVIDLDESNFEAALGAIDFLFVDFYAPWCGHCKRLAPELDEAAPVLAGLSEPIVVAKVNADKYRKLGSKYGVDGFPTLMLFIHGVPIEYTGSRKADQLVRNLKKFVSPDVSILESDTAIKNFVENAGTSFPIFLGFGVNESLIAEYGKKYKKRAWFAVAKDFSEDIMVTYEFDKVPALVAIHPQYKEQSLFYGPFEGNFLEDFVRQSLLPLVVPINTETLKMLNDDERKVVLTILEDDSDENSTQLVQVLRSAATANRDLVFGYVGIKQWDEFVETFDVSKSSQLPKLLVWDRNEEYELVDGSERLEEGDLASQISQFLEGYRAGRTTKKKVTGPSFMGFLNSLVSLNSLYILIFVIALLVVMVYFAGQDDTPQPRRVHEE

SEQ ID NO: 96787 - protein, 90 aa, Setaria italica
  Transcript Sequence Number=SeqID_30813
  Gene Ontology: Mol. function=DNA binding; Biological process =regulation of transcription
  Homolog annotation: Hit_ID=Q6JAH1; Match level="QueryCoverage=75%, HitCoverage=12%, E-value=5e-13, Identity=59%"; Hit description =Putative NAM protein
MEDMMMRQQRVYAQLLAEMKLQKAQQERAPCAGQQQIMPAASTQPACFDEGANHPAGTKVMVPCTQFPAPHNFYPCSGVQQQLQQSSPAI

SEQ ID NO: 96788 - protein, 247 aa, Setaria italica
  Transcript Sequence Number=SeqID_30814
  Gene Ontology: Mol. function=transferase activity
  Homolog annotation: Hit_ID=B6SVP9; Match level="QueryCoverage=100%, HitCoverage=49%, E-value=1e-110, Identity=78%"; Hit description =Glycosyltransferase
  Pfam annotation: Domain name=DUF563; Domain location=2-247; Score =242.8; E_value=8.2e-70; Accession=PF04577.6; Description=Protein of unknown function (DUF563)
VHTDVCFMAGDVRTDAASLSLLLFPPHDQQKQAPNGSSSTATEEERVRPYPRKWERFIMEKIPEVRLRVARPPDERRCDVRHDAPLLVMSAGGYTGNLFHAFNDGILPSWLTVQHLRRRVVLGVLSYNPWWAGTFGEIISGLSDHHVVDLLHDKRTHCFPGAIVGTRFHGILVVDPGRLRDNKTIADFHDLLADAYEKPKMTPEKTQAAPAETRRPRLGIVSRKGTRVIENQAAVAALASSVGFDVE

SEQ ID NO: 96789 - protein, 85 aa, Setaria italica
  Transcript Sequence Number=SeqID_30815
  Gene Ontology: Mol. function=electron carrier activity; Biological process=oxidation reduction
  Homolog annotation: Hit_ID=C4PJN6; Match level="QueryCoverage=98%, HitCoverage=15%, E-value=2e-35, Identity=83%"; Hit description =Cytochrome P450 monooxygenase
MVEEYTFTFLAMAVGFLVVVYLYEPYWKVRHVPGPVPLPLIGHLHLLAKHGPDVFPVLAKKHGPVFRFHVGRQPLTIVADAELCK

SEQ ID NO: 96790 - protein, 47 aa, Setaria italica
  Transcript Sequence Number=SeqID_30816
  Gene Ontology: Mol. function=unfolded protein binding; Cellular component=prefoldin complex; Biological process=protein folding
  Homolog annotation: Hit_ID=B6TWV7; Match level="QueryCoverage=91%, HitCoverage=27%, E-value=1e-16, Identity=93%"; Hit description =Protein UXT
MLNACRQIDEYTHLIASIKAQIKLVCEGIRELLQLPSEKELSPRNTW

SEQ ID NO: 96791 - protein, 252 aa, Setaria italica
  misc_feature (227)..(227): Xaa can be any naturally occurring amino acid
  Transcript Sequence Number=SeqID_30817
  Gene Ontology: Cellular component=mitochondrion
  Homolog annotation: Hit_ID=B9RMY5; Match level="QueryCoverage=98%, HitCoverage=28%, E-value=2e-65, Identity=48%"; Hit description =Pentatricopeptide repeat-containing protein, putative
  Pfam annotation: Domain name=PPR; Domain location=12-46; Score=33.2; E_value=1.1e-06; Accession=PF01535.12; Description=PPR repeat
  Pfam annotation: Domain name=PPR; Domain location=47-81; Score=3.5; E_ value=3.4; Accession=PF01535.12; Description=PPR repeat
  Pfam annotation: Domain name=PPR; Domain location=85-119; Score=4.4; E_value=2.7; Accession=PF01535.12; Description=PPR repeat
  Pfam module annotation: Pfam domain module=PPR::PPR::PPR; Domain location=12-46::47-81::85-119
TMVADGIQCSASTHNTVIDGLFKNGRAEAACRLFYELRRKGQLLDGIAYSIMVREFCKEGVGDQVAEALDLVKEMEQRGFVVDLVTITSLLIGFNKSKRWDLEEQIVKFIRDGSVLPDAIRWKSNMMVALRGPQDRGKDGTPMFSFDGNMDDVMSLVNPAGHTDTDEGPTNNDPKDDWSLSPHLDHIAKRADSLNNSVIFTMHRGQRVQGMGGQTFDADMINTYLSXIFLAKGKLSVACKLFEIFTNLGNKG

SEQ ID NO: 96792 - protein, 121 aa, Setaria italica
  Transcript Sequence Number=SeqID_30818
  Gene Ontology: Mol. function=protein serine/threonine kinase activity; Biological process=protein amino acid phosphorylation
  Homolog annotation: Hit_ID=B6SWL2; Match level="QueryCoverage=85%, HitCoverage=12%, E-value=1e-32, Identity=67%"; Hit description =Receptor-like kinase
  Pfam annotation: Domain name=B_lectin; Domain location=1-59; Score= -15.5; E_value=0.069; Accession=PF01453.16; Description=D-mannose binding lectin
RLLHSGNLVVLRHRNSSAVLWQSFDHPSNTLLPGMKTGKNLWTGAEWYLTSWRSANDPAPGPYRRGTQTAGLPENVVWHGGAKKYRTGPWNALWFNGVPEMRSYAGADPGPGLPGLQPGAR

SEQ ID NO: 96793 - protein, 193 aa, Setaria italica
  Transcript Sequence Number=SeqID_30819
  Gene Ontology: Mol. function=protein tyrosine kinase activity; Cellular component=integral to membrane; Biological process=protein amino acid phosphorylation
  Homolog annotation: Hit_ID=Q5QNM3; Match level="QueryCoverage=95%, HitCoverage=27%, E-value=1e-83, Identity=73%"; Hit description =Leucine-rich receptor-like protein kinase-like
  Pfam annotation: Domain name=Pkinase_Tyr; Domain location=4-190; Score=-141.8; E_value=0.00027; Accession=PF07714.9; Description =Protein tyrosine kinase
NRSKRTGLRSAEMCFKKEIDTMSRVNHKNFTNLLGYCLENEPFMRMMVFEFSPHGSLSQHLHLKEFEDLDWAARMRVIMGVAYCLQYMHHELDPPVAIHDVRSDSTFISDDYAAKVADVSVWDELAAKAKAGKEDGSSRCECPPDLQGNVYGFGALMIEIISGRVPEPDDHKPMCSWASEHLKDKNYSKLVDA

SEQ ID NO: 96794 - protein, 226 aa, Setaria italica
  misc_feature (36)..(36): Xaa can be any naturally occurring amino acid
  misc_feature (71)..(71): Xaa can be any naturally occurring amino acid
  misc_feature (174)..(174): Xaa can be any naturally occurring amino acid
  misc_feature (200)..(200): Xaa can be any naturally occurring amino acid
  Transcript Sequence Number=SeqID_30820
  Gene Ontology: Mol. function=nucleoside-triphosphatase activity; Cellular component=mitochondrial matrix; Biological process=ATP -dependent proteolysis
  Homolog annotation: Hit_ID=A3BNM4; Match level="QueryCoverage=99%, HitCoverage=23%, E-value=1e-108, Identity=81%"; Hit description=Lon protease homolog
  Pfam annotation: Domain name=AAA; Domain location=60-225; Score=86.3; E_value=1.1e-22; Accession=PF00004.21; Description=ATPase family associated with various cellular activities (AAA)
MKFLDSLYVIFSIYGSDENFDVHHAQRILDEDHYGXARCKERILEFIAVGKLRGSSQGKIICLSGPPGVGXTSIGRSIARALNRKFYRFSVGGLADVAEIKGHRRTYVGAMPGKMVQCLKSVGTANPLVLIDEIDKLGRGHSGDPASALLELLDPEQNANFLDHYLDVPIDLSXRMEIISIAGYITDEKMHIARDYLEKXTTREASGIKPEQVEVTDDALLALIET

SEQ ID NO: 96795 - protein, 576 aa, Setaria italica
  misc_feature (70)..(70): Xaa can be any naturally occurring amino acid
  Transcript Sequence Number=SeqID_30821
  Gene Ontology: Mol. function=nucleoside-triphosphatase activity; Cellular component=mitochondrial matrix; Biological process=ATP -dependent proteolysis
  Homolog annotation: Hit_ID=Q10MJ8; Match level="QueryCoverage=95%, HitCoverage=57%, E-value=0.0, Identity=79%"; Hit description=Lon protease homolog
  Pfam annotation: Domain name=AAA; Domain location=24-224; Score =176.7; E_value=6.6e-50; Accession=PF00004.21; Description=ATPase family associated with various cellular activities (AAA)
  Pfam annotation: Domain name=AAA_2; Domain location=22-167; Score= -39.2; E_value=0.012; Accession=PF07724.6; Description=ATPase family associated with various
  Pfam annotation: Domain name=AAA_3; Domain location=25-166; Score= -15.4; E_value=0.018; Accession=PF07726.3; Description=ATPase family associated with various
  Pfam annotation: Domain name=AAA_5; Domain location=24-172; Score= -0.7; E_value=0.0011; Accession=PF07728.6; Description=ATPase family associated with various
  Pfam annotation: Domain name=Lon_C; Domain location=357-564; Score =339.3; E_value=7.3e-99; Accession=PF05362.5; Description=Lon protease (S16) C-terminal proteolytic domain
  Pfam module annotation: Pfam domain module=AAA::AAA_2::AAA_3::AAA _5::Lon_C; Domain location=24-224::22-167::25-166::24-172::357-564
FEIKFVGSLVLEFSSHLSFTAGKIICLSGPPGVGKTSIGRSIARALNRKFYRFSVGGLADVAEIKEQKSXGHRRTYVGAMPGKMVQCLKSVGTANPLVLIDEIDKLGRGHSGDPASALLELLDPEQNANFLDHYLDVPIDLSKVLFVCTANVIEMIPSPLLDRMEIISIAGYITDEKMHIARDYLEKNTREASGIKPEQVEVTDDALLALIENYCREAGVRNLKKHIEKIYRKIALKLVRQGLSNEPPRDITIVEANEEPASFDVATKVEDENSKKSLAKDASVDVHPTDSSLENINVVPLTTESAVGHNEHSNEAPTEKILEETAKVFNTSSTPEANESVQRTTEALIDIPVEKIIVNASNLGDFVGKPVFQAERLYDQTPVGVVMGLAWNSMGGSTLYIETAKVGESEGKGALVVTGQLGDVMKESAQIAHTVCRAVLLEKEPNNSFFAKSKLHLHVPAGATPKDGPSAGCTMVTSMLSLAMGKSVKKDLAMTGEVTLTGRVLPIGGVKEKTIAARRSGVKTIIFPSANRRDFDELASNVKEGLEVHFVDKYNEIYDIAFTSDAESPRHKKASG

SEQ ID NO: 96796 - protein, 76 aa, Setaria italica
  Transcript Sequence Number=SeqID_30822
PVPLFPPLALAASERERPRRRLPRRDHRSNPQKTNSLQPGFDSPPPLLISCCRLLSSGRKALAGSSADHPRRAGDN

SEQ ID NO: 96797 - protein, 115 aa, Setaria italica
  Transcript Sequence Number=SeqID_30823
  Gene Ontology: Mol. function=transferase activity, transferring glycosyl groups; Cellular component=integral to membrane; Biological process=cell wall organization and biogenesis
  Homolog annotation: Hit_ID=Q2QNS6; Match level="QueryCoverage=99%, HitCoverage=9%, E-value=5e-59, Identity=96%"; Hit description =Cellulose synthase-like protein D4
AHQGRPAGALAVPREPLDAATVAEAISVISCFYEDKTEWGRRIGWIYGSVTEDVVTGYRMHNRGWRSVYCVTRRDAFRGTAPINLTDRLHQVLRWATGSVEIFFSRNNALFASPR

SEQ ID NO: 96798 - protein, 98 aa, Setaria italica
  misc_feature (77)..(98): Xaa can be any naturally occurring amino acid
  Transcript Sequence Number=SeqID_30824
VQVHSLDDPRGWYSLFLCCCTVGSTDGVDPCVLRRVLYHSFVLRFHQCYEIVTECHVDLVRLCSNCSLLIVTERRIXXXXXXXXXXXXXXXXXXXXXX

SEQ ID NO: 96799 - protein, 419 aa, Setaria italica
  Transcript Sequence Number=SeqID_30825
  Gene Ontology: Mol. function=acyltransferase activity; Cellular component=integral to membrane; Biological process=metabolic process
  Homolog annotation: Hit_ID=Q5JK26; Match level="QueryCoverage=92%, HitCoverage=81%, E-value=0.0, Identity=78%"; Hit description =Putative tafazzin isoform
  Pfam annotation: Domain name=Acyltransferase; Domain location=70-217; Score=83.6; E_value=7.2e-22; Accession=PF01553.13; Description =Acyltransferase
  Subcellular localization annotation: CTP_CleavageSite=16; ConfidenceScore=5.23e-01
YRGADQSSTSTGTSTGATAKPSSSALRFYRKKVGKEVDGIEDSVIFRSLQALAVPLIGNACYVFMHGLNSVQIYGAEKLHQALQERPKGKPLLTVSNHVAAMDDPFVIASLLPPSIMLEAQKLRWTLCATDRCFTNPVLSTFFRSVKVLPVSRGDGIYQKGMDMALSKLNSGGWVHIFPEGSRSRDGGKTIAPAKRGVGRLVMDTDSLPVVIPFVHTGMQDIMPVGKRIPRAGKRVIVVVGDPINFDDLIIDNSDDTQHTSRGILYDKATQRIGQRLQELKVEVDRLAAEQQSELQNHNIHNVSDDGYRLWQQVDWEGFGIGNSMLSSEPSAVQEQSKEAEPELRLEVEQSVSPAPSDVAVPNWFQRHVDPSELMGFAARGLIKNGKLEEGYRELQEPTTLNTWWWSQANNAVPRWSIA

SEQ ID NO: 96800 - protein, 62 aa, Setaria italica
  Transcript Sequence Number=SeqID_30826
  Homolog annotation: Hit_ID=B4FSU9; Match level="QueryCoverage=95%, HitCoverage=9%, E-value=4e-10, Identity=62%"; Hit description =Hydrolase, hydrolyzing O-glycosyl compounds
DGRSIVTNRCRCLSGGSSRCDPESQWFKLVSSTRKVASGNSVLAQLLLPVLKTFKIWLFNLF

SEQ ID NO: 96801 - protein, 90 aa, Setaria italica
  Transcript Sequence Number=SeqID_30827
QDGELEMVKSKEERRAKRQIFKAKLKNFTRHACKVTACTMTGAKIGALILDPVVCTLLGFSYGVISVLKDDVTGDVGPTVLDVVLPSGQN

SEQ ID NO: 96802 - protein, 81 aa, Setaria italica
  Transcript Sequence Number=SeqID_30828
  Subcellular localization annotation: CTP_CleavageSite=61; ConfidenceScore=5.50e-01
SLPFLPPSHSTSNIPPGSHISLHPKSACRIERTLQQGKLVKRGKLFAPPWKLSSLRPSPTACSRRSGPRSPAALEIDASPR

SEQ ID NO: 96803 - protein, 56 aa, Setaria italica
  misc_feature (49)..(49): Xaa can be any naturally occurring amino acid
  Transcript Sequence Number=SeqID_30829
MEAPCLALLLFFGTLLVLPQSSHGATRYYTFNVTLQKVTRLCTTRAIPXVNGKFPR

SEQ ID NO: 96804 - protein, 225 aa, Setaria italica
  Transcript Sequence Number=SeqID_30830
  Gene Ontology: Mol. function=metal ion binding
  Homolog annotation: Hit_ID=B9SDP3; Match level="QueryCoverage=97%, HitCoverage=77%, E-value=2e-73, Identity=60%"; Hit description =Ubiquitin-protein ligase, putative
  Pfam annotation: Domain name=SPX; Domain location=1-96; Score=-9.8; E_ value=2.2e-05; Accession=PF03105.11; Description=SPX domain
  Pfam annotation: Domain name=zf-C3HC4; Domain location=167-215; Score= 17.4; E_value=0.0011; Accession=PF00097.17; Description=Zinc finger, C3HC4 type (RING finger)
  Pfam module annotation: Pfam domain module=SPX::zf-C3HC4; Domain location=1-96::167-215
IEECSLTELNKEASEIAGCFRSRVQRLLHLHIPSGIQRYIWRFRQCFIDDQQIMVQEGRMLLNYVTMNAIAIRKILKKYDKIHGSVSGRDFKSKMQTAHIELLQSPWLIELGAFHLNCDDLDADELGGGGFFKNGFFKNFSCDLSGAQPLLTMTISETLKYEYSLTCPICLDTLFNPYALSCGHLFCKACACGAASVYIFQGVKSAPLDAKCPVCRAVGCFCHAV

SEQ ID NO: 96805 - protein, 76 aa, Setaria italica
  Transcript Sequence Number=SeqID_30831
  Subcellular localization annotation: CTP_CleavageSite=35; ConfidenceScore=5.50e-01
MASLPLCRSPSSLLPSWPHRPISASFHPKNPSSPVAAHVSVQDPPPQQDPAPPSDSSPNGSRPSSNTRYLWVNPNS

SEQ ID NO: 96806 - protein, 235 aa, Setaria italica
  Transcript Sequence Number=SeqID_30832
MGGGGGGGGGSPAASGSGSSSEDDGDAAWKAAINSIAAVGFGVPSSNGVAKAVSGGSGEADSDAELEQPHEGKPQAPKLKLYQIKVRNMLDDILEKNLEIVKAPCLNLTDPTETEGGIKLFKKAPPGIKMDSTDKLHVQLKRPRIVPGEEIDEKSKKFRHMLRSVVVDGSDILVSAKNASQRSLARLEARETAAKAKAKREEERVQELKKVRGEKWLPSIARQMKEEKDWEQRRQ

SEQ ID NO: 96807 - protein, 78 aa, Setaria italica
  Transcript Sequence Number=SeqID_30833
  Gene Ontology: Mol. function=hydrolase activity, hydrolyzing O -glycosyl compounds; Cellular component=extracellular region; Biological process=carbohydrate metabolic process
  Homolog annotation: Hit_ID=Q01L59; Match level="QueryCoverage=100%, HitCoverage=26%, E-value=3e-26, Identity=75%"; Hit description =OSIGBa0111I14.7 protein
RYLKGYSGKGRKKVWITAAPQCPFPDRMLGQALQTGLFDRIHVQFYNNPVCSYRAGNVEAFTRAWQKWTRSFPRSSVY

SEQ ID NO: 96808 - protein, 99 aa, Setaria italica
  misc_feature (21)..(21): Xaa can be any naturally occurring amino acid
  Transcript Sequence Number=SeqID_30834
  Subcellular localization annotation: CTP_CleavageSite=38; ConfidenceScore=5.76e-01
RRSELPSPSLPPPSFRPGPAXSPPRQTSPRPYPRRDARAPLLQAAPPPSRRRRPSESKPEKLPQTGSASLSACCRLLRWGVAMAPARDAEDELEMKVEK

SEQ ID NO: 96809 - protein, 60 aa, Setaria italica
  Transcript Sequence Number=SeqID_30835
  Gene Ontology: Mol. function=metal ion binding; Cellular component =nucleus; Biological process=regulation of transcription, DNA -dependent
  Homolog annotation: Hit_ID=P38564; Match level="QueryCoverage=90%, HitCoverage=24%, E-value=7e-18, Identity=84%"; Hit description=Dof zinc finger protein MNB1A
MQGAAAEPGRRLAQQQFAGVDLRRPKGYAVPAPAEGDPCPRCESRDTKFCYYNNYNTSQP

SEQ ID NO: 96810 - protein, 389 aa, Setaria italica
  misc_feature (18)..(18): Xaa can be any naturally occurring amino acid
  Transcript Sequence Number=SeqID_30836
  Gene Ontology: Mol. function=phosphotransferase activity, alcohol group as acceptor; Cellular component=cytosol; Biological process =nucleobase, nucleoside, nucleotide and nucleic acid metabolic process
  Homolog annotation: Hit_ID=B6U6Y9; Match level="QueryCoverage=100%, HitCoverage=79%, E-value=1e-180, Identity=78%"; Hit description=ATP binding protein
  Pfam annotation: Domain name=dNK; Domain location=136-283; Score =104.7; E_value=3.2e-28; Accession=PF01712.11; Description =Deoxynucleoside kinase
DKGFDGVAQLKQLYRDKXFGKSNEKMVEFLQNSVGIIHKNHAESITLFIKESVDEELKGTDTSKLPKNRRLTFCVEGNISVGKTTFLQRIANETIELRDLVEIVPEPIAKWQDVGPEHFNILDAFYAEPERYAYTFQNYVFVTRVMQEKESACGMKPLRLMERSVFSDRMVFVRAVHEANWMNEMEISIYDSWFDPVVSSLPGLIPDGFIYLRASPDTCHKRMMVRKRSEEGGVTLDYLRGLHEKHESWLLPSKGGASGVLSVSQLPVHLEGSLPADIRDRVFYLEGDHMHSSIQKVPALVLDCEHDIDFNKDIEAKRQYARQVAEFFEFVKKKKESSTAETIDGDKSINKQIMLPQSGGLWVPGSSRLPESALKSFDFRRTMSSFLST

SEQ ID NO: 96811 - protein, 157 aa, Setaria italica
  Transcript Sequence Number=SeqID_30837
  Homolog annotation: Hit_ID=Q8W0Q5; Match level="QueryCoverage=94%, HitCoverage=55%, E-value=7e-25, Identity=31%"; Hit description =Putative vegetative storage protein
  Pfam annotation: Domain name=PPR; Domain location=42-75; Score=39.4; E_value=1.4e-08; Accession=PF01535.12; Description=PPR repeat
  Pfam annotation: Domain name=PPR; Domain location=76-110; Score=6.7; E_value=1.4; Accession=PF01535.12; Description=PPR repeat
  Pfam module annotation: Pfam domain module=PPR::PPR; Domain location =42-75::76-110
  Subcellular localization annotation: CTP_CleavageSite=65; ConfidenceScore=5.04e-01
KLGYEDTASCSVANSLMTFYSDFGLPDAAEKVFASTSNRNSVSWNAMIKGLVNNGRVNGALTVFREMRLENQPDVATLVTIISCCGDQGLVSEGRAIHGYIMRKGLLHEEPSVGNSLLDLYLKCDESSTASLLFRTMPRRDLISWNTMISGYSRNDS

SEQ ID NO: 96812 - protein, 82 aa, Setaria italica
  Transcript Sequence Number=SeqID_30838
  Gene Ontology: Mol. function=metal ion binding
  Homolog annotation: Hit_ID=Q8H055; Match level="QueryCoverage=95%, HitCoverage=13%, E-value=4e-25, Identity=73%"; Hit description =Putative DHHC-type zinc finger protein
FRISSSTAEEMQGVISHSAHKGIEFTRSSSDGYEASGGEDSDCIPSRIVHRSSNWDNVILNAGQGGPAVDLHMQSSEGFVLT

SEQ ID NO: 96813 - protein, 207 aa, Setaria italica
  Transcript Sequence Number=SeqID_30839
  Gene Ontology: Mol. function=transferase activity, transferring glycosyl groups; Cellular component=Golgi apparatus; Biological process=protein amino acid glycosylation
  Homolog annotation: Hit_ID=B6TZ56; Match level="QueryCoverage=100%, HitCoverage=53%, E-value=1e-114, Identity=96%"; Hit description=Beta- 1,3-galactosyltransferase sqv-2
  Pfam annotation: Domain name=Galactosyl_T; Domain location=25-207; Score=171.5; E_value=2.5e-48; Accession=PF01762.13; Description =Galactosyltransferase
KASESTGRRKYLMVIGINTAFSSRKRRDSIRNTWMPQGEMRKKLEEEKGIIIRFVIGHSAISGGIVDRAIQAEDKKHGDFMRLDHVEGYLELSGKTRTYFATAVALWDANFYVKVDDDVHVNIATLGNILSKHISKPRVYIGCMKSGPVLSDKDVRYYEPEHWKFGEVGNKYFRHATGQLYAISKDLATYISINKHVLHKYINEDVS

SEQ ID NO: 96814 - protein, 307 aa, Setaria italica
  Transcript Sequence Number=SeqID_30840
  Gene Ontology: Mol. function=Rho guanyl-nucleotide exchange factor activity
  Homolog annotation: Hit_ID=Q01H97; Match level="QueryCoverage=97%, HitCoverage=66%, E-value=1e-155, Identity=88%"; Hit description =B0103C08-B0602B01.6 protein
  Pfam annotation: Domain name=PRONE; Domain location=3-307; Score =343.8; E_value=3.2e-100; Accession=PF03759.5; Description=PRONE (Plant-specific Rop nucleotide
YGRKYLDKLIKERFSKLLLGEDMSGSGKGVSTSVAISNAITNLYATVFGSCHRLEPLPAEKKSMWRREMDCLLSVCDYIVEFFPSKEMLPDGTTREVMATRPRPDIYVNLPALKKLDDMLLEILDSFQKTEFWYVNDKGQKDDSVATPCRPASQRGDGKWWLPVPCVTKPGLTETARRDLQQKRDCASQIHKAAMAINNGVLAEIRIPDLYKQALPKCGRASVGDLIYRHMSFPGKFSPEYLLDCLEISSEHEALEAADRVEAAIHVWRRKASQSHSRSPWSAVKDLMESDKNVMLASRAEDVLLCL

SEQ ID NO: 96815 - protein, 128 aa, Setaria italica
  Transcript Sequence Number=SeqID_30841
  Subcellular localization annotation: CTP_CleavageSite=56; ConfidenceScore=5.81e-01
PPPFAGARSWGWPSCGPSPAASAPSSPSAPAAACRCSPAASAASRHLLPLSPLKTVARNPTSRTSPPLFRRPPRPEEDNAAGPIQQVFFISIRTHGDSGSSTRVDDGNSTTVDGYNAVITLSLPFLSV

SEQ ID NO: 96816 - protein, 95 aa, Setaria italica
  Transcript Sequence Number=SeqID_30842
  Gene Ontology: Mol. function=protein serine/threonine kinase activity; Biological process=protein amino acid phosphorylation
  Subcellular localization annotation: CTP_CleavageSite=21; ConfidenceScore=5.09e-01
MGGPSPRGRRATTSLALLLLLAGVAACPIPAVRAQATVFTGDVNGSGREITSFSFPGFGNELQKLNNLTFTGNTSLTQRSLQITPDTGNNPGSFL

SEQ ID NO: 96817 - protein, 125 aa, Setaria italica
  misc_feature (115)..(115): Xaa can be any naturally occurring amino acid
  Transcript Sequence Number=SeqID_30843
  Gene Ontology: Mol. function=iron-sulfur cluster binding; Cellular component=cytoplasm; Biological process=rRNA processing
  Homolog annotation: Hit_ID=B9SNE8; Match level="QueryCoverage=99%, HitCoverage=36%, E-value=1e-53, Identity=82%"; Hit description =Catalytic, putative
TTTKLLIRLQNGESVEAVIMRYDTTLGKYDGKPRSGGVRSTLCVSSQVGCKMGCRFCATGTMGFKSNLSSGEIVEQLVHASRYSQIRNVVFMGMGEPMNNYNALVEAIGVFTGSXPFQLSPKRIT

SEQ ID NO: 96818 - protein, 112 aa, Setaria italica
  Transcript Sequence Number=SeqID_30844
  Subcellular localization annotation: CTP_CleavageSite=56; ConfidenceScore=5.73e-01
HPSAPLSEPASASSSSSLLVSGPLGASSSTTSVTTGFPLRLHRGGLHQGVVRPGAVAAVAAGQGDAIDPWTRDSYKCGGCRPRGRRRGRRHGRASEWSLWGGSGDARERRPL

SEQ ID NO: 96819 - protein, 270 aa, Setaria italica
  misc_feature (38)..(38): Xaa can be any naturally occurring amino acid
  misc_feature (122)..(122): Xaa can be any naturally occurring amino acid
  Transcript Sequence Number=SeqID_30845
  Gene Ontology: Biological process=cell wall catabolic process
  Homolog annotation: Hit_ID=B6SSA9; Match level="QueryCoverage=97%, HitCoverage=75%, E-value=6e-70, Identity=60%"; Hit description=LysM domain containing protein
LVSDSQMFAHKRLLIPLPGMPMPASVRLSSSGQRMKRXITWAPNHQHDRDITDSLDSANSAQKGASPAMSTLQRYYGLSSQKGNTTDCSTEMSMYCKGSFQSSLGETLLSCSAAPGTDRSWXMEEAVNGFSSANGANGNKSHGVPKPKQDVSMRRRQKVEAESNATDTQDDFLADPIKAIKSLLPRPISSIRLSMGTGSPDSSQKSNISFLNGFKSVRKSPSAPNFADAENAVSMWSSSKWTFNHESFTRPLLDGLPKPVSARRMKTALD

SEQ ID NO: 96820 - protein, 33 aa, Setaria italica
  Transcript Sequence Number=SeqID_30846
ILERKALVEGGRISLAQEMALKLDALRKTPLRG

SEQ ID NO: 96821 - protein, 137 aa, Setaria italica
  Transcript Sequence Number=SeqID_30847
  Homolog annotation: Hit_ID=Q84VC6; Match level="QueryCoverage=65%, HitCoverage=35%, E-value=6e-27, Identity=73%"; Hit description=S -ribonuclease-binding protein SBP1-like protein (Fragment)
  Subcellular localization annotation: CTP_CleavageSite=55; ConfidenceScore=5.40e-01
MAFFSHHHLQQPHPQQAPPPPQHQQQQVLPSFRNALPVPVDGQIPAPLAFFNPPPAFPEQPAQAPLVDAVGLTAAAGLGWRQPREQELLGENSQMSSIDFLQTGSAVSTGLALSLEDRRHGGGGGGAGNSSGDSPLL

SEQ ID NO: 96822 - protein, 296 aa, Setaria italica
  Transcript Sequence Number=SeqID_30848
  Gene Ontology: Mol. function=zinc ion binding; Cellular component =nucleus
  Homolog annotation: Hit_ID=Q84VC6; Match level="QueryCoverage=63%, HitCoverage=75%, E-value=4e-81, Identity=83%"; Hit description=S -ribonuclease-binding protein SBP1-like protein (Fragment)
  Pfam annotation: Domain name=zf-C3HC4; Domain location=250-284; Score= 6.2; E_value=0.02; Accession=PF00097.17; Description=Zinc finger, C3HC4 type (RING finger)
KQGQAFFNPPPAFPEQPAQAPLVDAVGLTAAAGLGWRQPREQELLGENSQMSSIDFLQTGSAVSTGLALSLEDRRHGGGGGGAGNSSGDSPLLLLPMLDDDISREVQRLDADMDRFIKAQSERLRQSILEKVQAKQFEALASVEDKILRKIRDKEAEVETINKRNSELEDQIKQLAVEVGAWQQRAKYNESMINALKYNLEQVCAHQSKDFKEGCGDSEVDDTASCCNGGAVNLQLMPKENRQPKDLTACRVCKSSEACMLLLPCRHLCLCKECESKLSFCPLCQSSKILGMEIYM

SEQ ID NO: 96823 - protein, 121 aa, Setaria italica
  Transcript Sequence Number=SeqID_30849
  Gene Ontology: Mol. function=protein serine/threonine kinase activity; Biological process=protein amino acid phosphorylation
  Homolog annotation: Hit_ID=Q9AXH6; Match level="QueryCoverage=94%, HitCoverage=15%, E-value=2e-21, Identity=51%"; Hit description=Wall -associated protein kinase
VISISTETGEIRVVTWPSYMCYNLNSSSIFTSYAGPLWDLENPFVISSRSNEFTAIGCNTVAILESKSYYTGCVTYCESIEGAATNGSQCTGLGCCQTPISGNLTTIKNYWNNNSNGTYEN

SEQ ID NO: 96824 - protein, 77 aa, Setaria italica
  Transcript Sequence Number=SeqID_30850
  Gene Ontology: Mol. function=transferase activity, transferring glycosyl groups; Biological process=metabolic process
  Homolog annotation: Hit_ID=Q8LKT6; Match level="QueryCoverage=100%, HitCoverage=16%, E-value=3e-27, Identity=74%"; Hit description =Putative glucosyl transferase
YLNRSYVTNVWRTGLAVAPGADGIITKEELRSKVEEVVSDAEIKERARLFKDAARWCVSEWGSSYENFNKLVNLMSE

SEQ ID NO: 96825 - protein, 91 aa, Setaria italica
  Transcript Sequence Number=SeqID_30851
ANCAGPCRGCLPVAMPNNGLPAMLNFSIRHNLCRRATLLTWCCYDSIRYWFHPHASNCRYPIYRIPTGPTLKDLDALFFDVPLSSNTLQGL

SEQ ID NO: 96826 - protein, 69 aa, Setaria italica
  Transcript Sequence Number=SeqID_30852
MKNFLRKLHIGDSAGGDGASVHPPPPTKKGGGGRGGEHMHASGLSGWLSSVTGRPHAPPPPPSLPEPAA

SEQ ID NO: 96827 - protein, 97 aa, Setaria italica
  Transcript Sequence Number=SeqID_30853
  Gene Ontology: Mol. function=transketolase activity; Cellular component=chloroplast; Biological process=metabolic process
  Homolog annotation: Hit_ID=Q7SIC9; Match level="QueryCoverage=96%, HitCoverage=13%, E-value=2e-41, Identity=82%"; Hit description =Transketolase, chloroplastic
  Pfam annotation: Domain name=Transketolase_N; Domain location=2-97; Score=-126.7; E_value=4.3e-07; Accession=PF00456.13; Description =Transketolase, thiamine diphosphate b
ILYDEVMRYNPKNPYWFNRDRFVLSAGHGCVLQYALLYLAGYDSISEHELKQLGQWGSRTPGHPESFLTAGVEVTTGPLGQGIANAVGWHLRRKDNL

SEQ ID NO: 96828 - protein, 258 aa, Setaria italica
  misc_feature (12)..(12): Xaa can be any naturally occurring amino acid
  misc_feature (44)..(44): Xaa can be any naturally occurring amino acid
  misc_feature (203)..(203): Xaa can be any naturally occurring amino acid
  Transcript Sequence Number=SeqID_30854
PSECSVDSPCWXGTASRLSPFDIHQTLVAQSVKQESVASDAGQXQSSSIDYLQNFVTSKSKQNHSQPHVESGLSKAPGDIGTNLIQDSHGKELEFVKHGAAKCNSEKQCSEVIDDLIKRSGLNSAAPDFIPFSVRKSNTSNVTGSCSSSGLNISGILKAIKSMSEVLCGNYSDEIEMKEHDYNLLQSVIENLQSCLHKARKGXPLRVAFDKARGLKACYPQNAVSKSVTGNYSGSYTADNGKGIIISNLADSSRFLGD

SEQ ID NO: 96829 - protein, 143 aa, Setaria italica
  misc_feature (30)..(30): Xaa can be any naturally occurring amino acid
  Transcript Sequence Number=SeqID_30855
  Homolog annotation: Hit_ID=B6TU32; Match level="QueryCoverage=90%, HitCoverage=44%, E-value=2e-09, Identity=35%"; Hit description=OTU -like cysteine protease family protein
RCCTLWNMYSESSQLPGRLTQRVDLWNTSXSQALRHHARIGSVKKNINSSHLQTTACFDSLGRQSQCRQPTRSHILNVKSDILSHHKFATISWRLGSMPRKIGGIASGQGFAVSGMASAEGPVDNEVDSTQPAESSANFFPCS

SEQ ID NO: 96830 - protein, 58 aa, Setaria italica
  Transcript Sequence Number=SeqID_30856
  Pfam annotation: Domain name=MtN3_slv; Domain location=8-58; Score= -12.8; E_value=0.046; Accession=PF03083.8; Description=MtN3saliva family
MVPNTVRVAVGILGNAASMLLYAAPILTFRRVVKKGNVEEFSCVPYILALFNCLLTPG

SEQ ID NO: 96831 - protein, 101 aa, Setaria italica
  Transcript Sequence Number=SeqID_30857
  Homolog annotation: Hit_ID=O22692; Match level="QueryCoverage=81%, HitCoverage=21%, E-value=2e-13, Identity=47%"; Hit description =F8A5.1 protein
LALATAMQECQGSQQDRHLVRKALKSALSHLKADHAGDFLSCHGQRVREYVPDLAESIAGLILSSNDKEFQDECITLLGLGSNQDVSEGLVQSSICEKMVR

SEQ ID NO: 96832 - protein, 149 aa, Setaria italica
  Transcript Sequence Number=SeqID_30858
  Homolog annotation: Hit_ID=O22692; Match level="QueryCoverage=72%, HitCoverage=26%, E-value=4e-10, Identity=37%"; Hit description =F8A5.1 protein
QWLEQVKDNQGSQQDRHLVRKALKSALSHLKADHAGDFLSCHGQRYSLSQGHMNSGWFSTESIAGLILSSNDKEFQDECITLLGLGSNQDVSEGLVQSSICEKMVRVIELNDTKENAEDNAPYLFECEKLDEDSQLDEEDGDEDMIFDF

SEQ ID NO: 96833 - protein, 85 aa, Setaria italica
  Transcript Sequence Number=SeqID_30859
  Gene Ontology: Mol. function=succinate dehydrogenase activity; Cellular component=membrane; Biological process=tricarboxylic acid cycle
  Homolog annotation: Hit_ID=C3V133; Match level="QueryCoverage=100%, HitCoverage=21%, E-value=8e-13, Identity=53%"; Hit description=Heat shock protein 70 (Fragment)
SLGEYRDKIPAEVASEIEAAIADLRQEMASDDIEKIKAKLEAANKAVSKIGQHMSGGGSGGSQSGSGPQSGGDQAPEAEYEEVKK

SEQ ID NO: 96834 - protein, 105 aa, Setaria italica
  Transcript Sequence Number=SeqID_30860
QKKAKKKTKKKPKPAATGGGGGVLIVDEDPVWQKPVQVEDDEPASSGDDRPLVDEDIEVKRMRRLEAIRAARPYNAIAEDGSGWVTVAAPEEQGGGGVARRRRND

SEQ ID NO: 96835 - protein, 124 aa, Setaria italica
  misc_feature (29)..(29): Xaa can be any naturally occurring amino acid
  Transcript Sequence Number=SeqID_30861
  Homolog annotation: Hit_ID=UPI0001A7B203; Match level="QueryCoverage =100%, HitCoverage=17%, E-value=2e-32, Identity=54%"; Hit description= pentatricopeptide (PPR) repeat-containing protein
MNEPERAVRILAKMKRVNMKATLRTYELXLFSLFGNVNVPYEEGNVLSHVDVSKRISIIEMDMLNNEIQHSFVSMKNLIRAFGDEGMIEEMLRYLNVAEKVLWNINPYQKSDLYSVALHALVKA

SEQ ID NO: 96836 - protein, 110 aa, Setaria italica
  misc_feature (105)..(105): Xaa can be any naturally occurring amino acid
  Transcript Sequence Number=SeqID_30862
MDENHLQAGAGSLARLQDPSIHGHARISLSRIDQARKHPAMWKWWWLLLWWPWCPPPETWCFWWWMMPWTRRKWSTPQGMVMAPFCSKPYSSSAALRSATNSGCXRYPTG

SEQ ID NO: 96837 - protein, 49 aa, Setaria italica
  Transcript Sequence Number=SeqID_30863
  Gene Ontology: Mol. function=protein serine/threonine kinase activity; Cellular component=integral to membrane; Biological process=protein amino acid phosphorylation
  Homolog annotation: Hit_ID=B2ZPK4; Match level="QueryCoverage=100%, HitCoverage=7%, E-value=4e-18, Identity=93%"; Hit description=BRI1 -associated receptor kinase 1 protein
  Pfam annotation: Domain name=LRR_1; Domain location=21-43; Score =16.9; E_value=0.086; Accession=PF00560.25; Description=Leucine Rich Repeat
LELYSNSISGTIPSELGNLTNLVSLDLYLNNFTGPIPDSLGNLLKLRFL

SEQ ID NO: 96838 - protein, 114 aa, Setaria italica
  Transcript Sequence Number=SeqID_30864
LDGCRKIYAEPGWTVNFPKLHPKSLQTCDEQIQRLITESQVCPSHNEVEISEELNLPVHDKSEEAMASQSWEQTGNFECTTKEIFKDSSARTSHNVPQHHTTPTDIDIAAGPAD

SEQ ID NO: 96839 - protein, 129 aa, Setaria italica
  Transcript Sequence Number=SeqID_30865
  Gene Ontology: Mol. function=protein serine/threonine kinase activity; Cellular component=integral to membrane; Biological process=protein amino acid phosphorylation
  Homolog annotation: Hit_ID=B9T689; Match level="QueryCoverage=100%, HitCoverage=31%, E-value=5e-60, Identity=88%"; Hit description =BRASSINOSTEROID INSENSITIVE 1-associated receptor kinase 1, putative
ELSTGQRAFDLARLANDDDVMLLDWVKGLLKEKRLESLVDEDLQHNYIDVEVESLIQVALLCTQSSPMERPKMSEVVRMLEGDGLAERWEEWQKVEVVRQEVELGPHRTSEWILDSTDNLHAVELSGPR

SEQ ID NO: 96840 - protein, 592 aa, Setaria italica
  Transcript Sequence Number=SeqID_30866
  Gene Ontology: Mol. function=protein serine/threonine kinase activity; Cellular component=integral to membrane; Biological process=protein amino acid phosphorylation
  Homolog annotation: Hit_ID=Q5S1N9; Match level="QueryCoverage=94%, HitCoverage=88%, E-value=0.0, Identity=82%"; Hit description=Somatic embryogenesis receptor kinase
  Pfam annotation: Domain name=LRRNT_2; Domain location=31-71; Score =54.1; E_value=5.5e-13; Accession=PF08263.4; Description=Leucine rich repeat N-terminal domain
  Pfam annotation: Domain name=LRR_1; Domain location=123-145; Score =16.9; E_value=0.086; Accession=PF00560.25; Description=Leucine Rich Repeat
  Pfam annotation: Domain name=LRR_1; Domain location=147-169; Score =16.5; E_value=0.11; Accession=PF00560.25; Description=Leucine Rich Repeat
  Pfam annotation: Domain name=LRR_1; Domain location=171-192; Score =14.9; E_value=0.33; Accession=PF00560.25; Description=Leucine Rich Repeat
  Pfam annotation: Domain name=LRR_1; Domain location=75-97; Score=2.4; E_value=1.1e+02; Accession=PF00560.25; Description=Leucine Rich Repeat
  Pfam annotation: Domain name=LRR_1; Domain location=99-121; Score =19.6; E_value=0.013; Accession=PF00560.25; Description=Leucine Rich Repeat
  Pfam annotation: Domain name=Pkinase; Domain location=307-581; Score =142.6; E_value=1.2e-39; Accession=PF00069.17; Description=Protein kinase domain
  Pfam annotation: Domain name=Pkinase_Tyr; Domain location=307-581; Score=120.6; E_value=5.2e-33; Accession=PF07714.9; Description =Protein tyrosine kinase
  Pfam annotation: Domain name=SKG6; Domain location=236-271; Score =9.3; E_value=0.064; Accession=PF08693.2; Description=Transmembrane alpha-helix domain
  Pfam module annotation: Pfam domain module=LRRNT_2::LRR_1::LRR_1::LRR_ 1::LRR_1::LRR_1::Pkinase::Pkinase_Tyr::SKG6; Domain location=31 -71::123-145::147-169::171-192::75-97::99-121::307-581::307-581::236 -271
SAAAGATRRRWAVWALLLLRLLLHPAARVLANTEGDALHSLRTNLNDPNNVLQSWDPTLVNPCTWFHVTCNNDNSVIRVDLGNAALSGTLVPQLGQLKNLQYLELYSNSISGTIPSELGNLTNLVSLDLYLNNFTGPIPDSLGNLLKLRFLRLNNNSLSGSIPKSLTAITALQVLDLSNNNLSGEVPSTGSFSLFTPISFANNPNLCGPGTTKPCPGAPPFSPPPPYNPPTPVQAGSSSSSTGAIAGGVAAGAALLFAVPAIGFAYWRRRKPQEHFFDVPAEEDPEVHLGQLKRFSLRELQVATDGFSNKNILGRGGFGKVYKGRLADGTLVAVKRLKEERTPGGELQFQTEVEMISMAVHRNLLRLRGFCMTPTERLLVYPYMANGSVASRLRERPESEPPLDWQTRRRIALGSARGLSYLHDHCDPKIIHRDVKAANILLDEDFEAVVGDFGLAKLMDYKDTHVTTAVRGTIGHIAPEYLSTGKSSEKTDVFGYGIMLLELITGQRAFDLARLANDDDVMLLDWVKGLLKEKRLESLVDEDLQHNYIDVEVESLIQVALLCTQSSPMERPKMSEVVRMLEGDGLADSSIG

SEQ ID NO: 96841 - protein, 75 aa, Setaria italica
  Transcript Sequence Number=SeqID_30867
  Gene Ontology: Mol. function=ammonium transmembrane transporter activity; Cellular component=integral to membrane; Biological process=transport
  Homolog annotation: Hit_ID=Q6T8L6; Match level="QueryCoverage=84%, HitCoverage=13%, E-value=2e-23, Identity=85%"; Hit description =Ammonium transporter AMT2.1
AGALFVIGWNVVVTSVICVAINAVVPLRMPEEKLEVGDDAVHGEEAYALWGDGELYDITKHGADETEHGGRAAVA

SEQ ID NO: 96842 - protein, 72 aa, Setaria italica
  Transcript Sequence Number=SeqID_30868
  Subcellular localization annotation: CTP_CleavageSite=57; ConfidenceScore=5.68e-01
AVFWPPTVSDSSRAASSLVSTTFTRTAPFLRPPPPPRPWSLDLSTAPLGLLETALLLSSTPPPPIDPSAPAT

SEQ ID NO: 96843 - protein, 101 aa, Setaria italica
  Transcript Sequence Number=SeqID_30869
  Gene Ontology: Mol. function=protein serine/threonine kinase activity; Cellular component=integral to membrane; Biological process=protein amino acid phosphorylation
  Homolog annotation: Hit_ID=Q40099; Match level="QueryCoverage=92%, HitCoverage=20%, E-value=1e-19, Identity=49%"; Hit description =Secreted glycoprotein 2
  Pfam annotation: Domain name=S_locus_glycop; Domain location=1-76; Score=20.5; E_value=1.3e-06; Accession=PF00954.12; Description=S -locus glycoprotein family
YFIRDASLLSRLVVDGAATQLKRFSLNNGAWSSFWYYPTDQCDYYAKCGAFGYCDPDRTPVCGCLPGFVPRSPDQWGQRDWSGGCVRNTNLSCGGGGGNGS

SEQ ID NO: 96844 - protein, 92 aa, Setaria italica
  Transcript Sequence Number=SeqID_30870
  Gene Ontology: Mol. function=metal ion binding
  Homolog annotation: Hit_ID=B9T3C7; Match level="QueryCoverage=65%, HitCoverage=26%, E-value=7e-12, Identity=51%"; Hit description=RING finger protein, putative
  Pfam annotation: Domain name=zf-C3HC4; Domain location=36-73; Score =37.6; E_value=4.9e-08; Accession=PF00097.17; Description=Zinc finger, C3HC4 type (RING finger)
  Pfam annotation: Domain name=zf-MIZ; Domain location=32-76; Score= -3.8; E_value=0.0044; Accession=PF02891.12; Description=MIZ zinc finger
  Pfam module annotation: Pfam domain module=zf-C3HC4::zf-MIZ; Domain location=36-73::32-76
SKGTSARGLYIASTQNRGRRVQLQANRSPKEPTFTCPICWNKMEEPATTPCGHIFCNTCIKQAIKVQKRCPTCRKGLRATSVHRIYLPSTAS

SEQ ID NO: 96845 - protein, 70 aa, Setaria italica
  Transcript Sequence Number=SeqID_30871
  Gene Ontology: Mol. function=metal ion binding
  Homolog annotation: Hit_ID=B9T3C7; Match level="QueryCoverage=85%, HitCoverage=26%, E-value=3e-11, Identity=51%"; Hit description=RING finger protein, putative
  Pfam annotation: Domain name=zf-C3HC4; Domain location=14-51; Score =37.6; E_value=4.9e-08; Accession=PF00097.17; Description=Zinc finger, C3HC4 type (RING finger)
  Pfam annotation: Domain name=zf-MIZ; Domain location=10-54; Score= -3.8; E_value=0.0044; Accession=PF02891.12; Description=MIZ zinc finger
  Pfam module annotation: Pfam domain module=zf-C3HC4::zf-MIZ; Domain location=14-51::10-54
QANKEVPKEPTFTCPICWNKMEEPATTPCGHIFCNTCIKQAIKVQKRCPTCRKGLRATSVHRIYLPSTAS

SEQ ID NO: 96846 - protein, 194 aa, Setaria italica
  Transcript Sequence Number=SeqID_30872
  Gene Ontology: Mol. function=metal ion binding
  Homolog annotation: Hit_ID=Q8GS41; Match level="QueryCoverage=77%, HitCoverage=84%, E-value=1e-11, Identity=34%"; Hit description =Putative RING zinc finger
  Pfam annotation: Domain name=zf-C3HC4; Domain location=138-175; Score= 32.4; E_value=1.8e-06; Accession=PF00097.17; Description=Zinc finger, C3HC4 type (RING finger)
  Pfam annotation: Domain name=zf-MIZ; Domain location=134-178; Score= -7.2; E_value=0.013; Accession=PF02891.12; Description=MIZ zinc finger
  Pfam module annotation: Pfam domain module=zf-C3HC4::zf-MIZ; Domain location=138-175::134-178
  Subcellular localization annotation: CTP_CleavageSite=42; ConfidenceScore=5.46e-01
MSTVSSTRRAPRRLSQDGSADKVVVNLEASSPVVGSSLSFPVAGSRRGVSATVAGAQNSPIDVEAIEDEVQAISPSRVPPPRNMRTRRQPVTVVDLEVEGSQQGNKRQRVVHCLSQNRGEGSSFQANKEVPKEPTFTCPICWNKMWEPATTPCGHIFCNTCIKQAIKIQKKCPTCRKGLRATSVHRIYLPSTAS

SEQ ID NO: 96847 - protein, 125 aa, Setaria italica
  Transcript Sequence Number=SeqID_30873
  Gene Ontology: Mol. function=transporter activity; Cellular component= membrane; Biological process=transport
  Homolog annotation: Hit_ID=Q84MA8; Match level="QueryCoverage=100%, HitCoverage=23%, E-value=5e-41, Identity=63%"; Hit description =Adenine/guanine permease AZG2
LTDSGGPCTVRDCTAVGGAKSTAAPGPECTVGPNPGYEQCLARTKSDLIVATAVAAMAGSFAMGLFANLPLALAPGMGANAYFAYNMVGFHGSGPITYSTALAVVMLEGIVFFALSAVGLRSKLA

SEQ ID NO: 96848 - protein, 93 aa, Setaria italica
  Transcript Sequence Number=SeqID_30874
  Subcellular localization annotation: CTP_CleavageSite=69; ConfidenceScore=5.06e-01
LVLLVNDCVISMLAPCTSYYSYISFLPAASSISPSPYFISFLLSRARSPEPKMQVGSKPITSAPWCWARAYQLVSLKKAHGNHAQLTSPSITR

SEQ ID NO: 96849 - protein, 174 aa, Setaria italica
  Transcript Sequence Number=SeqID_30875
  Gene Ontology: Mol. function=catalytic activity; Cellular component =nucleus; Biological process=coenzyme M biosynthetic process
  Homolog annotation: Hit_ID=B6THJ5; Match level="QueryCoverage=100%, HitCoverage=58%, E-value=2e-78, Identity=83%"; Hit description =Phosphosulfolactate synthase-related protein
  Pfam annotation: Domain name=ComA; Domain location=1-160; Score=46.4; E_value=1.1e-13; Accession=PF02679.7; Description=(2R)-phospho-3 -sulfolactate synthase (ComA)
IELNAGSLKLPEEALLRLVRLIKSSGLRAKPLFSVNFDSSDIPASGDRAFGAYIAPVKEQSSERVEDVDLLIRRAERCLEAGADMIMIDADDICQRADSLRADIVAKIVGRLGLEKTMFEASNASTSEWFVKRYGPRVNLFVDHSDVMNLERLRGFNMRRSNPASRLTSPFFLM

SEQ ID NO: 96850 - protein, 82 aa, Setaria italica
  Transcript Sequence Number=SeqID_30876
  Gene Ontology: Mol. function=protein serine/threonine kinase activity; Biological process=protein amino acid phosphorylation
  Homolog annotation: Hit_ID=Q5VRE1; Match level="QueryCoverage=91%, HitCoverage=9%, E-value=3e-28, Identity=72%"; Hit description =Putative wall-associated kinase 4
ERYYKGTLRDGRVVAIKRCNKLVYDERQQREFGKEMLILSQVNHRNIVKLYGCCLEVEVPMLVYQFIPNGTLYQLIHGDATP

SEQ ID NO: 96851 - protein, 163 aa, Setaria italica
  misc_feature (146)..(146): Xaa can be any naturally occurring amino acid
  Transcript Sequence Number=SeqID_30877
  Gene Ontology: Mol. function=protein binding; Cellular component =nucleus; Biological process=response to DNA damage stimulus
  Homolog annotation: Hit_ID=B4G0P1; Match level="QueryCoverage=87%, HitCoverage=51%, E-value=2e-55, Identity=78%"; Hit description =Double strand break repair protein
WKLQPSPNAQQTISEILDFLMDANIRLSEEVVRKTQSFDKLKQEADKCLQQSERFNNEKAEFEQATFSKFVAVLNSKKTKLRQLRDKVAELESADKLPKEEEEENSTDRTEQFEGGSDKEASVNDEPSETGSGDHHSSPEKSAATXQGRGRGRKRAKKTRMNS

SEQ ID NO: 96852 - protein, 98 aa, Setaria italica
  Transcript Sequence Number=SeqID_30878
  Subcellular localization annotation: CTP_CleavageSite=60; ConfidenceScore=5.08e-01
TLPPASSPIQPCEPTRHRAAAAGLHWRPRQPPQQAGAMALPPCRAFGLPKFPTGTLLVPRAAPARPQSRPCARAPTVPFDRRARLPRGETSPSAWTPP

SEQ ID NO: 96853 - protein, 155 aa, Setaria italica
  Transcript Sequence Number=SeqID_30879
  Gene Ontology: Mol. function=phosphotransferase activity, alcohol group as acceptor
  Homolog annotation: Hit_ID=Q10D72; Match level="QueryCoverage=89%, HitCoverage=3%, E-value=6e-75, Identity=90%"; Hit description =Phosphatidylinositol 3-and 4-kinase family protein, expressed
  Pfam annotation: Domain name=WD40; Domain location=3-42; Score=16.2; E_value=0.13; Accession=PF00400.24; Description=WD domain, G-beta repeat
  Pfam annotation: Domain name=WD40; Domain location=50-88; Score=5.7; E_value=8.3; Accession=PF00400.24; Description=WD domain, G-beta repeat
  Pfam annotation: Domain name=WD40; Domain location=92-130; Score=1.6; E_value=26; Accession=PF00400.24; Description=WD domain, G-beta repeat
  Pfam module annotation: Pfam domain module=WD40::WD40::WD40; Domain location=3-42::50-88::92-130
SNMEPLYVLHGQLGGVTQVLFSKDGNYLYTGGRKDPYILCWDIRNTVDIVYKLYRAADSTNQRIYFDIEPCGRHLATGGQDGMVHVYDLQGGQWVTGFQAAADTVNGFSFHPYLPFAATSSGHRRFGMQDEFEELNLAGNENCCSVWMFPSLQEA

SEQ ID NO: 96854 - protein, 106 aa, Setaria italica
  misc_feature (33)..(33): Xaa can be any naturally occurring amino acid
  Transcript Sequence Number=SeqID_30880
  Gene Ontology: Mol. function=nucleoside-triphosphatase activity; Biological process=proteolysis
  Homolog annotation: Hit_ID=B9S0Q0; Match level="QueryCoverage=84%, HitCoverage=12%, E-value=4e-36, Identity=81%"; Hit description=Stage III sporulation protein AA, putative
VSQENLIMNPSLEMLVGGIQSVTLGDEEANRRXGVQKTVLERKGPSTFTCAAEIVSKTELRVHRSLEATVDALLAGKPPNVEIRKLGPKGLVQEVSVQKEQSHIGL

SEQ ID NO: 96855 - protein, 102 aa, Setaria italica
  Transcript Sequence Number=SeqID_30881
MTDSTAPPVSAAGGQLPSCTFPEAPVSSEGNQGLSYGGADVDVFSFHGGGSLPPLADLSDAANYPSADGCSATASSSFGGGATSPLPWPEFFPDDPFITDFL

SEQ ID NO: 96856 - protein, 75 aa, Setaria italica
  Transcript Sequence Number=SeqID_30882
GQCTFIMSLVYMTITSALVNPSLHIIAWINDISMLPRATIVSYSQTSQVKVNTSFKLHNLACTSTYITSRLKKVI

SEQ ID NO: 96857 - protein, 98 aa, Setaria italica
  Transcript Sequence Number=SeqID_30883
  Subcellular localization annotation: CTP_CleavageSite=51; ConfidenceScore=5.32e-01
LLLHCSPRVHLHRLSPTRRLPLASSFPLPRRRLRRSTAIHAEPDAPPPPPSSAAEPEPPDSGAVDAEGEGPVELRAPTLFSTDDNPTPLQTATSLLLT

SEQ ID NO: 96858 - protein, 124 aa, Setaria italica
  Transcript Sequence Number=SeqID_30884
  Subcellular localization annotation: CTP_CleavageSite=85; ConfidenceScore=5.70e-01
ARARPGAPPARARCPGSRPSPRPPSPSTTRPRPEASPWYSRSPSRAAESKLGGRPPAEVRRRGRAGSARGGRRGQGRRRRYLYTRAPGRWRLRVRRPERAGHRLQPAAAAYRYTRELGARAGSG

SEQ ID NO: 96859 - protein, 226 aa, Setaria italica
  Transcript Sequence Number=SeqID_30885
  Gene Ontology: Mol. function=bis(5'-nucleosyl)-tetraphosphatase (asymmetrical) activity
  Homolog annotation: Hit_ID=O24005; Match level="QueryCoverage=75%, HitCoverage=78%, E-value=4e-86, Identity=87%"; Hit description =Diadenosine 5',5'''-P1,P4-tetraphosphate hydrolase
  Pfam annotation: Domain name=NUDIX; Domain location=65-213; Score =102.9; E_value=1.1e-27; Accession=PF00293.20; Description=NUDIX domain
  Subcellular localization annotation: CTP_CleavageSite=55; ConfidenceScore=5.78e-01
MVAAASARCCLLANPIVHHSRPAASALRLPRRTRPPLSSSSSRSCSTSASPLVTVASMDAPPEGYRTNVGICLANPSLTKIFSASRIDIPSAWQMPQGGIDAGEEPRAAAVRELREETGVTSAEIVAEAPNWLTYDFPPDVRAKLNARWGTNWKGQAQKWFLFRFTGNDDEINLNGDGSEKPEFGEWTWMTPQEVIEKAVDFKKPVYEEALKHFAPHLQSEPTVSS

SEQ ID NO: 96860 - protein, 68 aa, Setaria italica
  Transcript Sequence Number=SeqID_30886
  Homolog annotation: Hit_ID=B6U2D4; Match level="QueryCoverage=77%, HitCoverage=15%, E-value=3e-11, Identity=72%"; Hit description=NAC domain transcription factor
LLAVDPGRRGKRKAMLSPDDECAAMIHPPATAKRLNGSCFDAPQPAGGLPATTTSVLGGLNHHMLPQF

SEQ ID NO: 96861 - protein, 66 aa, Setaria italica
  Transcript Sequence Number=SeqID_30887
  Gene Ontology: Mol. function=DNA binding; Biological process =regulation of transcription
  Homolog annotation: Hit_ID=Q6NQK2; Match level="QueryCoverage=100%, HitCoverage=14%, E-value=6e-20, Identity=66%"; Hit description=NAC domain-containing protein 8
MTGTTWIIDGQRFATKIKNASGPSDPSKQKWMSNPSKECPKCSHVIDNSDVVHQWPGLPKGVKFDP

SEQ ID NO: 96862 - protein, 194 aa, Setaria italica
  misc_feature (167)..(167): Xaa can be any naturally occurring amino acid
  Transcript Sequence Number=SeqID_30888
  Gene Ontology: Mol. function=DNA binding; Cellular component=nucleus; Biological process=transcription from RNA polymerase II promoter
  Homolog annotation: Hit_ID=Q2L3A9; Match level="QueryCoverage=92%, HitCoverage=30%, E-value=4e-84, Identity=84%"; Hit description =Jumonji family protein (Fragment)
  Pfam annotation: Domain name=JmjC; Domain location=87-194; Score =143.3; E_value=7.7e-40; Accession=PF02373.14; Description=JmjC domain
KTKVNERKLEGKNNWRIVVGSTDEVEVDYGADLDTATFGSGFAKLSSDANKQDPYSASCWNLNNLPRLPGSVISFENEDISGVVVPWLYVGMCFSSFCWHVEDHFLYSLNYMHFGEPKVWYGVPGGEAVKLEESMRNNLPKLFEEQPDLLHELVTQLSPSVLKSEGXSVYRAVQKPGEFVLTLPTKQYHSGFNS

SEQ ID NO: 96863 - protein, 309 aa, Setaria italica
  Transcript Sequence Number=SeqID_30889
  Gene Ontology: Mol. function=DNA binding; Cellular component=nucleus; Biological process=regulation of transcription, DNA-dependent
  Homolog annotation: Hit_ID=Q2L3A9; Match level="QueryCoverage=90%, HitCoverage=48%, E-value=1e-135, Identity=79%"; Hit description =Jumonji family protein (Fragment)
  Pfam annotation: Domain name=JmjC; Domain location=1-113; Score =191.2; E_value=2.9e-54; Accession=PF02373.14; Description=JmjC domain
  Pfam annotation: Domain name=zf-C5HC2; Domain location=218-271; Score= 82.0; E_value=2.1e-21; Accession=PF02928.8; Description=C5HC2 zinc finger
  Pfam module annotation: Pfam domain module=JmjC::zf-C5HC2; Domain location=1-113::218-271
GMCFSSFCWHVEDHFLYSLNYMHFGEPKVWYGVPGGEAVKLEESMRNNLPKLFEEQPDLLHELVTQLSPSVLKSEGVSVYRAVQKPGEFVLTLPRAYHSGFNSGFNCAEAVNIAPVDWLPHGQYAVELYREQHRKTSISHDKLLLKTAKEAVKQLWMNLFNCNIDEGKYRWLNTCGKDGVLTSAVKTRVTMEGAAREVNGNLKSKKMDKDYDSTDRECFSCFYDLHMSAISCQCSPNRFACLNHTNILCSCEMERKIAFFRYSMDELNTLVAALEGDQTAVCLWGQDHLGLVCPSGNVQKRKMDSGKST

SEQ ID NO: 96864 - protein, 104 aa, Setaria italica
  Transcript Sequence Number=SeqID_30890
RHQRRHVHLQGGRHHQLQAAQLEMQVWRHHPGSMKMMKNNTSQSMMHTTRRCCAEKCKKPLLSSLMFILLFSSGFLWFIPQQQWLLKFVPVRLMMWGRFRFIWS

SEQ ID NO: 96865 - protein, 200 aa, Setaria italica
  misc_feature (163)..(163): Xaa can be any naturally occurring amino acid
  misc_feature (180)..(180): Xaa can be any naturally occurring amino acid
  Transcript Sequence Number=SeqID_30891
  Subcellular localization annotation: CTP_CleavageSite=27; ConfidenceScore=5.50e-01
MHHSIGMQPHQQPQSHDTHTRTHGAVRAKLNSRLFNLFPCCMQSILLALLQERRRSASRRSGASSSPRRGRPPPPRRPPRPPWPPFCRGARGTRTRRCPAPPPPPRPPRSCAGARSPGPSSPGASRTRRRRRRRGRPSRRGAPCACAPSPPSCTSPSRPWRSXRTHRRRTFCCTRRRRTXCCTRRRRRTCCTRRRRCCSR

SEQ ID NO: 96866 - protein, 65 aa, Setaria italica
  Transcript Sequence Number=SeqID_30892
MEKTKLQLPLPLVHGERLWARPWRWAKTAFFIVAMLASLLLVCAPPLLVVLLDLLLPPALLSNFL
